United States Patent Application Publication US 2005/0228172 A9 - sequence listing, part 172

SEQ ID NO: 768552 - DNA, 628 bp, Homo sapiens
cccatctaaccataaagtgggtcatgcacagcagcattccatcatcaaatggaagtggctatatatatgatcaggttcgagtaggtcctgaagacacaagtaagttacatgaggaagtggctcaaatgcccatggtctccactcctgtcaccctgccttctctccctcatcctgcactgagggtctcatgaggagttccctataatcagttgacaggggaagaaaagactagggcctggttcacagatggttctgcacgatatgcaggcaccacccaaaagtggatagctgcagcaccacagccccaaggtaggacatccctgaaggatgcggtgaarggaaatcttcccagtgggcagaacttcaagcagtgcacctggttgtgcactttgcatggaagtagaaatgaccagatgtgcgattacatgttgatttatgggctgtagccaatggtttggcttaatggtcaggttcttggaagaaacatgattagaaatttggtgacaaagaaatttggagaagaggtaggtggatgagcctctctgagtggtcaaaaactgtgaagatatttgtatcccatgtgagtactcaccaatgagtgacctcaggggaggagggtttgaataat

SEQ ID NO: 768553 - DNA, 567 bp, Homo sapiens
tgccagggttacttatttaaaccatctctgtttcactcacaaaagcatatatgatcaccctatttatattgaagatgtagctaataaaattaagacttatttttaaaatggtataatgattcatggcatatataagcagtcaaagacaaaaccgactatgaaccaggtccattccaattaagttaagccccagagtagaagaatgacagtgatgtcaaaacattttatttgtttctgtatctttcccttataaataagtctcatttctttctaccaaagccagatgtcagtgagtgcttaaatgatttgaacaataaagtasgatttaaaaattaaaatgttttcattctccgaaaatagcctaaaagtaattgagtaattgtagcacattttaaataaactttagagatgtaaaaattaaatataaagatgcaccacttaatgcttaatttgataaattttgataaaaatatacactagcataactagcaccacaaccaaaatatagaaaattgccattaaccactcctaaaatattcttagcaatcattccttaccttgaccttg

SEQ ID NO: 768554 - DNA, 632 bp, Homo sapiens
acactgtcattgcagtattgaagtcctccaatattattgtgtggctacgtaagtctataagaacttgttttatgaatctcagtgttccaatgttgggtgcatatatatttatgatagtttaagtcatcttgctgcattgaaccttttatcattgtgccgcacccttcttagtgtttctttactgttgttggtttaaagtattggccaggtgcaatggctcatgcctgtaatcccagcactttgagaggctgaggcaggtgaatcacttgaggttaggagttcaagaccagcctgcccaacatggtgaacccacatctctgctaaaaatacaaaaattacctgttcatggtggcacatgcctgtaatctcagctactcaggaggctgtggcatgagaatcgcttaaacccaggaggcggatgttgcartgagccaagatagcaccaccgcactatagcctgcataacagagtgagactccatctcaaaaaaaaaaaaaaagtaagttttatctttatctaatataagaatagtgacctctgctgtcttttgttttccatttagatgataggtcttttctccaaacctttactttgaggacaagggtgtcattacgtttgagatgagtccctta

SEQ ID NO: 768555 - DNA, 576 bp, Homo sapiens
tgctctcatttctcaagttataattaaatcctgttattagaaagaatgcacagatctggccgggcgcggtggctcaaccctgtaatcccagcactttgggaggccgaggcgggtggattacctgaggtcaggagttcaagactggcccggccaacatggtgaaaccccgtctctactaaaaatacaaaaattagccaggcatggtggcacacacctggaatcccagctacttgggaggctgaggcaggagaattgcttgagcctggcagggtgaargttgcagtgagccaagatcatgccactgcactccagcctggctgacagagcaagactctgtctcaaaaaaaaaaaaaaaatacacagatccttcttttaaaattatatctatacgcattcctccacgtgaaaatttattttgcagtgaaaaatgaaatatcagtatgtgcttttttaaaaaagtggaaatgtgtttaaaaacaggcaaaggacatgaacagacacttcttgaaagaagacatagatgtctccaacaaatacatgaaaaaatgctcaccatcactaatcattacagaaatg

SEQ ID NO: 768556 - DNA, 576 bp, Homo sapiens
tgctctcatttctcaagttataattaaatcctgttattagaaagaatgcacagatctggccgggcgcggtggctcaaccctgtaatcccagcactttgggaggccgaggcgggtggattacctgaggtcaggagttcaagactggcccggccaacatggtgaaaccccgtctctactaaaaatacaaaaattagccaggcatggtggcacacacctggaatcccagctacttgggaggctgaggcaggagaattgcttgagcctggcagggtgaaggttgcagtgagccaagatcatgycactgcactccagcctggctgacagagcaagactctgtctcaaaaaaaaaaaaaaaatacacagatccttcttttaaaattatatctatacgcattcctccacgtgaaaatttattttgcagtgaaaaatgaaatatcagtatgtgcttttttaaaaaagtggaaatgtgtttaaaaacaggcaaaggacatgaacagacacttcttgaaagaagacatagatgtctccaacaaatacatgaaaaaatgctcaccatcactaatcattacagaaatg

SEQ ID NO: 768557 - DNA, 642 bp, Homo sapiens
tacataccttaagctaacaatatcatgtgattcaaaacaatattctctagatgaaggtgcccactgggaatttttcaccacatctgatccctcagaagtaagattaatatatatacatgggccaggttcagtggctcatgtctctaatagcagctctttgggaggccaaggcgggcagatcacctgaggtcaggagtttgagaccagcctggccaatagggtgaaaccccrtctctactaaaaatacaaaaattagccaagcatggtggtgcatgcctgtagtcccagctaggcaagaggatgaggcacaaaaatcgcttgaacccaggaggcggaggttgcagtgagctgagattcactgcactccagcctgggcaacagagcgagactccatctcaaaaaaaaaaaaaaaaatatatatatatatatgtgtgtgtgtgtgtgtgtgtgtgtgtgtgtgtgtgtgtatgtgtgtgtgtatatgtgtgtgtaagtccatatatagttcatatatatatgatttgatacactttgattctctgctataaaatgtatccccattttttcccattatctccaatttcatatgtgaaatgtttttaaaatataattttaaagaactaaaaatataccttgaatagt

SEQ ID NO: 768558 - DNA, 543 bp, Homo sapiens
aaacatgaataaacaaataggggatttcagtacacatgttaactattaaagagtcaggtagaaatgctagaaatgaaaaacagtaatatagttgaagaatgtccttgactctctcataagtagacttgaaacagctgagaaaggaatcaatgaaagtgaagatagaaaaaaaattgatcaaaactgaaacacaaagagaaaaaaaagaatgaaacacacacagacacactccaaaacagaacatttaagaactgagggataatatcaaaaggcctaacacatatgaaattggatttccaaaagaagaagaaagcaaatagagtagaaaaaatatttgaaaagataaaggccaaaaatttctcccaaataatgaaatatgtcaaacmacatgtccaggaagctaagagaaccccaaagatctctaaccattatctcagataaatatcctttcaacacacacacacacacacacacacacacacctgcagacatttcatatttaaactgctgaaaaacaaagacaaagagaaaaatcttaaagga

SEQ ID NO: 768559 - DNA, 696 bp, Homo sapiens
aactccattccctatcaacctgttgtgtagtgaggtactggctggtcagtagctcagattatgtcttcctataatgtcactctataataaagcttcattatgggaaacccataaaagagctctggcattgacatccacacccccagctaaacattgttttgagattctaaatactaccaatttcctatttttaagtgacttttttgtcatctttgtctttgcagagtgatgtgtggtctgtgggaattactgccattgaaatggctgaaggagcccctcgtgagtaaaaaatgtttgatatttgttaaagattagggaaatgtactgtacaaatcatacaaatctctctctgtcgaagaagatgagattgccacttgtaccactcagctttcactggccacacaggtgtcatactatgtgccaaactacgaatggtggccttttcagtgattaccaaatgctttcttcagaatagctagatgtgggtatataaatcagcttgtacttttctttcttatartatcttattttacattgactgagtgttgtttccatttagtctcagtagtatttggtcctgacagtcctgagcaaccagaataaggattctggttggcattccagtctatatttcctggtggaatatttagattccagaacatttacagtcacacagtgctactgcctcaggctgtg

SEQ ID NO: 768560 - DNA, 578 bp, Homo sapiens
aatactcaagaaagggtgcatataataagccagcttccaccaatgggggaattttactttctgccaacattggtagacagggccagggaatgttgccttgcctcactaagacttgtatcaccaggtttctactcaaagaagttttagctgcccaaaacataggtcattctgacatgcaataaggcagtcatactagattctttaaaaaggaaatttaagagtgttacttttttaatctagcatatgcatgctgataaactcattctatactttctagaaactagagtagccttagtaaactattttttctttatgaagtggcttatcaaggctctctctacactcygagagacaagtaggtgagggtaagtatctgcctatttttttccactttcatttcatataattggtatcatatgacccagtcggggacttttggcttatgaagctgatcttaggaagtttattgtcactactggaggcaaaaattactcaaaataggtaacggccaaaaataaaaaatataattcctaatataaattggctgtatttaatttcaaaactggggagaagaaaat

SEQ ID NO: 768561 - DNA, 382 bp, Homo sapiens
cgccactgcactctatcctgggtgacagaccaagactccgtctcaaaaaaaaagaaaaaaagtaatgcataaagagtctacacattcctaaagctcagtcatggatactcttttcaagaacctgattgctatgggcagaatgttaaatgtaatgtgttctgtgggctacagttgacaaagcaacctatcagttactctatcctgcttgctacacagttgttgatcacggtgggtaragagaatagagggtgaaggaaagtcactgatttcattgatggggtaaaatacattgagcttgataatcaaaattgaggctaaccttggcaccattactctaacggccacactggatcttcccatgtgtaaggttactctatctgtc

SEQ ID NO: 768562 - DNA, 571 bp, Homo sapiens
tctggcaaacaacaacttaaatctcctagaaagaatatggatacagttaaaagtgggggaagtggatctttgtggtactttctctgtctgaccagaaaggaatggccagcaggtggagagatcaaggagaaggatgtgatcccatacaccagcacaccgcttggccctttgctcacggctttgcacgtgggctctgtgaatcccctcagatgtctgctgacccgggcagccagaaccacggccctgtattccacagaagtgccagagctgtgctcagacccaggtccctctraggccacagcccattgtatttagtttgcaagggttgccaaaatgaaatatcacaaaggggctgggtgtggtggctcaccactataatcctagtagtttgggaggcagaggtgggaggatcgcttgaggccagtagtttgagaccagcctggacaatatagctagatcccatctctacaacaaattttacgaagagttgggcatggtagcgcctactgtagttccagctactcggaagactgagagatgggaggatcccttgaatccacgagggtgcagt

SEQ ID NO: 768563 - DNA, 549 bp, Homo sapiens
aggaaaccattgtattaaaaagacaactgcactcctatgactatcactgtactattcacaatagcaaagtatggaatcaacctaagtgttcatcaacggatgactggataaaggaaatgtggtgtatctatacgatggaatactacagagccatcaaaaagaaaggaaacatgtcttttgcaacaacatggatggaactggaggccattaccttacgcgataactcagaaataaaatcaaatgcacatgttctcacttttaagtgggagctaaaatgagtacacataaacataaagagggaaataacagacactggggactctaaaagcagcgagggtaggaggggttygagggctgaaaaattacccatctgatacaatgttcactatttgggtggtaagtacactagaagccaacttcaccattacgcaatttatctatgcaacaaatctgcgcaagtactccttgcatctatataatgtgtgtgtgtgtgtgtcacagttcaagtccaggcgcggccccccttttgacagcgaccgtaaatccctt

SEQ ID NO: 768564 - DNA, 577 bp, Homo sapiens
gcacagtggctcactcctgtaatcccaacactttgggaggctgaggcaggcagatcacttgaggccaggagttcaagaccagcctggccaacatggcaaaaccccgtctctgctaaaaatacaaaaattagctgggcatagtggcggacgcctggaatcccagctactcgggaggctgagacaggagatcgcatcactgcactccagcctgggtgacagagggagacactgtctcaaaaaaaaaaaaaaaagttsggggggagagactattttcaccaaaggcttcaggttggctgctctaaggaaaaggcaagatggcaggtgggtggggcgtaggaagtaccaaatgggatggagtgaatcaggatttcagtagggagctggggcctgatggggctgggagagcaagttgaacaggatctggctggatgcgaggcaggctggagcagacctggaatggggggctctgctagtcgggcagggctgctgccatcacacagtgccacagactgggtggctcaaacaacagaaattcatttcctcacagttctggaggctggaagtcactgatgatgac

SEQ ID NO: 768565 - DNA, 648 bp, Homo sapiens
gactattttcaccaaaggcttcaggttggctgctctaaggaaaaggcaagatggcaggtgggtggggcgtaggaagtaccaaatgggatggagtgaatcaggatttcagtagggagctggggcctgatggggctgggagagcaagttgaacaggatctggctggatgcgaggcaggctggagcagacctggaatggggggctctgctagtcgggcagggctgctgccatcacacagtgccacagactgggtggctcaaacaacagaaattcatttcctcacagttctggaggctggaagtcactgatgatgacgtcagcagggctggrttcttctgaggccattctcgtggcttgcgggtggcagtgtccctgtatgtccgcgtgatggtcactcctctgtctgtgcatgtgtctgtgtcctaattgtctgttctcataaggactctgtgcatattggattagcgcccatcctaatgacctcatttaaccttaatcacatctttaaagaccctaactccatatacagtcacattctgaggtactggggttagaccataagcacaggaattttgggggcacattcagtccataatagagagtgaatgagcagggtttggtggcatttggaggctaccttgctttcagtg

SEQ ID NO: 768566 - DNA, 582 bp, Homo sapiens
agaaacagaaaacaaaataggagacgtacaccaacatatcaataatatccttagctgctacagcccctgccttgatgcatggcactccagcctgcatgaatgctccccacagccgccactacccattggaatggccaacaagggtacctgcgtgtggcctgagccgggaggtgcagcaaaaaattgagaatccatatgacgcagacctggagcagatcaatggatcaccacccagtgccaaaaggatgtgggctggccccagcttggacatgagaacttccagaatttcctcaaggagggcacagagctatgtgagctcattaacgcactrtgccccgaggggcaggccccagtaaagaagacccaggtctccaccatggccttaaagcagatggagcagatatctcaatgcctgcaagcagctgagtgcgctatggcattaacaccacagacatcctccaaactgtgcatccctggggaggaaagaacgtggcctgtgtgcagtggatcctgatgaacctgggtgggctggcagtagcccaggacgatgggctcttctctggggctcccatatggttccct

SEQ ID NO: 768567 - DNA, 628 bp, Homo sapiens
ttactagctgctaatctgtctgcagctccttcaagcactccagttcctggcattaatgtcaggtgtgcctgggatgctttaaatatttgttcttttaattttgtgatatccaaagacaagtttgtacagtgtccttctagatgcttttttattctttyccaaattttgatcttattaagagctattaattgtttccacaaatccttatgtttagctcctacagtgggacgtatcatttgaggttgaggtgccactataccaccatggttccagataataggaactcttgccatacttcttaccgtttctaccatctgactgttttgttcagaccagctgaatatagtgtggccatggcatgcagactgagaggtgcaattcaagctaaacatccccttggggacgaattaataatgattccataggaatcgttgcacagcacctctgcctgttctgcaatgcaatcttcccaaacaagtacgtccattaattctggccaggtccaattctgtttacaaataggtttttgagggtggtatgcctcagttataggagcagatttattatggtaaatactgaggtcagaaagcatgtgtaactgtgtcatagactgattacatccaggcat

SEQ ID NO: 768568 - DNA, 628 bp, Homo sapiens
ttactagctgctaatctgtctgcagctccttcaagcactccagttcctggcattaatgtcaggtgtgcctgggatgctttaaatatttgttcttttaattttgtgatatccaaagacaagtttgtacagtgtccttctagatgcttttttattctttcccaaattttgatcttattaagagctattaattgtttccacaaatccttatgtttagctcctacagtgggacrtatcatttgaggttgaggtgccactataccaccatggttccagataataggaactcttgccatacttcttaccgtttctaccatctgactgttttgttcagaccagctgaatatagtgtggccatggcatgcagactgagaggtgcaattcaagctaaacatccccttggggacgaattaataatgattccataggaatcgttgcacagcacctctgcctgttctgcaatgcaatcttcccaaacaagtacgtccattaattctggccaggtccaattctgtttacaaataggtttttgagggtggtatgcctcagttataggagcagatttattatggtaaatactgaggtcagaaagcatgtgtaactgtgtcatagactgattacatccaggcat

SEQ ID NO: 768569 - DNA, 580 bp, Homo sapiens
ggctgtgtggttctggtcttgtctgggctcactgaagaagctgcattcagctggtggattggctggagctagaaggtcccagagggcctcacttggtggggacagctggaagacggaggcccctctctttatgtagggtagcccaaatgtctttacatggcatctgagttccaagagtgtaagcctcaatgtgcacattttttttttttttttttyttgagacagagtctgactctgtcacccaggctggagtgcagtggtgcgatctcggctcactgcaacctccgtctcctgggttcaagcgattctcctgcctcagcctcccaagtagctgggactgcagatgcctggccaccacgcccagctaatttttgcatttttagtagagacggggtttcgccatgttggccaggctgaatgtgcaaatatttattgagcttctgcctgggtcacagttatgtctcattagccaacaagtcatataaccaagtccagagtcagtatgggaggaggctacccaagggcatgaataccaggaatatcagtagggagccatcagtacaacagtctataattttgt

SEQ ID NO: 768570 - DNA, 580 bp, Homo sapiens
ggctgtgtggttctggtcttgtctgggctcactgaagaagctgcattcagctggtggattggctggagctagaaggtcccagagggcctcacttggtggggacagctggaagacggaggcccctctctttatgtagggtagcccaaatgtctttacatggcatctgagttccaagagtgtaagcctcaatgtgcacatttttttttttttttttttttgagacagagtctgactctgtcacccaggctggagtgcagtggtgcgatctcggctcactgcaacctccgtctcctgggttcaagcgattctcctgcctcagcctcccaagtagctgggactgcagatgcctggccaccacgcccagctaatttttgcatttttagtagagacggggtttcgccatgttggccaggctgaatgtgcaaatatttattkagcttctgcctgggtcacagttatgtctcattagccaacaagtcatataaccaagtccagagtcagtatgggaggaggctacccaagggcatgaataccaggaatatcagtagggagccatcagtacaacagtctataattttgt

SEQ ID NO: 768571 - DNA, 599 bp, Homo sapiens
ttgccatggtggctaaaccttgaggttgcaaccttaggctagggggaggacatgctgaataaaaggaaaggcctgcccctctgggtcaagtaagagtgggaagaagaatggggataagcagaggagaaaagcagacttaagcatctttgttcctcttggccccttgggtctttgccctttgtacccagataaacgtggggaagaagaacattgggctattgggctgggagatgtgctttattgagtgattgtgtgtgtgtgtgtgtgtgtgtgtgcgtgtgcatgcatgcgtgcacttgtgagagagagaagagtgaagaratccaagtctccagatctccatcatggctggggaggcatggcgaagaagaggccaggcaacagaaggatagattgaaaagccagtaggccatgcttctggctaccatagtctagtggtgacttgcaaggaattcagaagggcccatctacctgatgaggggatgaggaagggctgaggcagcctgtggacttgcaggaggcctgtggtcagagtgaagaggctgcatgtgcagggccttagagatggaggcaagtggcagggaacatgcactgccatg

SEQ ID NO: 768572 - DNA, 641 bp, Homo sapiens
ggatggaggggtgggagtggggaaggagtttttgtgctgtgcagaaacaatggccagttcatcttacggtgtccccaaggcttgtgtttttaagacagaagggggcctttgtgttaattacactgataaaaactcccctggcagggcttcccctggaccggtggcataaaagatgtgacatttcgcccgtgtgaatgccacactgccaaacagacattttcttaagcagagaaggccagcccccaccccctcttcctcaccagttgatcagctaacctctcctggtgtgtagagaaaataaataaaaactgtaagactaaaccatctgctgctgggggtgtctggcttctttcttagttgggttggagcttccaggaatccatccattttggtttctgaacggtccaagttgtcytcaggtaggatggacatagaggcagacggcttgtagtggaggaggagatgttgccctgagagtttgggtttcagtgggttttcctgggaagcaggaatttcagcttgttactggaagttacatttctgagcaaaagacgtatgctaggtgaagactgaaggctgaagatgaggaaccagcagggctcactgcttgtaaattagaaaataattttctaaatactatg

SEQ ID NO: 768573 - DNA, 629 bp, Homo sapiens
gcaggggttggaggtgtctacggatccctcaacaccacaagaaataatcagatgttgatacagttttctggtaaggactttgatcagaatgtcagagaagcttacgactgaaacacggtttttaaaatacatcttttaaaaaaaacttaaaaaaatctttagaaatctacaataaaatacagataacagaaaaccgtcactaaacgaaagtctggcttagtgaattattattgaggcaggagaatagggtctggagggagggaacctaaggtcaattcacactgacttcctataactcagtcaaaaggaaaaccccaactttccatgcccaagtaacaaaagaccagaggctactccctttgcaagccccctgcttttttctggatggcagacgaaaaattaaaagtacctttgattggtccccttctgcaaccaaacgggctggtcacaggccaagtcttcakttgcataggagtataacgttgtaacttcacttcagcctctgataggtcaccttccgcaaccaatcagacatttgcatagggtgtaactttgtaacttcacttcagcctctgattggtcccttcccacagccaatcagactgataacagtccactaccttatttac

SEQ ID NO: 768574 - DNA, 536 bp, Homo sapiens
ttttatatatgaaaaatcaattttttagtttaaaaatatcatttagagctgtattaggctgcaagtaacagaaaactaggtgcattatttttccattgctgtgtaacaaatgatcacacacttggtggcttaaatcaaacaaatttatcatcttacagttctggaggtcagggggccaaaaggcatctcattgggccaaaatggaagtgccttcaaggctgtgcttccttctgggggctccaagggagcatctgtttccctgccttgtccagtctctagaggctgcctgtattccctggctcacaatccctttctctgttttcaaagccagcaatgacaggctgagtygtttgcatatgtgcactcccacctttgcttttgttatcacacctccttctctgaatcagatctctctcttgcctccctcttccactttctttttaaagccagtgtctcactttgttgcccaggctggagtgcggtggcacaatcatagcttactgcagcctcaaccttctgggctcaagcaatcctta

SEQ ID NO: 768575 - DNA, 560 bp, Homo sapiens
aatagtataatgataaaagacacatgtatgtatagtaaataggggctactagagcttcaagtctgatagagcaaaatcccagcttgctcactttgagaaacccatggggagagtttaggaaaggttttttaagtagaaaaaggaataaaaagggggtagattttgatttgggatgagttgcactgagccatgtgttagggaacttyttgggtattgcagacctattggatctcttgcaaattttgctcatggtcagtacagataaaaaaaaaaaaaaaaaaatgtcttgtgatctacattgccttttatgttgtctggtaacattgtggcatggagaaaatcccacatggagcaaccgtttaaatttgaaagcctatggagaggatgactaagaagggcagtttctttcattacaactcaggtttaagaacacttgggtttgtaagatctagtatttgacagcacaccagggtgattacagtcagcaataatttgctgtatatttcaaaataacaaacgtaattggaatatttataacagaaggaaatgataaatgtttg

SEQ ID NO: 768576 - DNA, 595 bp, Homo sapiens
tttcgagggggggcattcttggagattaattaccactggcacattacatttgagatgtctattaggcatttcaagaatgatgtcggccgggcgcggtggctcacgcctgtaatcccagcactttgggaggccgaggcgggcggatcacgaggtcaggagatcgagaccatcccagctaaaacggtgaaaccccgtctctactaaaaatacaaaaaattagccgggcgtagtggcgggcgcctgtagtcccagctacttgggaggctgaggcgggagaatggcgtgaacccgggaggcggagcttgcagtgagccgagatcccgccactgcactccagcctgggcgacagagcgagactccgtctcaaaaaaaaaaaaaaaaaaaaaaaaaagaatgatgtcaagtaggcagtgaaatgtatgagttaraatattcatagtattttctgtcttaaagctataaattctaaaaattttgttattttattcaaagaacatcaccaaaaatagatttacaggagaatcagagggtaaaattgttttctacaagtttttaataaatcttggtatacttgagacatttcttgatagatcag

SEQ ID NO: 768577 - DNA, 562 bp, Homo sapiens
aaggaatgtaatagttatgaattcctctccctattttgtcaggaatatgttagtatattttaaacaaacatatttttttcttttatttcttctctcctcctcttatgatctcatggaagatgtattataataatgcagtgttacagttatatcaaagaagaggaaacatcacccaagggctttgcattctcttctgtggaaagcatttktgtattttcagtagtatgaagaaagatcaaagtaagactttgtaattttctttatttgactaatatatgtggtttaagaaaatgtacaggggtgccaagtcaacaaacggtaaactgtgatgggtagtttcacgtgttaacctgtatatattacaattcccagtaattcaaaaaaaaaaaatccaagataatattgtttgaaaggcattttgtagatgtgattaagtttacaatcagttgccttcaagtaaggaagattatcctgattcaattaattgaataaggtccaccatgatcacagcagtgctgaagcttgtttgaagaagaaatcctatctatggacagaaaattca

SEQ ID NO: 768578 - DNA, 693 bp, Homo sapiens
taatgcaattttactttccagaattaattagtagaaatttagtcctgaaaaatcatcttgctatagtgttcctttcacttacattatactcgaggcatacaaatagttaatgctctgctgtgtctgttgccattgtttaaggctgaaacgccagctaggaacctyatggaggtcgaggcttctcaatgacgcaagctgcgctgttctctaattcttaactcagcaggaactgaactttttgccttatcaagtaacacatttctgagcacctaagtggtcatcctcacagaaggatactatcaggcttacaatctgcaccaaccagatgctcctggttgattcttgagttcaggttcactgtaaacttcaaaaataaaactaactccactgccgtttccaaaatgaataattgaaaatgaaggatgaaggtgctgatcaccagatgaagccagatgaacaaaataggaataaaaatttactattctagaatttctgtttttcaagtaataaaaatacacacatatttgttttttaaataagcatatacactgatttttaataaaaactctatgtatttgtgtttgcctgtcaggaggaggatattcaagtaaccctcagctaactaggaaattctgaaacctggaaaatcccacgtctggccaattgctatagattcgtaaccccttttatcaa

SEQ ID NO: 768579 - DNA, 645 bp, Homo sapiens
gaataattgaaaatgaaggatgaaggtgctgatcaccagatgaagccagatgaacaaaataggaataaaaatttactattctagaatttctgtttttcaagtaataaaaatacacacatatttgttttttaaataagcatatasactgatttttaataaaaactctatgtatttgtgtttgcctgtcaggaggaggatattcaagtaaccctcagctaactaggaaattctgaaacctggaaaatcccacgtctggccaattgctatagattcgtaaccccttttatcaacaggattgagaagcaaataaataggaaaaaaaaagtggagaaataattcagattactttcgtcacctacaacgttctaatcaaataccaaatagccaacatgtcaagaaaaaaatctgcatatctagattcattaaaagaaataatcttcatcaatacagttttgcataaattaattgctttattttcctgctacttctagaccacagtctggaagcaggatagcaaagtgagtagaaatatagactcttggaatagatcctgttttagatggaatctcagcaacatcaattatctgtgtgacttcctgtgagttgctagaagtacctgtttacctaattgtggataataatcgt

SEQ ID NO: 768580 - DNA, 634 bp, Homo sapiens
cgatggaacaggcgggtaccccgatcactgcctctgctgaaaacaaatagaaagccaactttcagaagtaaatgcatctagtagggaaaaaaataaaatagcaatgaagcagtgagtaatacagataacaaacttgatttaagaaatgtttgaagaagctcacatcccttacagaatmctcttatttattgtttttcttgaaaagtgttttgtttaaatcaattatataactgaccacaaagtgaaccttaacaaattaaaataagttataggtctcatgccctgtaatattccaattaaagtagaaacatgtaataaaaatagaactacaagcaaatgtctatccataaaaagtccactataattttacattaaagagaaactcaaaccttaatgcctatactatcccatctggaaaccattagaacagtactttctatgagaaacaatgtgagacagcaaaacctgtgtttcaaggaaaatgtctatctttaagtcctctaacgtagaacaaaatgatcaaaaaataaagaaatttaataataagattaaaaagttagaaaaaacaaaaataaattaggatcctattaataaaattcaagtgttataaacaatttaaagcaagagtgagttg

SEQ ID NO: 768581 - DNA, 634 bp, Homo sapiens
cgatggaacaggcgggtaccccgatcactgcctctgctgaaaacaaatagaaagccaactttcagaagtaaatgcatctagtagggaaaaaaataaaatagcaatgaagcagtgagtaatacagataacaaacttgatttaagaaatgtttgaagaagctcacatcccttacagaatactcttatttattgtttttcttgaaaagtgttttgtttaaatcaattatataactgaccacaaagtgaaccttaacaaattaaaataagttataggtctcatgccctgtaatattccaattaaagtagaaacatgtaataaaaatagaactacaagcaaatgtctatccataaaaagtccactataattttacattaaagagaaactcmaaccttaatgcctatactatcccatctggaaaccattagaacagtactttctatgagaaacaatgtgagacagcaaaacctgtgtttcaaggaaaatgtctatctttaagtcctctaacgtagaacaaaatgatcaaaaaataaagaaatttaataataagattaaaaagttagaaaaaacaaaaataaattaggatcctattaataaaattcaagtgttataaacaatttaaagcaagagtgagttg

SEQ ID NO: 768582 - DNA, 521 bp, Homo sapiens
attatttttattttttcacttgcttctgacaaaataataataatccccaatagcacaatctcttagaacaagagaaaaaagttgtttataaatccatctatattagaaagtgaattactgtgtataatcaatcatttgaaaaaatactaactctgtaagtattcagttgattacgttgggtttcttactaatttctccacttactggtattggcaggcggagctgaagcacgccctgactcccagcagcgtatcaaatttaagtaatttagtaaaagtagtgatcctatattcttctctggccagtctattagccctctattttcagttgcctgaaggaagatatttgcttgatttttcccaatctcattcattcartattgtttcagtgtgatgttttgctaaattccatttggaaatacccgatatttctgatatttttagacatgtgtgatctgtactctagacatagtacacagctcttaaaagatgaattgcataaggaaatgttcatttccacca

SEQ ID NO: 768583 - DNA, 524 bp, Homo sapiens
tcaaagtgactgagtgagtcagagtcttatgacgcttaagctgctccctgagagccaagtcaggcactcagaaaccgggttagctcttcgaggatcagataggcccacttagaaaattatctccgtgcctggagtggtacctacattgcatcacaggggagccaagtggctgcaactttatatatatatataaaatctcaggctagattctcgggaagcataagaaaacttaagcagtttttggaagctgttgtaactttctcaagttattaaagtatcctttcatrtctgaaatggcaacatacccatggttgttctaatgtcttgaaagagttattgcaatttaaaaaggcacaggattttttttttcaggaaaggtgtttaaactcatcacacatttttaatgatcttctttgtttaagagatgatttcactctagtgcacccattttaagatgtctataattatgttaaatagggaatggtaaaaatagtttaaaaatatataattgagttttttctatt

SEQ ID NO: 768584 - DNA, 524 bp, Homo sapiens
tcaaagtgactgagtgagtcagagtcttatgacgcttaagctgctccctgagagccaagtcaggcactcagaaaccgggttagctcttcgaggatcagataggcccacttagaaaattatctccgtgcctggagtggtacctacattgcatcacaggggagccaagtggctgcaactttatatatatatataaaatctcaggctagattctcgggaagcataagaaaacttaagcagtttttggaagctgttgtaactttctcaagttattaaagtatcctttcatgtctgaaatggcaacatacccayggttgttctaatgtcttgaaagagttattgcaatttaaaaaggcacaggattttttttttcaggaaaggtgtttaaactcatcacacatttttaatgatcttctttgtttaagagatgatttcactctagtgcacccattttaagatgtctataattatgttaaatagggaatggtaaaaatagtttaaaaatatataattgagttttttctatt

SEQ ID NO: 768585 - DNA, 580 bp, Homo sapiens
agtattatggacattacagttattaagctaggcaataaatctccttgacccataaattctcatttttgaattcatatgtcacctactttgtgtaataattgtccttatatgttttctcttgcatcatcaactgttattttttttcagagagtttcactttgttgtccaggctggagtgcagtggcatgaycgcagctcactgcaacccctgcctcctgggttcaagcgattctcctgcctcagcctcccgagtacctgggattacaggtgtgtgccaccacatctggctaatttttgtgtttttagataaaatggggtttcaccatgttggccaggctagtctcgaactcctggcctcaagtgatctgcctgccttgacctgccaaagtgctggaattacaggcatgagccaccgtgccaggccttgcttcatccactgttacagttgtattctaattcccctatgtatatatggatacattgggtctttgtttatctcagatgaattcaaagagccttataatcagttattggaaagagaatattactggtctatagtaaatgttcatttttggtaata

SEQ ID NO: 768586 - DNA, 569 bp, Homo sapiens
atatagagagagagagagtttagtgatatatatatatcactaaactgtatataattctatgtagttatttaattttgggttaaaaaattgaaacaacgttctaagctaaaatgttagtttctgttgcttcttaaaagctaatccaataayggcactaaattgtaaaaataaaggtttataggataatgaatgggctaaaaatagtaccattttgtgaaattcttaaatattcttcgtgagtaaatatggaattgcatattttgattaatatagacttctattacgggcaagatttacttatttgttgcgtagaacacaatgaacttggtttaaaggagaaaggtagactttctgtttctgtttcttagttgagctgttttctatttctgtgcttttaaaataaagcttctaaaacatagagatctgcatattaatagttttcccaatttcacagtgccctcaaaagccccacaacaatttctacattttaataaccagagccatacacctttacttccagccattatgttaagaaacatctctgttaaatgtgaggcattgtataggct

SEQ ID NO: 768587 - DNA, 569 bp, Homo sapiens
atatagagagagagagagtttagtgatatatatatatcactaaactgtatataattctatgtagttatttaattttgggttaaaaaattgaaacaacgttctaagctaaaatgttagtttctgttgcttcttaaaagctaatccaataacggcactaaattgtaaaaataaaggtttataggataatgaatgggctaaaaatagtaccattttgtgaaattcttaaatattcttygtgagtaaatatggaattgcatattttgattaatatagacttctattacgggcaagatttacttatttgttgcgtagaacacaatgaacttggtttaaaggagaaaggtagactttctgtttctgtttcttagttgagctgttttctatttctgtgcttttaaaataaagcttctaaaacatagagatctgcatattaatagttttcccaatttcacagtgccctcaaaagccccacaacaatttctacattttaataaccagagccatacacctttacttccagccattatgttaagaaacatctctgttaaatgtgaggcattgtataggct

SEQ ID NO: 768588 - DNA, 569 bp, Homo sapiens
atatagagagagagagagtttagtgatatatatatatcactaaactgtatataattctatgtagttatttaattttgggttaaaaaattgaaacaacgttctaagctaaaatgttagtttctgttgcttcttaaaagctaatccaataacggcactaaattgtaaaaataaaggtttataggataatgaatgggctaaaaatagtaccattttgtgaaattcttaaatattcttcgtgagtaaatatggaattgcatattttgattaatatagacttctattacgggcaagatttacttatttgttgygtagaacacaatgaacttggtttaaaggagaaaggtagactttctgtttctgtttcttagttgagctgttttctatttctgtgcttttaaaataaagcttctaaaacatagagatctgcatattaatagttttcccaatttcacagtgccctcaaaagccccacaacaatttctacattttaataaccagagccatacacctttacttccagccattatgttaagaaacatctctgttaaatgtgaggcattgtataggct

SEQ ID NO: 768589 - DNA, 574 bp, Homo sapiens
tataactgaactatgagaaaaggaataaaaaggtagataatgaaacctggaaatgtaaagaaatatttatttaattttaaatgaacacagaaagagctcttaaagtaatgaatataaaatgatctgaacaagaatggaatcttttgcctccagtgttaatggtaaagataaaatttaaagaacaaatatgatttagctctaagtccttcatttatctttctgtaaactatatgcctttttaagtattgtttaaaactgcatctttgaagatttggattgtttattamcattgctaacataagaatccagtgaaggcatagagggactcatgctgtgaattttcatcaggtatatgatggaaaagacagttcctcacgtccactgggcacgttcactaaaaatgaacttctggggctgatcctaaacagcacatccaatcacctgtggctagagttcaacaccaatggatctgacaccgaccaaggttttcaactcacctataccagtaagtaacatacgacttaatcacgttcttttttcattttgtcaggacatatctgatacttggcttata

SEQ ID NO: 768590 - DNA, 574 bp, Homo sapiens
tataactgaactatgagaaaaggaataaaaaggtagataatgaaacctggaaatgtaaagaaatatttatttaattttaaatgaacacagaaagagctcttaaagtaatgaatataaaatgatctgaacaagaatggaatcttttgcctccagtgttaatggtaaagataaaatttaaagaacaaatatgatttagctctaagtccttcatttatctttctgtaaactatatgcctttttaagtattgtttaaaactgcatctttgaagatttggattgtttattaccattgctaacataagaatccartgaaggcatagagggactcatgctgtgaattttcatcaggtatatgatggaaaagacagttcctcacgtccactgggcacgttcactaaaaatgaacttctggggctgatcctaaacagcacatccaatcacctgtggctagagttcaacaccaatggatctgacaccgaccaaggttttcaactcacctataccagtaagtaacatacgacttaatcacgttcttttttcattttgtcaggacatatctgatacttggcttata

SEQ ID NO: 768591 - DNA, 591 bp, Homo sapiens
ccacttcactgagtaactttgtaaaagcttgaatctattcatctgtttgtgggcactttccaattctacagacatttttgattacatagtagcacaaatgttctataaataggagaaagaaatattggagaggattggcacttagctcttattataatcaatttgacaggagtaattttcttgttctccctgtttcacctttctgttccacctgcaaaacccggasactcctcaggtctcctttgcaagattatcttagagctggaacatactgtctggtgggaagatatatttgtaatagaaaattggtggtgctgatggccatataatcaaaatagtattaacctcacattaaattgttagttgtaaatataagtaaataagctgaagaaatccccagctccccaaggtcatcaaatacctgaatcaaatatttattccaaaaagatgtctcagaaatgatgaccggttagataaaatattttacgcaagttatttatgcttaagactgtgtaaagacactttcagctattttcaaaagacttttgtaattgcctcttgatagttaattgcactacttaaggaaacatt

SEQ ID NO: 768592 - DNA, 469 bp, Homo sapiens
cctgcagggacagcctgacagccatgtcttccctctgagactgaggggttctgcaggcaggcactatatctcattcccttctcctgccccacatctagcccacagtccagagcagagtttcttcaatgaaggaatgaatcccccagagcaatagktctgggttagtactatcccaaacctcacagtctgttattcccagagacagtgatttacttctaatattcatcaacaaacccctccccctgccaaagatcgtctgcccttccattaagcgacaaggtcagaagggggtttccgtggacgaagttaataaacagctaacttgggaggaataaacaaaataaaacccagggtaggccggcgcaggcgtgcccttgcgtctaacaacaccacactccaccctctctccctcctctgcttggtgggtgggctgattcacttcctgtgtcccctcccagggcagcgtgag

SEQ ID NO: 768593 - DNA, 524 bp, Homo sapiens
caggtctaactaatgataaacaaccctttctcaggctcactatcaaaacccccaatcagaagtctccagccagagcctctttctattggtcccaggttctgctccctccatcctgcaaggtcgcatactccttcacctcctcggcatgtccttgccacaggggcggagtgggaggagggacagattgcagatccctgcttatagacagggaaaccaagatttaaagggtcagggaagctggtaagtgycagagcccaggtttcctcatccacatcctgagcattttctgtcccagtttggggtttgcagggaggacccccaatgactcctcccttctgtgagctcagttctcctgcactgaatgactaaagagagtcagcgtatcacacagagaggaagaaccgtgtgaaacctagaaggtaattcatgcccaggctcgtcatggctgggggccagtgggcctcagggcgggagactgatctccaggcaagccagaatcaaagccagcacccagcccactcccc

SEQ ID NO: 768594 - DNA, 524 bp, Homo sapiens
caggtctaactaatgataaacaaccctttctcaggctcactatcaaaacccccaatcagaagtctccagccagagcctctttctattggtcccaggttctgctccctccatcctgcaaggtcgcatactccttcacctcctcggcatgtccttgccacaggggcggagtgggaggagggacagattgcagatccctgcttatagacagggaaaccaagatttaaagggtcagggaagctggtaagtgtcagagcccaggtttcctcatccacatcctgagcattttctgtcccagtttggggtttgcagggaggmcccccaatgactcctcccttctgtgagctcagttctcctgcactgaatgactaaagagagtcagcgtatcacacagagaggaagaaccgtgtgaaacctagaaggtaattcatgcccaggctcgtcatggctgggggccagtgggcctcagggcgggagactgatctccaggcaagccagaatcaaagccagcacccagcccactcccc

SEQ ID NO: 768595 - DNA, 574 bp, Homo sapiens
ctcacaatgaccaaaaggtgaaagcccaaatgctcttcagcagatgaatggataaacaaaatgtggtatatctatactacaggatattactcagccttaagaaagaataaaaggcccaatgtgatggttcatgcctgtaatctcagctactctggaggctgaggtggggggactacttgagctcaggagaacaaggccacagtgagctgtgatcacaccactgcactccagcctgggcaacagagcaagaccctatttyttaaaaaaaaaaaaaaaaaaaggaatagaattctaatacatgttttaacatgggtgaggcttgaaaacattaagtcaaataagccagacacaaagggacaaatattgtatgattccattgagatgacatgcctggaataggcaaattttagagacatttacgtaaagacagtctggcaggggggccgggggcgggtagaggggatggggaattagtgtttaagggatacgtagtttctatttgggaagatgaagaagtcgtggagatggatggtggtcataggtgcacagcaatgtgaatgtactcaataccaac

SEQ ID NO: 768596 - DNA, 603 bp, Homo sapiens
tttaactggaatgctgggtgacttccataagccacaaagttaggaggtccccacacctcaaagtctggtttgatcctttgctccagtcttgtcagctttccaatcgtctagtgatcatggctttgttctacccttttgtctttattgaggtggtttgstagtgctccctgtcctctaatccttctttttttttttttttttttgagatggagtcttgctctgttgtccaggctggagtgcagtggcacaatctgagctcactgcaacctccacctcccaggttcaagcagttctctgcctcagcctcccaagtagctgggattacaggcgcccaccaccacacccagctaatttttgtatttttagtagagacagggttttgccatcttggccacgctggtcttgaactcctgacctcgtgatccacccacctcagcctcccaaagtgctgggattacaagtgtgagccactgcacccggtctagtccttgtattttctaagttcaactcaatgtccttcatgctaccactcttaatactatgatgtgctctagaatttcaggtaagtgagcattccacatcaaattcttagatggcaatata

SEQ ID NO: 768597 - DNA, 603 bp, Homo sapiens
tttaactggaatgctgggtgacttccataagccacaaagttaggaggtccccacacctcaaagtctggtttgatcctttgctccagtcttgtcagctttccaatcgtctagtgatcatggctttgttctacccttttgtctttattgaggtggtttgctagtgctccctgtcctctaatccttctttttttttttttttttttgagatggagtcttgctctgttgtccaggctggagtgcagtggcacaatctgagctcactgcaacctccacctcccaggttcaagcagttctctgcctcagcctcccaagtagctgggattacaggcgcccaccaccacacccagctaatttttgtatttttagtagagacagggttttgccatyttggccacgctggtcttgaactcctgacctcgtgatccacccacctcagcctcccaaagtgctgggattacaagtgtgagccactgcacccggtctagtccttgtattttctaagttcaactcaatgtccttcatgctaccactcttaatactatgatgtgctctagaatttcaggtaagtgagcattccacatcaaattcttagatggcaatata

SEQ ID NO: 768598 - DNA, 629 bp, Homo sapiens
actcctccttactgaaagttatttattaatttttttattgttgttattgttggttgctccccttcaagtacttgacttcatgactcactggcttcttttcaatccttttctcatctctttttttctattaaatcactargtgagctcctgcagactcctggctttagataccatctttatgctgatgacttccaaatattatttccaatctgacctctttgtctctctctgtctgtgtgtgtgtgtgtgtgtgtgtgtgtgtttactacctccttagcatctccacttggatatctgatatagactttaaatttgacatgttcaaaagagaactcttgattttcatttatcattcccacaaaaatttttttctcccccagtcttctccattagtagagagtactgccattcatccagctgacaaatccaaaaaccaaggggttgtattcaatacctaattcccttaaactccacaatcaatttattagtgaattctgttgactcaattttcaacatgtatatagaatctgatagtttctcatcatttccaacactatttttctatcttctctagactagaagattgcagtaaacttcctaaatactctctctgtttctattcgtatatg

SEQ ID NO: 768599 - DNA, 629 bp, Homo sapiens
actcctccttactgaaagttatttattaatttttttattgttgttattgttggttgctccccttcaagtacttgacttcatgactcactggcttcttttcaatccttttctcatctctttttttctattaaatcactaggtgagctcctgcagactcctggctttagataccatctttatgctgatgacttccaaatattatttccaatctgacctctttgtctctctctgtctgtgtgtgtgtgtgtgtgtgtgtgtgtgtttactacctccttagcatctccacttggatatctgatatagactttaaatttgacatgttcaaaagagaactcttgattttcatttatcattcccacaaaaatttttttctcccccagtcttctccattagtagagagtactgccattcatccagctgacaaatccaaaaaccaargggttgtattcaatacctaattcccttaaactccacaatcaatttattagtgaattctgttgactcaattttcaacatgtatatagaatctgatagtttctcatcatttccaacactatttttctatcttctctagactagaagattgcagtaaacttcctaaatactctctctgtttctattcgtatatg

SEQ ID NO: 768600 - DNA, 572 bp, Homo sapiens
caagtagttacataccttatgaatctacttttataacacatggaaagtttacatggatttgtctagattacatgtaataactgcatatgaatctggaattatttcaaaatcaaagtttaattaaaaatatagtagaaaaatttcatttataatagcatataaagtattatactttaaaaactgtacaataaatatataaaaatgcttcagactttttatacaaaaaattgaaatatgttgaagattacaaaaaattgagtaaatgaattgaaaaatgtaatattatacttcttccaaaattcatctataaaataagtaataaatcaatatgtcaataaggcattttggggrtaggagtgggaggttataacaagttgatagtaaaattcatagggaagagcccaaaacagacagtttgggaaaaacaaaacaaaataaaacagacaacaggagttaagctatcagataatcacttcgtattataaaactacagtgattaatgtagtgggtattgaaaacagaatacagccaggcgcagtggctcatgcctgtaatcccagcactttgggagg

SEQ ID NO: 768601 - DNA, 572 bp, Homo sapiens
caagtagttacataccttatgaatctacttttataacacatggaaagtttacatggatttgtctagattacatgtaataactgcatatgaatctggaattatttcaaaatcaaagtttaattaaaaatatagtagaaaaatttcatttataatagcatataaagtattatactttaaaaactgtacaataaatatataaaaatgcttcagactttttatacaaaaaattgaaatatgttgaagattacaaaaaattgagtaaatgaattgaaaaatgtaatattatacttcttccaaaattcatctataaaataagtaataaatcaatatgtcaataaggcattttggggakaggagtgggaggttataacaagttgatagtaaaattcatagggaagagcccaaaacagacagtttgggaaaaacaaaacaaaataaaacagacaacaggagttaagctatcagataatcacttcgtattataaaactacagtgattaatgtagtgggtattgaaaacagaatacagccaggcgcagtggctcatgcctgtaatcccagcactttgggagg

SEQ ID NO: 768602 - DNA, 637 bp, Homo sapiens
ttccttcccccgcactctcgggtaatttgttctctctctactctttggctgtgagactggatgagacatcaggagacttgcataaccagaatatatgaataaacttgattttcgtcccagctgtgcgactgacttactgtgtgccagacttgctgcgcgaccctgggcgagtcacttaatttactggagctttcatttcttttcctgagatgtgagaatgctctcatcttcccacactctcctaggggagctgttgttactcagattgataatacaggagtctctccctacctagatacaaagcttagstacaaacaaacttccatgtaagaaaattaggcactgagctgagaaactcagggaaagcggggaggggcaggtaaaagcatcaaggtcacagactaataaatgtttttccttttattcaattttaaaaatataaagactgaactgaatttaaaagcatgtcaatggcattgcacccagcctgactcagctataatggacactggacagttctttgcattgaatacccattgctcactgggaatctttcagatcctcctcactcacagtttcaacaagatgactgcaaatgtggttttctctttgcaaacaatgcacatttttagtacaa

SEQ ID NO: 768603 - DNA, 637 bp, Homo sapiens
ttccttcccccgcactctcgggtaatttgttctctctctactctttggctgtgagactggatgagacatcaggagacttgcataaccagaatatatgaataaacttgattttcgtcccagctgtgcgactgacttactgtgtgccagacttgctgcgcgaccctgggcgagtcacttaatttactggagctttcatttcttttcctgagatgtgagaatgctctcatcttcccacactctcctaggggagctgttgttactcagattgataatacaggagtctctccctacctagatacaaagcttagctacaaacaaacttccatgtaagaaaattaggcactgagctgagaaactcagggaaagcggggaggggcaggtaaaagcatcaaggtcacagactaataaatgtttytccttttattcaattttaaaaatataaagactgaactgaatttaaaagcatgtcaatggcattgcacccagcctgactcagctataatggacactggacagttctttgcattgaatacccattgctcactgggaatctttcagatcctcctcactcacagtttcaacaagatgactgcaaatgtggttttctctttgcaaacaatgcacatttttagtacaa

SEQ ID NO: 768604 - DNA, 607 bp, Homo sapiens
aggctttgccaagggctcagggaggtctcttcttcctcaggccatgtggaattcaaaccctccaccatgtccaaactaagcctcctcccccactgcaatacccatgtgcaactctaactcctccaggcggttttaggcactgtttatgcggtcagggaagaaagattttggttgtttaattcaatatacagtgccttataaggcacaacctggccagagttaagtgaggscaaactgggaacagggcattttcactgctgaatgacagacagcagcagagagttcagccaagatggtggactcctcatcccagtggttagttttctgcggcaaaagttgtacctctggttaggtaccgcctataaatgcttcatccagttatcagattctatgcttcctaaggcctccttcttccatttgaaaaaggaaaataaaagaaaaacattaatagcagtaaccattggaagaaaggtatggagaaatatgggctttaaatgtttgtgcacctttgtgcagcactgattacattttctagccttaaacatgtatttcttatatcatttgcaatggtaaatggggattatctaggcataaaactcatgcatat

SEQ ID NO: 768605 - DNA, 616 bp, Homo sapiens
atgaaccttgaagggccttgaataatgtgtaagtggtttggatactattgaacaagcattttcacttccgttgtaatatgattatgacctatggctcctaggccacagagctgagaggagctcagactaatatcaggataatggtcacaaatcacaccctaccctaaatgcagtaccaatgggaactcttccaccagctgcacatgcacagttccttatactcttctgtcagtgccttgtttctgagtatgccatggaaacaatgggtggaagggcagtataggatatttcatcttttacttctcttagattgcagcatctttgcctttggattcagcatgagttcaatggaacgagggataatccacataacagtcgtcatgctgtctttggcttcacttacctccccaaccrgcctgccatctctgaatctaacttgtgctctttgcctttagggtgaattccttcccagaagactcttgggctcttattgcaaatacattcgcagtagactggcgcctctaagtctagtcatacctcgttcctatggtaaccacagagtggcctccagctgggactcacagccatgtttgctttctgttcaggtatgccctct

SEQ ID NO: 768606 - DNA, 605 bp, Homo sapiens
tgactggctcattgggcgtatgccactctagtagtcacattaagcaatgcttggtgggtaacaatgataacaagaatgattaagatagcaaacatttacatagcatggactcagtagctgcaccgttataagtagtgaaagacacagccttaactacatgtgaaaatagcttactaccaccttcttggtgataataatgacagtggtagtagccaaccggagctgaattctaggtatcaagcaccatgccaagcrttttatttgcatgatgataaaacgatacttgatggagcaagagtgctatggggataggagggaattgaaaacacaggttgaaagaaaaaaacaagtaaagaggattcgctccagacaagcgttcctttgtacaggtgagtgaggaaaaagacagagcacagatccagcacgatgtgttcatagagaggagcgacacagagagggttaagccaagtagcttcattttccccgggaagaaggaggctgcctcacctgctatgaatgaggatgctcccatgttaggtaaaattagtgtctgagacactaatttatcctatgacagaaattactgaatatagctgatgtgtttt

SEQ ID NO: 768607 - DNA, 651 bp, Homo sapiens
gcctctttatctgttctggtcactttgctccttgttcaaaggagtcaggtgcccagagggctgctaaagggaagatacagacctatggccaatgagtgggaagaaggacgtagcagctcagaggactcaggcgcttcttttcttggagagctggacctcagcaggggtctgccctgggccccagagagcagttataattcgttcgggccaacgacaaggggatgatttattccctggtgcagtgggatgggctttacaggcataaaacaggaacaatagcaccgtgtaataaacccagcatgtccttgccagagaggaaagaaaactgagtgactcagacattaaactgtcagattgtgaccggagacaggtcaggtgaagakagctcttgcatagggccaggttcccggattctggggcaggcttgagccgcctactggtgaaggacaaataggacagtcagccccagaaagacatggggagagggccagcgagccaatgcgcagcttttaatagcaacgttcaaagtgttgacttttattttatttagcaaatgtggaacataatgtctctgtgttgcacttggtaggaaaagtaacaattgtttccagggttttccataaacttatctattttgatcatttggctcta

SEQ ID NO: 768608 - DNA, 682 bp, Homo sapiens
gggatggctgggtcaaatggtatttctagttctagatccttgaggaattgccacactgacttccacaatggttgaactagtttacagtcccaccaacagtgtaaaagtgttcctatttctccacatcctctccagcacctgttgcttcctgattttttaatgaccaccattctaactggtgtgagatcgtatctcattgtggttttgayttgcatttctgtgatggccagtgatgatgagcattttttcatgtgtttgttggctgcataaatgtcttcttttgagatgtgtctattcatatcccttgcccactttttgatggggttgtttgattttttcttgtacatttgtttaagttctttgtagatgctggatattagccctttgtcagatgggtagattgcaaaaattttctcccattctgtaggttgcctgttcactctgatggtagtttcttttgccatgcagaagctctttggtttaattagatccgatatgtctattttggcttttgttgccattgcttttggtgttttagtcatgaagtccttgcccgtgcctatgtcctgaatggaattgcctaggttttcttctagggtttttatggttttaggtctaacatgtaagtcttttatccatcttgaattaatttttgtataaggtgtaaggaagggatccagtt

SEQ ID NO: 768609 - DNA, 682 bp, Homo sapiens
gggatggctgggtcaaatggtatttctagttctagatccttgaggaattgccacactgacttccacaatggttgaactagtttacagtcccaccaacagtgtaaaagtgttcctatttctccacatcctctccagcacctgttgcttcctgattttttaatgaccaccattctaactggtgtgagatcgtatctcattgtggttttgatttgcatttctgtgatggccagtgatgatgagcattttttcaygtgtttgttggctgcataaatgtcttcttttgagatgtgtctattcatatcccttgcccactttttgatggggttgtttgattttttcttgtacatttgtttaagttctttgtagatgctggatattagccctttgtcagatgggtagattgcaaaaattttctcccattctgtaggttgcctgttcactctgatggtagtttcttttgccatgcagaagctctttggtttaattagatccgatatgtctattttggcttttgttgccattgcttttggtgttttagtcatgaagtccttgcccgtgcctatgtcctgaatggaattgcctaggttttcttctagggtttttatggttttaggtctaacatgtaagtcttttatccatcttgaattaatttttgtataaggtgtaaggaagggatccagtt

SEQ ID NO: 768610 - DNA, 549 bp, Homo sapiens
cctcagagaacttagagtaatactgagtatgcggcagatgatgaataaatggtctaatttagttaacagcattttagcagcagtagtaacagtggcaactgcatagatattttgaggaatctcaccacttttgttacttaattcatccctaaaagttttgttttagctggggaagcagtaaagaactttataaaatattcaacatttgtgcagtgttttgcccataaacaagtgatcatttttatacagcagaattgcaaagaattttcctctttatacctactgagttacaraggtaaattcacctattttaaatgccttcatttcattcaattcaagctgacacatttataagtcatattcgcattgactttaagtaataatgtttaagagaagaaatagaaattttaggataactaagctttttcagtttcaaaaaatataaattaacttgattaaatcaaggataaaggaagattttagaaggctatgatttagataatgagatgaacaaggaaactaaattggcaggttcagcattttgaagga

SEQ ID NO: 768611 - DNA, 549 bp, Homo sapiens
cctcagagaacttagagtaatactgagtatgcggcagatgatgaataaatggtctaatttagttaacagcattttagcagcagtagtaacagtggcaactgcatagatattttgaggaatctcaccacttttgttacttaattcatccctaaaagttttgttttagctggggaagcagtaaagaactttataaaatattcaacatttgtgcagtgttttgcccataaacaagtgatcatttttatacagcagaattgcaaagaattttcctctttatacctactgagttacagaggtaaattcacctattttaaatgccttcatttcattcaattcaagctgacacatttataagtcatattcgcattgacttkaagtaataatgtttaagagaagaaatagaaattttaggataactaagctttttcagtttcaaaaaatataaattaacttgattaaatcaaggataaaggaagattttagaaggctatgatttagataatgagatgaacaaggaaactaaattggcaggttcagcattttgaagga

SEQ ID NO: 768612 - DNA, 654 bp, Homo sapiens
tcaagtcatgacttcaaaaattagcatgcagacttggctgggagagttctctgatggctggaagatgtgtgtgggtgtgtttatgcacattttgttttttatactagctgcatttgacctatttttccccacagtggggatggcttgttgggcccatgaacactttgaggagcaggtctctgggaaggcattttatgaatcagaatggctggttgcccatgtagtaatcatgaagaaggagatgcatgttgaatgtaaagaaggatcctttgacagacaaaccaagctcacactagcttatgggaaaagagaatgcactggatcatagaacagaaaattctagctccagatatggctggatccaggggctcaaatgctgtgggtatctctgtctctcctgtacttctgatgggcattattcttargacaactcacttcttgctgcaaccaagtggcccttggtcagttggagacctgctttgtccatggtgtaaatatgtaaaatagggtcaataatccctgtgtcacagggtttacaagggtcaagttagacaatgtagataacgaacccaacacagcacctactgcaggatcagtactctagttcagtatccagcacatggtggaggtattttttgtgtttttaataatcat

SEQ ID NO: 768613 - DNA, 563 bp, Homo sapiens
aacatggcgagtcacagattacagggccaggacccgagatatgaggcaatgtgcaaaggtgagggtctttgttcttggagtagtctctggaagcccctggtcaaggcagagtcagaactccaggatcaagggtttctgccccagccacacgcatgtctgctgaagctctgctcatcactctygctcccgcagcctcacactgtgctctctgtattgttcctgtcctcaggggagctgccttaccttggggaccctagaattaggcagtgtccttgaattagccatgccctcctctgcgcccacagcagaaaggcacacctatttcactctcaacgtcctagagttgaacccactttttccccctgaacagtccatggaaatcttgacactgttatcagaaaaatggggagacaagtttagctggataggcaatggcattagtctacgtcaaaaggcaaagggaggtttgacttttatacgtattttcttattgatgaagatgaaacacaggacctttaattaaaaattctccccatattttcttatccccacatatgcctatg

SEQ ID NO: 768614 - DNA, 633 bp, Homo sapiens
aaatgagcaaaagaaaggaacttacagcagcttctctcccaagaaaactatattcacagagtcaccggccatgaaaggcatggtgcaagggagatgggaggagctctgctttctgagttgttgagtttctagattgctgagtgtggggtgtgaaagcatgaggggaaagataaagagaactatgagaccagcttatagggaatcttaaatgcataattaactatttcagctcattttatagcccaaggacaactactgaaggattgcatatagaagatgattcttgctgcaggaagcaagactagtggtgcaaaacctgactttaacatgagaggacgatgaattcacagcttccacatcactaattctttaaatctgcacatgacagtctgaactgcaactggcattaaagaagaggacatatttcctccctaaaatgagacgtgatctcccagaagaaagatatgcataaaaracaacagtgcaaggtcacctgaaattggtgccaaaaatgagacatgcaaccagtcacaggggctgagagaacaaggaatcttctgctcaagaaaataaagaaagaattcagggaaagggagtaatgagtgcatgaaagagattatttcaaagaggttg

SEQ ID NO: 768615 - DNA, 640 bp, Homo sapiens
gcaagtcgagcaggaatttgatgactaactgagtggattttattttattttttaagaattagaaggagaaaaaagaaaagaaaaagaggagaaggagaaaatgaatggaaattgcacattactatgagtcaatcatggtactgggtattaagratatcgtctaatttaactgtctcaaatcttgagaagggtgtttatacaccttttacagaaaagtggttgaagctgaaatatgttcagcgtatgctaattggtaataaacaactttttgaactccactgatgcttgaattttcactctgctggaagttgtcaggtccaaattttaaagcagacctgtcagcttcaaaccatgagcttctgccgttgtactgttctgcagaaaagtaatatgacttcagttcctctggcattagtgtgtagcaagatcagagtgtgagagatcagaagaaggagcactctggtgatgatgataatatgtaccatttatggtgcacacagatgtcccagttgctacctctagcatctctcattttttcaataatgtgcaagctcagtaacatacatttttaagaagtgagaattagagatgtcaagaatgtaaaactatcaagggcgaaggttgaaattcaaaataggac

SEQ ID NO: 768616 - DNA, 640 bp, Homo sapiens
gcaagtcgagcaggaatttgatgactaactgagtggattttattttattttttaagaattagaaggagaaaaaagaaaagaaaaagaggagaaggagaaaatgaatggaaattgcacattactatgagtcaatcatggtactgggtattaaggatatcgtctaatttaactgtctcaaatcttgagaagggtgtttatacaccttttacagaaaagtggttgaagctgaaatatgttcagcgtatgctaattggtaataaacaactttttgaactccactgatgcttgaattttcactctgctggaagttgtcaggtccaaattttaaagcagacctgtcagcttcaaaccatgagcttctgcygttgtactgttctgcagaaaagtaatatgacttcagttcctctggcattagtgtgtagcaagatcagagtgtgagagatcagaagaaggagcactctggtgatgatgataatatgtaccatttatggtgcacacagatgtcccagttgctacctctagcatctctcattttttcaataatgtgcaagctcagtaacatacatttttaagaagtgagaattagagatgtcaagaatgtaaaactatcaagggcgaaggttgaaattcaaaataggac

SEQ ID NO: 768617 - DNA, 640 bp, Homo sapiens
aggtcaactggaactgccaactaatttcagagtttcacagacctatccacccagtcgtgagtcatgaccaactgggacaggcctctggacaacagccacctgcccaggtaagacgaagcctaaaccagcagagcagaaccgcactccctgcaggcaagttcacaccccagagcaaaagagggaagcgcacagtcaacagcgacaktcttcattaattatcaatgcagtaatttcataaatcttagtacagagagaggaaagggggacagaggtcagcgtgttacacttattaggctcttcccacacagaaggaaacgtctgggcaggaaagaacagttccgctctaacatcagctttcaaggacaaacccagtttctcctatttccaaggtaactgaccctccagacagaagcagtcactcattcctctgtcttccttaaagttgtggactctccagtggaacttgtcctgtttcccttttatcatacacatctgtttacatatttagtatccctaaatagactgtgcccttatgaaaaaagctcttcatttcttagcattttgcattattttcagtagctaacactttgtccttatatacactaaaatcttaacgatgaataaatacatgattcaaagg

SEQ ID NO: 768618 - DNA, 640 bp, Homo sapiens
aggtcaactggaactgccaactaatttcagagtttcacagacctatccacccagtcgtgagtcatgaccaactgggacaggcctctggacaacagccacctgcccaggtaagacgaagcctaaaccagcagagcagaaccgcactccctgcaggcaagttcacaccccagagcaaaagagggaagcgcacagtcaacagcgacattctycattaattatcaatgcagtaatttcataaatcttagtacagagagaggaaagggggacagaggtcagcgtgttacacttattaggctcttcccacacagaaggaaacgtctgggcaggaaagaacagttccgctctaacatcagctttcaaggacaaacccagtttctcctatttccaaggtaactgaccctccagacagaagcagtcactcattcctctgtcttccttaaagttgtggactctccagtggaacttgtcctgtttcccttttatcatacacatctgtttacatatttagtatccctaaatagactgtgcccttatgaaaaaagctcttcatttcttagcattttgcattattttcagtagctaacactttgtccttatatacactaaaatcttaacgatgaataaatacatgattcaaagg

SEQ ID NO: 768619 - DNA, 613 bp, Homo sapiens; identical to SEQ ID NO: 752296

SEQ ID NO: 768620 - DNA, 581 bp, Homo sapiens
acacagaagatagattaaatatacagtagaaaggagataatttatagaccggggtgcctaatgattgagaggtagcatggatgagttccatggtacctggggagaagctgagctgaaacaaaactgaggcacctgctcctggttaacaggagaggagaaaatggtgaatgaaatgcaggtgagtttgtagaatggcartgcaaatcggagctagatcaatggctaatctctcaaagaagttagaaacaggggcttctgttgaaaaatacacagctttcagaagtgaaaatatttgaaataatcattgcagagaataggaaaatgaattaattatagcttgcagactttagtagattggaagagaatgaagtctctttcttttctgctttgttttaatctagagatatttttctcctgaacatttctatatttattgtaaaaatatactatctttttaatttacagaattttagaaatgattgtgaatgaaaatataaaaaatctttcctctgaatatgaggtagcctatctgtctactacgtattgtttttcccatttgccatttctataacaagctggta

SEQ ID NO: 768621 - DNA, 620 bp, Homo sapiens
tgaggatcaagactccaatatatgaattttaagaaacacaattcagtccataacaaagaccaatatacaaaaatctattatatctctgcatacaacaaacaattagaaaataaaattttaaaaatattgcttataataatacaaaaccctgaaattgcaaggaataattrtaacaagagttttgtaaggcctctgtgtagaaaattatttaacataattaagagaaatttaagatgacaaataaatgtatagatataccatgtaaatgaattgaaatgcttgatagtttaaagatctctattttattcaaattgatatatgtaatctcaattaaaattccagcaggtctctatagagatttaaattatgaagcaaaaatccatttggaaatgcaaatagccaagataagcttgaagaagaatagcaaagttgaaagaatttttagaaagatgtcaactgacagagataaatagagcatggactattataggatctagaaacagacccacacataaatggacatgtaatttattccgaagctggtactgcagtgttgtaaagaatatcatgatttatttatgattttgaataaattataatagctaaagtggatattcaca

SEQ ID NO: 768622 - DNA, 610 bp, Homo sapiens
ttctcaaataaagataacagcgatgtattttcacaaaagcaagagcttagaaagtactccacccaggtatccctcttggaaaaaatgcttaaggaaatatgacaaatggcaaagtgattgttatggatggaatgtttgtatcctcccaaaattcacatgttgagaccctaattccaatatgatggtattaagaggtggggcctttgggaggtaattaggtcaggagggtggagccctcaaaaatgggatttgtgccctttaaagaagaaaccgtggagagattatctgggccacgtgaggacagcaagaaggtggctgtctgtagaccaggaagagagccctctccagascaccaccatgtggcaccctgactgatcctggacttccagcttccagaactgggagaaagaaatgcctgctgctcaagaccctccagtccacggcaatttgttatagcagccccaactgactgtgacagagaagaagcaaagacaagagttccagaatgtggaagctggggtatcaaagggctggcccagatacaaagacaggaagacactgacctaggtccagataaccaatgtgctcagttataactgcaaatgcaaat

SEQ ID NO: 768623 - DNA, 448 bp, Homo sapiens
gaagttactgaagatagtaatgtgaatccacaggaaaaaatgaagagaatcagaaatgataaaaaggctaatataacaaatgatataaatatatacttgttctttcttctctgagcatctttaaaagccataaaattataggaagtaataagtataacaatatattgttgggttttaacatctgtagatgtaatatatataacaacaagactacaaaaaggacaaaaaggaaaagagttgtataggagcaatctttttgtatctcactggtattaagttggcacaaatctgaagttgatcttgataagtcaaaataagyatatggtaaaccccagagcaaacactaaggaaaaactaaaacagtgtcatgggaaaacataaagaaatcaaaatgctacattaggaaatatgcacttaatataagagaaagtagtgaagaaagaatata

SEQ ID NO: 768624 - DNA, 646 bp, Homo sapiens
cctccctgcttggacagcatgacagccttctgggctgtggttttgggttctgaacctgcagagtaaccgtgctgagcagcgggcggtcagcagccctcgtccccgcctggggtggctcctctgtgtgctctgcttctccgaggctgcccgtcagcccccacccagcctcctgctgggcccatttcccagccctgtcttccaagccctgtgccaggcctcttagtgtcaccaccttaaaattaagggacatctgtccaaagaacccgcacagaagacacaaaatgggtccatgagaagttgatctcactgcaaacccattktcagtgtaaacgaaacataaaatcctaagcccctcaactgactaaatggatcccatcttgcccacggggacccccgaaaaactgcgttcctggccatgacaggaagggaggtcagacacgcctcgttacaccccctccctttagggtttcgacacaaccactacccagcactaaagttaaaatagagaccgtaagacccacagagcagactctggcaataagatatcaaattacaaacaggacctcaggccgcgccaggcaagggacaagccgcgtgccctacactgagaggacggactctgctctcacgccacagctgctgtttt

SEQ ID NO: 768625 - DNA, 646 bp, Homo sapiens
cctccctgcttggacagcatgacagccttctgggctgtggttttgggttctgaacctgcagagtaaccgtgctgagcagcgggcggtcagcagccctcgtccccgcctggggtggctcctctgtgtgctctgcttctccgaggctgcccgtcagcccccacccagcctcctgctgggcccatttcccagccctgtcttccaagccctgtgccaggcctcttagtgtcaccaccttaaaattaagggacatctgtccaaagaacccgcacagaagacacaaaatgggtccatgagaagttgatctcactgcaaacccatttycagtgtaaacgaaacataaaatcctaagcccctcaactgactaaatggatcccatcttgcccacggggacccccgaaaaactgcgttcctggccatgacaggaagggaggtcagacacgcctcgttacaccccctccctttagggtttcgacacaaccactacccagcactaaagttaaaatagagaccgtaagacccacagagcagactctggcaataagatatcaaattacaaacaggacctcaggccgcgccaggcaagggacaagccgcgtgccctacactgagaggacggactctgctctcacgccacagctgctgtttt

SEQ ID NO: 768626 - DNA, 603 bp, Homo sapiens
catggaggtacactgccgtaaagtcctgccacttacagatgaagtggcgtcatattacccggaggtatcctttgttacagtaaaggtatgtattgtaactcttaggccaaataagtttgaaaggacgtattaggctattatcrccttgctataaggaaatacctgagactgggtaatttataaagaaaggaggtttaattggctcacagttctgcaagctgtacaggaagcataatactggcatctgctcagcttctggggaggcagaattgtgaggaaacttacaagcactgtggaaggtgaagggggagcaggcacatcacgtggccagagcaggagcaggagagaaagacggggctgggggaggggccacacgcctttaaacaaccaggtctcccaagaactcactcactgtcgcaaggacagcaccaaggggatgacgcttaaccattcatgagaaatccacccccgtgatccaatcacctcccaccaggccccacctccaacactggagattacaattcaacatgagatttgggcggggacacaaatccaaactatatcaagatgtatacaaaaagtagatataaaagggaataacta

SEQ ID NO: 768627 - DNA, 599 bp, Homo sapiens
aatgaaaagtatctattcttttttcctggaagtgaaagtctcctgatttgttctaaaataaatatctgctttgccaaatggaagggtcacttaaatgcagatggtgaaactaaattggaaaacaaaaccaagttgaataaaaacttagctrtaagatgattttgtaaacttaaatgctatgtctctaatttctctaattttaacatgcaatgaaggacttactttttattttataatctttttttctgagttctgatggctaaatttaaaagggcagtttttagtgctgagatataaattgcatcctgggatttaagtagttcagctacatcctgattctggtgctagtctttcatttgaatatttcttcctcaaaccagtatgtactgatggtctattttgtgctcagctgtatggtaggttcttgagattcaactttgagatggccagatagtcactgctcttctggacctaaaagtctagcaccgtgtacttctgagctctgccaacaacttcctgtgacatcctaaataaatatctctctctttttttttttaatttttgctttcggtttaaaatctttaaaatgaggtggatgg

SEQ ID NO: 768628 - DNA, 557 bp, Homo sapiens
aggaggcctacataaggatcatgcccagggttggggtaattcaacattagaatgttatcaatatttctcaaactaagttgaaaattaatgcaattccaattaaatttcaaggttttttttaaaaaatagattctaaaatatgtatggataaataaaggtctgtagatattaaataatattttgaaagagaagagcacgaagattcttcctgccagrtattaagaaatattaaaaagcagtagtaattaggatagtatggcaataaaataggggcaggactgaagacaaaggtagcagatcagaatactcatgtggactcccgggtgcctccaggaacttggcatattacaaaaatggcatcacgaatcaatgagagaaagaactgattatttggtaaataacctcactctatggcaaattaaaatttaattgctacttcccttcaaataaaaaataaactctatatgcaataagaatcaaatgtgaaagttaaaagtatagaattaatgaagaaagtgtaaataatatctttatgactttggaataggaaaggattt

SEQ ID NO: 768629 - DNA, 466 bp, Homo sapiens
agataatgttgattctcctcaggagccgcttccaacacccctgtttgcttctagacctataactagactaaagtcccagtgggcccctggaggtgaggttgagagtgtgactcatgaagcagtacactacacttgaaaataactgtttgagttctctaatttatataaatagcaatctggagaacagccatgggaatggatattaagggtatgggacaatggtggaaggaacactgagttggatcaggctgaatttactgatttgtgcctactaagtagggactctgcatttaatgttgcagctcagggagttaaaraaggttcttacagtttatttgcttggttagctgaaatatggattaaaagatggcccactgtgagcaagctggaaatgcctgatctcccttggtttaatgtagaggaagggatccaaaggcttagggagattgggatggtggagtggatt

SEQ ID NO: 768630 - DNA, 622 bp, Homo sapiens
ttactatatattgtaataatttaatatattgacctgagtctacaaactgaaaagtctcataggtcctggaaaagtgaatacacatcaaccaatgctgagaaaaaaaatttaataaaattactgtactttaataatraagaattctataagtgcatatatatagtagacaagtcacttcagaagagagaccaggtacatttctcatggaattagataccagaagataatgacagctgcaggctaaaggcatgggctatagggatgtgcactcctggcttggccactcacttgctatgtgaccttgctctagtatcagttacctgaactttctgctttgcagtatcctcatgtataagcaaggatgaccctttcctaaaaataaccactgcacacttttctaactccagagaatccagaaacagtaacacgaaagaccatctatcaaaagagagccaaaaaattaccaagacaccaaaatatacaaaggaaaacttgctggaaatataaggagaatcatcgagaaacgtaatagaaggcgtgattttaatacacctctcaagcctttgtcaggtcaagcagcaaacaagtcaataaagcagagtggaaatagtataatcagtaa

SEQ ID NO: 768631 - DNA, 507 bp, Homo sapiens
gcaaatagatggcaggcacctcttatctccccagcccaatgtccagaggagatgagaaatggaccctgagactttatgcctccccttacctgaaagcagccacttcccattgattggggtccatggatttgtcatmatcagtcactctggaaaattttcacgagaatataagtgataaaatggtgttccattgagtgaaacggtatgagaagcatcattatatgtcttgtctgtccatgaaggagaaggtacagtgattatctgtttggaggccttaattcatataatccaactgtagtctaaggacactggactagagaagtgctatggagaaggacatactttcagaaaaatatttcttcttctagatttcaattatgaaattttcttcttaataggaaccaaatcaatgagatgccaaagaatgaacatttcacttccaacctgcctgcctctaaggatgttaattcactctagccctgatggggtccctgggaagaactcaga

SEQ ID NO: 768632 - DNA, 646 bp, Homo sapiens
cacattttgagatctgtttaagtccaatgaagcgttgaatgaattaaaattactcttaatctttcattttctattccatgaaataaatcttttctctttccttcctgccttcttttttcttcttttctttctttctttcttctttctttcctctttcttctttctttctttatctctgtcttkctcttctctctctctctttctttctttctctccttccttcctctctttctttctttctccttccttccttcctttcttccttcctcctctcctctcctctcctctcctctcctctcctctccttttttttcaaatgctcactctgttgcccaggctggagtgcagtggcatgatcatggctcactacagccttgaccacctgggatcaagcaatcctcccacctctgcctcccaagtagctgggaccacaagtgtgcatcaccatgcccaacaattttttcttttatttcttgtagagacagggtatccttatattgcccaggctagtcttgaactcctgggctcaaatgatcctccagctttggcttctcaaagtgctgggattgcaggcatgagccactgcacctggccatttatctttttctactcactcagttcaatcactttaaataaatagtggtgt

SEQ ID NO: 768633 - DNA, 587 bp, Homo sapiens
tttgggaggctgaggcaggaggattgcttgaggtcaggggtttgaaacaggcctgggcaacatagcaagaaatttaaaaaattagctggatatggtgttgcatgcctgtagtcccagctacgtgggaggctgaggtgagaggattgcttgascccaatagttcgaggttccaatgagctattgatacaggagatagaaacaaattatttaggcagataatgagggcaaaagattccttagcagaacttcctttctaacaaacagcagcgcccaaaattatttttttctaacaaaatcatcttgaaagattgagctgcaaacatagatcaggaagctggaatctcgcatggggaatgttggcagctgcatcaatagaaaagcattacctgggggccaggcatgtctaccatggaagctccattttccctttttcattagcacatgtacagtaagacaaatgggcaacatggcgcagctcaggctgaaaacccgcctgcataataaaagactgtggtggcggctgccagaaattctcaccctatgcaaatgacacacctgtttctaaccagtttttaatgccctgtgta

SEQ ID NO: 768634 - DNA, 587 bp, Homo sapiens
tttgggaggctgaggcaggaggattgcttgaggtcaggggtttgaaacaggcctgggcaacatagcaagaaatttaaaaaattagctggatatggtgttgcatgcctgtagtcccagctacgtgggaggctgaggtgagaggattgcttgagcccaatagttcgaggttccaatgagctattgatacaggagatagaaacaaattatttaggcagataatgagggcaaaagattccttagcagaacttcctttctaacaaacagcagcgcccaaaattatttttttctaacaaaatcatcttgaaasattgagctgcaaacatagatcaggaagctggaatctcgcatggggaatgttggcagctgcatcaatagaaaagcattacctgggggccaggcatgtctaccatggaagctccattttccctttttcattagcacatgtacagtaagacaaatgggcaacatggcgcagctcaggctgaaaacccgcctgcataataaaagactgtggtggcggctgccagaaattctcaccctatgcaaatgacacacctgtttctaaccagtttttaatgccctgtgta

SEQ ID NO: 768635 - DNA, 477 bp, Homo sapiens
tgaatattatatttaatattatataatattaacttaatattatgttgagtgttaactttaaacaaatatgaatatagaacagaatctaaatgttaaaagtcctgacaacacaaaagttattttataactaataaaagtcagagatgaggaaagatacttttttttgaaaaagttatagtacaatttttccctctttcaaagcaagtaattaattaaaattatccaaatttgaaacatgctatgaaaaaatgtcttcaacctctttatgtttctttccttttctctttgtttcctttctctccttagagatttcatatagggtrtatgaatgatatatataaaatccagcaatttctttagtttcttttttatgttaaagtcaagaaaaatgaactttaacaatctttattttaatgccgtgtaagtaatgtgcaatcatttcttatgagattatttgtcgatatattattgtgtcca

SEQ ID NO: 768636 - DNA, 520 bp, Homo sapiens
acaaattatagtttattaagttcagaccttttgctcttcaaagtacactgctatgaaaatggaaaggcaaatcataggctggggaaaatatatttgcaaatacatatctggtaaaagacatattctgtgtgtatttaaaaagctcttaaaactcaataaatggaaaacaaaatccctaatgaaaattggacaaaagatttgaactgaaactttactgatgttttgtctataccaaagaagagacagggatagcacatatgcacatgaaaagttgctcaagattattattagtaatcaaaaaacagattaaatccatgctaaactaccattayacatgtattggaatgattaaaactaaaacaacaacaaaaactctgacaataaatactaagtgttggcaaggagctaaacaatgacactctcataaatgttttatttgtattatcatcgtaatgcaattttcttagatactgccttttccaccaccattgctggtgaaaaaggcagttccttaaaaagt

SEQ ID NO: 768637 - DNA, 583 bp, Homo sapiens
cacgcagcaatttggctatatctccaaaacattatggtgagtaaaaggtatcagacttacgcatattgtatgattctacttatatgaagatttagaacacacaataatatttcaagtgatatataacagattattggttgcatgggctagggatctttggagggaaactcatcaaaaagtggtataaggtgctttgtggggtgatgaatactttctgttgtaattggggtttggtgttaaatacacaagtatattcctttgttaaaacacatcaagcttgatatgtgcctttcactgaatgcaagttatatttaagtaaagttgattaacaataaagttgaagacaaaygcagaaaaactttcaccaaagaacttttaaatatactgagatgtatcaaaattaagaactatgtaaattatttcctaaactaaaagcacccagataacacactgaagaaacattcactgaccaggtactttgaaccattcactgtgctaggcaccataaagtcaaaacctaattgtcagatgatcagtgtttcttatcagttcacacagtctagataaaatgcatacaatgaat

SEQ ID NO: 768638 - DNA, 598 bp, Homo sapiens
  misc_feature 559, 560, 561, 562, 563, 564, 565, 566, 567, 568, 569, 570,571, 572, 573, 574, 575, 576, 577, 578, 579, 580, 581, 582,583, 584, 585, 586, 587, 588, 589, 590, 591, 592, 593, 594,595, 596, 597, 598: n = A,T,C or G
tatcattaagtgagaatggaaacagaaggaggaagtagtttcaagataaagatactggattgctttagcaagagttggtttgggaggcaggaatagacatcgctttacagcttttcatcagatacttgatcaggtcagcagttttggcaagcactgtgaactagaaaaatctgtttagaaatcgtacttgcagatatagaggtgtggcaaggatcaccaagaaagtactaagagggaagaggacagggacagacttttgcaatgtctgcatctaaggggaaggaagaagtctcctaaaaccagaaaaccartcaggataatgtgttatgaagaccaagggagaaaacatttcaagaaaaaatgttttcttgaatttcttgaatttctgtagggtgatctagtaacaagcaagactgttcaaagaagaaaggccttttgatttgttctttaaaaacaagttctagtcggtatgtctgttagaataaattattgttttctagacgttcagcagacaaggagagaggagatggtaatggaagggacatggtgagagtttttnnnnnnnnnnnnnnnnnnnnnnnnnnnnnnnnnnnnnnnn

SEQ ID NO: 768639 - DNA, 558 bp, Homo sapiens
ccttgataatttaccaggagttccaattccaattggcccttctcttctgcccatgcaatagatggacgtaaacctcacctgaccaatgtgcattacaaaaataacccattctctggcatttacagaataatgttttatgttttgactactaaataaagcaaccagcaagaggattccttgtctccttggaacaagcagtaccaaaaatctctctgtagggcttttgttattacactcgataacaacaaycaagctgataaagtaacatgtagaatcaaagaaatttctataaaaattctaaataaagcatgctacaagaccttttgttttcggatacacaatatgaccatgagtatatacccaccatattccatcacaggggcctcaaaaatggcccttggacatagatagaaggcagctttgggtaaataaacagcaattctgaaatctctccttttttttttgccattgggtcctattaataaaaccatcatccactaaaagtaaataagaatataatagaaagcagggcaaaaataaattaatagcattttaaag

SEQ ID NO: 768640 - DNA, 428 bp, Homo sapiens
gtcaatttctaagccccaacataaggatttgtggaattggatctgccctctgggtaaggaatgatcagaaaaacccaaagtgtttttacttttcttagtacaacacttctgacaccagatgtttgaggttttcttgctaaaccccaagcaactctgcagtggacaccagctgggtgtcttataattcaattcaattctgactctatctacytaaagtgagtgtctgattcctcaggttaaaggctcagtcccacaagattgcccccaacctcaaatgtcagttacaaatgccagcttgtgacctgtacttctgactgactggctataaatcagggttcccaagaccccctctttcaattcgatctgctacaatgattcacagaaacactttatatatgtttatcagtttattataaaggatacagata

SEQ ID NO: 768641 - DNA, 569 bp, Homo sapiens
ctattattattattattattatttttaagagacagggtcttgctgtgttgcccaggctggagtgcagtagtgtgatcatagctctctgcagcctccaactcctaaactcaagtgatcctcctgactcagcctcttgagtagctgagactacaggtgcacaccaccatgcctggctgattaaaaaaatgttttcttgtagagatagagtctttctctgttgcccaggctagtctygaactcctggtctcaagtgatcctcctgcctaggacccccaaagtgttgggattatagatataagccacggcatccagcctccactattattttttaaaattcctgaccatttgattgagcaggtgatgactgtatgaatatctaaaataacctttagcttgcaggattattaaaaaactcagagaaccaggagaattaactttaatcaggtttgagataaatccaggaaaagggggttacacctacctaatcctaagagcagaaatgtggtcagggtgtactgtcagaatcccaggtgtaccaattcattgttacaggaaggaacgcttccgtg

SEQ ID NO: 768642 - DNA, 541 bp, Homo sapiens
aatcaggaatttccatttccacccaaagtatactttattatcttctagcagttgtctgttaatataaaagcagcaaaatctcagctacttatataattttctccttttatttgaaagttacacttagagattaataatatgtacagagaagcttttcctgcctactctgtttataactctgtccaacttgcccacaaacactgccctccttcaacccatctgatgtgggcaaagccactgttttcttaggcccataactcagtgcagctgttttatttttataatgccggtcaacctttttgtktgtgtgtgtgtgtgtgtgtgtgtgtgtgtgtgtgtgtgtgtgtgtgtctacgatgtgcttatttaataattgccaaaatatttagactagagtaacttccggtgggtcaattggattgtgactttcttttgtggttttttggttcttcgattgctctctgttaaatattttcataattccccccacagaatacgtgtgtatatactgcaacttaaaaactaaaagcagtactcgaat

SEQ ID NO: 768643 - DNA, 387 bp, Homo sapiens
ccaccaaaaacacaggtcccartaactgaccccacttcacatggggtttttgtggagggagagggtcttggtcccgagcagccaggccccagctgggaccccgcctgggcttcttgctggagagcagcagcccagggcatactgctcgtctcactcagagggcagggacgctgtttactgtccatcactgcccagcagaacttcaggtgtacagacctacagacccgtgttcctttgagatggcagagcctcagtcccttgtggcccctattcaggagaggtaggggcactgactttgggatggaaccagagacactgtgttgacaccatccttttggcaagctccagtccactctccttccctctcttcccaggttgcctgcccct

SEQ ID NO: 768644 - DNA, 594 bp, Homo sapiens
gtgtcatcctagcatagcttctgcaaagaagcaagagagaatgcaggtaaaaacattttgcatctgcaccatttgataagcagcagccctcagggtcctgactgggggtgggtaagcaaaatttgagcttccggcctctgtcctgacagggcctcttactgagaggctggggagcggagcagccattacaggttggggcacttgttaggcyagagtgccctggaccttgttttggatatcaccctctaggcaaaaaagcacaacttgaccgtgaacctgaccacgttccgactgtggtgttacgcctgtgagaaggaggtattcctggagcagcggctggcagcccctctgctgggctcctcttccaagttctctgaacaggtaacctgtgtggtgggctctgtttggttgttggtgacactgtgttgaggatgaggcagtgtgacctgagcatccgtggagcatggggcagtaggtcccagaggtgtctgtttctgggtcagtatgttttcaggtgactttgaggagctcacatcagcacatgctcactgagcccaactctgtgccgaggcatgtgtgagaccatgagggtgc

SEQ ID NO: 768645 - DNA, 595 bp, Homo sapiens; identical to SEQ ID NO: 738191

SEQ ID NO: 768646 - DNA, 623 bp, Homo sapiens
actacatgctgcttactggtaaaaaaaaaagatattccatgcaaacagagagcagaggcaagcaggagtagctatacttatatcagataacacatacattaaatcagaaactgtaaaaaaaaagaaaaagtcattatataatgataaagggattaattcaataagagtatatatcagtcctaaatatatatgcaccaaacaccagaggacacagattcataaaacaaatattactagacctaaagaaagagatagcaacacaataagtgcaggatttcaacaccctacggacacactataaagattatagagacagaaaaacaacaaagaaacactggacttcaatgaaactttagaccaaatggacctaacatacatttatagaacattttactcaacaacctcaaaatatacatttttctcatcagcgcatgcarcattctccaagatagaccatatgttaggccacaaaacaagtctcaacaaattaaaaaaaatagtaactttatcaagtgtcttctctaactatagtaaaatgaaactagaagttaataccaagcagaactcttgaaactatagaaatacatagcaatttaaaaacatgctgctaaatgatctttgag

SEQ ID NO: 768647 - DNA, 586 bp, Homo sapiens
caataatacatgttatatacaaatggctttcaaagcttggtttatactaccaatatagctattaaaataacagctttctcataaggtatgaatgagttttcaaaagctatagctgagttttcatttttgcccatttattttaattcctttwgatctttagaaattatatggccaggcgcggtgactcatgcctgtaatcccagcactttgggaggccaaggtgggtggatcacgaaatcaggagttcaagaccagcctgaccaatatggtgaaaccccgtctctactaaaaatacaaaaattagctgggcatggtggcacgtgcctgtaattccagctacttgggaggctgaggcaggagaataacttgaacccaggaggtggaggttgcagtgagctgagatggcgccactgcactccaacctgggcgatggagcgagactccgtttcaaaaaaataaataaataaatgatacataatattttgttaagggaaaaaaatattttagcttataacttatccttgtgtaaattaactatcataatcaattttttgtttaccttagcatctgttagcaaattgtatta

SEQ ID NO: 768648 - DNA, 586 bp, Homo sapiens
caataatacatgttatatacaaatggctttcaaagcttggtttatactaccaatatagctattaaaataacagctttctcataaggtatgaatgagttttcaaaagctatagctgagttttcatttttgcccatttattttaattccttttgatctttagaaattatatggccaggcgcggtgactcatgcctgtaatcccagcactttgggaggccaaggtgggtggatcacgaaatcaggagttcaagaccagcctgaccaatatggtgaaaccccgtctctactaaaaatacaaaaattagcygggcatggtggcacgtgcctgtaattccagctacttgggaggctgaggcaggagaataacttgaacccaggaggtggaggttgcagtgagctgagatggcgccactgcactccaacctgggcgatggagcgagactccgtttcaaaaaaataaataaataaatgatacataatattttgttaagggaaaaaaatattttagcttataacttatccttgtgtaaattaactatcataatcaattttttgtttaccttagcatctgttagcaaattgtatta

SEQ ID NO: 768649 - DNA, 576 bp, Homo sapiens
gtatatttgtagattctgctgactcaggtggtccagcctcgatttgcagaagagctgtgggatatcacaaaatataaattatggtttctgcctctgtgacccaatttatcacctaagacctttgagagagagagagagagaaatcctaggaaaaagactctttatatttaggggttatagctgtacctaatttccagcttaaggaaatgtgttgtgagaattccctgatagagaaagcagactcccacaaccccaccaagaagaagatgcaactatagattccgattattctggagaaaaaatcttgatgatttaaagttaaatttggcttttctatattcagaaaaacagtttgatttttccagtggttttacgctagggtactcattcatttatttggactttctgctgtgtctgggcaagastgtgctaagtaaatacttgtcagagtgctatttgaaatacaatgtgagttccatatgcaatattaaattttctaatatcacatttacaaaaggtaaaaataattgtaataatatatttatttaacataatatattcaaaatattattattt

SEQ ID NO: 768650 - DNA, 610 bp, Homo sapiens
agatttaaaatgccctgaggagggtcattcaatgcttacatacatatatggttatacttgttgcagatggaagtactttttgtttttgtcacttattttgctatatttgttgtagttttttggcataactcaagaaattcttgaaaaaaaaaactcagcaaaaaaaagggctacagactttccttactcttttaggttcgattttcatttgagcagccagatggtagagcgcagatgcccaccactgaaagagtgactttgacaagatgtttctacctcttcccaggacattaaaataaggaaactgtatgaatgtctgtgggcaggtacatgtgtatggtcgggagtgtgggaaggttgaggaaagggtactgaaagtccatttkagtcaagaactccaggtttacaggctgagaatccttaatccaaaaatttgaattttgaaatgctctaaaatccaacactgtgtgagcgcccacatgatattcaaaggaaatgtttattgaaacatttcaaattataggtttttggattagggatgctaaaccagtaagtatacagctgaattccaatatacaaaaatatctgaaatttgaaatacttctggtag

SEQ ID NO: 768651 - DNA, 600 bp, Homo sapiens
gttgaaaagacatatacacttccattgtgattgcagcattattcacaataggcaagatataaaatcaacctaagtatctgtagatggatgaatggatggagaaagtatcataatgcaacagtattcagctttagaaaaaagaaagaaatcttgtcatttgtgacaacattgattaacawggataacattacattaaataaaataagccaagctgggcaccaaaaaacaaatactatatgatctcactgatgtgtagactcacaaaagttaaacacataaaagcagagggtagaatggtggtgattaggaggaggcaggaagtttggggagatgttgatcaaaggaaacaacatttcaattagatcggagaagtaagtttaagaaatctattgcaccacatagtgactatagtcaatgatgaattcttgaaaattgacagtgtaaattttaagtgctgtaatcacaaaaaaagatgagcatatgaggtaatgcatatgttatttagctctttaggcattctacaatatatatttcaaacatcattttgtacataagtatataaaatatttatttgccaattaaataaataaaataatattt

SEQ ID NO: 768652 - DNA, 643 bp, Homo sapiens
ctattaagcctccaatggcattttttacagaaataggaaaatcaaccttaaaattcatatggaattatttaaaaattcaaatagccaaagcatccttgagtaaagaacaaaactggaggcagcacacaacctgactttaaaacatactgcaaagttataataatcaaacatagtactggcataaaagcaaacacagagatcaatggaataaaacaaaaaggccagaaataaacccagttatttacagtaaatttatttttgacaaagtttcaagaacagacaataggctaaggacactttcttcgataaatgatgttgggaaaattaaatatccaagagcagaagaatgaaaacgggcccttatctgycaccatatacaaaaatcaactcaaaatggattaaaaacataagcctaataactgaaactttgaaactactacacaaaaacgtggaaaagcttaatgacactggtatagacaatgatttttggatataacactaaaaatatgggaaaagaaagcaaaattaagatatgagattacatcaaactaaaaagcttttgcaaagccaaggaaacaacagtgtgaagagataaccaacagaataggagtaaatatttgaatccatatgtctgataagatat

SEQ ID NO: 768653 - DNA, 674 bp, Homo sapiens
cactttcctatgaatgaaaaacaggattaagatcaaggaataaaggccatatttttagaagttggagataaattatttaaaaatatgtgagctgaatatggtgagctaaaatataaggaaaggtacccatctattctctgcttggaatatgtatgtgttttattaygcattatatacttggtaatatattataaaatattaattcaacatctacacttttagctactcagaatgtagtgaaaattagatacatctttgatataatctaaatttttttctgattcttcggtctagctacaatctttctaacaaagaaggttaggaatttaataaatagtcttgagacttatgagaaatgaatgaaataaaaaggagtttagattatgtaaaatgtccttgatcacatgctgatcgatcaagagttagggcagccctgcctgatgaaagacaaagcttttgaagccagaccttggtgtgagttctctgctcctaccacttacagctgtgtggcaagaacaaggcaagtatcctttccaatactggttttcctcatctgcaaaactggaataataattcataccttgcaggatgttttaggaattaaagataacatgtcaagtggccagcatgatgcctggaaccaaggtggatccttaaaaaataataaaggatag

SEQ ID NO: 768654 - DNA, 668 bp, Homo sapiens
ataaatacgtttgtagctatcaagatgaagagcagaactataaaaatggttataaaaatctaattaacattttaacagtaaaagcttgctgccttgataccacaagggaatggtctcagtcagtagataaaatgaagaattcccaagtgggcttaagagtagatgaaatactgctatcaatatttaatgggatgtgtcggattttaccaccatttgaaaggatgcaaataggggttaccatagaaatcaccttgacagaaaactgcacaaaatgcaacataaactatcccttaagcagccttgcagggattgctgtgatktccgactatagtcttctcatgtaattgttcgatagtgggaaaaaatgcctcgttcgtgtgtgtgtgtatgtgtgtgagtgtgcatgtatgcccaacataactaaagaattataagaacagtatggaaattctagaggcaggtatcttcatatttctttatatcataattactctttgataaagctataaatgccaaagttatttacagctttaacaaggtattcatcatagccatgctgctgaaagacaaagcaatctcagagatgttatatttaaatttaatattcttttttacattttagtggcaatattcttttgtgtcatggctctgagataaataaacattgc

SEQ ID NO: 768655 - DNA, 541 bp, Homo sapiens
gatgagcaggaactgagcggggatccacaaagggatttccaagtcccaggcaacagggtgactttctccagcactgctcagcagctgtgaggactaagctctgattttttaaatcttgcccaaatccctatctaaggggtctggggagtcatgtcctacaaaccataaattctcatcagatgggttttatttaatcctatatatcgtgacttactttccaagttgactctggcataacattatgagacaaggaagaaaatcaaaatattttacccyaaaacatgtttctttgtcatatcttgaaatggccctgaaaagctgtcctttgtgggggaaccttcgcatctgtaaagaatctctattaacatagctagatctttttcttccaggccctcccaatcctaaagacattagctaaaagtcttgcaccttttaaagatctggataggaaacatctgtcatctatttcccctaaaggcagccactaaaagacgtcaaaagaaccttggtctccacaatcttttatcttaacctgaacatc

SEQ ID NO: 768656 - DNA, 654 bp, Homo sapiens
ccctctgcctagaatcagcagcacacttataggatcctcaatgcacaagaacctgtcaacacagaacagcttccagagaatacctccccttccctggcacccccagtcaagctctacagcgggaaagcattggtccagccttaccccttcctgcacacacactgaccagcaccaaagtgttacctttgtgtgacaatatgcttcctcggaagttcaaagttctcctctcttgcttgtgggtgtcaaatgcccagaaaaggttcaccacatagccattcacctgccgagaaccaagaagcatgttagatgaacagctagtcatggggcacactaaatacaaaaggcaggattaaaaatacacctctttcctgttctttccttgggtatctcattcttacagtgaacagkttgttttttaaaaattttaaacaggttctacttgtgctaccattagctaatatttagttgtactccacctacttctaaaaacaaacgagaccatatttaatttatagattcaatgaaacaaaaaagtgaatgaagaataaaaggacgagaaccaattaataaaggtagaaagaggaaacactggaaagataattaggccatggaaattaaggataaatccttgcagtcaaggccaagaagacaatc

SEQ ID NO: 768657 - DNA, 593 bp, Homo sapiens
tcaggggctgggtgggaggaagccattggaggcagcaggtgcctcccaaaagatgcaggtcttcattcctctcaaaactcggagccaatacaagattcagcttgtccatttagtagaaaccaagcccaagggcacaaggaggaatgctctgccacctgtgtccctcactcttggatatgaggtcatctggtttgtatctccctgcttccactgtgcctaattatgtctgggcaatttccttgtaacttgttaattctaagaagcatcttctatcccacccagatatgtaataaactcctttccattatctgcttcaatgctgttaataagcattaatgtttttaaagagctttggctattcccccacaaatatcacaccttcctgcaactctgayaaaggaggctttataggccttattttttgcagaaaagacacagagaggctagtgctttcccaaatctgccattcagcaaataagctctactccctcggtgtgaaaggcaccctctgaatccaagggaaaacgattaaggaaaggctttgtaaataaccctctatcagccaaaagggggagtctataggattgcagggc

SEQ ID NO: 768658 - DNA, 575 bp, Homo sapiens
taaataaccctctatcagccaaaagggggagtctataggattgcagggcccagatgtgtttaatgagctggatatttcacaagttgctttctgggtgaagtggcaggggagccgggcacaggccccacggatgactggctaaatgagtatctagagcttcccattaatctgttcttacagtacaaatgggtaaatgagcccctgggttgccaaaggtaaaatatataaaagagaagcctctgacttggttcctgcttctggtctctctccatcaaacgcaytctgcccactacttatccttccaaagatgaactttcatcacatgacatcagtggttcccaactgcttctccgataaagtccacaaagcccttgctgtcctgggcgctgcccactcatctaacttcaccttggcccctgtgcccatgcccattctccataactcaaaccagtttcctggccatgccagcttccccacatgctgctcccttgcctgtgaattgattccctccacctctgcttggttcaccccagacactctccagagctctttgctagggcctgcccaagtttgct

SEQ ID NO: 768659 - DNA, 460 bp, Homo sapiens
aagggcctctttgacccttaccaggacttagaacccaaaccagtattcttatgagtatctggtaggtttgatttttaccttggactttttccaataacacgaaaaggttaggaaacagagagctatccctccctcccctggcggggagcaggaaacaaaggaaggaggatgacaggcaaaaaagaaaaagggaagtaccttstttgacacaggtattgttcttgagctgatagccctgagggcagtcacacatcaggtcccctgatggaagcacactgctggacacatcctctggacacctgcagcttctactgttgttggccttgggcaggcacagcaggctgcatggcctgggcacacaggcattgcttcctggagggaagacaaacagcagcaggtaggttaatacacaccatgagggaggtactgaatacaagaaggagacccactgcaacctcct

SEQ ID NO: 768660 - DNA, 612 bp, Homo sapiens
cagggactttgcaaatgcaaaatgcatcccctcccccaattggatgaagtcatacctactcatccttaagcgtctaactggatggtcattttctcaaggaggcttcccctgctctcctgggctaggccaggtccctttgtatgtggycccatagaattgttcagcttctttcaccttgaaatcatacattctacttgttcaattaatgtctgcttcccctataagacggtaataccatgagaatagaaacctcattcttttcttcatcattattgtcttaaatatctaccacaacatggatgcttaaagaacatttgttggataaacaaataaaagaaactctcacaactaagtgccaccagtaaatctaataagtaggatttcttgccatatgaaaacgtggaacagggcaaggtcaagaacaaagccccgtacttttaatccattttatagaatctttttttgattattgaaagtcaatattattgaggtataatttacataaaaatcacatagattaaaatgaacccatttaaagtgcacattttgatgagttttgaccaacacatgcacccctgcaagcatcgccacagtcaagacggaacatttctg

SEQ ID NO: 768661 - DNA, 770 bp, Homo sapiens
tataggatcccagaatagataagtttggaagtcatgaggatatatacatacatagtaagaaatgccatgatagtacacatagaggagaacgacatccaaggactgggtctaggatagacactccaccagaaggaaagagaaaaagcacagtatcaagtttgactttgcaacagtgcaattattttataataacaccattgttttagagtacaattatactggctcaattaaacatctcaaaaagattctgttgctgtagtttgttttcataccccatcatttgttgaaattatggcaagaaacctattccaacatccagggcctcaggatgtgactgtatttgagataagggctttaaagaggtaactaagataaattgaactcatgagattgggcctcaaaccagtaggaatggcacccttatcagaagagattaggacaccaacacagagaagaaagaccacatgaagagatgagaaaaaaacagccatctgcaagccaaggagagagctcttagaagaaataaccatgctgacaccttgatctgggacttcgagcctccaggagtgagaaaaatacatttctgttgtacaagccacmcaataagtagtagtggcctgagattttctagacttcttaaggggcttacttccagcttcaaatttctattattattactactatttgtaatattaagacaaatgtagacaatgaaattaagccaactgcttaagcgattatgtgttagatataattgttccttaatatta

SEQ ID NO: 768662 - DNA, 596 bp, Homo sapiens
catgcaacaatatgaaactcacaacccagatgttcttcagtaataaaatgaataaataaactgtggtatggtcatatcatacaatactacacaagaagtagaagcactaactactactgcatgcaacaatatgaaactcactatcataatgttgagcaaaagaagccaagcacaatagaatgcatacacattataccacattattccatttttcaaataccagtaagctaatctagattgatggaagttagtatagtggttacattttgtggagaggttggagtgataatgttttggaggagacatagggatacttattattttgactgctcatagtgtcctacagcctgatctgaggggtggtttataatatctttccttyataaaaattcacaaaagctgtgcagtgatgaattatgtattcttcaatatagttttgttcttcaatgaaagtatttgtccaggactggtatggtggctcacacctattaccccaactacttgggaggctgaggtgggaggatagcttgacgccaggagtttgaaactagcctgagcaacatagcaaaaccctgtctctgaaaaaaaaaattaaa

SEQ ID NO: 768663 - DNA, 439 bp, Homo sapiens
gctctaaacagacagcgccagagtctttagaaatccaggcttctacatttctgctatattcctccattcacgactttattttcaagttctctcagttggtctaagaactgctgatgctccagccattacactggcatgcaggtctttagcgggagaaagaggaaaatgacaaaagagtgtactatccagttttctttaagcatactccatggtcttttattcttcttatttgattaatacatattaaccgattaacagattaatctattcttaatacagactaactacaatctgtaccatayttcctgccaaaattctatcctatgttgtctataataattttctatattaaatattcttttaactgtttaaatatctaatcttatcccttcttattcttcatatacatattgatattactctcctaagtataccttct

SEQ ID NO: 768664 - DNA, 567 bp, Homo sapiens
gttatacatgatctctgtgatttcagactgtaagtttttgcataccattctatcaaagatgtcaagcataatgtctaaaacatattatttataacagcattaccacgaagaacaatagttatatattaaagtttactatgtgctagacactgtacagtttagatgtatcattttagttcatcttcttagcaatcctatgaggtcaataccattacccttctcataataaaaayaagtaaaataagcatgaggaagttgacaccattcaataaatactttctaaagaaattgaagtgtgttggtacattaccccagaattgttttaatagactttatttttagagcagttttagattcacagaaaaattgattggaagttacagaaatttctcacatactacctgccccatacatgtatagcctcttccattatcaacatcccccacaagagtaggatatttgctacaactgatgaacctacattgacacatcatcatcaagagtccatagttcacattagggttcactcttgatgttgtatattctgtagatgtaggcaaatatata

SEQ ID NO: 768665 - DNA, 663 bp, Homo sapiens
ctccccttttcccgtccacactctcttcagagccactggtaactgtctttctattttctacttctatgagttcaatgtttttatattccacatacaagtgagatgatacagtatttgtctctctgtgcctggtgaatttaacttaacataatatcctctaggttcagccatgttgttgcaaatggcagaatttcctgtgtttttaaagctgaataatattttattgcatatatacatcacattttaaaaatattcatctaatgatgaacaatattgagctattgagaataatgctgcagtaaatatgggggtgtggatatcttttcagcatattaatttcaagtactttgggwatactccagtagtgggattgctggatcatatgttaatattattattattattgtgggaagctttgtactgttttccagaatggctgtgctaatttacaataccaccatccctgtataagtgttcccttttctctacagtataaagcttcccttttctccacattctcaccaacgtttattttcatgttttttataatagccaatcttacagatgtgaggtgatgtctcatcgtatttttaatttgcatttctctgataattgcagttgagcatttttccatatatctgttggccatttacatgacttcta

SEQ ID NO: 768666 - DNA, 581 bp, Homo sapiens
aagaaaagtaatttcacattaggtgagctggaagccaatagcttaattttaatatgaccaagtggattatttattatttatatctgttttaaaataataaccaaaatattgtctttaaaataggtgatttaaagcatattcatatattgtataaatgattaataatgtataattagcaaacagatctttgaaatttatcgttatacatagacatttycagaaaattagtgtcctatgagttttatgtatttcattatcagtaaggtattctctaatcattgaaaaataagcactgcttttttatttttagcaacctctcagtttcctttttgatattgacacatttgcatttcttttattacatatagaagtgaagataaatatttgggataaatgtggaagggacagaaataatcacatgtcctttaagtaacttacagtactctttatagttggtataaaaaccaaacactcatgaagaaattagagatacttaaaacaaataaggaattattggaaataatattgagggatactgacttcaagcacagtatggattcagtttcaaggaggaagtgaaa

SEQ ID NO: 768667 - DNA, 488 bp, Homo sapiens
tcatttttatccttgcttctcaatgccagccagtcatgaagctccatcagctattctttaatgtttcttatgctcatctctcttaccatacttataatcaccttagcacagggctttttcacacctcatacctaaactcttacaacagaccctaaactactttctctattttagtatctcctccaccaaatcaatcttaactgctactcccttcatcaagccactctcctgatcaaaaaacatcagtggctctccccygatgacaaaataaagtccaaactcctgaccctggcacttgaggccctccatccagatacaaccaatctttatacatttatcttcaccagtcaaacttcacttattgttgcctcctagcctttgctctgcctgtctctccctattttcctcactttcctttcttagtgttaggaaaccaactgagactattccagttaactacgatctacccctcttctaaacacctctaa

SEQ ID NO: 768668 - DNA, 623 bp, Homo sapiens
tcccactcctatttctctgaacagtagaggcagtcctagctgggtaacatgtgtagtctgggcagcatgtttcctgccgcctcacaaaaagagtatttatattaacattccagattcattgggaattatggaaactccatgcattaaagtcaatgcaaaatttctgctattttaatatcttcacttatcaatcaatgcaacttggcacagatttaagagtgtggcaacatttttttcatgccatttgcacattactrttcataatgctacaacgatctcctgtataaaatatgatgaattcacaagtatgattatcaaatttatggtgtgtgctcactacaccacacattatggttttgtagcttctttgccctaaagtaacaaagatttgcatagagtttaaatgagtatggtctatacaaactatagttaaaatattattacagttatatgcttttccatataaactagtaaaaaaatcatatttctttctcctttagggcagtattttattacaattaaatgaaaagcttagctctgctatttctttgaaaacaaaatcaagaccaaaagagatacagttcaaggattagacctgaaaaccatagtgagaaattttaaaa

SEQ ID NO: 768669 - DNA, 519 bp, Homo sapiens
ttttttaaaacgtatttttttcttcagtgttaggactccccatatttatataactaagttgggtgaaaacttaatttttgtattgtattcttcaacctcttttgaatatgagaaaagtctattgcttattaagatgtaactcatcctttgggccagtcactgcttagaatacaccattgcttgattyatcccacatttacatcggggttatttatcaaagatatccaagagtggaagagacaaaacagaccaaggacattatgtctttcaagctcagcagcatttagcagattcctgggcctccaaggcctaacatttagctaagacttcttaaacaatcaggtaaaaagggccaaactagttagcagatgtcttattcagataacgaagagaatactttagtgacaatgtgagaaaaaaaatggcaaaattgatacaaaccctttgaaccatgtttccctttttcctctcagaactcaacctggagtctaacagggacagtatccttattctcgagca

SEQ ID NO: 768670 - DNA, 551 bp, Homo sapiens
tatgtaaccctttataatgcccattatctcaattaaacatcttcagaaatagccgtagtaatgatgaagagaattcaatgatattgtacaaaagaaaacaagctgcactatctttgacttgatttgttttgacttcaattaggaactatgactgttcttgttcttttcagagattgagtttaaagaaagaatagtttttagttatcttaggtcacatttcaagtaaaaactgtgaatgaaggaactttacaaaggcactgttaagtattggagtgaaagcactgtaagaatcagtttactgttagagtcagtttagycattgcccaacttactttccaaccatctgcattaaatatgcttcattaaaacagaaccatttggaaaataagctagcaattaacacagcttttgcacatgcctctaacacaatagatttcaaacttttggtgaaactgactcaactacttccatgctgctgctatgtaggacttggcagcagtccctaggcgtgcttcatccataccatgtcatttcaagatactgctgcatta

SEQ ID NO: 768671 - DNA, 643 bp, Homo sapiens
tgtgtcttctttcacttaatatgttttctaggttcatctgcatcgtagcatgtatctgtacttcatttctttactgctagacaatttatggaatacagactactgcaatttgtttactcattcatccactgatggacatttgggttgtttccaccatttagctattgcaaatagtratgctatgaacatgtgtggtcatatatttgtttgagtacctgctttcaattcttcagggtatatacctaggagtggaattgctgggtcatatgacaagtctatgtgttcctttgaggaattgtcaaactcttttttccacagaggctgaaccatttaacattcccaccagcaacatacgagggttccagtttctccacatcgtcctcaaaaccagttactgcccgtcttttgattctggccatcctagtaggtgagaagtggtatcttactgtggttttcatttgcatctccctgatcactaatgatgttgagtattaatgatgtgtttatcttctcagagtaactgtctattccaagtcctttgcccattttttagttgagcttttttttgctgttgagttgtaagttttcgttcttgtattttggccattggtccattatgagttaatttttatacatggcatga

SEQ ID NO: 768672 - DNA, 643 bp, Homo sapiens
tgtgtcttctttcacttaatatgttttctaggttcatctgcatcgtagcatgtatctgtacttcatttctttactgctagacaatttatggaatacagactactgcaatttgtttactcattcatccactgatggacatttgggttgtttccaccatttagctattgcaaatagtamtgctatgaacatgtgtggtcatatatttgtttgagtacctgctttcaattcttcagggtatatacctaggagtggaattgctgggtcatatgacaagtctatgtgttcctttgaggaattgtcaaactcttttttccacagaggctgaaccatttaacattcccaccagcaacatacgagggttccagtttctccacatcgtcctcaaaaccagttactgcccgtcttttgattctggccatcctagtaggtgagaagtggtatcttactgtggttttcatttgcatctccctgatcactaatgatgttgagtattaatgatgtgtttatcttctcagagtaactgtctattccaagtcctttgcccattttttagttgagcttttttttgctgttgagttgtaagttttcgttcttgtattttggccattggtccattatgagttaatttttatacatggcatga

SEQ ID NO: 768673 - DNA, 634 bp, Homo sapiens
tgctctgacctcgggaattggggaaagatgggtagggctggattgggcaggtccacctacagattccctgatgacagacacaagcaccagcactgaggaagaagaggaacaatccagtgggtggtcgccaagcacccagaggwgtgccgcctaggtgtggagctgagaaacctcctcatccccaagatctctgtatggggaagggagtgagcagcctaaactcctaattcaggtgagcaggtgctccagttgcctgagatctgcctgggcatgcagtgtagagggcccttctgcaccacaatctctgcacatgcggctgaggcgtcttaggttgctcatccaggcaaaaaagtgcttcaaatgcctagagattggcctgggtggagagtggagaggaccctgtgttagcacaatctccactagaagggtcagggaggctcaggctactgattcaggtgagcaggtgctctgactgactgaagacctacttggaacatgaaaatggagtggaaaaggcctcgctaaaccatgatctctgcacaagaaggacgggatagctcaggctgctggttcaggcatgtgggtgcttcaaatgcctggagttatccctgggcattgagcagagagggcctgg

SEQ ID NO: 768674 - DNA, 620 bp, Homo sapiens
ttataccataacaataagcgattaaaatcttcatattcccttatggcttgtagctttaattggctattcctacttctggtagcccaactctctgtcccagctcagtgagagtcatattctttgtccgtttatggaattgtccttttcagatttggtaattgctatagattgaatattcatctcccccaaaatttatacgttgaaatttaatccccaatgtgacagcatttcaaagtggggtctttgggaagtcctggaggctctgcttttatgaatggaattagttcccttataaggggccccagaaatctcccttgctccttgtgccwtatgaggacatggggaaaatggctgtctatgaatcaagaagcaagcccttatcagacatcaaatctgctggtgccttgatgttgaacttcccagcctacacagctttcaaaaataaattgctgttgttataagccactcaatctaatgtattctagttatagcattccaaattgactgagacaataataataagcactaattatttacttctggttctgcgaaaggcaccattgtggacatgcagaatatgcttaatcctcacagctcacctgtagagaacatagggagca

SEQ ID NO: 768675 - DNA, 588 bp, Homo sapiens
acaataacattctaaaattaatgaattttcccagaaaagtgattccaatcatttgaaactttttacttatgtacacgataaatttaatgcaaacataagccattccacaaatacatctaaatattatatcacaggatatagcatgtaatatatttctatagatcagtaggaaattcatgaaaattcaaaccaagtataagttttgtaaatcacactgtacttttccattgcttgtgttagtatttaacttttcaagtattttaatgctgttttccccagccagtctataaattcttcaagaattacttattgtaccacctacagcaaaatcagaaacatgaacaatataagtaatctatagtctgtatggatagaatgaatcaataattctaacarcctatgaaagtgagttcctagaaatatttacatatgtatatatttaattatatatatatttaattatatatatatatatttttttaataaagataggttctcactctgttgtcccagctagtctcaaactcctggatccaggcaatcctcctgcttcagccaaagtgctaagattacaggtgtgagtcacca

SEQ ID NO: 768676 - DNA, 605 bp, Homo sapiens
ggagtattacgtgcattatctttgtcaggacatactgaaatatgtttgcttctaaatataatctatggaagtgcttgttaaataagtgaataaataaataaatattatattgtttgcaaagattctaccattcaaaaagtattctttttctctttcattaagttttaccctatgcaaacaattccctgccagatttgttgatggaagctatcactatgaaaacataaagtcaacttttacatttttaaaaaatcgctgaaaagttgttgaaaaacttgttgcaaagaaatgattgcaagtaatggaaatatggagaagccacaaacagacataatttctccagttcttaagttttattycctgttgactagaccagtatcactgtcttttatctcacttagattcaccaaaaatatctaatcatttcaaatctttcatttttctatccctacctatttcaacacataaaaatgaataacttgatcagggcaaagtatccacaacagtgtgagaattctgctgtttcagtcagaatttttcctctcgaggcaagtctgtctatacttaatctttcctatttctttggtcttctgatcaaagttttt

SEQ ID NO: 768677 - DNA, 649 bp, Homo sapiens
tcaacaaaaacttatgagacatggaaagaaacaaaaaattatgcactatacacaggaaatatagcaattattgcaagtgtttctgagaaagcctagatagtggacttattagaggctttaagtcaactattttaaatatgttcaaagaactggagaaaaacatgcttaagatctaaaggaaagcatgaaaacartgtctcaccaaatcaagaacatcaataaagtaattgaaactataaattataacaaagaaccaaatagaagttctagggttgaaaactacaatgactgaaatcaaaatttcatgagagaggctcaatagcatatttgagcaggcataagaaagagtcagcagtgtgaggaacagcaaaataaaagagaatgaagaaaaatagtcttagagacttgaataccaacatacacataatgggaattccagaaggagagaagagaataaataggaccccaaaaatgtgaagaaataaatggccgaaaatttccctgaattctgaatctgcatatccaaaaagctaaacaaactcccagtatgatacatttaaagagaactacatctacatatgtcataatcaacttgtcaaaagccaaaaagaaagaatcttgaaggcagcaagagtggaacaactcatca

SEQ ID NO: 768678 - DNA, 636 bp, Homo sapiens
gggagattggctagtaacaactctgacgaatataggactagcaggtataagaagcagtcacacctctgggatattgagcacccaaggaagaggctccccacaggctgacatgcagaccctcttgaaaggagtctttatggtaccagcggaacttgctggaaaccagccctctggaacttgccataaatctgccctgtagggttctgggagagctgctcattagcaggtatctccctggaggcacgctgccacaacacccccaagggaggtgctgaaatctgctggcagctgggggttgctggagcccttcactgtgtgccccagatctcaaaagcaaaaccctttcctcccaccatgttgctacatgaccctcttctgacaaagcttcctgaccagctggcaaagggaaaatatgtaaagggattggatccattttccccragcaggcaaaaaggatgaatttggagttgagaggcattaacttgacaactggcccaagcttcaagaaagaagccctgtaagaagagcaaagactcatgatgctcctctccagggcatgtaacagagcattaatggaaacccaggctcccagtggacttacgatgctcctctctagggcatgtaacagagcattaa

SEQ ID NO: 768679 - DNA, 645 bp, Homo sapiens
ttgatggacttgaatccaggagagtcactaaccaaatacagttactatttccttctggggtatttacacagaaagcgatatattacaaatgtaaaatcttagccgtttctttgagaagtgattatacctggcctactgtatgaacatgattctttctaaaaaaaaatttaatcactaattttcctatttaaaattgtgacatgaataattatgttccatattcttgaggggaagcmgtaaattccattgtaatatgtttgtgtaataggagcaatagctatattgtgctgcgaagtctggcattaaggcagtctaaaatattgcctgtacatttttttttaatgatctctttgcagagaaacagaacaaagactaaacctaccgcacattaaaatatatattaaggctatggtattcgaaacagtttagtacttaattcaggtagacatggaaaaatcagtggagctaaatagaaggttgccgattaaaataacagcgaagtaccagtgttagccaaatagcaatgcaaaggtcaaaaggtttgcgttttaacatgctgtcggtgaggctatgcgttaaggcagtttctaccgtaattgaaaaagcacgtcaaagaatgtgtattcaaggatgccacatagtttg

SEQ ID NO: 768680 - DNA, 550 bp, Homo sapiens
aaagaacaaagacctgtggctcttaaagcttgcattctagaagcaaaaggagaacactaaagaaataagagacaaatatataatatcactgcatatatgcaaaatgtcaggagtaaggggactggtattcatggggtgtgggtgccatttgaaatagagtggtcagggagagccrttctggggatgtgagatttaagcagagacctgaaagacacaaagaaaggaaacaggcctatatatggggctggagtgttctaggcagagggcacagcaagtgcaaaggccctgaggccagaccatgcctgttgtgctccaggaacagaggggaggccagcatggctggaggggagtgagcaaggggaggagtaaaggggatcaggccagagagatacggaggggccaggccctgcagagccttgtgggctgttctaaggactttggctgttgtcctcagtatgctgggagatagggaggtgttttgagcaaagaaaagtgccctggtctggcttaggttctaacaggatccgtatggatgaatctggagaatgga

SEQ ID NO: 768681 - DNA, 576 bp, Homo sapiens
ctcactccctaaggagaattgggacagggtccctccagcggagagaagcctggaagacttctatttttttgagactcctggaatattaatttataaagaaaacaacaacaaaatgaagacatccctaaagttgcagtacatttaagatgtaacattgagcaaatcgtgacaacctgcataaaatcacaacataatataaatgtgtaactcacataactcacaagataaccccaggatttattcgatttgtttatatattcgtattttaaacccatggcattctctaggagtggttcagtaagggatgcaggggtagtgttgtttgaggaatgcagtcttttttcgttgttatcattctgtccctgtttgtgtacataacccatttaragataaggtcaaaattctaaaaatactggaatgtcagttttctgaatagctactatatttccctagtatgaaagtcaaagtgttcaaaagggcacacagtgaaaagttctctcccaccctgtcccccagccaccccgtcctcctccccaggggcagccactgttaccaatttcctgtgatcgcttccac

SEQ ID NO: 768682 - DNA, 517 bp, Homo sapiens
tcttgcacatgtatgcctctctcagtaaagattcctgaatcaaaagacgtgtgcttttgtcattttttaaaatttttatttattcatttatttttgagacagggtctcgctctgtcacccaggctggattgcagtggcacgatcatggctcactgtagcttgacttccygggctgaagtgatcctcctgtctcagcctcctgagtagctgggaccacaggtgtgtgcccccatgcctggctaatatttaaattttatttttagtagagacagggtcttcctatgttgcccaggctggtctcaaacgtctgggctcaagcaatcctcccgcctcagcctcccaaaatactggaatcccagtattataggctgtgcttttgtacttttaataggtattgacaaaatgagactgtattgatgttcttgtttgcagacttcatacttaagtgcccctttccctacaccttccccaattctattcaaataaaaatcaacatctttaatctgtgctgtagaat

SEQ ID NO: 768683 - DNA, 517 bp, Homo sapiens
tcttgcacatgtatgcctctctcagtaaagattcctgaatcaaaagacgtgtgcttttgtcattttttaaaatttttatttattcatttatttttgagacagggtctcgctctgtcacccaggctggattgcagtggcacgatcatggctcactgtagcttgacttcccgggctgaagtgatcctcctgtctcagcctcctgagtagctgggaccacaggtgtgtgcccccatgcctggctaatatttaaattttatttttagtagagacagggtcttcctatgttgcccaggctggtctcaaacgtctgggctcaagcaatcctccygcctcagcctcccaaaatactggaatcccagtattataggctgtgcttttgtacttttaataggtattgacaaaatgagactgtattgatgttcttgtttgcagacttcatacttaagtgcccctttccctacaccttccccaattctattcaaataaaaatcaacatctttaatctgtgctgtagaat

SEQ ID NO: 768684 - DNA, 599 bp, Homo sapiens
gtaagacaaatattaaataaaggaaactactctgggcatgagtttataaaactgtcaaaaagaacttaagggtccaaaaatgtgcccacaaaattggtatgtgaggtacttcagcctcacaaatgcttttctgatgctctttttactgtctttagaaaaagatcttaaactcagccaaagtgggagtagaactattctgggattgctaatagccatgaygcttgtagttccataaaaggatgggaaatctggctcttattccagacatcagaggtaaagaattggccttagcattcaattacacagtgtgcctttcaccttataactaaaacattagtgacttgagaaccacaagtatactaaaaagagataaaattaatcacaccagaatgaggaacttaaatacagtcagccctttatatgtatgggttttgcatctgtggattcaaaaatatgccccaaaacattccaaaacattgcatctgtattgaacatgtacaaacttttttcttgtcatattccctaaacaatgcaaataaaacaactatttacatagcagttacattgtattatgcattatatctaatatagagatgata

SEQ ID NO: 768685 - DNA, 586 bp, Homo sapiens
ctatgtcaccttaaacatctttctcttcctcacctcctcacatcttcatatcaatgaattctattaattctgcccatcgtccccaaactctctatctctctccatctctaccacaaacatccatctaagctaccactgtttcatccagatgattgaagtgaaagtctgtctgtgtccacacagtcagttctccacaccacaactataataakgtattgaaaaagcacatctgctcatgttacagtctttgattcaagcttcccattgcttaaaattccttaaaatggccatcaaagcactgcctgatctagctcctgcctatatcctccctcttagcttatatagtactctcccacactctctgtccttcagccatgtttgccttatttttaagctccatcccactgaagattctttgcaaatgttgttccctctactaagaacactgttccctccccttgttactcaggtaactcatagtcatctttaattactagcccaagggccatttatttaatgaaaccttccttcactcccctaccctctgacctagagtttgggactaatttacaaatttcagcttttc

SEQ ID NO: 768686 - DNA, 576 bp, Homo sapiens
tctgttcttcatttaattttattgtttcaaagtggtataaaaattagatcatacattatgtaattttttgagattggcctttctcactcagcatatttctctggaaattcatccaggctgttgcatgtaactttccattgcatgcctgttctattttattgctgaatactattccatggtatggatgtatcacaatgtgtttaaccatgcacccattagtggacactggagatgtttccagtttgcagctattacaaataaagttgctgtgaacattcaacattagcgtacaggtttctatgtgaacacaagttttcacttctctatgagaaaagcctaggaatgcaattgctgggtcatatggtagttgtatgtttaatttatgaaattgaactctttyctagtatgggctgtactattttacattcccagcagcaatgaatgagtaatccagtttctccgcatctttgccagcgattggtctcgtcactaatctttttattttagccattttgatagttggatagtgatacctcattgtagttttaatttgcattttcttaatggttaatgacc

SEQ ID NO: 768687 - DNA, 623 bp, Homo sapiens
acaaatccagataatacattacttttggagaagctgagctgtttcaaaagtgttccttttatttgaagaagaagcagagtagcccaatcaagtaattttatttattttgaacttacacaataatttacgcttttgtttttcagcaagtagtaagggaggtgggttaatctgaaatgaaatgttcttagatcctgytgttcagttggttggagggcattaaagatagttattacttaagatctctgttgttttgaaattcccattttcctctgacctaaattctatgatgtaaaagaatcccagccaccacagatagactgtttttccttatttaaatgctttaaaatttagttttgacggaatggtctcttaatagaattcttgtgattctgtaacatcttagcatctttggttggcacttagaatattctcccacaggcatatttcatttgcctgtatgcttgtattcctcattagcttatttcctctggagagtgagactctgtttctgcatgtaacagttgatcagtaaatgttttgattattactatttagatcctgaacatgaacgggctcctattcctttcctattgctgcccccaatgaatttttacattcaaaaa

SEQ ID NO: 768688 - DNA, 593 bp, Homo sapiens
cttattttcaaggctgtttcatatggagacaacttccttgggcaagtcttccatgcatcagcatggaagaactctgaagattaagccaggggtctggtcaagacctctgctgcctaccagccagcagtcactgaatgtccctgatgctcagtgtcttcctctgtaaaatgtcttctctgtaaagggatgttataaagttcaaatttttaaaaaaagatatagttgaaaacccttggaaactataaaatgacctacaatggtaaggcagtattattgttttatttctctgaaatacttaataatgaaaatggagcctattttcttgataattcttatttgggatattaaaggccaataaagccaatatttgctatgatgaagggccacaaagtgtarctttttactaaacattataccaaatatccactaacttaggtgagatgacctacagttgaagtttgggttacaatccaactgtgtttattgtttctactaggctggaaaattgtctgagatgaagatcaaccttatctttatataatcaaaaaattatatatttgaaaagatactagcatatcatggttactcaactc

SEQ ID NO: 768689 - DNA, 650 bp, Homo sapiens
aaattaaatagccacatatagctagtggtcaccatataaaaaatcagttatagacgatttgaaaggctgtcttttcttccccccccccctttatttaaaaataaatttcagctttaaagagtttgcagaaaggatgttttcgatatttaatttagggcttcattatgattatccaactcaaatatgtgttttatagtttcttttttgtaattagaataaataattttcatacttggtaacataaataaaaatagtagttcagtgaastgcaaactcattcagttcaggcttatgacagatgtctatttagaaatttacgattttatttcagaggtgagtttcctcttaaatgtgaagtatatctctatatcttagggccaattgagtcaactcttttaaaagttgttgcaggattaacaagaaattttgagtatatcaacttagaacatttatattgtgtggtcactctccttttttctctgttgtatattggccatctgaaactgaagttagtaagtcttgaatacttatcagtttcttttattaatttaaactccactctcggtggttggtggggttgacaggaatctgaaactgaagtgaataattgttcatgtaagtcaaggagttgaatcttttctccatagcta

SEQ ID NO: 768690 - DNA, 610 bp, Homo sapiens
gttgttactgagacgtaatgggcagtaagacttactcttttgtttcccaacaaatgacagaattataccagaagtaataaccctttccatctctatagggctatcgagtctccagcccatgttcacatgaggtatccgctctaacagaggagcaggaacagaagggaacctggggcrtacctccctccatcgcatagcagcaggtgcaggcaccgtgtctttgcccagtgcttccatctgctgtcctcaggctattgccctgccccaaagcctaacgtggcagacacgtgctgagcagtttcagctggccttggggattgggattttaggagcaagcttcagaaaccctgtggaagactgggaaagtcggtgaaataataaagatggtcctgacgatgacagagggcacattctgatgtcacacggctttaagcatgtgctaagcactcacatgtgcaccttgaatacctcacaacagccatcttactgatggggaagccaaggactgactagtaaggttaagcaacatgacagtaagattaaattagtagtcctaacctggattcacagacttagtagatcgggatttgagaccagcatttcagtggtt

SEQ ID NO: 768691 - DNA, 610 bp, Homo sapiens
gttgttactgagacgtaatgggcagtaagacttactcttttgtttcccaacaaatgacagaattataccagaagtaataaccctttccatctctatagggctatcgagtctccagcccatgttcacatgaggtatccgctctaacagaggagcaggaacagaagggaacctggggcgtacctccctccatcgcatagcagcaggtgcaggcaccgtgtctttgcccagtgcttccatctgctgtcctcaggctattgccctgccccaaagcctaacgtggcagacacgtgctgagcagtttcagctggccttggggattgggattttaggagcaagcttcagaaaccctgtggaagactgggaaagtcggtgaaataataaagatggtcctgacgatgacagagggcacattctgatgtcacacggctttaagcatgtgctaagcactcacrtgtgcaccttgaatacctcacaacagccatcttactgatggggaagccaaggactgactagtaaggttaagcaacatgacagtaagattaaattagtagtcctaacctggattcacagacttagtagatcgggatttgagaccagcatttcagtggtt

SEQ ID NO: 768692 - DNA, 613 bp, Homo sapiens
ttctgccatattaatgtttttcaagtgaggttttaattgtctcacttatgctgttataacataatttgtagagctatggtttaaattatatagtttttaaaacttttatgttcaagggtacatgtgtagatttgttctgtaggtaaattgcatgtcacaggggtttgtttggtgttcagattttgtaacccaggtaataagcacagtaccagatagttttttgatcctcaccctcctccagtccttcacccttaaggccccagtgtctgttgttcccttctttgtgtccatgtgtactcaatgtttagctcccatttataagtgagaacatgcagtattttattttctgttcctatgttasttcgcttaggttaatggtgtctagctccattcatgctgccgcaaaggatatgatttcattctttattatggttgtatagtatttcatatatggtgtatatgtactacatcttctttatccagtctactgttgatgggcgttgaggttgattccatatctttgttattgtgaatagtgctggaatgaacatatgtgtgcatgggcctttatggtagaatgatttatattcctttgggtgtatacccaataatg

SEQ ID NO: 768693 - DNA, 602 bp, Homo sapiens
ataatagtctcagttctgtattgttttgggccactcttttcatttctcattagtttgatttttattctattcctaattaggaaatatctgattgttttaagtcacaaagagtttatgacatcaacatattttagaaagccatagagagtctttatattaatttcattatgctagtgagctcatttctcctcttgctgaatgttcttttcatatggctgatcttacatatgtaacaacacatactgtacaataaaaattttggaaagatagctttagccaaattgatgatagttgaagattatttgagacaaattgagtccttaaaacaaattataggagaaaccagaatcttctgacaattatataattcaggaaaataaataaaactacaaatatgtaaattgaagattataaaaaattattgtgtcattcagaaatgtgagttgttcttttttccygccactgtcctagagcaataaatattggatatatcccttaaatgactacctacacagatgttcttaattttggtagaatactggactcaccagggaggtttataaaatacaaaaaggcccagcttatttttagaaaaaaaaaaa

SEQ ID NO: 768694 - DNA, 603 bp, Homo sapiens
tgacttttcatttgcatcttataacccagtcactttggtatgcttaatattgtacctcagtgagtatggtgggtaagggtactgactttcctatcagacaggcataagaaggttggaatttaaattctgctacttaataactatgttgtcctgggaagattttttttaacctttcaacttattttcatcttatataaaactggaagtgaaaatattacctaccccaatagggttgtggctggaatgaaatgagcatgtcaatggttagcactttttctagtaaaaaaaaaaatcaacaagtgattgtggcagggttcgctagaaatgttgcgacttgtagaaggccacacattctgaatgaggtttgctaaaacttcaatgttttcccctataagatacttgttgctgagtacaataaatgkctcaaatctgctctctggtgtttactagagccaggctgattttgatgaagtgtacctgtagtccagggtatattttaatggatgcttgggatttaaaaaaaaaaaaaagttaaatgcagagtgctgataagaaatagagacagagaaagtgaaacaactagagatttgggttataaatgga

SEQ ID NO: 768695 - DNA, 640 bp, Homo sapiens
ccaacctgaggaaagaatctgagggttggaagactgctgtccaaattaacccagtaagatgaaaatctttttaaaaaataaatgaagaagaataaacaaaacctccaagaaataggggattgtgtaaagagaccagatctatgactcattgccatccctgaaagacagggagagaaaacaacttagaaaacatgcttgaggatatcatccacaagcttttccccaactttgctagggaggttgacattcaaatttagcaaattcagagaacccttgtattatactatacaagatggcaatcctcaaaacacatagtcatcagattctccaaggtcaacatgaaagaaaaaatgttaaagtcagctaaagagaaggggaaggtcacctaaaaagggaaccccatcaggttaacagcagaactttcatcagaaatcgtataagccagaagacattggggacctatatttagcamcattaaagaaaagatatttcaaataagtttcatatccagccaaagattcgtaagtgaaggacaaataagatcgttttcagtaaagcagatgctaacggaattcattactatcaggcctgccttacaagacatcctgaacggggtggtaaatatggaaaggaaagacca

SEQ ID NO: 768696 - DNA, 633 bp, Homo sapiens
gcctttcatgttgaaaaccctcaacaaattaggcattgaaggaacatatgtcaaaataataagagctgtctataacaaaccaacagcctccatcataatgaacaggcaaaagctgaaagcattccccttaagaaccagaacaagacaaggatgccctctctcacaactcctattcaacatagtactggaagtcctagccagagcaatcaggcaagagaaagaaagacaatgtatccaaataggaagggaagaagtcgaactgtctctgattgyaaacgatatgattctatacatagaaaaccctatagtcttggtccaaaagctccttcagctgataaacaacttcagcaaaatttcaggatacaaaatcaatgtacaaaaatcactagcattcttttagaccaaaaacagacaagctgagagccatatcgaaaactgaatcccattcaaaattgccacacagacacacacacacacacaatatctagaacatgaaggatctctacaatgagaattacaaaacactgctgaaagaaatcagagatatcacaaacaaatgaaaaaaaattccaggcacatggataggaagaatcaatattgttaaaatgaccatactgcccaaagaaatttaca

SEQ ID NO: 768697 - DNA, 601 bp, Homo sapiens
tttcaggattattccaataaattcttgcccttagcatatgtgctaggtaaggagaaagtatggcagacaattatgcagtatataaaaagcatgtgttttgtgagacatactccctactgcactgcaaaacagataatatgagacattaaaaaacttggccactttaaaaatgaaaacttagcagaaaagtgttaatgtggcttggaatctstaagcatcactgatttagaatttcttgccattataagtacatggaatacctgctttagcgggaataatattgatcatgactaaaaaagaattagttatgtatatataactcaactacactgtggcatttgtggagctctgccatctgggaaacaaactgtctctttttacttgtgaagataaaaatcaaaaacagagatcgtgaaacacatggctgccagtctaggttattacattgatcttcatcaaggaaaaaaaaaaaagaggtattactcaggagaagcatggtcaagagaaagtagcctcattatttttcaaaaccaagaaaagtattataagcgatttatatttttatatatatttcccagtccctaaacccttcagcagtaat

SEQ ID NO: 768698 - DNA, 690 bp, Homo sapiens
atttatatctcatctgtttgtctcacttagtagtactctatggtgtggttatacttctgtttgttgaaccactcacctgttgaaggacttctggcttgtttccaggttggggctataacaaacaaatcctctataaacatttgtgtacaggtttttgaatcaacatacgtctttatttctctggaataaatacccagggatgtgatttctgggttgtagtttcatgtttcatttttaaagaaattgtcaaagcatttttcaggtgtctgtatcatttcatattcccaccagcactgtatgagtgatctactttccctgtgtccacaccagtgtctggtgtcattgttcatgctagctgtgctgacaggtgtgtagcgatacctcactgtggacttaacttgaatttccctgatggttaatgatgctgaacttcttttcatatgtggactcaccatctgtttgtcttcttcagtattatagaacttacagtattctgctaaaaacattttatataaaaacagsgttctctttccagtagaagagtgaccttttcacagaggaggaggtggctgcacaaataggtgaaatgcctcaaagccacgcagccataaggtaacagggctgacgtaggaggtcacacaagcccagggcagtgaggccccctcagtcttctcatgtggagagtctcct

SEQ ID NO: 768699 - DNA, 642 bp, Homo sapiens
gttttatttactaagggcttaaatatcctatcataatggtatacacatttgcctaacaaattttgaattagctcagtatctaaatgactctaggtaatgccataagccatgggtttatgtcaacattttcaggttattaaagagccattatgatccagtgtttatgacatgaagtaccaggaagttttgtcaacctgccacagggcccaaaattctcctatttggtattaatctaagatggctttaagagttcaccaaaaatgaaatatcttcagaagagaaagctgaagtcaatatctggggcttgccagtgtcccttccccaaagtaataaaagatttagtgggtagagggggcaagacactccacctgatgttagttaaagacgggtaacwtaatttgattccaattcatcagtttgaatgtaggcacaagtctatatttgaaatgtgaaagtgaggtagcaatatgttacaaagggattggtgggtttgttatgcaaaagcaaatgaatcccttaatgactagagtcagatctactgcttcaatagggagtgattcataagactatcatccagggtaccctgatggaacacaatcaagtctctgaatctgtcattggaattgctgaatctctacaata

SEQ ID NO: 768700 - DNA, 555 bp, Homo sapiens
caagttatttcccaaggttaatttggcagtttctgggaccagtagggccactgtggtgatggcttggaagcatgtgtaaatagtaggttcccccaactgcagctaaggagttgagaaaaatattagagtttttcctgagacacccttcayagtcgtgctacaggaagagcggaagcctggattagagaaaagaatggagagactggctctagtgtctagaaggggatttactttacttccttcaatttatagaatcacccaagggtcctgtgctgtgatggcagtttgagccactggagtcaggggtttgagccctgggacctgttagtctgttggtccagttggaccatctggagacttgttctgaacctggtaaccttcatctctgggagaagttggatctccagtgttccccaccacgggctagacagggttgatgtggcttttttcttatttgctgcttgggcactcctttttaaagtgccctgacttgccacatcaatagcaactagtggatgcaccttggggatcctggacttttcaagcctgcaaagc

SEQ ID NO: 768701 - DNA, 468 bp, Homo sapiens
catgacacacattgagtgccccaacttttacagctacctcatgaagaactccaggctaaatatattagttcttggagcagaagggactaaacatatgcatgtctccctaggtcacagaacaaggatatgatattaagcaagcatgcaaacacttccagaagctacgtgcccttggagcagtgtggaaaaggggcagaaacacagcttcccttttctctgcagaagaacctatggcacacacttttattggctactttatgtcctggcttctaacaaatgtacacaggaaargtaatgggaaaagcaaacaatagcttttttggcagccagagtcagagtttggcacttcacaaatctttccttcagctgcctccagtgataaatccaggtgtacccatttgtcctggaaagagtttgaccatgcatcaactggcacaatttcaataacacccacccaagggattatct

SEQ ID NO: 768702 - DNA, 648 bp, Homo sapiens
atgtcttcacatattcaaaatatactctagtttcttgaacatatggaataaagttataaaactattttagtgtttctgtctaaaattttgtcatgtgtatcatttcttgatcagtttcaatgattgttgtttctcctcattatggaattatgaggcttttactttctagctggtggaaactggcagtatttccatttatctgtgacactgtttcctccaatttttaaaaaatattttttatcttatctcatagttttctcacatccatgcactgaacagcactcaaccaattacttgaggagaacatttttaagatctataaatttttctctatagttctttcttatctggatctctgtcagcaaaaaaactcttccctctctcttggagggaacactattttttaatgctccaatgttgtttgctatacaaatacatgaagagataatatagaacaaaagcaaatacaaggtatttaaaaatatgatgtttcagggagaattgtcsactaataaatcttatctacttttttacatctggccatcattctgggcaaggccattgttgtctcttacacagtttgccctaacagccttgtaaattatctctatttatatatccacgtaaagtaatttgtgcatacagaag

SEQ ID NO: 768703 - DNA, 674 bp, Homo sapiens
tgtgcatgtatatacgcatgtaaatatgtatagatatgcactattttacatataatattatattcattattatttattcatttttattttagaaaacctatggaatgaggttggcataaaatatcacatatctagaatgtctttcatggtagatatagaaggacttgataaaatattattttggtttattagctggaaaattctggctctaaaaattttctggcaatattaaaratctaggctttctttaatacctgcaatctggctaattgtttaagaatgagttttcttagtcaatgctaattgacttcctatcaagtaataatatttgaaaagcctataaatgattattagcactcaacactttttcccaatgattttttagtgtggaaaattggttactaatcattctgatagagctttcaagttgaggttattggtataggctgccctgattaatattctggtattcttgttgtttaaaaatagtttatgctcaaacattcatttttgaatgaggactatgacaatttaattaaagtttaaactctagtagctgttgaagaacgtacataatccaattacattttactcaattaatttaatagcaaaccactttgctataatgagtgttaatcccctgatttttttcttcttagctgtttatcaatgat

SEQ ID NO: 768704 - DNA, 674 bp, Homo sapiens
tgtgcatgtatatacgcatgtaaatatgtatagatatgcactattttacatataatattatattcattattatttattcatttttattttagaaaacctatggaatgaggttggcataaaatatcacatatctagaatgtctttcatggtagatatagaaggacttgataaaatattattttggtttattagctggaaaattctggctctaaaaattttctggcaatattaaagatctaggctttctttartacctgcaatctggctaattgtttaagaatgagttttcttagtcaatgctaattgacttcctatcaagtaataatatttgaaaagcctataaatgattattagcactcaacactttttcccaatgattttttagtgtggaaaattggttactaatcattctgatagagctttcaagttgaggttattggtataggctgccctgattaatattctggtattcttgttgtttaaaaatagtttatgctcaaacattcatttttgaatgaggactatgacaatttaattaaagtttaaactctagtagctgttgaagaacgtacataatccaattacattttactcaattaatttaatagcaaaccactttgctataatgagtgttaatcccctgatttttttcttcttagctgtttatcaatgat

SEQ ID NO: 768705 - DNA, 574 bp, Homo sapiens
gagttgaactgctgagaaagagccccagacctccagcatcgtggtggagcactggagatgctctggagccagcctgcctggggtcaagtccgggttccatctctgactgtgtgacctcggggacgtgccataactgctctgtgcctcggtctcctcatcggtgaagtatttccctcttarggatgttgtgggaatgaagtgggtgaaggaatgcgagtcctgagaaccgtgtctgctttgtgcacgtgctcagacgcatcaacgattctgcttctcattcgcttctggtgccttttaagtgctgccagggctgtccgcactgtgaacggtccttgacggggtgttatcttcagaaagggaagactagcacccggccccccaggcttccaaagcatcatccatgcaaccatgttggctttcaattccttggagttaaggctgacggccatctggttctaacccggcctcctgtcttcctgtcccactgacttcccgttcttcagctgctctaggcttccctgtctgtctccagaccctagcccacctctgttcccttcccaggctcagctcatcc

SEQ ID NO: 768706 - DNA, 621 bp, Homo sapiens
cttgaaaattgtaagaacttttttttttttttttttttgagaaggagtctcactctgtcacccaggctggagtgtagtggggccatctaggctcaccccaacctccgcctcctgggttcaagtgatcctcctgcctcagcctcccaagtggcttggattacaggtgcatgccaccacgactggctaatttttgtatttactttagtagagatggggtttcaccatgttgatcaggctggtctcgaacttcctacctcaggtgacccgctcaccttggcctcccagagtgctgggattacaggcgtgagccaccactcccggtaagaacgtttacattcccagaaccatttttgcctcaggttcctcactatcaccttcttaattccatctaatggcatgtgatactcatccscaaaagacaccaacaaagccaaaatcacagatttctaggttgatggaacaggggccgcctaggagacctgtttccaccagctcttaattcaaatgtgttctgttacctagcatttccctacccatccgttaagattggttacttacttcatcggggagctcaaggatagtaatatttttggaacgaaatgtgatttcaaaagtgatcac

SEQ ID NO: 768707 - DNA, 491 bp, Homo sapiens
acctggccctgatttttttttttttaaacagggagggcatttcgattccaccctgccccagtcatgactgcgaattttaggggctgaagtcatcttggctctcctgccagcctcctcctcagccccctgctaacacagcactccaatgctcactaaagcagccgccaccragtgacatcacccctaagaagatgcccgtcaccctgacagtgctgctccagggtaaggtatagaggggaggtggactttcagagtctcacaggagtcgcctgaattgcatctgccctggagaagagcttgcccatcaaccccagcacaggacaacatgagtgtcacagagatggtgccacattgagtctctccactccccaagggagttccaggttttgttccagggcctgtttgttctttgaaggggtctttagagaccaggaccttcatttttctggggtgattagggaaggggtgagtaagtgaggccccagagcaga

SEQ ID NO: 768708 - DNA, 630 bp, Homo sapiens
cagtttatgagcatttatttacacaagggaaaatgaattttgatactccaggtatgccatctatcccagcctgtctgcatcaaaatgccagattgtcatctccagtttaggccccctctttttctgctgtaagttgtatttcagtctgaggatgaattcagcactttaatcagtgcatttgttttctgctttgtcatccacgtaactggcaagtctggccagggcactgtttgcagatgaaatctgcctgtgtctggaatgcagagtggccagtttctccgayttttcttctctttctcagtcaacacagccactctttccatttgttcccagttctatgcacactataattatgtatatttcctttcatgccacttacacttgtacatttctgcactagggtgaatgcaattattccattttctccttttttcccctttgtggctcaaactgttgccttgttctttctcattgattcctgcactgcaaaacagtcaaatggaaatacaatatgttgcacctgacattcatttaaatcacctgccatgatggtaatacatgctggtgatttcttagtgtactagtcaatggaaaactgtattagtattgcaataatatgcctatatttgc

SEQ ID NO: 768709 - DNA, 563 bp, Homo sapiens
ttttttctcaaactcttgtagaaaattgaagagaggggaacacttcaaaactaattttatgaggacaccattaccttgatagcaaagacaaacaaagacaccaaaagaaagaaaattataggcctatattcccaatgaatacatacgtaaaaattctcaacaaaatgctagcaaaccaaattcaacagcacactgaaagaatcatgtatttattaccaggtggtaacatatattcctgagatgtgatgatagttcaacttacaaaaatcaatcaaggtgatataccataataacaaaatraagggtaataaccacatcatcaactcaatagatgcagaaaatgtatttgacaaaattcaacactttttcatttaacaaacactcaaaaaactaggaatagaaggaaattacctcaacataatgaagactatatataaaaaaccaacagataacataatattcaatggtaaaaaattgaacatgtttcctctgagatctgtaagaaggcaaaaatgcacagtctcaccacttctatttaactgaaatagtacttgaagtcttag

SEQ ID NO: 768710 - DNA, 589 bp, Homo sapiens
tttgctaatgctttgtttttgcatttaggttttggtccctcttaagcctagtttctttctaattcagactgatttttttttaaagatctattctggatctcttctctaaatgactctggcctattgataaacttttcaccccaacaaataatctgtagggtgttgagaagctttaaactgatatatgtagcacctagctgccactttatgaatagttaatacattgtaattattatgttgatattgttactactataaggttatattctatgataaatatgaaaaaggtacttgaaaaaaataactaaggttttctttcaycaatagattttttacttgcaatgaaaattttagaattgtaatttcaccatccaaataacctttgttttaaatcatcagataaatcaggtcactgaggggaaagggtgagttggggttaaacattaacaaatcctttgggaggtcaggcaattgaatgatgtcttttccagcacatttatgcagcccttttttttctgcttacaaaagaagaaaaataatgaatgttgcctttgggttagaaaagtacagcacagggaaagaaccatct

SEQ ID NO: 768711 - DNA, 507 bp, Homo sapiens
tgacatgatcagatgtactcttaaagagggtctttggggcttcgcccatgactctctttggttcttcttccttacagtctgcaacagtgaaagactgtttcctacatgaagtctgtgagagagagaacaggtttgcatgttgccaagttatcaaagaaaatacatttccttcaaaaccarcttatcccctgaagctgctagtaagaaaaatatgagcaaaatataccacagaataaacttaagctgcattttaaaaagactattatcttgtatgaaaataattcataagttaaaatgttaaaaggccagggaccacacctgtaataccagcactttgggaggaaggggtgggcagatcacttgaggtcaggggtttgagaccagtctggctaacatggcaaaaccccatctccacaaaaaataaaaaaaaaattagccaggcatgtgacggtgcacgcctataattccgcactcctacttaggaaggtgaggtgggaggatcgctgg

SEQ ID NO: 768712 - DNA, 644 bp, Homo sapiens
cttgataggaatagcattgaatctgtagattgctctgggcagaatggccattttaacaatattgattcttccagtccgtgagcatggaatgctttttcatttgtttgtgtcctctatgatttatttcagcagtagttygtagttctccttgtagaaatctttcagttccttgattggatgcattcctgttgtgggaagtcagggaccctgaacggagggaccggctggagctgaagaagaggaacataaattatgaagatttcatggacatttatcagttcccaaataatacttttataattttttatgcctatctttactttaatctcttaatcctgttatcttcataagctgaggatgtacgtcacctcaggaccactgtgataattgtgttaactgtacaaattgattgtaaaacatgtgtgttcaaacagtatgaaatcagtgcaccttgaaaaagaacagaataacagcgatttttagggaacaagggaagacaatcataaggtctgacagcctgcacgtgcatgcaaaaagagccatatttttcttcttgcagagagactataaatgaacgtgcaagtagggaagtatcactaaattcttttcctcacaaagactattgatattaatactctgggaaa

SEQ ID NO: 768713 - DNA, 644 bp, Homo sapiens
cttgataggaatagcattgaatctgtagattgctctgggcagaatggccattttaacaatattgattcttccagtccgtgagcatggaatgctttttcatttgtttgtgtcctctatgatttatttcagcagtagttcgtagttctccttgtagaaatctttcagttccttgattggatgcattcctgttgtgggaagtcagggaccctgaacggagggaccggctggagctgaagaagaggaacataaattatgaagatttcatggacatttatcagttcccaaataatacttttataattttttatgcctrtctttactttaatctcttaatcctgttatcttcataagctgaggatgtacgtcacctcaggaccactgtgataattgtgttaactgtacaaattgattgtaaaacatgtgtgttcaaacagtatgaaatcagtgcaccttgaaaaagaacagaataacagcgatttttagggaacaagggaagacaatcataaggtctgacagcctgcacgtgcatgcaaaaagagccatatttttcttcttgcagagagactataaatgaacgtgcaagtagggaagtatcactaaattcttttcctcacaaagactattgatattaatactctgggaaa

SEQ ID NO: 768714 - DNA, 588 bp, Homo sapiens
ttataaaaagttaataatttcttattggttattttaactacaaaattggaaatcaatggatattggtaagtcaatatttaaaacttagttgagaatttggaatattaataaacttccatgttaaacaattatttgttaaatataaattaaatgactgacattttgtaaacaaagagtaataataagtggtaaactatctcttggggaacatttaatgaagtgctgaagatccaaatgtaatttggcagagggttctattctataaggaaccatcaccttggttcataagggggttaaacacattcatgcagatgaaacaacacaactggctgggtcaggccaaaaatagagaataaataaccaatggaacaaataaccaatggaactcctttctatgttgatgtattagtctgttcagattaccattttwaaaaatgccatactgagtagcttaaataacagaaatttatttctcacagttcctgaggttgggaagtcccagatcaagctgacagccaatttgggttctggtgacagctctctttctgacttgcagataactgccttatcactgtgtctgacatgtaa

SEQ ID NO: 768715 - DNA, 667 bp, Homo sapiens
gtaatttctcattggtaaaataaatcttattcctattgatgcaatagtctatcatgatatccatgagtgagtttccacttctcccttccccttagctatagaaagcagaatttccctaaaactttggaaaattctaagaaatgtagaaattaaaaattatggatgctttttctctaataaaagctaatgtttaagcttagtcaaggttaaagtttgytaagatcttactccagaaataatagtaaggagatggttgactataggtataactataccactacgtcttagttcactagacatttgttgtctccacttaggccttagactttgcactagattttaatgttagcataaatagtataacatagaagattttcaaacttcggagaataagtctaccttagttttttagaatgtttaaccattagagttatgccaacaaggattccaggctcagaactacttctttttagctgagtaacttttggcagttatttaggctctctgatcttgagattcccatctttattttaaaaatggtgatagaaactatgaatatgatttttaagaaatttaaatgagatgcactaaggtactaagcacagtatttggcatataagaggtaattttaaaatattagcttagttattattcagaatacatggat

SEQ ID NO: 768716 - DNA, 603 bp, Homo sapiens
gtcaataagaaaaaatcaaaagagaaacttatgcacaaataattgtagttttatatctgatggacaaataggctttggtgatagtatcctagtaactgcagaatttgttgttgtttaagaaaaggagatggggcaggaaaagtgcagagtagaaacagtggtgaacaataaaaactctactattgtcaatttaccaggtcaataaaaatgattatagtaagttctaggcactttgtgaaagtacatatggtactttctaggtaagtgccagctagatgacagtcttactctgattacataaatacatacaatttatggttaaattgggctgtgccgtgacaggtttcagatgtaaaaaytttcattacctttgttaccttcagaagagagcaaaatatctgttatctggaaaatttaaagtgcacagttgcttaggcttaaaggggtcaatcaaaaaaataatatttcaaccaggtaaaattttacttgtattctagttcaactaaactatttaaaataaactcagtacagggatattatgaagatttcttaatatgctaaataatttaaaatttatcatattttagataaaataaaaagtaa

SEQ ID NO: 768717 - DNA, 586 bp, Homo sapiens
aatccatcttaagttaatttttgtatatgctaaaaggtaatggttcagtctcattcttctgcatatagctagcctgctattccagcaccattgattgaaaatgaagttctttccccattgcttgtttttgtcagtttcgtcaaagatcagatggctgtaggtgtgcagctttatttctgggttccctattatgttcccttggtctatgtatctttttttttttatcagtaccaacgtaggccttggttactagagccttatagtatagtttgaattccattaatgcaatgccttcagctttgttttgttttgcttaggattgctttcgtcatttgggctcttttatgtttccacgttaattttagattttttttttaattctgtraaaaatgatgttggtagtttgacaggaatagtgttgaatccatagattgctttgggcagtatggttgttttagtgatattgattcttcaaatccatgaacatggaatgtttgtcgatttgtttgtgtcatctatgatttcttgtcattgtgtgttgtaattctccttatagagatctttcaactcacaggagtcattttta

SEQ ID NO: 768718 - DNA, 620 bp, Homo sapiens
cattaaagtcctatatagccatgaagtgaaaatggcacatttgattttgtgcctagattgttagatacagaatataaaaattatgcttagtactatttttctgcattgggttcaaattaacctctttatgtaaaagttaattttgtgattttttattgtacagtacactttgaaaagattttgaagatatataagctggagaattagaatataatcaacatgaaattcactattcaatgagagctagcatttaaaatagagataacattgtttcaatttctaattgcaaattgcastgttacctctaaatgtgattttatttttctctaacttgcatggctacataacatgctatgatacttttctaatactctaaaaagatataacttaatttttttcctctggagattagatataaactttgaaatactagacttggtgtgtaactttttactcttcatcttcttctggaggtgtagggtattcattgctattgcaatatagaccttgtgaagttactgaaagcctctgagtacttgtggtcaattaggccatgttgtggtgactgatcgatgactttcataggatggtgatattctggaaatttcaactttgcctta

SEQ ID NO: 768719 - DNA, 562 bp, Homo sapiens
gcaaatttaactcaaataagactgcttcaaggcatttaatcatcaaattatcaaaggccaaggacaaaaaaggatcctaaagcagcaagagaaaagaaataaataacatacaatggagctacagtatgtttggcagcagtgtttttagtggaaaccttytagttcaggagagagtggcatgacatatttaaaatggtgaaggaaaaaaaaaaaaacttgtatcctagaatactgtatccaataaaaatatccttcaaatatgaaggtgaaatatttttccagacaaacaaaagctaaggaatttcatcaacacaagaactgtcatacaagaattgctaaaaggagttctttggtctgaaagaaaagaacattaatgagcaataagaaacattataaaggtacaaaactcactggtaatagtaagcacacagaaaagcacagaatcgtataacactgtaattataatgtgtaaactacacatattttgagtaaaaagactacaacatgaaccaatcaaaaatagtaactctaaaaactttcatagacagtacaataagataaa

SEQ ID NO: 768720 - DNA, 625 bp, Homo sapiens
tttattattcaggattctactctgagagtgccccttctttatctacttcctgatcatctacatcactaattgaactcacagattttcagattttcagttgattctatcagttacatccattatagtaattatccattttgttgctctaattatcccagatgtaactattgggagctctatcaaattggtttctgtgttctttcaacatgcaggcgtatcttgaatttcttctgcccagacctagaatctaccacgtctccaagttagtctcatttctttaattggagaatggtatttagaaaccaagatatggaagctagcttagctaattactattaaggcaacactgcttctcagtgagcaacgctaggaaataataagtatatgcrtatatgtaatatacgatgtctgtatatattttattccattctaacaccacagagttcatcctagtattccccatgtccatatttttaactcttttccctaacaatgagaaacctgtatctcatcatgaacaatatgtttacacaaaaattagctttagaattgctaacccataaccttgtgaagaaaaacttactaactgcaacaggatattggtgtatgtttttttctgggtttt

SEQ ID NO: 768721 - DNA, 632 bp, Homo sapiens
tctaaattagtatcatatgaatttatcatttttccacatcctaaattgttaatgatatcactagtagcatgtgtaacattttttatattcctcacttcaactttcacttaaaatacctgaattaattttgtgattctttgtcacaaggtatattttacaaacttttaaaactcaatgttataaaaacaaaagccatcaggaaaaaaaaaacaggatataaaataataccaccctttttttctaaagttcatcaaatagaaactaaagtttaatatttgaaattttgattaaagttaagtaagcacatggtgactttatygcaaatgtttgcaatttaggtttgttaataatgacattctttcgtataatcaaaagaattgaaatgaactgtgtggaaaatttctgagcttttttcttcttcctttgtttttctgaaaatttgactgaggagggctcagtgaggtagaaggcaaagtagagtgcatgtgaaaatgaacttccaaacaggagaaagaattcactgggtccaatgttaagagaagtcaaaggagaaggggaccgagaaccaaccatggggtcctttgctgaatcccattaatcccattaatgtttaatgctactagacattaatg

SEQ ID NO: 768722 - DNA, 646 bp, Homo sapiens
agtgaaaatggtggtataggtcactccaagggcctgtccctcaacagaaacatcaaaaaatcaactaaaactgtcagaacaaactttgttagaattctagaaaacaatcaatgcatatgctaaatcaaaaaaaagcaacttaaaatagtgggaatatataattatgtacatagcagcattagtcacaatagccaaaaggtagaagcaacccaaataacctttgatgaataaatgcataaatgaatgtagtatatgcaaccaatagtgtatgagtcagccatataaaggaagttctgaaacatgttacaacatggataaaccataaagacattatgctaagtgaaataagacagtcacaaattcatagagacgtgaatagagacaaaaagtagaatgctggtttccagggattagcagggaaaaataaatgagaaattactgtttaacggatacagacttttagctttgcaagaygaaaacaattttggagatggatggtggtggtatataactatgggaatgtaattaatgctactggaatatacactttaaagtgattataatggtaaattttatggtgtgtccattttgccatgactaaaaattttttaaaaaacaaaactttgagaagattatgttccaaaat

SEQ ID NO: 768723 - DNA, 640 bp, Homo sapiens
cagattttgacacaagtaattgcattctcatcaagaataacatcaggtatttaaataatgattatttcttcttttgctgaagaatattaatataaaagtaattaccccctcacacattaaaaacaactttatgtattaaatccagtaaacccaaagcaataaattttaattagtttttctcctttgaatgcatcattcattgaatattatgttttactaatattcagcgaggacatttttatttcttcttgcttctttcatacccaacgccataaaaytcatctgcttcattaaaaaaaaaaactggtcctttctctgtattatattattccactcttcacgagtacattatagagatcatttttcttcagtgatacagaaggcataaacagtgcatttcagtttgggttatccccacatcttgggtgatttttgacatttacaccagtaaaatgcacacattttggtatatagttctacagccttcagcaaatggcatagagttgggtatccaccaccacagtgatgatacggaacatttccattattccaaaattccttcatgccacacttttataatcaacctgggagtgttttatgaactcctataccatcccagtcttataggtggtctaatatc

SEQ ID NO: 768724 - DNA, 640 bp, Homo sapiens
cagattttgacacaagtaattgcattctcatcaagaataacatcaggtatttaaataatgattatttcttcttttgctgaagaatattaatataaaagtaattaccccctcacacattaaaaacaactttatgtattaaatccagtaaacccaaagcaataaattttaattagtttttctcctttgaatgcatcattcattgaatattatgttttactaatattcagcgaggacatttttatttcttcttgcttctttcatacccaacgccataaaattcatctgcttcattaaaaaaaaaaactggtcctttctctgtattatattattccactcttcacgagtacattatagagatcatttttcttcagtgatacagaaggcataaacagtgcatttcagtttgggttatccccacatcttgggtgatttttgacatttacacmagtaaaatgcacacattttggtatatagttctacagccttcagcaaatggcatagagttgggtatccaccaccacagtgatgatacggaacatttccattattccaaaattccttcatgccacacttttataatcaacctgggagtgttttatgaactcctataccatcccagtcttataggtggtctaatatc

SEQ ID NO: 768725 - DNA, 427 bp, Homo sapiens
aagattacagattattccaattcaaataataagaagaagtaatattggggtacaataaagaccatttggttcataagtataaatttctagcttgtctctgtggagattaaagctaatttttagatttcagtacatctcaagcaatgtstacattttttcatgaacacatttcaaaaaagagtccttttctcttaagacctactcactttagaattaaaacaaaaaataagtggatcccttccacacatttaatgcttggggcttagtgttacagttataatgatggactacttagttagaaagagtaagtgctggaatgagacaacagatgtgatggggcttcttgccagacagtcttgattaatgtaaatcaagtcaacactagaatgttaatatttatttaaaattagagatatttatattagat

SEQ ID NO: 768726 - DNA, 621 bp, Homo sapiens
gaaactcaaaccacccaatatgacaattgcggtactggaagtatggatcccccaacgcaggggcactgctgactctatgtcaaggtctagggaggcaaacacagaggatgaagcagtgaaggatgagcaaatacacttcaaagagtaccagatatcaaaataacagagtacttggttccatgtagaataaggaagtggtggccgggtgcggtggctcatgcctgtaatcccagcactttggaaggctgaggcgggaggatcacaaggtcaggagttcgagaccggcctgaccaacatggtgaaaccccatctctactaaaaaaatacaaaaattccctgggtgtggtggcaggcccctgtagtcccagctactcaggaggctaaggcaggagaatcgctttaacctgggacgcagaggttgcagtgagccaagatcgcaccaccgcactccagcytaggcaacagagtgagataccttctcaaaaaaaaaaaaaaaaaaaaaaaaaagggaataaggaagtggctgaaagatgattatgttctccacattcagacagatctagtccagtttagagggtgtctcaaatgagagcctattttcacaggaaatgaggacatgaa

SEQ ID NO: 768727 - DNA, 646 bp, Homo sapiens
cttttgtctcccagtttattctgatgtgcatgggtcctaggaccagattttgaaaaaatttacttatagactagcacaaaagtggcagtcaaaagctatggttatgaatttaactttactataaaacctatctttgcatgcatgatttaacttctactttgagaacatgagaatgtatgtcaagtaggttgagcttttagaaagtcagaatataaattaaggagtctatatatttgaagacagtgtaataaagagcaaaattcatgaagctacaaatcatgactagattwctggtcccaactctgccactttatggcctgatgactggggaagctatacccagtaacattgctgaatcttagtttctccatctttaaattggagttaataccatattcactgaatttgtcctatccaactagaatgtaagttccatgaaatcagagacttgccaggttttgctcactgctatatatccagcacctaaaatagtgcctggcatatagtaggtattcaataaataattgtaaaatggatgaactacagtatttgaaatagtctaataaatactgagaataaaaatggcacaataccttccctcagaagctcagagcctgggggagacagaaatatgcacaaatactat

SEQ ID NO: 768728 - DNA, 646 bp, Homo sapiens
cttttgtctcccagtttattctgatgtgcatgggtcctaggaccagattttgaaaaaatttacttatagactagcacaaaagtggcagtcaaaagctatggttatgaatttaactttactataaaacctatctttgcatgcatgatttaacttctactttgagaacatgagaatgtatgtcaagtaggttgagcttttagaaagtcagaatataaattaaggagtctatatatttgaagacagtgtaataaagagcaaaattcatgaagctacaaatcatgactagattactggtcccaactctgccactttatggcctgatgactggggaagctatacccagtaacattgctgaatcttagtttctccatctttaaattggagttaataccatattcactgaatttgtcctatccaactagaatgtaagttccatgaaatcagagayttgccaggttttgctcactgctatatatccagcacctaaaatagtgcctggcatatagtaggtattcaataaataattgtaaaatggatgaactacagtatttgaaatagtctaataaatactgagaataaaaatggcacaataccttccctcagaagctcagagcctgggggagacagaaatatgcacaaatactat

SEQ ID NO: 768729 - DNA, 614 bp, Homo sapiens
cagtgtttgcactctgttgagagataaggtagagctgagaccgtccttgttgaagcagttacctagttccttcattccaacgactgagtgaggtctttattgccatcatcccgtgtgcgcactctgcatccacctatgtaacaaggcaccgctaagcaagcattgtctgtgccataacacagtactagaccactttcttacttctctttgggttgtctttctcctctcctayatccatttcttccttttccaatttcattggttttctctaaacagtgctccattttattttgttggtgtttcagatgggcagtgttatggctacgtgatatttgaagggaaggataagtgttgctttcagtagttattgccaatattgttgttggtcaatggcttgaagataaactttctaataattattatttctttgagtagctcagacttggttttgccaaaactcttggtaatttttgaagatagactgtcttatcaccaaggaaatttatacaaattaagactaactttcttggaattcactattctggcaataaattttggtagactaatacagtacagctagacccagaaatttggaaggctgtagatcagaggtt

SEQ ID NO: 768730 - DNA, 537 bp, Homo sapiens
aaataaatagcattaataaaaatgaaacaatgctaaatgtctgccttaccccaatgtgtcctctgccattagttgcaccatcagaagtgtaaaaacgtcaatgggagaatctatcaataattgtgtaaaaagaaatgctcccactttattagtagtagaagtggaaagaaaaygttgctacgagttcagtattggtagtcagggattctttggcagttatattgtagtcgtaaagggcatggactctgggatcagactgcctaggttcaaattctgactctaccatttattggctaaatgaccttgctatgtcttagttttgttaatcttaaaatgaagataacaatggtatttccacttcataggtttatcaggattaaagaaataatacatgtaaaacaagtggaatatgcctggcactaataactgctcatagatttagctattaatatctccttatgcaagaggctatactcagttcacaactatagattaatggagatataaacaagttcctttcataacaggatttttgct

SEQ ID NO: 768731 - DNA, 537 bp, Homo sapiens
aaataaatagcattaataaaaatgaaacaatgctaaatgtctgccttaccccaatgtgtcctctgccattagttgcaccatcagaagtgtaaaaacgtcaatgggagaatctatcaataattgtgtaaaaagaaatgctcccactttattagtagtagaagtggaaagaaaacgttgctacgagttcagtattggtagtcagggattctttggcagttatattgtagtcgtaaagggcatggactctgggatcagactgcctaggttcaaattctgactctaccatttattggctaaatgaccttgctatgtcttagttttgttaatcttaaaatgaagataacaatggtatttccacttcataggtttatcaggattaaagaaataatacatgtaaaacamgtggaatatgcctggcactaataactgctcatagatttagctattaatatctccttatgcaagaggctatactcagttcacaactatagattaatggagatataaacaagttcctttcataacaggatttttgct

SEQ ID NO: 768732 - DNA, 582 bp, Homo sapiens
acataattggaagtaaaacactcctcagaaaatgtaaaagaacgaaaatcataacagtctctcagaccacggtgcaatcaaattagaactcaagatttagaaactcactgaacaccgcaaactacatggaaactgaacatcctgctccttcatgactactgggtaaataacaaaatgaaagcagaaatgaagatgttctttgaaaccaatgagaatgaagacacaatgtaccagaatctccaggaaacatataaagcaatgtgtagagggaaatttatagcactaaatgcccacaagagaaagcaagaawgatctaaaattggcaccctaacatcaaaattaaaagaactagagaagcaacagcaaacacattcaaaagctagcagaagacatgaaataactaagaacagagtacaactaaaggagaaagagttatggaaaacccttcaaaaaaatcaatgaatccaggagctggttttttggaaaaataaacaaaatagactgctagccagaataataaagaagaaaagagagaagtatcaaatagacgcaataaaatctcatataggggatatcaccacc

SEQ ID NO: 768733 - DNA, 586 bp, Homo sapiens
acattcatcaatgctgggatctttgtccaccattggttattgcatctgcccaaatgctttagctacaacaagttcctagccagggatacctcccctactggcctgaagcctgaaccatcaactcagtaaataagatactggtggggaaaattaaattaaaaaggtgtgcaccacgaaggaatgagataagcttcaagagatccttgccattccaaccccatgggagatagtaaacttgctcatacaacaagttcataactactattaatacaaccagaatctgagaaagccagcacacaaagactctctataaccaagaaactcatacagagtatttacccctaaaagcatcaagaaccaaattaagctgtaataaactacaaacattaaagtcatatccttaagaagaaaaacaactwttttaaaagtcaaaccaacaataaaattaaaaaaaattaaagaagtagtgtactcaaatgagaagaaagcagaaaagtaattctgttaatatgacaaaacaggatgttatagcacccccaagagattgtactaatgcccagcaatggatccaaaacaagaagaaacc

SEQ ID NO: 768734 - DNA, 657 bp, Homo sapiens
tagaacccacacccaagaactccttggggccttcaataacttttaagagtgttaaggtgtcctaagaccaaacattttgcaaattgttgctttatcaggatttttgttatttctagaatgcatttctttctaactgatctacttgggaaaaaaatcgttacctcatggcaattattgctttcctatcaatatggagattatatttctgaaggagactgaccaaaattatattaaaaggtttaaatmaaacaagtggatccatgttataacatgaggaagagagctgccccactagatgtctgacattagataactcagagtcccgcctctccaacaagtctcccttactagagaaacggacagattctgttttgtgggatgggataaggagacaatctgaagtagagtttgacacaatattattctgcccatatgaaattctggtagccagggtgccaggtgtattcataatccagatgctgtcaattttaagcctgaagccccaagaggcgagcagtgtttaatacatcatctcttgttaaatagcagccacacagttggcggtagccagtgaagcattccctgccatgtaggacacgccagttgtctataaataggacctgtgaatgggccaaaaaaaaaaaaaaaaagagagag

SEQ ID NO: 768735 - DNA, 600 bp, Homo sapiens
aaactgaaaagcttctgcacagcaaaggaaacaaaagaatgaagagacaacctgcagaatgggagaaagtatttgcaaactatacatctgataaggggttaatatctaaaatatttgaggaactcaaacaactcaatagtaagaaaacaaataacctgatttaaaaatgggcaaaggatctggatagacatttctcaaaagaagacatacaaatggccaagaggtatatgaaaaagtgctcaacatcactagtaatcagataaattcaaattaaaaccaccacgggatatcatctcatackccttaggatggctattattaaaaagacaaaagataacaatgttgatgaggatgtggagataagtgaacccttgcacactgttggtgggaatgtgaattagtgcagccattatggaaaacaatacggaggtttctaaaaaaagctaaaagtagaactactacatcatccagcaatctcaccactgggtatatacccaaaggaaatgaaatcagtatgtccgagagatatcttccatgttctttgcagaaatattcacaatagccaagatataaaatcaatctaggcagaatacatgggag

SEQ ID NO: 768736 - DNA, 540 bp, Homo sapiens
tgacaagagagtttgtttcttcatgggttctggtgggagaaaataaaatgcttcccctggtcatttgtaactctaaggctattgtcatgtaggtctagggttggaattaatacctcttatttaggtcttgaaaaccccaagcttacacattaacatcaaaaagataacagccagagatacacccccagtcaaacctcattgaagtcacacagatgaagccgtttgaacaaatccctaaactcacaaacaaaattataaaacacctgaggaaaaaaaaaamccgcctgtgattgagtatcagcaaacacaatgatgagcaggattacactaccaaaaactttagataatagagccaaccgagagtataaaataagtttgtataagatacttagaaacaataaggaatccaaacatatgagaaagatcaagattctacggaaaaagaagaggccggtttctttctttaaggaaccaaatagaacttccgaaaatgaaagacattatttccagtgacagcaaaagatcagaggatgggtttaa

SEQ ID NO: 768737 - DNA, 641 bp, Homo sapiens
caaaaactttagataatagagccaaccgagagtataaaataagtttgtataagatacttagaaacaataaggaatccaaacatatgagaaagatcaagattctacggaaaaagaagaggccggtttctttctttaaggaaccaaatagaacttccgaaaatgaaagacattatttccagtgacagcaaaagatcagaggatgggtttaaaagcagattcatctgctttagtgaactggaagatagaagtaaggaaattattcagaaggcagcaaggagagatagcaaatgtataaacggttaagagatacagaaaaatgatgcaaaggtccaaaaaaactctaataggaatgacagaatcagagaataaagagagcaggggtaaaccaataatcaaaaggatactggctggaaattttcagatttgaaaacagacatagttcctcgtattctaaaagcatgagccacagcaagaatcaataaaactgaatcacaggggaaccggygcaggtcaacaaagaaaaggggaaagatcttaaaatcaaccagaaagaaaagacacagtgctatcaaagggataataaactgacagcagacttctcaccaactgcaataaaaatggaatcatatcactaatgcatt

SEQ ID NO: 768738 - DNA, 597 bp, Homo sapiens
ggaagaaattgccaaagtgctttccagtgtggtcatactattttacattaaaaccagcaatatttctgtgcattcttaccagcattttgtgttgtcactattattatcttaactattttgaaagctgtgtagtgacattttattgtttaaatttgcatttcccaaaaggctaataaaattgaacattttgtctgcttatttgtcatctgcatgtcctcttcagtgcaatgtctgtccatgtcctttgctmattttcttttttccttttttattttagagtatttagttggcaaataaagattgtatatattcaatgtatacaacacaatgattttgtttctttttaaaaagaattatttatttttcaatgggtttttggggaacaggtgaagtttggttacatgaataagatatatagtagtgatttcagagatattggtgcatccgtcacccaagcagtgtacactgtacccaatgtgtagtcttttatcttcactcccccacccctttctctgagtcttcaaagtccattgtatcattcttatgcctttgcgtcctcatagcttagctcccaattataagtgagaacataccatg

SEQ ID NO: 768739 - DNA, 586 bp, Homo sapiens
aagtttttggcagaattcagttccttgcagctatatgactgaggtcttaggttattgggtagctgtttgttggggttgggttggcattcaattactagaggctgcccctctgtataggcatttcgcaacatggctgattgttctcttcctctaaaacctgcaggagaatgtctctctgatggttcaccttcttttttttttttttttttttttttttgagaccggagtctcgctctgtcccccaggctggagggcagtggcacatgttggctcactgcaagctccccctttcgggtctcgggttcacgccattctcctgcctcaacctcccgagtagctgggactacagatgcccgccaccacgcccgggtaattttttttttttttttttgkaattttaataaaaatgagggttcacccggttaaccaggatgggctcaatctcctgaccttgtgatccacccgcctcggcctcccaaagggctgggattacaggcgtgagccactgcgcccggcctgatgggtccctttcttttaaatttttttatcagcacaaattatgggatacctatgaaattctattatg

SEQ ID NO: 768740 - DNA, 628 bp, Homo sapiens
ttgttgaggatttttgcattgatgttcatgaaggatactggcctgaagttttcttttgttgttgtatctctgccaggttttggtttcaggatgatgctggcctcatagaatgagttagggaggagtccctccttctcaattttttgaaatagtwtcagtaggaatgctaccagttcctctttgtacatctggtagaattcagctgtgaatccatctggtcctgggatttttttggttggtaggctatttattactgcctcaatttccaaactcattactggtctgttcagggattcagtttcttcctggttcagccttggggaggtgtgtgtgtccaggaatttgtccatttcttctagacttcctagtttatgtgcccagaggtgttcacaatattctctggtggttgtttgtatttctgtggggtcagtgataaatattccccttatcatttctgattgtgtttattcaaatcttctctctttccttctttattcgtctagctagcggtctattttattactttttttcaaagaaaaaaaaaacagcttctggattctttcattttttgaagggtttttcatgtctctgtctccttcagttcagctctgatttttgttatttcttg

SEQ ID NO: 768741 - DNA, 529 bp, Homo sapiens
tcttaactatgccacttaactatgccactttttggggtgaggcagacaaatgtgaaatgggtactaattttacaatctcacttgttcagagtatgtgaacatgtcacatcatctgactaggcttggtgaagtaatgcaggtgcacactgctcatagagccagtgggagttacattgttattattattagagatagtctttagcatttctatgctactttcttcttgcaaattgctgcctattttcctgaaaaagattcacaaatggattgcaatacatagcatatttatgtatttgggcacatttacattgttggtaaatgtacagagaaaaactattgctggttastgagtagctaagataacagttttttcccctcattaaacctgactagtaaagcagagcatactcactttccttcacaacctctagagactgagcatcctaccattctaatcagagataaaatggggaactcagcaaataaatcaatcaataagcaaatattaattgatgacaaacttcaatgc

SEQ ID NO: 768742 - DNA, 572 bp, Homo sapiens
ctaaatggaagttgatgccggttgggtcggggcgacctgcaagcttgcgcacaaacgtgcacataagaacatacatgtaaggaacctgttcatgcagggcgtggagagagtgtgtcccacttatcacttaattttacccgctgaccccacgataaactgtaccaaggggctggccattaaagtcaatccagtcaaaatactcagtgtggagaagacatggaaattcaggatctcttttatgttgtggatggttctgtaattagtaaaatcactttggaaaagtttggtcctatgtcctaaaggtctttccaaaacaaagctttcccacatgtaccargaaatgtgttccagaatgctcacattagcaaacacctggagagagttcaggaaagaggatggccgctacacagaatacaacattgttcagccgcctgggactgctgccgtccagtacttctcccaggggagccagggaagcatcacagtttatgttgcagaatcctcaaaaatgaagggtgtaacagcaccaaatcgctctggagctggtgaggagtggaagccatcatatggag

SEQ ID NO: 768743 - DNA, 538 bp, Homo sapiens
atcacagtttatgttgcagaatcctcaaaaatgaagggtgtaacagcaccaaatcgctctggagctggtgaggagtggaagccatcatatggagattggtggcagtggcttgagctttgagcaagaccctgatccactgccctccccttcccaaaatgcagctggtttttaaagtgaagagaggatcttggaaccagggaatgagaagcaaattggacagttctggcgaatactgaagaagagaactgatggtcactgacatatggacccctcactccacccctctttgctcgtcatagcagctgtttggaatgttcctctctcagaatctaatcagctcaagaggagagacccaaagacgctgatattgcagttctcccagtgaggtggcctggcasgttgacttttagcaaatacttatactttgttttatttttctttcttctgtgctggccagaacctctatctactatattgaaaagaagaggtgctatcaaatgccattttcattttgctgattaaaaaaaattcttctaat

SEQ ID NO: 768744 - DNA, 624 bp, Homo sapiens
ttctacctgccctttggagtgactgtccttgtctatgccagaatctatgtggtgctgaaacaaaggagacggaaaaggatcctcactcgacagaacagtcagtgcaacagtgtcaggcctggcttcccccaacaagtaagtaccctggagggggtagagggaagacaacacccaatctcctgacttcccagcctgtgtccagcagtgcatgattttgccgtttagctaaattggagacacaaatctgacaccgactttggaatctgctaattttggctgcrctttgaaggtaggaaatccaatctcaagaaaacattgatagttgcctctagagcctgccttacctggcaaagtgattggagagctcctgggcttgttctgcttcccttcaaagtctttcattttccccaaatgggcagcagctcagatgtcccacaggttttgaagtttaagtgcagcagttgtaccttgcactgctggtgggttcccagaactgactttttgtctaaaccactcatgccaagaatcactggggtccatcaaagccttttttccttactggatctgtccgtgtgtcaaggaactgacaagctggtgggatagggtgctgataaagcattttat

SEQ ID NO: 768745 - DNA, 544 bp, Homo sapiens
cattttagaatttctgattggtttttctttaaaatatatttctctttagaaaaatttttgtttatatatttaattgttttttaaatttatttatggttttcacttttgtttggtatctccttgaggagcatcataatcaactttttgaattatttttctggtatttcaaagatttttacctcaggttggatcaattgctagagagctagtgtgatatttcaagggtgttatagaactttgttttgtaatattacctgaattatttttctgatttcttctcattagaagactatttcttctaattattcttgaatttatttttttatttaactgtgttttttaaatttatttttcccctttaaggatgtgactttattactyatagtttgttgtagcttaattcagctcttgatgctttcaagggtgaacagtatgtttgagttccttggttatagagagtctttgtataatggcttcttcagatgctgattgtagtagcaatgtgcctagcgtgtgaacaagttcactacctcctatggagctg

SEQ ID NO: 768746 - DNA, 616 bp, Homo sapiens
aaacaggctacacacatcatgacatttattgaaacattgtgaataatatcaaggataaactcaaagcccagtaatagcggaaaggttaaaggaattatcaggaattacttttctaattagtttacagctatttaaaattctattgctgagtgccgataataacatggagaaatacctatggtaccttcagtaacaaatgagagtataaaatagtattattacaattatgaaaagttttaaaaaataattatacaaacaaaaagacttaaaatacatataaatgttaagtgacttactctgagtggtaggctttgggtaattttttctctcttctttctaatttattggatttctacattttctataattggtattcataacatttgtgatgaaggaaatataaatttattttttaaagctgaaaacaggagataaatgacataaaraatatatttagatggtacaagagcctaaatttctcaataataagtcataatattgctctgtcaaacctaacacttcatctccaacaattaatgttttaatgtgttttacgaggcattgccatctattttgatattacctcgaaagatcaatattgatggccattatatgc

SEQ ID NO: 768747 - DNA, 597 bp, Homo sapiens
caggcttatctacctgttccctgatggcagacctattgatcttcttcctcaaacatcagcgttgaggaagaatcaagtgggtggccaccaagcatgcagaggtgtgccaaggcatggagctgggaaacctccttggccccaagttctctgcacagggggagggtgaagagagtgggtgctccagatgtctggagatctgtctgagcatgaaatagggaggaacccayttcatcacaatctgcactagaaggatatagtggcttaggctgctaatccacatgcgaaggtgtccaactctctagagatatacctaagtgtggggcagccaggacctcgcttcaccgcagtctctgtacaggaagagtgggcaggcccaggctgctgatttaggtgagcaaatgcttcaaatgcctgaaaatctgcctgggctggagcagagaggggcctcatatactcagatctctgcacagtaagggtggagcaactcaggctgctgttctatgtgagcaggtgctttgaatgcctggagatctgatctgccttggtgcagaacagaggtggtccccctgtaccatgatttatgcccaggaagggtgg

SEQ ID NO: 768748 - DNA, 597 bp, Homo sapiens
caggcttatctacctgttccctgatggcagacctattgatcttcttcctcaaacatcagcgttgaggaagaatcaagtgggtggccaccaagcatgcagaggtgtgccaaggcatggagctgggaaacctccttggccccaagttctctgcacagggggagggtgaagagagtgggtgctccagatgtctggagatctgtctgagcatgaaatagggaggaacccacttcatcacaatctgcactagaaggatatagyggcttaggctgctaatccacatgcgaaggtgtccaactctctagagatatacctaagtgtggggcagccaggacctcgcttcaccgcagtctctgtacaggaagagtgggcaggcccaggctgctgatttaggtgagcaaatgcttcaaatgcctgaaaatctgcctgggctggagcagagaggggcctcatatactcagatctctgcacagtaagggtggagcaactcaggctgctgttctatgtgagcaggtgctttgaatgcctggagatctgatctgccttggtgcagaacagaggtggtccccctgtaccatgatttatgcccaggaagggtgg

SEQ ID NO: 768749 - DNA, 597 bp, Homo sapiens
caggcttatctacctgttccctgatggcagacctattgatcttcttcctcaaacatcagcgttgaggaagaatcaagtgggtggccaccaagcatgcagaggtgtgccaaggcatggagctgggaaacctccttggccccaagttctctgcacagggggagggtgaagagagtgggtgctccagatgtctggagatctgtctgagcatgaaatagggaggaacccacttcatcacaatctgcactagaaggatatagtggcttaggctgctaatccacatgygaaggtgtccaactctctagagatatacctaagtgtggggcagccaggacctcgcttcaccgcagtctctgtacaggaagagtgggcaggcccaggctgctgatttaggtgagcaaatgcttcaaatgcctgaaaatctgcctgggctggagcagagaggggcctcatatactcagatctctgcacagtaagggtggagcaactcaggctgctgttctatgtgagcaggtgctttgaatgcctggagatctgatctgccttggtgcagaacagaggtggtccccctgtaccatgatttatgcccaggaagggtgg

SEQ ID NO: 768750 - DNA, 627 bp, Homo sapiens
gtgtgcatgcccacagtgcatggacttcaaaacttctcatttgatccttaattaaaaccactttgctgagcaaaaagctgactgattgccttaggagatctacaaaatagacactgttttatttatcagtacctgaatttatacattacacacattataatttayaacaaattatgtcatttctatgaggatgtcttattacctagaaataactactacattaatagaggaaaaaatgtacttgccaagtctttcagaccagggagggctgaggcagagtgctggattctgtcagcttattatccaaaaagacaggtagataaattcccctttcattctgcacttgaacacctagttattatcctccttgtgcttacattgttaagcctttctcctggaagtggcagatagtaactgctttgaaataatgcttaaaggatctctatgtgtctggatggagttaaggcacactctacatgtggaacttccttagagtgggaatgagcgctgagcttgaaacatttctggaaacttcaggaaccttggggaatgaaaaactataaataaatgaaatgagagcattcctgaaacctgtaagcagggtagaactccctggtataaccttga

SEQ ID NO: 768751 - DNA, 645 bp, Homo sapiens
gtttatattcccaccaacagtgtaaaagtgttctcttttcaccacatccatgccaatatctattattttaaattttttaaattatggccattcttgcaggagtaaagtgttatgtcattgtagttttaatttgcattaccctaatagttaatgatgttgagctttttttatgtttgtcggccattcgtatatcttctttagataattttctattcatgtcttttrcccactttttgatgggattatttgttttttttttttcttgctgatttgttggagtgttttgtagattctggatattagtcctttgtcggatgcacagttcgtgaatattttctcccactctgtgggttatctgtttactctgctgattatttcttttgctatacagaagcttttgagtttaattaagttccatctatttatttttgtttttgttgtttgctgttggattcttggtcatgaactctttgcctaacccaatgtctagaagagtttttccaatgttatcatttagaatgtttatggtttcaggccttagatttaagtctttgatccatcttgagtagatttttgtataaggtgagagaggaggattgagtttcattcttctacatgtgctttgccaattatcacagcaccatt

SEQ ID NO: 768752 - DNA, 645 bp, Homo sapiens
gtttatattcccaccaacagtgtaaaagtgttctcttttcaccacatccatgccaatatctattattttaaattttttaaattatggccattcttgcaggagtaaagtgttatgtcattgtagttttaatttgcattaccctaatagttaatgatgttgagctttttttatgtttgtcggccattcgtatatcttctttagataattttctattcatgtcttttacccactttttgatgggattatttgttttttttttttcttgctgatttgttggagtgttttgtagattctggatattagtcctttgtcggatgcacagttcgtgaatattttctcccactctgtgggttatctgtttactctgctgattatttcttttgctatacagaagcttttgagtttaattaagttccayctatttatttttgtttttgttgtttgctgttggattcttggtcatgaactctttgcctaacccaatgtctagaagagtttttccaatgttatcatttagaatgtttatggtttcaggccttagatttaagtctttgatccatcttgagtagatttttgtataaggtgagagaggaggattgagtttcattcttctacatgtgctttgccaattatcacagcaccatt

SEQ ID NO: 768753 - DNA, 551 bp, Homo sapiens
acagtgtgactacacaggtattttagtctcgggccagcgattggagtgcttgctctggagtttggtaggagcctccagagccagaattgagcaggaaatgtagaaagtgccccaggagtaggcactggaattgtaccctccccttgccacaggtstagggcaagagaagaactactgtagccatgatttctcctgggtgagaagaaaccaacttggtgacctggaaactctgtgtgtgtgtgtgtgtgtgtgtgtgtgtgtgtgtgtgtgtgtgtgtgtgtgtgtgtgtggtgtgtgtgtgtgtttgctgggtgccccagcctgctcccctgagatgaaggtacagaggggtcctctctactccatgcccaggcatatctccagacattcagagaacatgctcacctggattaacagtctgatctgtcccatcgttcttacgcagagaccacagtgcagcaaagcactctctgttttatgcccaggcagatctccaggcattcagagcactcactcacccatatcaacagcctgagtgtccaccatttctg

SEQ ID NO: 768754 - DNA, 561 bp, Homo sapiens
taaagaaaaatgataatttgttccttgttttctaattttgttcatatttcctgaaataggctagcgttcactgtgtaaagtaaaagtttaataattaaatccattaatatcagcagtagtggtagtaacaatcttttattaagcatttatttcagacatactttctccttcactcttcaaaatagtattgttagggatggaggcagtgaygtgcacctgtagtctcagcaagtcaggtggcttagacaggagaattgcttgagcccaggagtgagaaactaacccaggcaacctagtgagaccctggctcaaaaaaaaaaaaaattaaaattaaaaaaaatagttttgttggatgattattattctgattttataaatgataaatttataagtagtacagccataattccaagccttcttgatcctctgtgtgatgaaatcaaaggaggacgaaattatgtcatgacaacagaaacgttggtattgacaatagccaatcctcaatagttaggatgacttgggtaaccggctttaggtttttgttcatttgtttgtttcagg

SEQ ID NO: 768755 - DNA, 639 bp, Homo sapiens
ccacaatgagataccatctgacaccagttagaatggcggtcattaaaatgtcaggaaacagcaggtgctggagaggatgtggagaaataggaacacttttacactgttggtgggactgtaaactaactcaaccattgtggaagacaatgtgtggcgattcctcaaagatctagaactggaaataccatttgacccagccatcccgttactgggtatatacccaaaggactataaatcatgctgctgtgaagacacatgtacacgtatgtttattgtggcactattcacaatagcaaagacttggaaccaacccaaatgtccatcagtgatagactggattaaggaaatgtggcacatatacaccatggaatactatgcagacataaaaaaggatgagttcatgtcctttatagggacatggatgaagctggaaaccatcattctcagcaaactatcgcaaggayggaaaaccaaacaccgcatgtttgtgctcataggtgggaattgaacaatgagaacacttggacacagggtggggaacatcacacaccggggcctgtcgtggggtgggaggagaggggagggatagcattaggagatatacctaatgctaaatgacgagttaatgggtgcagcaca

SEQ ID NO: 768756 - DNA, 493 bp, Homo sapiens
tatggagtagtagactaattttgtcttgatattccgggtcaatcaccccagccaacactgtaactcccttcttagcctgttgacttaaaggtggaagtgaccaggtagtaatcttaacttccagtttactggaatcatagtgtytcctggtggcagtgttcctccctctggaactaagacttctaggcaagcagaacgtaatgtaacaggaacaggaagcaaaaattttgctagtgaatcactaggggtgatggtgagaggtgccacttccacttctacttccaccccttgattcctggccccatgaatcctggctatgggagaaacagtgccatatattgaacaccaattcagagcatacatggccttctggagaactttgctccagccctgaaaagtattgttacctagttggcattgtaattgtgacttcaataggccattctacaattctgtcaatccagctgcttcaggatgatggggaacatggtaa

SEQ ID NO: 768757 - DNA, 604 bp, Homo sapiens
gaaagtcacacatacaataatgcatatgctgtctaaataatattacaaaataataattccaagtgggttaaatttacctgatgttcttaatccagggagagtcatttccaacattggaactttttcagtaataaaacctcgcttacatttttcaatatctccatcatttagaatcatgtctataatttcactaacccaagtagtacctgtgacaaaaggcaacattttcaaaataattacccaaattgcacgggagagggagaagaatttattggaaacactaccatcttaacacattctattacaaacttaattcccctttctatgcaccaaatgccaattttaatatactaaaatagatggctgcacaaaatgaatattaactttatttagaatgrtaatgattttatggacaagttgatttccaggaaacaaaaaatgaggtcggacttgaatttgtcaggccacagaactcacctgatttaggataagtggctatcacaatgtcatctggtctgctatggaactgttcaattttttcccagttgcttgcaaaagcacaggtcatgggataaccatggaccaacttcagatcttttcgcag

SEQ ID NO: 768758 - DNA, 594 bp, Homo sapiens
gcattatccccacatcaaaatcaaaatcaagttaatctttctgttgcatagaaaactccagaatgtttccccctctgttctgcagtgtcctgctggtaccaatattgttcactgattttattaccccaacttaatcctgtattgctcagcaaaaaggaaaaaaaaatgcaattaaagtgtgccagcaacaatagggatatcttttcccagaaacaaatactttggaaaatagatttcaatagcttctagattatggcactatcataccattagtcagaaagatcattttcagtgaaacagtgtcacagaccragagagagagagagagagatgaagaaagctggtgactcaggaacaccaaagcaagataactgaaatcttcaatccccaaaagatcacgaaagccccaaatatagctgttaatataaataacatcattgtaggttggtattaagaaggccaggccaattctcagcctaacaaagaggatgttttcaggaaagcataccaattatttttccaaatttccagccctcaaaaagtagcaacaaatttagattatacgatggagatgtaggcaaataactgtctact

SEQ ID NO: 768759 - DNA, 537 bp, Homo sapiens
gtccattgatgggagaatggataaacaaaatgtagtatatacatacaatggaatattattcagcctaagaaagaaattctgacacatgatgcaatgtgtatgaaccttgaaaacatgctgagataagccagccacaaaagaacaaatattctacgattctgtttatgagacacctagagtagtcaaattaaygaaaacagaaagtagaatggtggtttccagggaatcaagggagagacgtagagacaattagtgtttactatgtagagtttcagtttgggaagataaaaaagctctggagatggatagtaatgatggttacacacaatgtgattgtgataaatgccaaagaactataaacttaaaaatggttaaaatggtaaaatatatgttatgtatattttacaaaatataaatttataaacaataattttaaattattttcattatttaaaatgaaaaaagtctacttagaacttggtgtttacatggacacagggaggggaacaacacacacagggcatgttgggcggcagc

SEQ ID NO: 768760 - DNA, 586 bp, Homo sapiens
atcctgaattttgccatccttgaaccttgtatgtccaacagatactttattttccttttgattgaaaatattttaagggaatgggggaaggatctctattgtgcaactgaaaaggctttgactaaagcaagagggaaccagattgcttatagtctttgagtaatgatcatttgtaattgcattgataatgactattctctgagctcctgctaggcacttctcacatatggctccttctcttgcaataacttacaagagatacaatgatcaccattatgtagttgtaattatgaagggtctgttacattgagtgaycggaccaaggtcaaattgcttgtaggaagttaagcagaggtcaggcacagtggttcacacctgtaatcccagcactctgggaggccgaggtgggtggactacctgaggtcaggagttcaagaccagcctggccatcatagtgaaaccccgtctctactaagaattcaaaaattagccaggcgtggagttgtgtgcctgtaatcctagctacttaggaggctgaggcagaagaatcgcttgaactcaggaagtggatgttgcagtgagccaa

SEQ ID NO: 768761 - DNA, 636 bp, Homo sapiens
actgcactccggggctcctacaacccattcaaatatgaacagtaagtcgctcaccaagggctggatcagccactgttcccagctcccacccaaacattcctctacaagtatttcctctcagagaaaaaatcaaaaacacctgtaactggatgaggggaaatgagtgtagatttcagactaaaccaattcagaccctatcatcttcccagactctccaatctggcaaagccctttgagagtatttctgtgaaacccacttttcttaatatttattgtacccagatctcccctttggaataccatcagacctgcagtttctttccttggggaaaggcaggacgcacgcacccagcaatcagacacatcctcagggatgcctggatctcctgaaacctagtgggtcctgaatggagctacctccagatgagaagtrcaggccaaggctctgggaaggaaggggcccggccactcacacatctaagtcagcgggaggcttagacatgaagccaggaagcctggtgcctatctcatcagagagagaaagatcagttaattcaccaacaacacaaccattgatatttaatgtggtgtccaggttcagggccaattgtatatatattttttgagacagggtct

SEQ ID NO: 768762 - DNA, 588 bp, Homo sapiens
cttgtcacccaccacagaagaataaatgaaaccagagtgaagtcaactcagagcccctttgtgactgcatgactgaacttgggcatccagaattcactgactctcacagcccagacaccttgttggtgaccgtggtaagaaagctgagtagagatagaggggctcaggcaggggcaatggggaaggctcccattgggcagaatgctctggatcacatatactgctttcacctagatcctggctccagactgggagagacactttcaagccatgtctgtaagagtgcttggcaaaaagactcgttgatacccttcgtagattgcaagctaaaattagcagcgggcgtgaagctgactccttcagagtgattgcggggcctggaggtgctggcttctgctgattactcatkatgctggctttgcagggaaatggtggcaggtgcttaaaatgtttagtgacccttaaaagacagaatattgtagctaagcccaagtgtatatgtctgttctatcaatcctttactctttccccaaagtgatgagctttgtaatagtcgaagggtaagaggagttgtgaaggtcgggcact

SEQ ID NO: 768763 - DNA, 449 bp, Homo sapiens
tatcttctgaccaatatttctccaattcctcacctctccagcccctggaaagcaccattgtattctctgcttctgagttctgttttttttcagataccacacataaatgagatcatacaacttctgtctttctgtgcctgccttatttcattgagtgtaatgttctctatgttcatccatgttgttgcaaatgacargatttccttctttttgaaggctgaatagtattccattgtgtacacatgccacattttccattcacccactgacggacacttgggttgattccttatcttagctgttgtgaataatgttgcaatgaacatgaaaagtacatatctctttcacatattcatttcatttcctttggatgtgtatcattagtgggattgccaggtcatatcgtagttctaattttaattttttgagaaacctccatactgctttcc

SEQ ID NO: 768764 - DNA, 646 bp, Homo sapiens
tcctttcacattcctgcaattgcttttggtcccagcaacgcaagcttccagctttgcaaaagtgcctatgctccacccttggagggtagatccacacctaccttcagcctcctcccacccagacagactccctgatttcctaagccccagtcaagatgaaatagcatgttttctgtgagagaaaggtcttttccatcatcattcatgtggctcttgctgaagtccatgaaccagcccagggggcccacttgccatgtctactagtaaacacactcccaacagagagatgcaggcaaggagacatgatgaccatcatagtgacattggcaggagccaacaactacaccatggcaatcacygggcaggccgctgagctgggatcccttggacgtggcctgtttcctctcaacaatgctaggagggtgctggcgttggctgcaccaactcggctaggcacagctccattctctcttctcctgtgtttctcattatgaggggtgcactcacaagagttggtggcagaataacaacacccatgttttagtagccacgttgttgctgatctgccgaccccccgagcacaaggagttgggcctgcaattgctctccattctctccagatcctgccccacttctttccaatctc

SEQ ID NO: 768765 - DNA, 646 bp, Homo sapiens
tcctttcacattcctgcaattgcttttggtcccagcaacgcaagcttccagctttgcaaaagtgcctatgctccacccttggagggtagatccacacctaccttcagcctcctcccacccagacagactccctgatttcctaagccccagtcaagatgaaatagcatgttttctgtgagagaaaggtcttttccatcatcattcatgtggctcttgctgaagtccatgaaccagcccagggggcccacttgccatgtctactagtaaacacactcccaacagagagatgcaggcaaggagacatgatgaccatcatagtgacattggcaggagccaacaactacaccatggcaatcactgggcaggccgctgarctgggatcccttggacgtggcctgtttcctctcaacaatgctaggagggtgctggcgttggctgcaccaactcggctaggcacagctccattctctcttctcctgtgtttctcattatgaggggtgcactcacaagagttggtggcagaataacaacacccatgttttagtagccacgttgttgctgatctgccgaccccccgagcacaaggagttgggcctgcaattgctctccattctctccagatcctgccccacttctttccaatctc

SEQ ID NO: 768766 - DNA, 664 bp, Homo sapiens
ttagtctttcaactttgttcttgtgtttaaaattgtcttagctattctaggtcttacatttacatatagatattagaacagtttttctcaatttctgcaaagcagactgctgggtttctgattgagattgaagtgaatctatagaacaattagggggaaactgacagtgttytgtaatttccagtgtgtagaatttctgtgatattttatgttattgtaaatggtattgttttttaattgttatttctgatcatttattgctaacatatagaaatacacctgatatttgtatattgttttatatcctgcagcttactaatctctttctgtaattctagtagctttgtttgtattatacattccatcagattttccacctaggtgttcatgttgtatgtgaataaagagtattatttctttctttctatactgaatgactttagttttattccttgtctgataggactggtcagaacttctagtacaatgatgaataaaagtgataagaacagacatcttgtctttttcctgattttagggcaaagcagttactctttcaccataaataaatataatgtaagctatagtttttgtaaataacctttattaggttgagaaaattcacttctatttctagcttacagatagttttcattaagaatga

SEQ ID NO: 768767 - DNA, 482 bp, Homo sapiens
gatttcatttgtagacattttggtcccttaatgtcagcaagcgttgcacaatgaattttgacatgcatgcattcagagatgtatagaaattttagttacttacgtatatttttaaaagcctggtaccagatgcctgcttttctccctgttttcttttttttttttttgagatggagacttgctctgttgccaggctggagtgcagtggcacgatcttggctcactgaaacctcygcctcccaggttcaagtgattctcctgcctcagcctcccgagtagctgggactacaggtgcgcaccaccacgaccggctaatttttgtatttttagtagagacagggtttcaccatgttggccaggatggtcttgatctcttgaccacgtgatctgcccgactcagcctcccaaagtgctgggattacaggtgtgagccacctggcctggcccagatacctgctttatataagagggaagtataatta

SEQ ID NO: 768768 - DNA, 522 bp, Homo sapiens
gcctggttgatctgagcctgggtagagcattggcccctgggttctctgacccttgttccccttgtgcaggtggaagccacccgtcccttcagaccccccagggcagaggactcaggctccttctagagcagccttcgttcactaccaaggtcccgcccacggagatgagcagagcccaggttcagctgggcaccttcaggtttagagacctcagctgctggggctgaaaacagaggccactggaacaagcctggaaagaaccaggactgagcttgtgatggcccagaggccttcagctccctctgctccttttcttggagcagctgaggctctgaggggtgggcagtacagacccacggtcgtygtgctcagccccaacttccctgcagatgcctttccctgacatacaaagctccaaccccagccaggcttttcatgcccttgtgtgtcccgttggcctgcagaccacagcagggctcggccccagtttccggaccatctgcccacatggccaaggctggt

SEQ ID NO: 768769 - DNA, 494 bp, Homo sapiens
aacagaggccactggaacaagcctggaaagaaccaggactgagcttgtgatggcccagaggccttcagctccctctgctccttttcttggagcagctgaggctctgaggggtgggcagtacagacccacggtcgttgtgctcagccccaacttccctgcagatgcctttccctgacatacaaagctccaaccccagccaggcttttcatgcccttgtgtgtcccgttggcctgcagaccacagcagggctcggccccagtttccggaccatctgcccacatggccaaggctggtcctggatcctgaaacccacagctgccagctcccaccytgtgtccaagccgcccttgcagcacttgagcccagccagccttccctggccctgtctgctccctggaagcactggccaccctgaatgccctgccagggcccagctgtccttctgcccagcagccccctttcctctgtggtgttaggaccccatctttctttgg

SEQ ID NO: 768770 - DNA, 585 bp, Homo sapiens
aatagcagccaccattcctcaagtacctactgtgtgctggggcgctgggcttagtgatttacttgggatatctcatttaatccctacaacatccactgaggggaggggctgttatcgtcgtttttatggatgaggaaattgaggctcagagaattaaagtgccatgtccaaagacacacaggcagattgtggtgaacagaaaatttatctcaggcctgcccaacaccacggtcctcaccactgctctctgctacctccaatttacaacracagctcatagcaagtgggagtcccacacttttattaaatgttaaaaacattcctcatggtcaaatagattatgacaaatgatggttcctgcaggaggctcgccttcttctctggggttaactcggagtgggctgtaaggcatctgagctgattgagatcagggtgcacctgtccatatgtatgaggaagaaggtagtgtcttggggtctggcagtaaaaggagaaacagctggggctggggagattctggcctggggattggggaggtgggtctgagctgtggctgtgtctccaactcactgagtgacagtcaac

SEQ ID NO: 768771 - DNA, 585 bp, Homo sapiens
aatagcagccaccattcctcaagtacctactgtgtgctggggcgctgggcttagtgatttacttgggatatctcatttaatccctacaacatccactgaggggaggggctgttatcgtcgtttttatggatgaggaaattgaggctcagagaattaaagtgccatgtccaaagacacacaggcagattgtggtgaacagaaaatttatctcaggcctgcccaacaccacggtcctcaccactgctctctgctacctccaatttacaacaacagctcatagcaagtgggagtcccacacttttattaaatgttaaaaacattcctcatggtcaaatagattatgacaaatgatggttcctgcaggaggctcgccttcttctctggggttaactcggartgggctgtaaggcatctgagctgattgagatcagggtgcacctgtccatatgtatgaggaagaaggtagtgtcttggggtctggcagtaaaaggagaaacagctggggctggggagattctggcctggggattggggaggtgggtctgagctgtggctgtgtctccaactcactgagtgacagtcaac

SEQ ID NO: 768772 - DNA, 509 bp, Homo sapiens
gaggagcacaggaggtgaggacagccttggggtaaaggacagccgccgaggaagatgagctgcttccagggaacagactctgagagaagaggtgtacacattttaaccaaaagaagaaaaccaggaaattggagttgtctgratgaacaatcattcctaaggaacgctgtgaggtgaaacctgattcctgtttcagactcccccaacaccttcctgtctctgccctagtctgcaaagattcttaactatcattccttcattccactcattcatttagctactgattatcctaacagtggcgcaacattgtagtatgtgcaacataaaagacacattacagtagggcagaaaacataagacattgtcctatgaaaagtttcgtaagacgataagcagctaacattaattaatcaaacaaggagtattgtattaattcagaggcaagagcactggaatctgggatgggcttgggaacaggtgagctcacagaaggactcttgcctgtggct

SEQ ID NO: 768773 - DNA, 667 bp, Homo sapiens
cattttccttcagttcaggtttgattttggttatttcttgtcttctgctagttttggggctgattttttcttgcttctctaatttttttcagttgtgatgttaggttgttaacttgagatctttctgactgttttacatgggcatttagtgcaatgaatttccctttgaacactgccttacttgtctcagagattctggaatatgatatctttgttctctttagtttcaaaagcttattgatttctgcctaagtttcattatttacccaaaagtagttcagaagcatgttgtttaatttccatgtaattcatggttttgaattattttcttagtcttgacttctgtttttattgcactgtggtctgagagtgtgtttggtatgatttggatttttttgcatttgctaaggattgttctgtgtccaattacatggtcgattttaggktatgtgccatgtagcaaagagaagaatgtatactctgttgttttggtgtggagagttctgtagaagtgtatcagatccatttggtccaatgtttagttcaggtcctgaatatctctgttaattttctgcctcaaagttatgtctaatattgtcagtggagtgttgaaatctcccactactattgtatgggagtctgtgtcttgtcgtaggtctctaagaac

SEQ ID NO: 768774 - DNA, 577 bp, Homo sapiens
cagtgtaaaaagcgttcttatttctccatagcatcacgagcatcgattgtttcctgactttttaataatcgccattctgactggcatgagatggtatcacacggtggttttgatttgcatttctctaatgatcagtgatgttgagcttttttcatatgtttattggccacataaatgtcttcttttgagaagtgtctgttcatatcctgtgaccacttttggatggggttcttcattttttttcttgtatatttgtttaagttccttgtaaattctgcatattagacctttgtcagatgagtasatcacaaaaatctcctcccattctgtaggttgcctgttcactctgacgatagtttcttttgctgtgcagaagctctttagtttaattagatcccatttgtcaagtttggcttttgttgcaattgcttttggtgtttttgtcatgaagtctttgcctatgtctaagttctgaatggtattgcctaggttttcttctagggtttttatggtttggggttttacatttaagtgtttaatccatcttcagttaatttttgtgtaagatgtaaggaag

SEQ ID NO: 768775 - DNA, 657 bp, Homo sapiens
tcagatttttaaaaataattgacactataataatcacctttgagcatataacactgtaaagatatgagtatattttttagaattaatgcctggagaggaattatgcatttcatataagactttttataggtatcatcatatcatcaaattttcatcttggaaggtgctatgaatttataattctatccagtagtatatatgagagcttgttttgttataatagcttaaaacctgwttaaacataattcttttcagaaatacagtagctatatttgcttagtacaagagtgatatatgctcattgaaaccattcagaagatgaagtatgaaaagaacgaaaaaccacactttcagatttttttaatgagtacatagatacatatatacttttaaatggaacagaggcaaagagaaaggtgaggatattgaagacaacaatggagttaaaaagaggggcttctttaaagtttgagatcttggaggatagcaaaacaataagtagaagacatatatattcctttaaagagagcaagggtagatagcattttaattattactaagtcagggaccacgactaaggcccacggagattcaagaaaggaggaaaactctcagggaatagattgaaatgactcccaagtggaaaagtggatccat

SEQ ID NO: 768776 - DNA, 575 bp, Homo sapiens
ctgatctgggagcataattcatctgcaaaatctctttccccatattgtgtaacattatcataggagtggtatctcatcatattcacaggctgctcttatactcaagagaagttcatataagaccagaggtcattagaggtcatcttagaattctgcctgcctcagcctgccctctggccctcagtgatccagtatttcccacgtataaaatacattcaatccatcccacagtctccaaatttctttgtattatggcatcagctcaattccaaaagctcatctgaatttcatcatctgaatcatgaacggatgagattcctgggtatgatcctatccagtaaaactcctagggcaaaatccctctccaamtgtggaccatcagcactaaagtgacaagctatcttcccccaacaccaccacatacaatgatgggacgggcataggataacatctataaacattctattttatacaggagaaaacagaaggcagaaaagaggagttccaaagcagtttggatatccagctgacgtctactaccagtctgtccaagggaatttaggctttccctgtca

SEQ ID NO: 768777 - DNA, 616 bp, Homo sapiens
gagatacatccatgttgttgcatatgtcaatacattataccgttttaatcaatgagtggcattatatgtatataccaagatttatttaatcatttacctgttgaaggacatttgggttctgtttaatttttgactattacaaactactatgaatatttctgtatgtatttgtaaggacatatgcttttccttttcatgagtgaatacctaggtgatgaatgacctaggagataaacataataggaatatgtttaattttstaagaaacctccaaatatttttcaaagtggtggtatcattttacactcccaccaccactatgtgagggttcctgttcccttacatccttgtcaagccttaatatcgtttgtgtttataaattttcacattctaactgtgtaatggtagcacattggggttttagtttgcatttccttaataacaaatgaggtttgtcttttttatgtgcttgtcagtaacatattttcatttgtgaagtgtgcaaacaaacgtgaacctaaaacagccagtccttcaagatggattttgagtggctaacaggacctaaatttaaaatacagccaagcggccatttgctgactagagatcacacagg

SEQ ID NO: 768778 - DNA, 526 bp, Homo sapiens
aggtccctgaaactattacacaggcttaatcaccacagtatattatacaggaaaaaaaagtctcttaggagaatataggtaacttggattgattatatagttagccagtcatgttcccctttatattcctcaataggaatgtagtaaactttgctctatggtagcaagagaaaatttaattagccttagtgatcatctggaataaagaacccaatgggttctaagattatggggactgcatcatgactgccattcagcagtgtgaactaagaaggaaatcaaggaccatgaagtgggatgcagcctcaaaaataaggaaactttaaaaaaagaataaaagttcaaatagcagctcaaggcagtggtagaaawcaagaaattgtctgggacagtgataaaagaatcccttatctcttgaagctgcaaaactgagatacctgaaaacccaaatcaaacattgatctgttgagcctgctgggttgccaagtacaatgtcagttacatttcaagccctgctaggcattct

SEQ ID NO: 768779 - DNA, 591 bp, Homo sapiens
tttattgttattgagtgggtaatatatccaaggaaccaaccaatttacatatttaaagaatttccatgaggtagtttattgctgttagctttattttacaaggcaaaataactctttcttactatgatgactgacaaagtagtagtattttattgtatttgtatagatatacttactgtatgatgataatcctaatgtsaaatcataccttcaaataactaatcaaagtttactatgttaatatatgttagttttattatgaaaattgcaaacatatacaacactagtttgagtagtaatttcacatgtctgagcttcaggaattttcaactcagaggtaatctggtttaatttatgtgactcaccaaagtatttactttttattactttactgagataaaattgatggaaattactaaacagccaaaacaaaaaaacaaaaacagaaacaatcaaagatcaaaatagccttaaaaaaagggaaatggaaagttattgttgaaacaatgttatatctaaaacatccagctttcatcaaaatgtatgaggcctgcaaaaaatattagaaagtgtgacttacaaaagtcacag

SEQ ID NO: 768780 - DNA, 428 bp, Homo sapiens
atccaaattcttcgccatgtcattttctatataaacccaattaattccaaataatttttctcacacctgctttgaagaatatttctataggaactaccatactgtaaagataatcaaactactttgagaaaataaatgattcttcccacaaacctgctgttccacagactttcctatttaatgaaattggccactgcattgtttctctttctccactcaaaaattatttaatcattcttgtttyctgtcactcagtccattcaacaagttctgtcaactttgtctttaatattttgctattttttcatatgcatctgcccacaataagatgcaaatttcatgtgatcagggacttgacgtgttttgttcactgctcactctctatatcgagaatgctgcttgcaacaaaacagtaaacaaataaagtg

SEQ ID NO: 768781 - DNA, 602 bp, Homo sapiens
aatataaaaaattcaattgtttgcttatatagcagcatgaataattagagttttaagttaaaaacacaataatttttttttttttttgagacggagtctcactctatcgccaaggctggagtgcagtggtatgatctcggctcactgcaaactccgcctcccgggttcacaccattttcctgcctcagcctcccgagtagctgggactacaggttcytgccactgcatccggctaattttttgtattttattttattttttttagtagagatggggtttcaccgtgttagccaagatggtctcgatctcctaacctcgtgatccacccgccttggcctcccaaagcgctgggaaaaacacaaaacctttcatattaaaacaaaaagttgaaatatttagtaatctaataaaatatgtatcagatctatatgagaaaaactatgacctctgataaaagaaatcaaaaggagctaaatatatattttatattcacagtaagaaaattaaacattgttaagtatcatttctctccatctgtttttcatgtatagattaaatatcatgtcaattaaaatatctgctagatattgtgtggatatcga

SEQ ID NO: 768782 - DNA, 602 bp, Homo sapiens
aatataaaaaattcaattgtttgcttatatagcagcatgaataattagagttttaagttaaaaacacaataatttttttttttttttgagacggagtctcactctatcgccaaggctggagtgcagtggtatgatctcggctcactgcaaactccgcctcccgggttcacaccattttcctgcctcagcctcccgagtagctgggactacaggttcctgccactgcatccggctaattttttgtattttattttattttttttagtagagatggggtttcacygtgttagccaagatggtctcgatctcctaacctcgtgatccacccgccttggcctcccaaagcgctgggaaaaacacaaaacctttcatattaaaacaaaaagttgaaatatttagtaatctaataaaatatgtatcagatctatatgagaaaaactatgacctctgataaaagaaatcaaaaggagctaaatatatattttatattcacagtaagaaaattaaacattgttaagtatcatttctctccatctgtttttcatgtatagattaaatatcatgtcaattaaaatatctgctagatattgtgtggatatcga

SEQ ID NO: 768783 - DNA, 602 bp, Homo sapiens
aatataaaaaattcaattgtttgcttatatagcagcatgaataattagagttttaagttaaaaacacaataatttttttttttttttgagacggagtctcactctatcgccaaggctggagtgcagtggtatgatctcggctcactgcaaactccgcctcccgggttcacaccattttcctgcctcagcctcccgagtagctgggactacaggttcctgccactgcatccggctaattttttgtattttattttattttttttagtagagatggggtttcaccgtgttagccaagatggtctcgatctcctaacctcgtgatccacccgcyttggcctcccaaagcgctgggaaaaacacaaaacctttcatattaaaacaaaaagttgaaatatttagtaatctaataaaatatgtatcagatctatatgagaaaaactatgacctctgataaaagaaatcaaaaggagctaaatatatattttatattcacagtaagaaaattaaacattgttaagtatcatttctctccatctgtttttcatgtatagattaaatatcatgtcaattaaaatatctgctagatattgtgtggatatcga

SEQ ID NO: 768784 - DNA, 607 bp, Homo sapiens
ttgatggctttcaatcaccatatttcgttcctctaaaactttcactaggtcatttaccttgagaaagatatttttgtcgtattgttttattttgacagtcacctgggtttccttgaatctgataaactgtgagaaagactctctccactcttaaatygctccgtgtgtgatgtaatatagttacttttgttcagaaattcctaaattgctaatatatatgtatgagtgtgtgtgtgtgtgtgtgtgtgtgtgtaaaacaagcgcagatcacctgaaatacatttaactaaattgatgtaaacatcaataatataattttgttcactttaaaatcattatttattggaaaaatttagtatataattgtttttaattcaatatacctcttaacctgaacgttattgttggtcacctctagactgcacctacaagaaatgctcaaattagttctaaacatgagaacaaacatatgaaacttaccaccaggaaacattagtgcaaagctcgcagatcctataattacacaattgaaaccccaaggcaactagctaacaacactatgacactagcaaaacctcacatatcaatatttaatctttattgtaaa

SEQ ID NO: 768785 - DNA, 633 bp, Homo sapiens
gcaattgtcctgcctcagccttccgagtagctgggattacaggtgtgtgccaccatgccaggctaatttttatatttttagtagagacagggtttcaccatgttgatcaggctagcctcgaactcctgacctcgtgatccgcccaccttggcctcccgaagtgytgggattacaggcgtgagccaccgcacccggcctcttcaatttatttttatgagaccttgcatgctgattgtagaactttttagaaaatatagataagcaaaagtagaaaataaaaattattcctcatcccattactcagcaccaaccagtattaatattttggagtatctccttcttctcattctctccctgtgagatgtagtcctctattataaacatacaggttatagaaaatgtacaaaatacattaaacatctttttttaaactccttttcttaattgaaatttatgagaaaaacattgttatgttgttactatttcaactgctatgtttattcccttgcctggatgtgccagaatttattcaacagtccctatgtttgaaaatttatgttttctattaaaactaacactgctgtaatgttaccctcttacagaggctttccctaatgttcctaactaaaatgg

SEQ ID NO: 768786 - DNA, 541 bp, Homo sapiens
acaaattcattacagaaaatacttctgggttgaagggtattaatagtgttaatattaattgtgttcatattaaccatgttaatgttttgatgtatgctaccaaattagtggacaaaaaygtttttacaatttactctccccaaaagaggaaggattcgtttctttgcatcctcaccagtatttgacagtattatttttaaaatgataaaagaagttttactattcctttaattttcatctatttgacagttaataaaataagccactttcacattttgattgctcattaatatcttagagaagatgattaagggaaaagtttggacatagttacttcttttctcaggctttatatgtggcaagtaggttccatggagaaataaaaattggcagaaagaataataattgcagccaagaatttagctaagtagatttactgttataaagaatttggaagtgaaatctaccaataatagttatgctaataatgtatcttagcctttctctatctatatcttcatatttatctacctctatctat

SEQ ID NO: 768787 - DNA, 650 bp, Homo sapiens
cacctggtgggccctcatggtaacttcaatgattgtgtcttaggaacgccggttctgtttaacttggattttcccatcattgcacagtgttgagaggtcaagttaatgaagaagatcatatttctgtattcataactctgctagytccattttctagtgataagggaggggatgaggtaattgccaaattgctatatttggtcaagaaacgagattgctacaggaattctaagaagactacttttattctttttggaggagcaaagggactctttgctataaaaaccacaaagcctttcttttcttgcttgtacttaaaatgttgagaaatttaagcagtacaaaagtgcacagactactataaccactaccttcaagatatccagaattgacaagtgttaacatttggtaacactgaatatacattaccatttttaactaaaaagaaacaaaacattgcagagaaagacaaagtttcttttagtaaaaataatttatttattaaattttattataattaacaagtgagaattgttacaatgtgatgttttgacatacgtatttacattgtgggatgattaaattaagctacttaacatatccgtcacttcacagacttaccttttttatggtgaggacatttaaaatag

SEQ ID NO: 768788 - DNA, 650 bp, Homo sapiens
cacctggtgggccctcatggtaacttcaatgattgtgtcttaggaacgccggttctgtttaacttggattttcccatcattgcacagtgttgagaggtcaagttaatgaagaagatcatatttctgtattcataactctgctagctccattttctagtgataagggaggggatgaggtaattgccaaattgctatatttggtcaagaaacgagattgctacaggaattctaagaagactacttttattctttttggaggagcaaagggactctttgctataaaaaccacaaagcctttcttttcttgcttgtacttaaaatgttgagaaatttaagcagtacaaaagtgcacagactactataaccactaccttcaagatatccagaaytgacaagtgttaacatttggtaacactgaatatacattaccatttttaactaaaaagaaacaaaacattgcagagaaagacaaagtttcttttagtaaaaataatttatttattaaattttattataattaacaagtgagaattgttacaatgtgatgttttgacatacgtatttacattgtgggatgattaaattaagctacttaacatatccgtcacttcacagacttaccttttttatggtgaggacatttaaaatag

SEQ ID NO: 768789 - DNA, 591 bp, Homo sapiens
gcggagtaaggaggggagggaacagatccactccaaccttggttggggtcaagagaaaattccatgtacctaaatatatgaagcttataaatcaagctgacacactcttaaataaaatatgttcccatccttctacctgtgaagtatttctttgtaatgtcctggaaggacaggttcaaatttagaattcctggactcctaggkctctgccctggggcacagtggcatggggggagctggcccttctgtccccaccccggctctatcccgcaccacaactggtgtagcacacctgcctggacagagtggaactttacataactgcggttcaaggaccatctttgggacacttctgttgatcagatctcttttctccctcatggctgtagctgcatttgactttaagacaccttacacagccttgtagaaatgccatataaagtgagctcctgtattgatttgggcatgaagctcccttctgggacaagtgctatgtctgattgatgccttctgggagtccatataagcgcctacttcattgcctacaaattgaaggataatcacttttctaaacaggcttgcactgaattc

SEQ ID NO: 768790 - DNA, 597 bp, Homo sapiens
gctcccagctgcaggttatctattcatcaaatgtcacagttaacctaagcagctgcttccataacccaaagctccctaccctatatttttttcagtactttgtaatctcatattgtaattctataccaaagaagaagaagaaaaaaaaaaccttgtagaaccaacccttaattgtactgattttatggttagaagaaacagcacaggagataaaggaacaagaagggaagaagtcacgatgataaaaatttactctagtgaaacaaatggaaaaatatttaagcatgacaaagaaatcacaaaattgttyctttagttagggtcagcagtcattgccctcggtgatgaatgttgaggcttccaggcaaaggttctcagctctgtctcaggcacagaccgtccatctcctctaaagatggatgtggccctgtcaggctggatgacatttcacagtcccttcaagcctcatgatgccatggttctgtgaacagcgagctacagttcaaagttgaatgaccacgaaaaagtcatctgatgagaaatcggaatgccacgaataatattgaaatgaaaaggaaagcttgatcttgaaaaagt

SEQ ID NO: 768791 - DNA, 588 bp, Homo sapiens
tcattcatgcgatgttttcatggctttttgaaatttcatcaagatactgccaataataactgatggcctgacttttcaatgaagcttgaaaaactatcctccaaatatctatgattaacttctcattttagagatggttcacatcctaaagactttacaaatatttatttcaattagtttcgataaacaaattattcttcaaaaacctcttaacttcactcctttcctgttaccactgccactgtaacccaggccctcatgattttatagctgtcttattatttcaacagcttcctatctacctccctacagtctaacagtccatccctttaatcaattctataactgctaccagagaaatatccctacaatgcattttatrtaataccctctaattcaaagcctgagattgcatctcaccactccagaatagtttttaactacttcccctgatatttctaatctctctacatcaacggttcttaaagtatgttcccgagaccaggagcatcagcaacgaacaaatactaagtgctaagtgctcagttaatcactggattttgaaataacgaattattcatctttctg

SEQ ID NO: 768792 - DNA, 571 bp, Homo sapiens
gaagttcctgaaaggcagaaaatgtttacgccttctttttttcatagtgatcacatgtaacagagcacatccctaagcaacaattagactctcagttcttctatcaccaaaggtgggacagattcattctattactaaaactagaagctgcttcagggataagaaatagatttcttccatcttctataaccctaaaggcaagaaagaaaattggttccatggacatagtcatttcctctgtgattccactgttcttcttccatcctatatgctatattcatgagtcaagttctcaaatattaatacttattagcttattaaatagttttcacaactcttctctacttctcattgtcccaatgctaattaatgttatagccaaggaytgaaattcgttttcccattgtctgacttcttcctgaaaagctgaattcttgtccaaaaaacgaaaactttcaagagattcacccagattccagactctctcagaactataagtcccagagacctgatcagtgaggaaagacggcttataggagccatcagtggatgtgttgccagttccccgcaa

SEQ ID NO: 768793 - DNA, 630 bp, Homo sapiens
cttttcctagcactattattttacataatttaatttaaaatgtaaaagtttctctatttattaatccagaggatactttagcccatctcgactcagccgtattactaacacttacctctgacacaacttcatccagctgccgcttcagtgttccattttctttcttcagttgctcgttttstgagagggcagcctttaatctcgcctctaaccctagcatatattctttcttcttcttgcgagactgacaagcggattctcgattttttatcatacgttgctgtctccttagcacagcaatctagaaaaagttataatgaatcagaataccctggttttaaaatcagatcaaaatagatcagaatatactcatttttacaattattttaaccaacaattttttcaaagcataggttactagttgtttcaaaagaggtttgaaaacacactgctcaaactaaataagttaaaatcaaatgattaaataaggccttctaaaacccaaatgttaaataatttcttcttatgttttctaaggctcgtttattaatcttccaattttccccttagaaactccctcagaaagtatctttaaatatatatgcatatatacatacatcttaaatctgt

SEQ ID NO: 768794 - DNA, 537 bp, Homo sapiens
tcctccccattctcaaataaatgaaaaacatactttaaatctgtatgttattataataataccacctatttagattgtactataaaaacagacaaggcaccaggcgcggtggctcacacctgtaatcccagcactttgggaggccgaggcaggcgatyacgaggtcaagagatcaagaccatcctggccgacatggtgaaaccctgtctctactaaaaatataaaaattagctgggcatggtggcacgtgcctgtagtcccagctactctggaggctgaagcaggagaatcacttgaacccaggaggtggaagttgcagtgagccaagatcacaccactgcactccagcctggcaacacagcgagactctgtctcaaataaaagaaaaaaaacaggcaaggtgcagttcctcatattagcacatgctcacaaaaaaataactatagtcttcagatgacaggaaagtattgaagtttcaaataatgtgtaattcaggtttctggaactgataaactgctcagaaaagaacagtttgtc

SEQ ID NO: 768795 - DNA, 464 bp, Homo sapiens
tactagaataatcattttgatagtcatttggaaaaacataaaattggatttgtatctcatataatacacaagggtaatttcaaatggatccgagatctaaacactaaaaataatatctcatgataaatacttattcatagtcacttagaaaatattccttcctgaataattttatcctaagccactagatggggtaaagcaagaycaccatccacgcagagaagtagcctggtggaatgtcagggtccaagaagggtagagagggcactgatatggcaggcggcctggcatgaggagtcacagcagagtgaggagggcatccgcatgggaagacagcctagtgtaaggacatcagagcccaaaggagacatgttaaaagaacataagagctggtgtgaagggacccccactggccaaatccagaacaatgtaagaatcagaataaataattatagtaacggatt

SEQ ID NO: 768796 - DNA, 573 bp, Homo sapiens
atcatggagcagagacaagccatccttggagcacccggtcaaaattcgtaagcacccagtcaaaattcgtgacccatagattctagcaatctaataaaatggttgttgctttaagcaactaagatttagtttgtcaaacgataaaaccagaacactgactttgtgtatcccacattctatgaaggcaaacaggcatgaaacagtataagtaaatacataaaatgaagaggaataggtagtgcagrggtagagaggaatttagataggagaatgtgctggttatttattcactgtctctcagcactaagtccactttctataatcggtgatataaattattcccagctggcatccttttaggtcctgtcaataggggatactagaaaaagctagaagggaggagaagggatttttcttcattctaccatcagctgtatcccagcactggcaatttgctccaggttctggcttctttcagtatactcaaccccgacctcatcaggcccccttaaagatattagtatcagccaggtgctgccccttcttagaagtacatgtattaaatgcatggga

SEQ ID NO: 768797 - DNA, 487 bp, Homo sapiens
cagtctccagccagcccagccaatgatgacatttacttttctccaaactgtccctcctcctttgttccccatcttggtgaatgaaatcatcatccactcaatcactcaaactagaaataaagttatctcttattcctccctctttcctctctcatatccatttggtctctaagcctcctcccttctgcctttttaatcgctcttaaacacattcccttcctctgtgtttcctctaccagcacccttcattccttgactcaattattgcyttaattcttaaccagactctgcctctagaattgtcctcccagcctattccacacactgtagtcagggttgttttctaaaatacaaatcaagtggcattattctgctgcttaaacttctttagcatttgcacgatctttaggaaaaatttaaaacttcttagcaaggcatacgttgcccttatgatctggtcatgcctatctttccagtgtcctgaaag

SEQ ID NO: 768798 - DNA, 407 bp, Homo sapiens
acaaaggaagagattgaataccgtgatattactctcaaaagtggctgcagaagcttatacacccaccagcaattcacgtggctcccattccctcttgtcatcaatattcagtgtttcttacctttgtaattttatcaaacaaatttttcttttcctaaataagaacatttaaaattattcttattttattttctgtracccaggatagggctgataataatatattttttaaaattgctattgctattcttttttttttttttttagacggagtttcactcttcttgcccaggctggagtgcaatggtgcaatctcagctcaccacaacctctgcctcctggattcaagcaattctcctgcctcagcctcccgagtagctgggattacaggcatgcgccaccatgcc

SEQ ID NO: 768799 - DNA, 629 bp, Homo sapiens
caggcacggtggcttgtgcctataatctcagctactagggaggctgtggcaggaagattgcttgagtccaggagtttgagaagctgcggtgagctgtgatcacatcattgctctcctgcctgggcaacaaagcaagaccctgtgtcttaaaaagaaaagaaaaaatatagctaaaaagacaatgtaagaaataaaaatggaatactaaaaaatatgcagttcagtgaaaagaagacaggaaaagagaaacacataaagaacaaatagaataaattaaaaatgcataccaagatggtagacttaaatccaaccatattagtagttaaattcagtgggctaaacacatcaattaaaaggaagaaattttcaaactagatttttttaaaaaggaaagatccaactatataktgtttataagaaataacactttaaatatgaagacactgacagatggaaaataaaggtgaaaaaggatgtatgccatgcaaacatgaagcattaaaaagctgacatggctatattaatcagaaaaagtagacttccaaacaaagattattctaagagacaacaaaagaaattttttattgataaaaggagcatacaaggaagataaaacaattctaaatgtc

SEQ ID NO: 768800 - DNA, 604 bp, Homo sapiens
  misc_feature 1, 2, 3, 4, 5, 6, 7, 8, 9, 10, 11, 12, 13, 14, 15, 16, 17,18, 19, 20, 21, 22, 23, 24, 25, 26, 27, 28, 29, 30, 31,32: n = A,T,C or G
nnnnnnnnnnnnnnnnnnnnnnnnnnnnnnnnggtgttctctgtactattttttgtttttgtactttttgaaatttaaaattataactaaatataaagtttaacatgtgtacccatacaataaccaaagtttaacatgtgtcagcacacacacacaaccgcagtgtatacacactgggaagttataagaagccataagacattttcctttagawctcatactcaagggaggtaagagccacagaaaagtctaaccataacactttaaattcttgaatatcattctcgaactacctgtaaccagccacaagatctctcctgctaacaattaatattctttcacatagttataaaatagtaatctttcagagggaatatcccttcaggaatacacagccattgatactttcatttttaaaatttaccactcttcttcgtgaattatctattcgtatatattgtccattgatggttgaattaatttgcatttttctcactgatttatactctatatattaaaaatcgttcttaaaagactgtgaaaatgtacatgagtgttcaaagtggcattactcataacagacaaaaagtggagacaagccaaa

SEQ ID NO: 768801 - DNA, 604 bp, Homo sapiens
  misc_feature 1, 2, 3, 4, 5, 6, 7, 8, 9, 10, 11, 12, 13, 14, 15, 16, 17,18, 19, 20, 21, 22, 23, 24, 25, 26, 27, 28, 29, 30, 31,32: n = A,T,C or G
nnnnnnnnnnnnnnnnnnnnnnnnnnnnnnnnggtgttctctgtactattttttgtttttgtactttttgaaatttaaaattataactaaatataaagtttaacatgtgtacccatacaataaccaaagtttaacatgtgtcagcacacacacacaaccgcagtgtatacacactgggaagttataagaagccataagacattttcctttagatctcatactcaagggaggtaagagccacagaaaagtctaaccataacactttaaattcttgaatatcattctcgaactacctgtaaccagccacaagatctctcctgctaacaattaatattctttcacatagttataaaatagtaatctttcagagggaatatcccttcaggaatacacagccattgatactttcatttttaaaatttaccactcttcttygtgaattatctattcgtatatattgtccattgatggttgaattaatttgcatttttctcactgatttatactctatatattaaaaatcgttcttaaaagactgtgaaaatgtacatgagtgttcaaagtggcattactcataacagacaaaaagtggagacaagccaaa

SEQ ID NO: 768802 - DNA, 657 bp, Homo sapiens
ataaaaccaccaaagtagaaatgaggaaaaagaaaaaaagggggagagccaaaaaaaattataattacattgcaagaaaaaattgtaaaacacataaagaaaacctaatctgttaaggaaatataccaccaaaatggcccatcatatgaattcatctcagggaaaattattatgacctaacacagatttgaatgtaagtgtttagggtcctaaaaagataaatgaatggcatccatttttaataaatgatgaattayggaacaacatgtagaaattttaaaagaacatatagctatgaaaaagaatgaaatagacatctggaaatgaaaaattttgttatttacaaagaggagctggtactaagacaaagaaagtcttatcagcttaaggagtttttgggctgagacgatggggttttctaaatatacaatcatgtcatctgcaaacaggacaatttgacatcttctcttcctatcttcataccctttatttctttctcctgcctgattgccctggccagaatttccaatattatgttaaataggagtggtgaagagggcattcttgcattgtgccggttttcaaagggaatgtttccagcttttgcccagtcagtatgatattggctatgggtttgtcataaatagctcttattat

SEQ ID NO: 768803 - DNA, 511 bp, Homo sapiens
ctttatattattcctacaaataatattttcaaatttaatacccctttaaagataattagcagaaacaagattgcagccacaaattaatgagacttggatgactagaataaaggtatatattctcagacagccatgcttaccatttataaagaaataaaaagaaagatagaaaatacctgaaatgcaaragaaactattaaaagctgacacaatttgaaaaagaaccaagtagaccttctagaaatgaaaaatacaacggaagtaaaagttcaataagaataacaacagagtctacttaaggggaaatacttgaagcattaccattaaaatccaatttttaactcaatgctgttttgtgtatacgagccaatgcaattaaaaagaggaattagagatagaaatttggaaaataagtgattaaattttaattatttgcagaagttataataaaatatctggaaaaccaaaggatcaacttaaaactactataagcaataagagaatttagttt

SEQ ID NO: 768804 - DNA, 511 bp, Homo sapiens
ctttatattattcctacaaataatattttcaaatttaatacccctttaaagataattagcagaaacaagattgcagccacaaattaatgagacttggatgactagaataaaggtatatattctcagacagccatgcttaccatttataaagaaataaaaagaaagatagaaaatacctgaaatgcaaaagaaactattaaaagctgacacaatttgaaaaagaaccaagtagaccttctagaaatgaaaaatacaacggaagtaaaagttcaataagaataacaacagagtctacttaaggggaaatacttgaagcattaccattaaaatccaatttttaactcaatgctgttttgtgtrtacgagccaatgcaattaaaaagaggaattagagatagaaatttggaaaataagtgattaaattttaattatttgcagaagttataataaaatatctggaaaaccaaaggatcaacttaaaactactataagcaataagagaatttagttt

SEQ ID NO: 768805 - DNA, 703 bp, Homo sapiens
ctagcaacaggagttcttaacctgggatccacagaccctcaaagcgttcttaaataaaaccatattctaatatatttgggggtttttggtaacccttatattttgatatatgcattttaaaatattattttgagaaagagtccacaggctttctawacctttataaaccaagaggagtttatagcacaaaaaaagttaagaacacattagtcctagatccactgtgccaggagcttctccaacacagatatatgctgtgagttttgataacaagtagaattgtgctattaatggatagtgttaaattcttatcttacaatagattcagtggacccaagaaaacctgatgaatcactcaactgtatttttggacttcttggatataaacaagactcatagaaaaaagatttatcagaataccagtgactataataaacttgccagtgtacttgatgaattccaaatgaagttgggttcagtttctttggaggtaaacatatatactatataaaaatctgaggagtgctatatatgtatatatttatttatttttacatacaaacatctatgtatatcaaatcagtatttttaaggggtgtgtgtgtttgtgtgtgagagagagcaagagagaaaaagagagagagagggagagatcaggggaaaatgcttaccttcatattttaaagcagaacattagaagtac

SEQ ID NO: 768806 - DNA, 703 bp, Homo sapiens
ctagcaacaggagttcttaacctgggatccacagaccctcaaagcgttcttaaataaaaccatattctaatatatttgggggtttttggtaacccttatattttgatatatgcattttaaaatattattttgagaaagagtccacaggctttctatacctttataaaccaagaggagtttatagcacaaaaaaagttaagaacacattagtcctagatccactgtgccaggagcttctccaacacagatatatgctgtgagttttgataacaagtagaattgtgctattaatggatagtgttaaattcttatcttacaatagattcagtggacccaagaaaacctgatgaatcactcaactgtatttttggacttcttggatataaacaagactcatagaaaaaagatttatcagaataccagtgactataataaacttgccagtgtacttgatgaattccaaatgaagttgggttcartttctttggaggtaaacatatatactatataaaaatctgaggagtgctatatatgtatatatttatttatttttacatacaaacatctatgtatatcaaatcagtatttttaaggggtgtgtgtgtttgtgtgtgagagagagcaagagagaaaaagagagagagagggagagatcaggggaaaatgcttaccttcatattttaaagcagaacattagaagtac

SEQ ID NO: 768807 - DNA, 490 bp, Homo sapiens
agtgaaagattttaacacctttctgtaactcagaacaagcacacaaaaatcagtaagaatagagaagctttgaacaacatgagcaacaaatggacttaatgagaatatatagagcactgtagcctatacctgcagctgacacgttatatgcaaacacatatagaacattgccaaaattggccatataacaggccacaaatcaagtttcaccaaatggtagctctgcttcttattctgatagtataaccttagtcaagtatctaacgtcttttagcctcagttcctccatccaagaaataagggttattatagtaatttcactaygtggtatatatgtatgtgtggttggcagttggtaggtgcgaaatagactatagctgttattatatttgtatattttgtatatttgtatattctatttgtataattctatattgtatgcgttagagtctacgagccttggaagcaggtgctgtatcttatttccttt

SEQ ID NO: 768808 - DNA, 607 bp, Homo sapiens
ggccctgtaacccctttgttttggccaatttctcccatttggaatgggtgtatttactcaataccggtaaccccattgtatctaggaagtaactagcttgcttttgattttacgggctcataggtggaagagacttgccttatctcaggtgagactttggactgtggacttttgggttaatgttgaaatgagttaagactttgggggactgttggaaggcatgattggctttgaaatgtgaggatatgagatttggaggggtcaggggcggaatgatatggtttggctgtgtccccacccaamtctcatcttgagttgtactcccataattcccacatgttgtgggagggacccagtgggagataattcaaatcatgacggcagtttcccccatactgttctcatggtagtgaataagtctcatgagatctgatgggtttatcaggggtttccacttttgcatcttcctcattttcccttgctgctgccatgttagaagtgcctttgacctcccaccatggttctgaggcctccccagccatgtggaactgtaagtccaattaaacctctttgtcttcccagtctcgggtatgtctttatcagcagt

SEQ ID NO: 768809 - DNA, 507 bp, Homo sapiens
tagtcctagagcaggatgctgctgatagatgtggcccaacactctgatgaccagatgatgctatggagccatatattagccaggatttcccagagaaacagaaccaacaggataaagagaaagagagagagattataaggagttgatcacacagttatgcaggctgacatgtccaaaatttgcagggtgggccaacaggctgaagaactaggaagagcccatgttgcagttcaagtccaarggcagtctgttgcagaactccctcttgcttggggaggtcagtattttttcttctattaagggcttcaactgattagacaaggcccacccactccatggaggacaatctgctttactcaaaatccctcctttttaatctcacccaacaacaccctcacagaaacatccagaataatgtttgaccacatatctggacactgtggctcagccaagttgacacataaaattaaccatcatgagccagttgtgcccccaggacttaacgat

SEQ ID NO: 768810 - DNA, 507 bp, Homo sapiens
tagtcctagagcaggatgctgctgatagatgtggcccaacactctgatgaccagatgatgctatggagccatatattagccaggatttcccagagaaacagaaccaacaggataaagagaaagagagagagattataaggagttgatcacacagttatgcaggctgacatgtccaaaatttgcagggtgggccaacaggctgaagaactaggaagagcccatgttgcagttcaagtccaagggcagtctgttgcagaactccctcttgcttggggaggtcagtattttttcttctattaagggcttcaactgattagacaaggcccacccactccatggaggacaatctgctttactcaaaatccctccwttttaatctcacccaacaacaccctcacagaaacatccagaataatgtttgaccacatatctggacactgtggctcagccaagttgacacataaaattaaccatcatgagccagttgtgcccccaggacttaacgat

SEQ ID NO: 768811 - DNA, 666 bp, Homo sapiens
ccagttgccacttttcaaggcaaaaagatgcacagatcttctctctgccaagcaaatcacaccttctttgcattggctccaaagctaccctcatggaattccaaaaattgctgtgtatttgcaatatttctgggtttggttagcaaatctctacttgaccaattaaagccttttgcgcttttatagacttcatctgtgtctccgttcagcagttagcttttcatgctgacaaatcttcatcttctaaattcattttgtgtgtctactaaaatctagctacmactttaaaagtgttcaaaatctagccctgtaatttgacatctaagaattgatcccagggaaataatcagaaatgcccacgaggattttggtggaaaacattccatttcagtgttaattattaaagtaaatatgtacatgtacttaattaaatataatctgaaaataaactaaatctaaataatataaaaatcatcaaatatgtttttgtagacccagcaattgctacattagtcattaaaatgttttagaaaacatttgacgacaagaaaacatatacccaatcatatacaaaacatgtaccaaataagatacaaaattttatatacgtgtgtgaataaacatatgtgaatataagtatatacactatacatacatatatatgat

SEQ ID NO: 768812 - DNA, 621 bp, Homo sapiens
tgttatgttccttttaatgtaagcagaaaatcaagttttccccaggcagcttgctgttctatcacatcatttaaaatcattgtgaatgaaagcacacaatagcagaaggactcactgactttaccgattttcctggttgaattacggggctcgaatagtaatgatgcgctgcccatttttaagacctatgcttgtctccactttcaagcaaggaagcacaccatacagggtcaggagaggaggctgcacgtgggggactcgcagccattytatccacctctcgactgaattggagtattttttataattaagtccttaaaaaaaatcccttttatttttcagcacacatttcatgttataaaaaaattatttaactaaatatcatattattctgcttaccttattttgggcaattcataacagcatttaatgggcctatttcccccaaagtattttcattgctgctaatagagaaaacccagaaggaaaaaaaaaaaaaaagccaccgtggtccaaaaagctagtgaaaataagcttgacttaatcaagtgtcttcacaggattcctcagagcctttggtaggctagtgagcatctcaagtccccaggtcagggcatagga

SEQ ID NO: 768813 - DNA, 621 bp, Homo sapiens
tgttatgttccttttaatgtaagcagaaaatcaagttttccccaggcagcttgctgttctatcacatcatttaaaatcattgtgaatgaaagcacacaatagcagaaggactcactgactttaccgattttcctggttgaattacggggctcgaatagtaatgatgcgctgcccatttttaagacctatgcttgtctccactttcaagcaaggaagcacaccatacagggtcaggagaggaggctgcacgtgggggactcgcagccattttatccacctctcgactgaattggagtattttttataattaagtccttaaaaaaaatccctyttatttttcagcacacatttcatgttataaaaaaattatttaactaaatatcatattattctgcttaccttattttgggcaattcataacagcatttaatgggcctatttcccccaaagtattttcattgctgctaatagagaaaacccagaaggaaaaaaaaaaaaaaagccaccgtggtccaaaaagctagtgaaaataagcttgacttaatcaagtgtcttcacaggattcctcagagcctttggtaggctagtgagcatctcaagtccccaggtcagggcatagga

SEQ ID NO: 768814 - DNA, 621 bp, Homo sapiens
tgttatgttccttttaatgtaagcagaaaatcaagttttccccaggcagcttgctgttctatcacatcatttaaaatcattgtgaatgaaagcacacaatagcagaaggactcactgactttaccgattttcctggttgaattacggggctcgaatagtaatgatgcgctgcccatttttaagacctatgcttgtctccactttcaagcaaggaagcacaccatacagggtcaggagaggaggctgcacgtgggggactcgcagccattttatccacctctcgactgaattggagtattttttataattaagtccttaaaaaaaatcccttttattyttcagcacacatttcatgttataaaaaaattatttaactaaatatcatattattctgcttaccttattttgggcaattcataacagcatttaatgggcctatttcccccaaagtattttcattgctgctaatagagaaaacccagaaggaaaaaaaaaaaaaaagccaccgtggtccaaaaagctagtgaaaataagcttgacttaatcaagtgtcttcacaggattcctcagagcctttggtaggctagtgagcatctcaagtccccaggtcagggcatagga

SEQ ID NO: 768815 - DNA, 597 bp, Homo sapiens
aaattattttctggattttgtgattcagaagtggctctataccttgaactaacagctgaagcaaatgcagtcagtcttgactggtttctgtgccatcctagacacattctccaggaggccagctcacctttgacttgactagggcagtctggttatgttcctctacattctcctccttttaragtccctctccaacataagtcgtcttcctctgggtctggggtgagttcctttcttctccagtggagttgttcttctctagagtctgctcgcttctcccagtgtaggatgagttcaaagctgttgcatatctccagtggagcacttcttttctttcttttactctatgtcacatttatttctgctctgatattttggctgtattttcattccccatggcctctaaagctgcttctgcaaaagggttgaatttactctgtatgggaagtcttgtactctttgggtaactttagtcgaacagtctcttgtacttttctagaccagtcctctgttcttaaccttttcatgaggtgttgatgctcttctttctgaccgattacaatatcttgcatttcctagttttggattatttttggt

SEQ ID NO: 768816 - DNA, 620 bp, Homo sapiens
aaagctgcttctgcaaaagggttgaatttactctgtatgggaagtcttgtactctttgggtaactttagtcgaacagtctcttgtacttttctagaccagtcctctgttcttaaccttttcatgaggtgttgatgctcttctttytgaccgattacaatatcttgcatttcctagttttggattatttttggttatttagcctccattttacctagtaactcttcatcctttgtgctccttagaatgcagtggagccagcccttgggctcctttatccccgttgtaagcatagccatcatcttgtggtaatagacataaacttgcattttcctttggaagaagagaccaacggcttctttcatgtaagcacaaagcagggaaaatactccgcctgaaacaatgcaggttaacaaagatcagaacaagtagaatacatgtcatcttagttagctgttaattcatactccataatcattacagttaacacagtccactgagtgggagtttgcccccaaaagagagaaagatcaagtagtcaagaaggtgagtgaattcagagagtgaggggatcatttactctcccttctacccctcttccaactttaattgttgtaattgt

SEQ ID NO: 768817 - DNA, 620 bp, Homo sapiens
aaagctgcttctgcaaaagggttgaatttactctgtatgggaagtcttgtactctttgggtaactttagtcgaacagtctcttgtacttttctagaccagtcctctgttcttaaccttttcatgaggtgttgatgctcttctttctgaccgattacaatatcttgcatttcctagttttggattatttttggttatttagcctccattttacctagtaactyttcatcctttgtgctccttagaatgcagtggagccagcccttgggctcctttatccccgttgtaagcatagccatcatcttgtggtaatagacataaacttgcattttcctttggaagaagagaccaacggcttctttcatgtaagcacaaagcagggaaaatactccgcctgaaacaatgcaggttaacaaagatcagaacaagtagaatacatgtcatcttagttagctgttaattcatactccataatcattacagttaacacagtccactgagtgggagtttgcccccaaaagagagaaagatcaagtagtcaagaaggtgagtgaattcagagagtgaggggatcatttactctcccttctacccctcttccaactttaattgttgtaattgt

SEQ ID NO: 768818 - DNA, 620 bp, Homo sapiens
aaagctgcttctgcaaaagggttgaatttactctgtatgggaagtcttgtactctttgggtaactttagtcgaacagtctcttgtacttttctagaccagtcctctgttcttaaccttttcatgaggtgttgatgctcttctttctgaccgattacaatatcttgcatttcctagttttggattatttttggttatttagcctccattttacctagtaactcttcatcctttgtgctccttagaatgcagtggagccagcccttgggctcctttatccccgttgtaagcatagccatcatyttgtggtaatagacataaacttgcattttcctttggaagaagagaccaacggcttctttcatgtaagcacaaagcagggaaaatactccgcctgaaacaatgcaggttaacaaagatcagaacaagtagaatacatgtcatcttagttagctgttaattcatactccataatcattacagttaacacagtccactgagtgggagtttgcccccaaaagagagaaagatcaagtagtcaagaaggtgagtgaattcagagagtgaggggatcatttactctcccttctacccctcttccaactttaattgttgtaattgt

SEQ ID NO: 768819 - DNA, 614 bp, Homo sapiens
ctctatgggctttagaatatagttggggaaaaggctactggatacctggtattgctgcagaaaacttctttcagttgagcatcacagcaccaaatagcagctaatcaaataataaactctacttttctatagttcattattttgaactataggagtagttggtttttgtactcgctgcctacataagttatgctcccatgattattttccttgtattgaaaaacaaattaatgtccttaaagtctgcatagagrtctgcctaaatttcacttaagggcacatttctatgaacttgcagggctcatcaaaagggaaagaaatttagaataagggaatgccatttacacatttgttcattggatttctctgctctcatttgggacttagcttaatgcatgtgatgagatgatacagaggactaaaaaagaaccaaaaacccaaacaataaaccccactcaaaatcagctccattaatatgaagaaatatgcaagtactggacatcagacaaggtgaaaaggctgccaaagatctggcaagttatattagggatttctgctgttagcactgagcccagtggtatgagatgaacattggaaataaaataaaaaactag

SEQ ID NO: 768820 - DNA, 596 bp, Homo sapiens
  misc_feature 555: n = A,T,C or G
tgagcaaaccagatacttactgctgaagtgagaaaaaaaaaaagacattatatcaactcccactcaaatcgagctgcagtaggcagctaggactcacaggcttagaaaatgagacggagcccactctattataccagctgctcagccctatacgtgtctaagtktttagtgctgggtagcactaaaggagatacaactatgtttatatccagcttatttcctagcaaatgtttctttataataaaaaaagaatacaaataaaaatcagctcaactattttaagctatttatcctattcccaaatatgacaagaaaaaaaaagaaacgcttacaaaagtttcttaaatgctttcttaatgatttagactaatagcataaaaggtagcacagaaattaaccaaatttagatgccaccttaatcctggattgtacttcataactaactttcggaatagaagtgaccagaatctaaaataaaaaggtaagtaggtacagaaatataatcaaggggaataaatacgtatagcacataacaatgaactcttaattcttganaattagaaggcttaactccacaataaaaaaataagcaaaca

SEQ ID NO: 768821 - DNA, 543 bp, Homo sapiens
aaaacatcactccactaaatcattatgttgaactattagtccagtaggggagtgtaatgaagcaaaaactagaagctgaaaaggctgaaatggctgtactctagataactgggcagtctggattctttcttctacaaattccagttctattaaagcctcagaggtcaaaatcctggcgctgtggagattggaatctccccgcaacatagaaatcaagttagacagtgcataggttggaatgcctaaagtaggtcttaaataattaatgttacctaaaagtttgtggaagtcatctaaagtttttaaagaatctctcctaatttgaactttttgaggttgaatacattgtttatcgaccaccattcctaaatattgaacaggagtggtctgaygaattttatcttgagcaatgtgtaatccagcctctataacacagcagctcaaaatttggtaacagtcaattctttatcagtgggggcagcaattaaaatatcatcaatataatgatgaatataggcctcgggaaattgggcttgaactggt

SEQ ID NO: 768822 - DNA, 543 bp, Homo sapiens
aaaacatcactccactaaatcattatgttgaactattagtccagtaggggagtgtaatgaagcaaaaactagaagctgaaaaggctgaaatggctgtactctagataactgggcagtctggattctttcttctacaaattccagttctattaaagcctcagaggtcaaaatcctggcgctgtggagattggaatctccccgcaacatagaaatcaagttagacagtgcataggttggaatgcctaaagtaggtcttaaataattaatgttacctaaaagtttgtggaagtcatctaaagtttttaaagaatctctcctaatttgaactttttgaggttgaatacattgtttatcgaccaccattcctaaatattgaacaggagtggtctgatgaattttatcttgagcaatgtgtaatccarcctctataacacagcagctcaaaatttggtaacagtcaattctttatcagtgggggcagcaattaaaatatcatcaatataatgatgaatataggcctcgggaaattgggcttgaactggt

SEQ ID NO: 768823 - DNA, 634 bp, Homo sapiens
gccaacacggcgaaaccccatctctactaacaatgcaaaaattagccggatgtggtggtgcacatctgtaatcccagctactcaggaagctgaggcaggagaatcgcctgaatcaggaggcagaggttccagtgagccgagatcatgccagtgcactccagcctgaacaacagagcgagaccgtgtttgtttttggacattcaagattcaactacacaatgagaaattcccacaawaacatatatgtcaaaggtccatccagtcttggctttaactgttgattccgggatgacaattgttagggggaaatctgtaggttgaaatgctctactttcctggagcaacatttatggtttactagttctgtccatggagaccccttgacaccaaacaccagcatttcaaatacctggctgtaattatcacactgatccacatgatgccttaatcacagccccctcactaggttttctcttttccgggccaatgaatcccaattctttcactgtttgtcatatggaagtgttgaacatagccctggaaacaaacctagtactcaataaatcataattttgtctgtcttattgttccgtgcccagtcttttacaatctgttgccctctggtggatagttt

SEQ ID NO: 768824 - DNA, 618 bp, Homo sapiens
aaatgtacatttcatggttaggcagctcaaagccactgactagaagaagacaatagggatcgtgagaaaaagaagaatatttgaaaaaacaaaaaacaaatagaaaagaatcagaaacccatatatatagattgtataaagattgttgaggtatgaggcttttaactcatgagaggaaaattcttcaaggctgggcaagcaamacttactgatgttttgggtggaatccaaagtcaaatatggatgacaatggagaggttatatagacctaaaaccccataattctccttagattctattaaaaatgaacacagtgtacccttggagtctggggagctctctattctcctttcataatcttaaccatcactactaggctctgcctgatcttcccctacttccctactccaaccacatcagctccctctgttctgtaaacaggccaagggcactttgccttagagcttttgcacctgttgttctcctcttttcctaccacactcttttcagcagtcccccactttgttcagggttttctcccaacatcatctcattagaaagagctttcctggtcactgtgcctaaaacagcaatccccaccccatccttctctcttgc

SEQ ID NO: 768825 - DNA, 618 bp, Homo sapiens
aaatgtacatttcatggttaggcagctcaaagccactgactagaagaagacaatagggatcgtgagaaaaagaagaatatttgaaaaaacaaaaaacaaatagaaaagaatcagaaacccatatatatagattgtataaagattgttgaggtatgaggcttttaactcatgagaggaaaattcttcaaggctgggcaagcaaaacttactgatgttttgggtggaatccaaagtcaaatatggatgacaatggagaggttatatagacctaaaaccccataattctccttagwttctattaaaaatgaacacagtgtacccttggagtctggggagctctctattctcctttcataatcttaaccatcactactaggctctgcctgatcttcccctacttccctactccaaccacatcagctccctctgttctgtaaacaggccaagggcactttgccttagagcttttgcacctgttgttctcctcttttcctaccacactcttttcagcagtcccccactttgttcagggttttctcccaacatcatctcattagaaagagctttcctggtcactgtgcctaaaacagcaatccccaccccatccttctctcttgc

SEQ ID NO: 768826 - DNA, 536 bp, Homo sapiens
ttcctgaagtgctttcttctctattgtgaagggacctggagtgctcggcctgtgtgctgaagaatgtgcagctcttctcactagtcatatctcctcagcagatgaccaaggtggaagctagaagatcagggttgtcacataatcgggtgctggaggctttagaagcaaggagggtattttcagtgggaggatcaggtgtgacattctggtagaagtagtatttatttatttattttttcttttccttgggatttgagatgcacttggcacagtgagggctcaatatttgaatgaataaaggcagggttgaaacacacagatgagggaggagtattttcrgtttaggaaacacatgaacacaacatcagcagggggagaagatgaagctcatgaaggtgaaaatgaatcactctcttggctgagtggagtgatggaagcggtgggggaggaggctcgcaaatgtgttcttgccagactgtggaaggctgtgaggatcagctaaggaatctgggggactctgggcaggagaggtggtt

SEQ ID NO: 768827 - DNA, 508 bp, Homo sapiens
gggtggcctttgtagtttttttccttagagacagggtctcactgtgtcacctacgctggagtgtagttacaccatcatagctcactgcagccttgaactcctggccttaagtaatcctcttgctttggcctcctgcagcgctgggattacaggtgtgagccaccatgctatgcccatttgagttttgatatgtaatctacttgccttttgaaagtgccttgtaagagtactactagtgtgtttacttttttaccttttatcctacrtttgtctttttatacctcctctccctttttcctacaaaacttcctgtaaggagatcttggttctgctgcagtcaaaaattatattttttccttgagggttagctctgctctttggcctgctaatgagtcttacagggtctctgtgggtccttcagaggagatatatttttacgaaacattctccggtgcagcagtttacaaacgcaacttctggagtgtgagctctttgaaggtaggagctg

SEQ ID NO: 768828 - DNA, 580 bp, Homo sapiens
tgtttccccatttcatctgtctcttacattttcctctgcatttctgattagatcgaggaccaagaattgtgactgatgcttctttgtcccctgttcaggtgtttcttaagtggcagatgaatagttcctccctgtactctcctgtaaacatactttttgcttttacatctcttcagttttgcttttacttttttttttttcgtaagggatacattctttcagtagctttatttaaatgtagtgtgtggaccgtttgttgtgaccttctttgaaattttctctgatcatggcagcccaaaatatcggtacctgcctctgaaccatcttcgttgtctctggctgtgttacttatacaacasctgctattattatttgtatttttgttttatatgtttcatccctccttagattataaactctgaagttagaggtcatcttatagacaattttgaatcttctgtgttaaaaaatataattttggccaggtgtggtggctcatgcctataatccctgcactttgggcagcctaggtgggtggatcacttgagtccaggagtttgtgaccagcctggccaacatg

SEQ ID NO: 768829 - DNA, 584 bp, Homo sapiens
gcaaattatatagcctgaaataaagatattgatttatctagcttcccactacaggcagaatatctgcaacttaaaaatcttatttttcaccaactctcatcaactcccctaattttcttacacttttaattatatatatatatatatatatatatatatatatatatatatatayacatatagttatgttactttccagtgagtacagaggtcaccacttgaaattcagccaacaattctaacaactttgaacttacatctcattaaaaaaaattaccaatgctgtgtgctagttccctaggtaaccaagactccacttcaaaaatggactggatagtcaaaagaaagcataacacagatacgctaaccaaacaaaaagcaattttgcttcaattgctaaaatagatttgaccaagtgtttttacgtagtggcagatgggagctgcattaatatttatgttggacatggtaagaggggcttggaagaaaaggactttatattggagattcatctttggaaataggtaaaaatcgacttagtgtagaatgaacacaggctcccaaatctgagttcgaattaatcc

SEQ ID NO: 768830 - DNA, 584 bp, Homo sapiens
gcaaattatatagcctgaaataaagatattgatttatctagcttcccactacaggcagaatatctgcaacttaaaaatcttatttttcaccaactctcatcaactcccctaattttcttacacttttaattatatatatatatatatatatatatatatatatatatatatatacayatatagttatgttactttccagtgagtacagaggtcaccacttgaaattcagccaacaattctaacaactttgaacttacatctcattaaaaaaaattaccaatgctgtgtgctagttccctaggtaaccaagactccacttcaaaaatggactggatagtcaaaagaaagcataacacagatacgctaaccaaacaaaaagcaattttgcttcaattgctaaaatagatttgaccaagtgtttttacgtagtggcagatgggagctgcattaatatttatgttggacatggtaagaggggcttggaagaaaaggactttatattggagattcatctttggaaataggtaaaaatcgacttagtgtagaatgaacacaggctcccaaatctgagttcgaattaatcc

SEQ ID NO: 768831 - DNA, 513 bp, Homo sapiens
ctccacctgcagccccggtgcgggatccactgggtgaagccagctgggctgctgagtctggtggggccttggagaatatgtctagctcagggattgtaaatacaccaatcggcagtctgtatctagctcagggtttgtaaacacaccaatcagcaccctgtgtctagcttagagtttgtgagtgcaccaatcgacactctgtatctagctgctctggtggggccttggagaacctttgtgtccatactccatatctaactaatctgatggggacaagkagaacctttgtatctagctcagggattgtaaacgcaccaatcagtgccctgtcaaaacaggccactcggctctacgaatcagcaggatgtgggtggggccagataagagaataaaagcaggctgcccgagccagctgcggcaacccactcaggtcccctttcacgctgtgggagctttgttctttcactctttgcaataaatcttgctgctgctcactctctgggtccacactgc

SEQ ID NO: 768832 - DNA, 602 bp, Homo sapiens
aacacaccaatcagcaccctgtgtctagcttagagtttgtgagtgcaccaatcgacactctgtatctagctgctctggtggggccttggagaacctttgtgtccatactccatatctaactaatctgatggggacaaggagaacctttgtatctagctcagggattgtaaacgcaccaatcagtgccctgtcaaaacaggccactcggctctacgaatcagcaggatgtgggtggggccagataagagaataaaagcaggctgcccgagccagctgcggcaamccactcaggtcccctttcacgctgtgggagctttgttctttcactctttgcaataaatcttgctgctgctcactctctgggtccacactgcttttatgagctgtaacactcaccgcaaaagtctgcagcttcactcctgaagccagcgagagcatgagcccaccgggagaaacaacaactccagacgccccgccttaggagctgtaacactcaccgcgaaggtctgcagcttcactcctgagccagtgagaccatgaacccaccagaaagaagaaactccgaacacatcagaacatcagaaggaacaaactccagaggc

SEQ ID NO: 768833 - DNA, 602 bp, Homo sapiens
aacacaccaatcagcaccctgtgtctagcttagagtttgtgagtgcaccaatcgacactctgtatctagctgctctggtggggccttggagaacctttgtgtccatactccatatctaactaatctgatggggacaaggagaacctttgtatctagctcagggattgtaaacgcaccaatcagtgccctgtcaaaacaggccactcggctctacgaatcagcaggatgtgggtggggccagataagagaataaaagcaggctgcccgagccagctgcggcaacccactcaggtcccctttcacgctgtgggagctttgttctttcactctttgcaataaatcttgctgctgctcactctctgggtccacactgcttttatgagctgtaacactcaccgcraaagtctgcagcttcactcctgaagccagcgagagcatgagcccaccgggagaaacaacaactccagacgccccgccttaggagctgtaacactcaccgcgaaggtctgcagcttcactcctgagccagtgagaccatgaacccaccagaaagaagaaactccgaacacatcagaacatcagaaggaacaaactccagaggc

SEQ ID NO: 768834 - DNA, 588 bp, Homo sapiens
tctgcagcttcactcctgagccagtgagaccatgaacccaccagaaagaagaaactccgaacacatcagaacatcagaaggaacaaactccagaggcgccaccttaagagctgtaacactcaccgcgagagtccgcggcttcattcttgaagtcagtgagaccaagaacccaccaattccggacacaccggcctgggttcaaccatagaaactcttctctgctccatgtggttgtcatccttctcctagtaaatgcaggcagcctttcatgttttgtgatcatagcagagacaaaatagagcaagcttgstcacgtcattagtacaaaaattccactggcaaaagcaagtcatgtgactaaacccaaaataaaggggcagagaaacatactctgcctctttaatggaataaacggaaaagttacatggcaatgggcatggataaatagagaaatgaaaattcaggcattaatgtattctgccaaaatccactctaggggtacacacctgtatgagtctgttttcatgctgctgataaatacatacccaagactggacagtctacagagaaaaagaggtttaattgact

SEQ ID NO: 768835 - DNA, 619 bp, Homo sapiens
taaacatatgagctaaaacgataagctttttagaagacaatatagacgaaaatcttagaaactttgagtttggcaaagatttcataaataaaacaaaaaatgagtgcagaagaaaatttaaattagactatataaaaagaaaaaactcttggttttcaaaaggcaccattaaaaaataaaaatgcaagactcagacagggaaaaaaatttgcaaacacctgtaagatgaagcatttctacctagaatatataaaagtactcttttaacttaaaaataagacagacaacccaataacaaatggacaaatgatctgagcaaacacttcaccaagtaagatgtgcagattgcaaataagctcatgaaaagatgttcaacatcgctactcattagggaaatgcaaattaaaactgcaatgggataatacyatatacccactaaaatgactaaaattataaagactgacaattccaagtgcttgtgagaatgtggaacacctggaattctcatatcatgctgatattgactacaaaacgatatggccactttgggaaacaatttcttactaagttaggcattcacttatcacatgatccagcaatgccacttttaattattcat

SEQ ID NO: 768836 - DNA, 644 bp, Homo sapiens
ataatttcgtgccatgttgaacttggctttctaatattaattttgacatcaaagcaaattgtattatttttcttttaaaggcattcttgttttacagggagcacttgttggtctgatggctggatttgccatttctctatgggttggaattggagctcaaatatatcctccacttcctgagagaacattgccattgcaccttgatatccaaggctgtaacagcacctacaatgagacaaatttgatkacaaccacagaaatgccatttactactagtgtttttcaaatatacaatgttcaaaggtattgaattaagttttattacattatactttaaaaaatttacgcaacaagtagagaaccccacttgctttttgtcttgcttacaacactgtgattttgcctaattctgaaatgagtaaaacccatgtggttagctatagtattttctgcagcggtaacaaaaaatgtcatattttcataatttctctagaaatttctgccttgtctacagatctaagaaaacttaaatattaatgagaaacttctgttatgtgtaaactctcctaaacaccagctcttagctgcatgaagaattatctttgtcttggaaaaacttttaaaatggaaagcacaattataga

SEQ ID NO: 768837 - DNA, 697 bp, Homo sapiens
gtaagaacactcatagaacaaagatagcacaaaacaacagcatcaaaatgttggaatgtgccaagcagacagatctatgtaataatagacttagaaaaccagaaaaaactgaatgctaaaccagttctggggaaaacccaagaacaataatatttatactacgaaatccmagaaaatcttagaactggggcacacagtgacctaaagaagtggggtgaaggtccagaaaataacttgaagaattctcccagagcaaaaatatatagattatcaaaaaaagaggaagataaggacattagaggatcagcccaggaagtccaataactgaaaaataggaattccagaaagacaaaaaaggaataaatcagctaaaacattcaagaattattcaagaaaatttttctgaaccgaaagacaagactatacaggttgaaagggttcactgagcatccagtaatataagtaaacatagaaccacatcaagatacattcctatgatattatagaacactgaggccaaagagacaattatataaggttccatagaggagaaaggttacgcacagagaattaggaattggaatgtttttgaagttctcagcaggaatattgaatattaattttagaagttaaaagatcaagaacttaaaaattgtgagaaaaacagattttggttttatacagaattctataccta

SEQ ID NO: 768838 - DNA, 697 bp, Homo sapiens
gtaagaacactcatagaacaaagatagcacaaaacaacagcatcaaaatgttggaatgtgccaagcagacagatctatgtaataatagacttagaaaaccagaaaaaactgaatgctaaaccagttctggggaaaacccaagaacaataatatttatactacgaaatcccagaaaatcttagaactggggcacacmgtgacctaaagaagtggggtgaaggtccagaaaataacttgaagaattctcccagagcaaaaatatatagattatcaaaaaaagaggaagataaggacattagaggatcagcccaggaagtccaataactgaaaaataggaattccagaaagacaaaaaaggaataaatcagctaaaacattcaagaattattcaagaaaatttttctgaaccgaaagacaagactatacaggttgaaagggttcactgagcatccagtaatataagtaaacatagaaccacatcaagatacattcctatgatattatagaacactgaggccaaagagacaattatataaggttccatagaggagaaaggttacgcacagagaattaggaattggaatgtttttgaagttctcagcaggaatattgaatattaattttagaagttaaaagatcaagaacttaaaaattgtgagaaaaacagattttggttttatacagaattctataccta

SEQ ID NO: 768839 - DNA, 697 bp, Homo sapiens
gtaagaacactcatagaacaaagatagcacaaaacaacagcatcaaaatgttggaatgtgccaagcagacagatctatgtaataatagacttagaaaaccagaaaaaactgaatgctaaaccagttctggggaaaacccaagaacaataatatttatactacgaaatcccagaaaatcttagaactggggcacacagtgacctaaagaagtggggtgaaggtccagaaaataacttgaagaattctcccagagcaaaaatatatagattatcaaaaaaagaggaagmtaaggacattagaggatcagcccaggaagtccaataactgaaaaataggaattccagaaagacaaaaaaggaataaatcagctaaaacattcaagaattattcaagaaaatttttctgaaccgaaagacaagactatacaggttgaaagggttcactgagcatccagtaatataagtaaacatagaaccacatcaagatacattcctatgatattatagaacactgaggccaaagagacaattatataaggttccatagaggagaaaggttacgcacagagaattaggaattggaatgtttttgaagttctcagcaggaatattgaatattaattttagaagttaaaagatcaagaacttaaaaattgtgagaaaaacagattttggttttatacagaattctataccta

SEQ ID NO: 768840 - DNA, 713 bp, Homo sapiens
acagtaagaacactcatagaacaaagatagcacaaaacaacagcatcaaaatgttggaatgtgccaagcagacagatctatgtaataatagacttagaaaaccagaaaaaactgaatgctaaaccagttctggggaaaacccaagaacaataatatttatactacgaaatcccagaaaatcttagaactggggcacacagtgacctaaagaagtggggtgaaggtccagaaaataacttgaagaattctcccagagcaaaaatatatagattatcaaaaaaagaggaagataaggacattagaggatcagcccaggaagtccaataactgaaaaataggaattccagaaagacaaaaaaggaataaatcagctaaaacattcaagaattattcaagaaaatttttctgaaccgaaagacaagactatacaggttgaaagggttcactgagcatccagtaatataartaaacatagaaccacatcaagatacattcctatgatattatagaacactgaggccaaagagacaattatataaggttccatagaggagaaaggttacgcacagagaattaggaattggaatgtttttgaagttctcagcaggaatattgaatattaattttagaagttaaaagatcaagaacttaaaaattgtgagaaaaacagattttggttttatacagaattctatacctagcccaactatcat

SEQ ID NO: 768841 - DNA, 525 bp, Homo sapiens
aaatataatcaaactatgcctaggaggataagaaatcattttggtaaatgcacagcagcctgccacaaatttatttgaaattgataataattgttctatttaagaaaataccataaaaaccctagaagaaaacctaggcaacatcattcaggtcataggcatgggcaaagacttcatgactaaaacrccaaaagcaatggcaacaaaagccaaaattgacaaatgggatctaattaaacaaaagagcttctgcacagcaaaagaaagtaacatcagagtgaacaggcaacctacagaatgggagaaaatttttgcaatctacccatctgacaaagggctaatatccagaatctacaaagaatttaaacaaacttacaagggaaaaaaaaacatcaaaaagtgggcaaaggatatgaatagacactctcaaaagaagacatttatgcagccaacagacacatgaagaaatgctcatcatcactggccatcagaggaatgcaaatcaaaaccacaatgagatatcat

SEQ ID NO: 768842 - DNA, 525 bp, Homo sapiens
aaatataatcaaactatgcctaggaggataagaaatcattttggtaaatgcacagcagcctgccacaaatttatttgaaattgataataattgttctatttaagaaaataccataaaaaccctagaagaaaacctaggcaacatcattcaggtcataggcatgggcaaagacttcatgactaaaacgscaaaagcaatggcaacaaaagccaaaattgacaaatgggatctaattaaacaaaagagcttctgcacagcaaaagaaagtaacatcagagtgaacaggcaacctacagaatgggagaaaatttttgcaatctacccatctgacaaagggctaatatccagaatctacaaagaatttaaacaaacttacaagggaaaaaaaaacatcaaaaagtgggcaaaggatatgaatagacactctcaaaagaagacatttatgcagccaacagacacatgaagaaatgctcatcatcactggccatcagaggaatgcaaatcaaaaccacaatgagatatcat

SEQ ID NO: 768843 - DNA, 498 bp, Homo sapiens
caaaggccctgaggctggaaataacttggtatgtctgagggagctggactgtgaaggccagtgtggttggagcttagtaagcaagggctagaggcctacaggctgaggatggagagtgtgccaggcgctgggttgacagccccttacaggcgatggcatggagcttggatggcattctggatacattgggaagctatcaaatggtttttaacattcgtgcttgaccccatttgcatttcaagctgatcattctggctactgggtggagaatgcatggagctagggagtgggggaccagttcgtaggcaactgtkgtggtccagactggggctgaactcaggtggccaaggctcagaggacagtggaaacttttgagtcacttctcagttatagtctccatgacaggtgctatcatcaggctggatggtatcaccctccaggggccacaaaggcacccccccttaccagcccactcccagcctgtgggtgatggataga

SEQ ID NO: 768844 - DNA, 586 bp, Homo sapiens
ccgctcggggcaggaaagcaggctcctgtctctccaggatccagcctcccgatcaccgcgctagtcctcgccctgcctgggcttccccagagacgggagcttgggtgggggaccctggacccgaagccaaggctgaactggtgtgccaagcccagggagcaaccaagtccccaactctttccctgcccttcccgcaggctgagcagaaaaccaggaaatggatggactccacctccgcagccacgcctgcccgtttgcgcttactgaacagaggtcctcaggaacgtggtgagacaaagagaaaggagggcgttttcgccaccctcttgctaatgcttcaataactccccattgccctaatgagctcaccatcagagcctgattaagacctttggaggccctaaaattataagacccactatctccatcaatgtaattwaaaaaaaaacaactttaaatggaactttaccaaaaagccgattttcctctgtgaaattattttaatagcaacgacaagcccttgccttgcagcacactggcctgcccaacagaagatccagtaaggtttgcaaaaccagttgggatc

SEQ ID NO: 768845 - DNA, 627 bp, Homo sapiens
tatcgtttatcctagtttttctggtcattttctttcacacattcaaattaatgctcagccagagacttaggagaaactatgcagattttcagagcaagtgagtagcctcctccctgcctcccctcctccctgcatctctccttctctccttcycaccttccctctcttcctttctgcagttcacttttccagtcttgtgcttaacattctggctgtcctggcctctgtgaatgccagtttctgtctcctctcctctcctcaggagactgcatcaggcaataagcggggctgttgtagggcttacttcgtctgtttctcttctctcagcaatgatagtcccgtgccacctgctgatcaatgtctggaaaccattgtttcatgtgttttgtccatttttctggttgtttcaggtggaagggtaaatgtggttcattttacggcaatgtaaatttttctttttttttttgagacagagtgtgtctccatcacccagcttggagtgcagtggcgctcactgccacctctgcctcccgggctcaagcgatcctcccatctcagcctgctaagtaactgagagtacaagtgtgcgccaccatgcccagctaatctcattttttgtagatgaga

SEQ ID NO: 768846 - DNA, 627 bp, Homo sapiens
tatcgtttatcctagtttttctggtcattttctttcacacattcaaattaatgctcagccagagacttaggagaaactatgcagattttcagagcaagtgagtagcctcctccctgcctcccctcctccctgcatctctccttctctccttctcaccttccctctcttcctttctgcagttcacttttccagtcttgtgcttaacattctggctgtcctggcctctgtgaatgccagtttctgtctcctctcctctcctcaggagactgcatcaggcaataagcggggctgttgtagggcttacttcrtctgtttctcttctctcagcaatgatagtcccgtgccacctgctgatcaatgtctggaaaccattgtttcatgtgttttgtccatttttctggttgtttcaggtggaagggtaaatgtggttcattttacggcaatgtaaatttttctttttttttttgagacagagtgtgtctccatcacccagcttggagtgcagtggcgctcactgccacctctgcctcccgggctcaagcgatcctcccatctcagcctgctaagtaactgagagtacaagtgtgcgccaccatgcccagctaatctcattttttgtagatgaga

SEQ ID NO: 768847 - DNA, 627 bp, Homo sapiens
tatcgtttatcctagtttttctggtcattttctttcacacattcaaattaatgctcagccagagacttaggagaaactatgcagattttcagagcaagtgagtagcctcctccctgcctcccctcctccctgcatctctccttctctccttctcaccttccctctcttcctttctgcagttcacttttccagtcttgtgcttaacattctggctgtcctggcctctgtgaatgccagtttctgtctcctctcctctcctcaggagactgcatcaggcaataagcggggctgttgtagggcttacttcgtctgtttctcttctctcagcaatgatagtcccgtgccacctgctgatcaatgtctggaaaccattgtttcatgtgttttgtccatttttctggttgtttcaggtggaagggtaaatgtggttcattttacggcaatgtaaatttttctttttttttttgagacagagtgtgkctccatcacccagcttggagtgcagtggcgctcactgccacctctgcctcccgggctcaagcgatcctcccatctcagcctgctaagtaactgagagtacaagtgtgcgccaccatgcccagctaatctcattttttgtagatgaga

SEQ ID NO: 768848 - DNA, 595 bp, Homo sapiens
cttcttctataaatacaaaaagtcttggccaggcatggtggctcacacctgtaatcccagcactttgggaggctgaggcgggtggattgcttgagttcaagaccagcctgagcaacatagtgaaatcctatctccacaaaaatactaaataaataaatataaaagatctaactcttggagtggttgtgaggttcaccttagtgcatataaagtaaccaatgtgtgccatgtacatagtaggcccagctcaagcaatgggctgcctttcctctccatggcactggttacacaacagatcctgggcaaaagacctatgggtctccttccaagccccaggrtaaggtagtggttggcatcctgccctgcgcccatgatgggtactagaccctcagtgcagcccttgtcccctgcccaacaggccgcttcctggagctgcatatgtacatgacatctgcactgggcaagaatgacatgaaggccattggcctgcagatggcccttgacctcctggccaacaaggagaagaaagactccatcacggggctgcagacgcgcacccagcctgggcggcctgactggagcaaggtaatgccaa

SEQ ID NO: 768849 - DNA, 534 bp, Homo sapiens
cctgattgaataggatatcccagctatcacaaggttgccaatgagattagagcttcatagacacagagatggcccttgcagtggaaatcattacattaggtgtcaggtgatggaaatcacaagcaaggaatgcaaacccccattggcagacccagattagagtcagccatggagttaaattattacgtgaaatgccattctgctattaaaacacaaagagacaaagagacaagccaaactgccctttaaacatgtaaacaccaagcttccacygagggaatttatttgtcctttacatgtaggcaatactcagtagctattgcctctaatgatcctccagggctagagaaaaagatggaagatgtcatagtcagctcaggttgccataacagataccaaagactgggttgcctaaacaacagaaacgtatgttcacacagttctggaggctgcaaagtccaagaaaaagtccagcaaggttttgtttctggtgaggcctctcttcctgacttgcagatgtggtcatttgtcttc

SEQ ID NO: 768850 - DNA, 534 bp, Homo sapiens
gatgtccttcaagtttcctcctttgtttggctggaaagtcttgtgtaagcttttccaatttaaacatccattggaacaaagtatttgctcacttttctgttctgtacttgctgcagggcatctcttaagcacagtttaatcacattgctgggaactgcaattattttgcatctcccggaggctcctgagagacaactgtaaataatggcttattctcttcaccaaacaagaaggcaattgactcacacaattgcctgaagactgggcctgggaactccagtttcattccacagggatgcacttaaagggctgrcgtagagaatgaaaaactccccaatggaggtaggaatggtcattttcaagccatatgtttcttcagacggatgcctaattttaatttgcctttgaatacatttagctcttgctccaaaattctcttctcatgattcctctttcttgcttatcagtaggaggatgttgctggctgcctggggtctctggggacagttttcatatacgagctctggaaaatta

SEQ ID NO: 768851 - DNA, 620 bp, Homo sapiens
ttttacattggattttgctgtccctgtgctgaaaaactccagcatcccagtctgctactttctgtcccaactaaacctaacattaaaagcccttacattagtccccaaaaccatcacctcttgatactaattaaaaaaaaaaaaatgcattcctatttctctatattcactgaccaatcaagacacagaaaataaaaatgacctttaaaatacctaatactcactcccttggcatttaacattaaataatataaacacgctgggcgcagtggctcacacctgttatcccagcactttgggaggccaaagtgggtggatcccctgaggtcaggagtttgagaccagcccgaccaacatggtgaaaccccatctctactaaaaatacaaaaattagccaagtgtggcagtgcatgcctataatmccagctacttgggaggctgaggctgcaatgaggcaagatcacaccattgcactccagcctgggcaacaagagcaaaactccatttcaaaataaataaataaataaacaacaaacaaacatttaataccacttgtacacagcagtttgctggcaacctaagaggcaaaataagatgcatatatacagctgtaattgtca

SEQ ID NO: 768852 - DNA, 629 bp, Homo sapiens
tcacatgtgtttgtgctcaaattgaaactatttttgtggtctaaaaacctctaagccagctatttattttaatatggttccagactgacatgccctcatatgtctagtgaaagcaagtgtaaaccttagagggatgtactttcaaccaaacaccaaaagaaaccgtccacacagagttccattgaacatgagctcaaaatgcacagggaaaaaacaaatctacctttaccgagtgggagtaagcaaagtgagccagcaaacaaggcccatagtggcttcagatattggcgttaacacaatcaggatataaggcaaatatgcttaatatgttaaakaaataaaatgggaagttgaaagtttgagttaggaacaagagactacaaaaaatgaacaggtaaatgagaaaaataaacaaaaagcacaatgagaaaatgttaaattacagaaaaagaaaaaatatagtaataggtatttatacctcagcaaataggtaaaacaagactagagtccagtggaaagataattagaaaatagaaatcagagttgaagatattacttacaatttagcatagagagagagatagagaaaaaaataagagatatggaagtcaaagtgagatggtccaaca

SEQ ID NO: 768853 - DNA, 644 bp, Homo sapiens
cctacatcaacaaagtttgggaagctatgttggatgcaacagaatgacagttatttagcctctgctttggaaagctgaccattctataagcttttatggtctagggagcttgagactaaagcttgcagtgtattttctgttatctgaacatgtacttccacacatctgtggtatactttggtctgcttttctgtctatctgtctatctatcatctatctatctatctatctatctatctatctttctatctaatttatccattcatccatctcttcatttacccattcatctctctatgacccagatataagaataaaaacattaaactgtatccaaaataaatatatcaatatgtataggctaaagctggagagragtgagaagggtcagtttcaaatcacaggatagaaatgttgaatattccccacaaaggagaaggtgtcagctattttttaaaagattataattttgagcagaaatccttctaggggcaaagaaaagagaaaatatttcatttgacatgacaagttataaaatgcaaatctgccagttttggaagggtaaatatttgctgaagattaagtacatgacaaaggtacgtcattaaatctaaagaaattaaagagctcaatttaatatcaca

SEQ ID NO: 768854 - DNA, 644 bp, Homo sapiens
cctacatcaacaaagtttgggaagctatgttggatgcaacagaatgacagttatttagcctctgctttggaaagctgaccattctataagcttttatggtctagggagcttgagactaaagcttgcagtgtattttctgttatctgaacatgtacttccacacatctgtggtatactttggtctgcttttctgtctatctgtctatctatcatctatctatctatctatctatctatctatctttctatctaatttatccattcatccatctcttcatttacccattcatctctctatgacccagatataagaataaaaacattaaactgtatccaaaataaatatatcaatatgtataggctaaagctggagaggagtgagaagggtcagtttcaaatcacaggatagaaatgttgaatattccccacaaaggagaakgtgtcagctattttttaaaagattataattttgagcagaaatccttctaggggcaaagaaaagagaaaatatttcatttgacatgacaagttataaaatgcaaatctgccagttttggaagggtaaatatttgctgaagattaagtacatgacaaaggtacgtcattaaatctaaagaaattaaagagctcaatttaatatcaca

SEQ ID NO: 768855 - DNA, 598 bp, Homo sapiens
ctctatacatgccctttatcagataaataaatggtagtgtgttcacatcacggaatactattcatcattgaaaatgaacaaactgccactgtatgcatataaggttgagtgaaagaagccagatagcaaagagtacatactgcatgattccatttatataaagtataaaagacaaagcaatgtggccagatgcggtggctcacgcctgtactcccagcactttgggaggctgaggtgggcagatcacctaaggtcgggagttctagaccagcctgaccaacatggaccaacatgaccaaccctgtctctactaaaaatacaaaattagccaggcgtagtggcacatrcctgtaatctcagctactcgggaggctgaggcaggagaattgcttgaacccaggaggcagaggttgcagtgagccgagattgcgccattgcactccagcctgggcaacaagagtgaaactccgtcttaaaaaaaaaaaaacaaagcaatgtaggtgttagaatggtggtaagtcttagaaggtaatagttgaaaggaggcaaaaggaggtcttctggggttctggtgctgttctgtttcttgatctcagtg

SEQ ID NO: 768856 - DNA, 598 bp, Homo sapiens
ctctatacatgccctttatcagataaataaatggtagtgtgttcacatcacggaatactattcatcattgaaaatgaacaaactgccactgtatgcatataaggttgagtgaaagaagccagatagcaaagagtacatactgcatgattccatttatataaagtataaaagacaaagcaatgtggccagatgcggtggctcacgcctgtactcccagcactttgggaggctgaggtgggcagatcacctaaggtcgggagttctagaccagcctgaccaacatggaccaacatgaccaaccctgtctctactaaaaatacaaaattagccaggcgtagtggcacatacctgtaatctcagctactcrggaggctgaggcaggagaattgcttgaacccaggaggcagaggttgcagtgagccgagattgcgccattgcactccagcctgggcaacaagagtgaaactccgtcttaaaaaaaaaaaaacaaagcaatgtaggtgttagaatggtggtaagtcttagaaggtaatagttgaaaggaggcaaaaggaggtcttctggggttctggtgctgttctgtttcttgatctcagtg

SEQ ID NO: 768857 - DNA, 676 bp, Homo sapiens
gtcaggaaaccttttatagttaatggtaaaccaatctatttggagagtggcttaaaagcagcttttaaaggagagagagactactatagtttggcttaaaaggtatgtcaaccaaatgcaaaatccttgtttgaatcctgattcaaacaaaccaactgtaagaaggcatttttgagacaactggggaaaattgaatatggactaaatagtagatgatgttcaggaattattgattattttcttgggagtattatattctggttgtttttaaaaagtacaaggctgggcaccatggctgatgcctataatcccagcactttgggaggccgaggcrggcagattgcttgagctcatgggttccagaccagcctgggcaacatggtgaaatgctttctccaccaaaaatacaaaaaaattagccgggtgtggtggtgcatacctatagtctcagctactcgggaggctgaggtgggaggatcacttgagcctgggaggcagaggctacagtgagccaagatcacaccactgcactccggcctgggtgacagagcaacaacaacaaaaacatacttatccattggagatacatgctgaatttgcagctgcaataaaataatgccgtagattttattttaaaatactctagcgcatgcagtactactcaaagtctgaggat

SEQ ID NO: 768858 - DNA, 636 bp, Homo sapiens
aacaaccatatttcccaaaaagatctatagattcaatgcattctcagtcaaaatatcaatgacattctcaatagaaatagaaaaaacattatgaaatttgtatggaaccaaaaatgactctgaatagccaaagcaatcccaaacaaaaatgaggctggaggcrtcacactaccagatttcaaaatatactacaaagctgtagtgactaaaacagcgtggtactcaccttaaaactgatacatagactaatggaacagaatagagaaaccatgtataaatccaggtatttacagccaactaatttttcacagaggagccaagaacctgcattgagaaaatggcagtctcttccatgaatggtgttgggaaaactggatatttctatgcagaaaaatgaaactagatccctgtctctcaccatacacaaaaaccaaatcaaagtggcttaaagatttaaacttaggacccaaaactctaatactactagaagaaaactggaaaaacatttttagaaaattggtctgggaaacaattttatcatagataagacctcaaaagcagatgcactaaaacaaaaacaaacaattgtggttataaacggataatgttctgcacataaaaaaaatctaccaccgc

SEQ ID NO: 768859 - DNA, 661 bp, Homo sapiens
gttgttatgaaggatttcctcaaatattattttggtaactcaggtagattcaggaatgaaatatgctacaactggaacaatgcaagctgttaagaaatgggtaaccaagttccagccaaagaattatctttaaagtggggaaggaccaaggcaaactcattttgctacaragctgcctcagatgactgtcccaatgggtggcccaatgcatagtacctaatgggcatagcaagcccccataaatgtaatatgtatattgatatcaggaggtttagcccagtgggtgaagcagtactgcagataattctgaagtgcaggacattaggagaacttcctatacacagcagatctgtggacagaaagtcctggaggcaggatctagatttgggaaagggccctggtctctggctttgaattcagtaggccttactgtaagacagagaagcattcgagtagagtcgacatgcaatggcatctaagggaaggaaacccaggctgaaactttatgatatcctgggtcaacatggagtacaaggaaggctgtgttattgggaaggtgacacacttcaggtactagctacactgaatttgattaggtaggtttttttctaccaaaataaagtatgcttgcagacacactacattattttcctccatttgt

SEQ ID NO: 768860 - DNA, 661 bp, Homo sapiens
gttgttatgaaggatttcctcaaatattattttggtaactcaggtagattcaggaatgaaatatgctacaactggaacaatgcaagctgttaagaaatgggtaaccaagttccagccaaagaattatctttaaagtggggaaggaccaaggcaaactcattttgctacagagctgcctcagatgactgtcccaatgggtggcccaatgcatagtacctaatgggcatagcaagcccccataaatgtaatatgtatattgatatcaggaggtttagcccagtgggtgaagcagtactgcagataattctgaagtgcaggacattaggagaacttcctatacacagcagatctgtggacagaaagtcctggaggcaggatctagatttgggaaagggccctsgtctctggctttgaattcagtaggccttactgtaagacagagaagcattcgagtagagtcgacatgcaatggcatctaagggaaggaaacccaggctgaaactttatgatatcctgggtcaacatggagtacaaggaaggctgtgttattgggaaggtgacacacttcaggtactagctacactgaatttgattaggtaggtttttttctaccaaaataaagtatgcttgcagacacactacattattttcctccatttgt

SEQ ID NO: 768861 - DNA, 617 bp, Homo sapiens
atatacagcaagccaataacaaacaacatttgctgcataatgaatgagtcccttattttacacatgctctctggaggagggaaaaaaaaaacctccactatatgccctccaaaaagtcttccaaccgaagaccagcccacaattcaggttttgttctgcataaaaacatagccaatgaagtgaatggatcctgaaatttcaaccattgtcaacctgcaaagtaattccaggctttctggtcatgagggcctagaatcagacaaagatgctctgtatttgccaactttctccccacagtattaagatctactgagaggggcacctttctggaatatgcacaaagacgtcatgtgtamtagttcgcctgacaataattccaatactaggtttcaatgattgaagttaataacttactaaaataagttagaaagaatagaattgcagtttcaaaataattacaacaaaataacaactattttaacacttgacagtttgaaaaactcttttccattttcaagtagatattatgattattcttattttatagatgaggatgctgagatccaggtttaaatttaaccaattagaaaatggtggatttgggttttccaacccat

SEQ ID NO: 768862 - DNA, 595 bp, Homo sapiens
tgctcagcatttctgatcagcatttgataattgcttgggttaacacatcgagtcaatacgtggcagctagaatcacagaaactttaacgtgtaccctttttgtgccggatattgtataactcccacaagtatgcagacccagcaaccacggcaggcaaccagacasatgctgagtggattccttggcttccaaccttttactcaattacttccttcactgtatctacacctgggctctttctccagtaacgaaactttgtgttccttgtcttgctttcagtctcatctcccgcatcttctggtattcttataaccctacagattttttttttttttttttgaaacagagtctcatcgcccaggctggagtgcagtggcgcgatctcggctcactgcaacctctgccttccgggttaaagcgattctcctgcctcagcctcacaagtagctgggattacaggtgcccatcaccacacccggctaatttttgtgtttttagtagagacggggtttcgccatgttggcaaggctggtatcaaactcctgacctcaagtggtcagcctgcttcagcctcccaaagtgctgggattacag

SEQ ID NO: 768863 - DNA, 624 bp, Homo sapiens
gggacagcacagcaactctgggactttgcattcaactaagtgctgccctgtcacagcagaaagcaaaacccagctaaaatcagctgacacccacccatggaggaagcatctagaccagccctagccagagggtcagaactcragttttggcaagtcttgccatcacaggctgaagtgctttggggtcctcaataaatttgaaaagaaatcttacaattcctaggcaagtccgagtgctgtgctgaacgcagagctggtggacatgaaacaccagccagggcagctaagaaagtgcttgcatcacccctcctacaactccagacagcacaaattgcagcaacaaaagtgactcattcttttggcttgagaagaggagagggaagaataaaaaggactttgtcttgcatctttgataccatctcaaccagagtaggaaagagcactgggcatagttgtagggccctgattacaggccatagctcccagatgacacatctagacataccctgggccagaagggaacccattgccttgaagggaaaaacccagtcctggcaggattcaccacctgctgactaaggagcccttgagctctgaagaaccagaagtaatacccaagtacta

SEQ ID NO: 768864 - DNA, 615 bp, Homo sapiens
aggtaaagaaatagtcaatcatctatcacctgagagcacagagggagggacaattatccggatataaacccaggcattcgagctggcagtggcaacccacttcgggtcccctcccattgtataggagctctgttttcactctattaaatcttgcaactgcgcactcttctggtccgtgtttgttccacttccaggtgagcttttgctcgccgtcaaccactgccgatcgctgccgtagcagacctgccactgacttccacccttccagatccggcagggtgtctgctgcacttctgatccagtgagttgcccattgccgctctggatcaggctagaggctcgccattgttcctgcatggctaagtgccygggttcatcctaattgagctgaacactagtcgctgggttccacggttctctttcatgacccacggcttctaatagagctgtaacactcaccgcatggcccaagattacattccttggaatccgtgaggccaagaaccccaggtcaaagaataaaagtcttgctgccatctcgggagcggcctgccaccatctcgggagtggcctgccaccatcttgggagctctaagaacgaagaccgaccagtag

SEQ ID NO: 768865 - DNA, 621 bp, Homo sapiens
actcaaaatacaaaaattagccgggcgtggtggtgggtgcctgtaatcccagctacttgggaggctgaggcagagaattgctcgaacccgggaggcggaggttgcagtgagctgagattgcgccactacactccagcctgggtgacagagcgagattctgtctcaaaaaaaaaaatattgttattagctcaggtgatcttcgttgcttatttccttctgtatctggtagattgcagcacctcgtcatcgtgactctgctttcttttgaacttgttaacgtagagatattcrgaggtataaagacaagctctcttctagagctgtcttggggagtatcttgaaaacagaaggtaaaggatttggggctggcagcaaagacaactctgcagcttgaagccaaaggatcacccaataggtggcccattattgtcttgggttagaaacactgcagaaagaaatgccacatttgacctacgctccctctccttcaaactgtagaaaggaaaacttaaaaatacctaaaattgtcacctgactttattcttttaagaagtgaaaatgacgtgctcagatttcatattcgagtccccacaattaggaagcatttagcattggactttg

SEQ ID NO: 768866 - DNA, 621 bp, Homo sapiens
actcaaaatacaaaaattagccgggcgtggtggtgggtgcctgtaatcccagctacttgggaggctgaggcagagaattgctcgaacccgggaggcggaggttgcagtgagctgagattgcgccactacactccagcctgggtgacagagcgagattctgtctcaaaaaaaaaaatattgttattagctcaggtgatcttcgttgcttatttccttctgtatctggtagattgcagcacctcgtcatcgtgactctgctttcttttgaacttgttaacgtagagatattcggaggtataaagacaagctctcttctagagctgtcttggggagtatcttgaaaacagaaggtaaaggatttggggctggcagcaaagacaactctgcagcttgaagccaaaggatcacccaataggtggcccattattgtctygggttagaaacactgcagaaagaaatgccacatttgacctacgctccctctccttcaaactgtagaaaggaaaacttaaaaatacctaaaattgtcacctgactttattcttttaagaagtgaaaatgacgtgctcagatttcatattcgagtccccacaattaggaagcatttagcattggactttg

SEQ ID NO: 768867 - DNA, 577 bp, Homo sapiens
cttaatatgtcatatattattcattacattatttccttatatgattttaaaaaattgttttaaattacttttaaaatttgttgtgggtacatagtaggtgtatatatttatggggtatatttggtgttttgataccagcatgcaatgtgaaataagtacaccatgaagaatgggctatccatcccctgaacatttatactttgagttgcaaaccaattaacactctttaagtatttttaaatgtacaattaagttattattaactatagtcaccctattgtgctgtcaaatagtaggtcttactcattctttcttacgttttgtactaaccatccacacctcccctcagccccgcactccccttcccagcctctggtaaccatccttctactctctatgtccatgagttcaacwgatttgatttctggatcccactaataaatgagaacatgcgatgtttgtctttctgtgcctggcctttttcacttaacataatgacctccagttctgatatgactgttttgtgggatttatactttgcatgtattttttgtttgtttgttttttgagagggaat

SEQ ID NO: 768868 - DNA, 642 bp, Homo sapiens
gaatcttgttttgtcatattaccagaattgtttctccagttccttctcatttgagaagactgtttcagagggaagatctggggctcaagggctgctgttcagattctttaatcccataggatgctcctttgatgtgatactctctgccttcccctagggatggcgcttcctgagagccaaactgcagtgattgttatttctcttctggatctagcaacccagtggcgctaccaggctcctggctggtacaggagaatggacagacctgatccatcttcaggcctgtcagccatggataccagaacctgctctggtggaggtagcagrggagccaagtggactctgtcagagtccttggttgtatttttgttaagtgccctggttttgtgttggttggcccccagccaggaggtggcactttcaagagtgcatcagctgtggttgtatagggaggatacaagcttgccctagggtaaggcagtgggcagggccatagagctcccaagggattatgtcctttgccttccactgccagggcaggtagaaaaagaccatcaggtgggggcagggttaggtccgtctgagctgagactctctctgggcagagcttgctgcagctgctgtgggggatgggggcatgat

SEQ ID NO: 768869 - DNA, 604 bp, Homo sapiens
ttaatagacaatttgatcatataaaagttttgggggttttttaaataaatcatcttattgtgacttacacagactattcatgacatgcttggactttctggtttgtcctgaacatccctgtttgttaaacaaccagtcattttattttaggactaaattgmccatacaagattctgtttaatgtaaaattatttctctttaagcttttttacaaaaaaaaaaaaaaaacctctttatttttataactttcatttcatctctcttatttcctggctccttttaccttgttttatatataacatttatataaggtttgaattagacaaaaattgttcacctttttaaaaaagacacacttttttgaaataatgttttcctataatatagttttattggaaaatacccaaataatgacatatctattatttactttaatataactttagcttctaaattatgatgagtttgtctacaagtatttatcccattacatttggttaattattgtattttaatcatttacctagatatttatgaaaactacaatagtcttcttttaaagttatggaaccaccattgcaaaattataactaagacaatgaaa

SEQ ID NO: 768870 - DNA, 487 bp, Homo sapiens
ttgtcctaagcagttcccagcttgactcttccctttagcttagtgattttgggacctcaatgtttccggagttgggtctcctcctgctgttgaatttgtgatctcactgacttcaagaatggagccacagcccttcgcagtgaatgttacagctcttaaagatggtgtggacccaaagagtgagcagtagcaaggtttattggaaagagcaaaaggacaaagcttccacagcatggaagatgacctcagcaggttgccactgctggctgggggttgggrggggtggtggccagcttttattcccttatttgccctctcccatgtttccctttatgtcctatgagagtgcccttttttcaatcctcccggcaattggacatttctaggatcctgctgactggtgcattttacagagtgctgactggtgtgttttacagagcactgattggtgcattttacagagcactgattggtgcatttcacagtc

SEQ ID NO: 768871 - DNA, 568 bp, Homo sapiens
gtctagggtacagttcatatctgatgtttctttgttgactttctgtctaaatgatctgtccattgctgaaaatagggtgttaaactcttctactagtattgtgttacaatctatctgtttcttgagatctattaatattggctttatgtatttaggtgctctgacattgggtgcatatacatttacccaacatcagagcacctaaatatgtaacatatccttttgctgaattgaccaaccccattatcatatattaatataatgaccttctttgtctctatttacagatgacttaaagtctattttatctgatataagtatagccactcctgttttggtttccatttgtgtgaagtatckttttccatttatttactttcagtctatgtgtatccttataggtgaggcaagtcttttgtaggcagtatatagttgggtcttgttttctttttttttaaatccatttagctactctgtgtcttttaattggataatttaatccatttacattcaaagtaattattggtaggtaaggatttactactgtcattttattaatttttttcta

SEQ ID NO: 768872 - DNA, 539 bp, Homo sapiens
tgttcttggcagcttgcttctccatgtgaattttggaaaagcttctgaagttccctttagtaaacaccaagagaactattgctgggtcgtatcgtagttgcatgttcagttctctaaggcactaccaatctgttttcttttcttttttgtttttttttgagacagggtctcactctgtcacctaggctgaagtgcagtggtgtgatcatgrctcactgcagctttgaccttcctgggatcaggtgatcctctcagctcagcctcccgagtagctaggactataggcatgcaccaccacgcccatctaatttattgtatttttagtagagaccatggatttcgccatgcttcccaggctagtcttgaactcctggggtcaagtgatcctccctcctcggcctccaagtgctgggattacaggtatgagccactgcatccagcccaacctgttttctagagtgactgttttatagttttaaagtccctcatccattttgagctatgtttttggtgtaatttatgtggtttaggtcaatgtc

SEQ ID NO: 768873 - DNA, 581 bp, Homo sapiens
gcacactaatgacatgtgcattttaaactgtttgtatacttcaattaaaattttaaaaaagttaaatttaaatgatcaataaatactcatcttgaatgatggaagacagcaccttgggcctgtttctaagcaatgtattgactaytggacaaaattacaccaccatcagccatccacagtgctgtggatgccctccctcctcaccgctgcagcttggccggtcagccgaaggccccagcacagggaggtggaaaattctgcctcttgcaatacccaagcttcaccaggaccagtaatctctggcccagtcacacagagcctcctgggatttgagccacagttgcagtgagtgaggaccctgaggggaatgtccaaccgggtgacagggagagggcctgcactggtggtaaggcaggcaggagacagcagatattaaatgccctcctggggaaaggacagctgcaacccagggcctggtgggccttggagctgtgagctgactcaggtggacacaataacatctttcagacagttttggactggcccaattcttgggtgaagaatgcagctgagtgtatgag

SEQ ID NO: 768874 - DNA, 581 bp, Homo sapiens
gcacactaatgacatgtgcattttaaactgtttgtatacttcaattaaaattttaaaaaagttaaatttaaatgatcaataaatactcatcttgaatgatggaagacagcaccttgggcctgtttctaagcaatgtattgactattggacaaaattacaccaccatcagccatccacagtgctgtggatgccctccctccycaccgctgcagcttggccggtcagccgaaggccccagcacagggaggtggaaaattctgcctcttgcaatacccaagcttcaccaggaccagtaatctctggcccagtcacacagagcctcctgggatttgagccacagttgcagtgagtgaggaccctgaggggaatgtccaaccgggtgacagggagagggcctgcactggtggtaaggcaggcaggagacagcagatattaaatgccctcctggggaaaggacagctgcaacccagggcctggtgggccttggagctgtgagctgactcaggtggacacaataacatctttcagacagttttggactggcccaattcttgggtgaagaatgcagctgagtgtatgag

SEQ ID NO: 768875 - DNA, 605 bp, Homo sapiens
tcatagtcacaatccagacaaaactgtttcatgctcaaaattatcaaaaatattttataaaattacctttgggccatgcgtattaggtgtatatgaagcctaagtgaattctgtgtttagacttgggtcccatcccaagatatctcatgatatatgtgcaaatattcaaagaaaacatctgaaaaccaaaacatttctggtcccaagcattttggataagggatacytaacctgtaatgctaagatatcatttgcccttttcaggctaattctctcacgagtgtacagtggaattttccagaagttactcagtgtgtgatgtcaccatcactctgatgactaatgggatgtgtgcttgtgtgttgggttttaaaagttatcagttttaatttctaatttggcaaaaattgatagttataatttatataaacaaaaggggtcctcaaaaggggtctttggggtcctcagtaacttttaagagtataaaggagttccaacctcaaaaagcttgagacttgtttgatattgctttaagaaattttcatgatgtacaggatagcactttgtatgatgaaataaaaacatttttgtaattttgttgtgag

SEQ ID NO: 768876 - DNA, 639 bp, Homo sapiens
catagtttccaacccccaatgggccttcaacatggcactgccatcctttccccatctccttcctcggttctctcacccatcacccacaatttcaagcttcctcctccatccacaaacctcccaggccccctcactcttcccgcacagtctgcctccggtgctccagaaagactggaaatgaggtgagctcccttggatccctgcctgccacctgcaaatatcatgtggtgctacttgccctcctgtccctcctcccgtcccaggccaatcctcccacccccttaattgcccggggatctccattacttaaacctttccactggtacctctcctcccacacaagcctcctcagctgttttccrtctttaaccaacaccttccctggctccagctactgccacttcatcctctcttgcagccatgcttcttgaaaaagtggtctccattcaccatgccccctcctccatcttccgagcccaacaaacacagtctcagcactactcaataggagctggctctgccacaccacaggaccttattgagtgcagtggatgcttgtcagtccttatcttgcctggcttctcaacatctggtcactatcattgtttccctggttccacatgacccctgggtccctcc

SEQ ID NO: 768877 - DNA, 554 bp, Homo sapiens
ttctctcactgcactctgcccctccactacacccctctcatcacaacctgctgtgctccctggaaacgtgcctgccacactctgctcctgctggaaaggactgaccggcaaggacacctgaggcctgggttagaggggggcatcttctgtgcactgcaggcatacctcaaccaaagcctgagcccccgcacccttctggccagctcctctgacttcccacccaggtatagcatctgggggccagcctgcaacttatcagttttctattcccaccatctgacccggagcttggtgcctggtaggtgctcttcaaatatttctggatgaaatgcaaaacaaaacaaaacaaaagacccaaaaaaacgaaacaagagatgcaggagttgagacaagcatattggatttggtgagtaggaccccttcaacttaaccctttcctggtcttcagtgattttcaaataaygaggaactgttttcacagtgactggagggctcttctggtagttggtgccaggggctgctgaacatcctgctccgtgagggacagcagagcc

SEQ ID NO: 768878 - DNA, 619 bp, Homo sapiens
atgctccacaaccaaaaaatatggtttagtttatatatgaaaaatactagtttttgattgacaagaatgttctaaaactgtttttggctaaaaacaaacaactacgtcagttttttcagaacaagctagaaataatctatatataatcagaaaatatattcttatttgcaagtttatcttaaaatgatataaatgggataaattctaaatagtaaaaatgataaatattgtgtttcagtaactgccttacaatttccatctgactttgtccaaaataatatgtacaccttattgttttgactccatttatagttactctattttataggtcatatttatgataatcccagcaaacgtcaataagaatcaagcacctagttcccagtgcaatcactggaggcaatataatgagcctgaaaaaagaaatacctcccaatgacaacaatgtctttttaaccrtgtcaataaaaagagccatgggaggttttgaaaaatataaattgaatcttgactcagtataaacttcagaggttcacatgatcttctgaaaatggttcactcattgtatagcctgccactactatgaaagatacatgtcacttttatatgtcctcaaatg

SEQ ID NO: 768879 - DNA, 645 bp, Homo sapiens
tgttagatgtggccctgagtttctcggggttggtaatagaagagacattctcccagctcacctatacccttttccaggaggcctctccctgatatttcaaatcagcaggcctggaggcttctgtctcagtaattcaacaactatagcagctggttcttttcccttaagatttaatacttgtcatttatctatgtcaaaactgtaaaggagcaagtttccaaagacagatttattatgtgtgctgagtgtctcaggtgcagcagtgcatatagatgggctgaattccatattttccctgagtttttgttctataaaaatagccacttttactttgcattcagacaagcaagaaatatacagtcttgagctgtgagtcaccacagggcactcacagacagtaacattattgtgagactgggctctagccattggattcaggatcagctscctagcttgcacatgggttggcttaggcaaggagcaagttgtaaccagagctagctacataatttgtgaggctcagtgcaaaatgaaaatgtggagcctcagggttaaaaagcaagaaaaaaagtgctcttatagataaagcttttttctttcttctgcagtctctctcccagcttgtcatggtgtttttcatttgtt

SEQ ID NO: 768880 - DNA, 683 bp, Homo sapiens
gtctccatcattctactcattagcccaggtggcaattatttgttgtggtgtttgttgtagacaaagacagtcttgtttttttggttttggcattttgctactaaatgtgtttttgataaatgaataaatataataacaccacaatagcagctaaaaattatttattgaccattcactatgcaaatgcacatgcattttcttaagtattccaataacacagtgccatggttattatctcagttttacagatgtagaaacaggctcacgtgaattatgtaacttgttcaaggccataatagcagtttgtggtgagtctgggacttaaacctaggtcttttaaaaaaattattattccaaagtcttgttttaaactttgtaatatgaatgtttatcccaaagattttaagcactcctgaatgttatctcttacatctaagaagataggtagttctcagaaaaaatcaattgcttagaatgccttttgcatagaactgctgctaatatttctttttgccagtaatagracttagactcatattaggcagtgcaaagtagtggttaagtactcagactttggagtctgccagacctgagctcaaatgctagccctgatactggaatcttgtgtaaattaccataacttgcccaaatcatagtttgcttatacagtatctaaaaagggg

SEQ ID NO: 768881 - DNA, 610 bp, Homo sapiens
ataaactgaagtgtttttttttttcttattattatagtcatatgccttctgaccccatctctgatgagcatgtcttaaggtctttgaaaaagagttgtaaagtaaaagggaagcttgtgtcccagtggctttgttaggtaggatgctggaaaaaaagatcaccgtaagtgcccaracctctaaagaccactccaggctttcctggctccaggaaaataaaattcattcagtgtgggaatattactgtccaaaaagttccttttgttttaaagtccagttacagacgctataacaggtttttttttgtttggttttttgtttttaaaaaaagaacactcaaatcctggtaaactttctggaggtcattttatctctgtgggctgaggggaataacgaggttggttcctcgggtccccacatggagctgctcttttgttatccttaaatataatctattacaatagtattattggcaacagtcaaattaacattaattatattttgagtcattaaaatacagttttctctgtgaatttttaaaggtttgtatttttattatgcaatattttaatcacacataatcatatggtaaataataacataaacaccc

SEQ ID NO: 768882 - DNA, 610 bp, Homo sapiens
ataaactgaagtgtttttttttttcttattattatagtcatatgccttctgaccccatctctgatgagcatgtcttaaggtctttgaaaaagagttgtaaagtaaaagggaagcttgtgtcccagtggctttgttaggtaggatgctggaaaaaaagatcaccgtaagtgcccaaacctctaaagaccactccaggctttcctggctccaggaaaataarattcattcagtgtgggaatattactgtccaaaaagttccttttgttttaaagtccagttacagacgctataacaggtttttttttgtttggttttttgtttttaaaaaaagaacactcaaatcctggtaaactttctggaggtcattttatctctgtgggctgaggggaataacgaggttggttcctcgggtccccacatggagctgctcttttgttatccttaaatataatctattacaatagtattattggcaacagtcaaattaacattaattatattttgagtcattaaaatacagttttctctgtgaatttttaaaggtttgtatttttattatgcaatattttaatcacacataatcatatggtaaataataacataaacaccc

SEQ ID NO: 768883 - DNA, 601 bp, Homo sapiens
ccaaaagtaattaccaggatactttgcagattattgaataagtccctggaaccggcacactgatttatataagacctggagattttgagagatttgagagaatattaagaatcaatcaatattttaatttatttcagggtcctggagactttagctctgtagaaaaccacagggaggaaattgtgacctttgaaatatggctggctggcaggcagcagggaggtacctcggcaaagagcctgtttggcagctgctgcggggaaagacttctctgtgctggaatgttctctttcttcacagcatcagtcaggaatttcaaatagccaaagaggggagggcctcagggtgagtgagctctggagccctggcaagaaggctcttggcttgaatgtgcatagcttactcctccccagagagagtccccagggcctggagagaggagcctgcagactttgtgyctctgcctaggaggcgctgctgtgatctggagacgtcctcgtagaaccacctgatgatgtgtcatcattgcaggagatccagtaccttctcccctgggtcactaggctccctaggccatactcttcctgtgtcctccccaggg

SEQ ID NO: 768884 - DNA, 346 bp, Homo sapiens
cctgagctcaaagtgaaatgggttttgagacccaggggcattgccctgactggcaatataaccaaaatcaatcccagtgcactcctgtagaaagctaccacctcttcctgtgttatgagaaccctaataataagttgatttggaagaagactggagaaattaaagctttatcactcccaaaggcctgmcctttatctcagtttttagtttccaacaaatattatttttctgtccaatcaaaagatatttttggatgctatggaccattctgtgatatcaaatctgtccctgggttttctgaaaatcttacctaaaagagaggtcttcaataattatgtattgtact

SEQ ID NO: 768885 - DNA, 553 bp, Homo sapiens
aatttaaaaagccatatatgacaaacccacagccaacatcatactaaatcagttaaagttgaaagcattcctcctgagaacaggaacaagacaagggtgtccactttcactactcttattcaacagagttctgaaagtcctagccagagcaattaggcaagagaaagaagtaaagggcatctgaattgaaaaagaggaaatcaaactattgctgtttgcagattatacaactgtatacctaaaaaatcctaaagacwcctccaaaggactctcagatttgataaatgaattcaggaaagtctcaggttacaaaatcaatgtactcaaaacagtagcactgctatataccaataacaaccaagccgagactcaaatcaagaactcaatcccttttacaacagctgcaagaaaaataaaatacctaggaatatacttaaccaaagaggtgaaagatctctatgagaactgcagaacactgctcaaagaaatcatagatgacacaaacaagtggaaacacatctcatgctcatggattggaagaatcaatattgtg

SEQ ID NO: 768886 - DNA, 586 bp, Homo sapiens
ccactgaaattggaatgtacagaagagggacctgggaattttttctccaagacgcacccagttaattctcatgagcaattgtattaaaggacacgtggctaaaggaaggtgcagtctgccacagtggttctaagcactggtggcccactggaatcatctggagagttttaaaattgcaggtaccagccgggcacggtggctcatgcytgtaatcccagcactttgggaggctgaggcaggcagatcacgaggtgaagagatcgagaccatcctggccaacatggtgaaacccatctctactaaaaatacaaaaaattagctgggcatggtgatgcacatctgtaatcccagctacttgggaggctgtaacaggaggatcgcttgaacctgggaggtggaagtggcagtgagccgagattgcgccactgcactccagcctggcgacagagcgagactccatctaaataaataaataaataaataaataaataaataaataaataaaatttcaggtacctgggcctcgtgcccagagtttttgatttaattagtctgatgtaggacccagacttttgcattgctccaa

SEQ ID NO: 768887 - DNA, 632 bp, Homo sapiens
gggtggatgaaaggattcaggctgggagtgtatgatgagaatttgaaacatttactatgaaaaatgatggaaagggcctgaaaagacaaatataagatcactgagcagtactgagggttcaatggaagctagaatccatgaacatattaaggatatatttgtaagtgacagcaattttctccagtgctgtttggcaacccagggacagaactggaaaggataaaaggctggaaggatgcattattagagactggggagagcaaytagaacaggaaaattgatgaggatgaagatgatgctattgaaatgattgttcattgggtacagagaaggtatggaataaagtgaaatcaagagaatcccagatgaatttgaaaatgggtataagaagtttgagactgtggaaaaggtagaaagggacaaggttgtaatctgtagtttcctgtggctaccataacaaattactgcaaactaggtggcttaaaacaaccaaaatgcattatttcacagttctagaggatagaagtctgagaccaaattgttagcagggttggttccttctgactgctctgagaagaatctgccctgtgcctctctcctagcttccggtggctgctggtggcaatcctagg

SEQ ID NO: 768888 - DNA, 615 bp, Homo sapiens
tgtagtaggcacatagcagatgtctgatggttgaatgtgtgagagggtggatggatgttggaagtctgggttcgtggatcagggtgtcccaaggaactgcatttctgggggatgcttcccagatacctccatgtgtccayaggaagcaaggaaggattgctgaacatctggggactgcttggattttgtgtgctctgtcaggcacagtagaaactcccctgaagatcagattgacttataagggtggaagacactaaagtgtaatacaacaattctgcatcatggcccatcttccttacccaagcatcttacatggaatcaaatgactggatccatggcatcaagaaatcagttctgcaggtctgcctctgtgcttcccctgtggatctggagaagtgacagggtagaagccgttcctgctttgaagttggggccctggccgtctggtgatcagaaaaagggcagattgtatatgtgcattaattaattgcccttatacatttcccatccagaagtatttggtgttctgtaactctgggccttataggggccaaagccatatccaatgggagacagaagtgcattgagacacaaaggaatcacctaagaaagagt

SEQ ID NO: 768889 - DNA, 529 bp, Homo sapiens
ttgtccatttttaatcagattctttttctactgagtcatttgaatttcttatatattctggatattaatcccttgtcagatccatagtttgcaaatattttctaccattatctaagttgcctcttcactctgttgattatttcctttgctgtgaagaagctttttggttggggttatctcatttgtctatttttgctttcattactgtgcttttgaggtcactaaaaaatctttgcccggaccagccatgaarcatttctcttatgttttcttccaggagttttattgtttcaggtcttacatttaagtctttaattcatgttgagttgatttttgtacatgttgagagatagtggtctagcctcattcttctgaatgtgaatacagttttctcagaaccgtttattaaagaggctgccttttctccattttgtgtttttggtacctttctcaaaagtcagctggctgtaagttggcggatttttttctgtgttctctattctgctccactggtcgatgtgtctatctt

SEQ ID NO: 768890 - DNA, 606 bp, Homo sapiens
ccctctgaacctcgcttttctcatttatgaaacgatcatgatggtaacaggtatctgtggggttgctggaaagatgaaatggcatggtgcatacaaaacacctaggatagtgcctcgaatatattatatgtacattgtattaaggattgccattgagattacgtagcatctgttgaaaatgttttcatttttacccttgaatgacacctgcagtcatcagatctgagcgtggaaaagccttcagaaatgactcagctctgcactctcatggaaaggcccagagaagtgatgtgacatgcccaaggctgagaaaagtcagaattaaaatccaggtgattccttgcctggactcctgattgcaaagtacagctcctcagggccctctgaggtcacggccaaatggacacrtcagctactgaatggaagcagacacagcctctcctgctcctccagattcaaatccagctaccccaggagggacctcccaaaactctttcccatcagaaatgctcaaaacccaaaagataaaggaggggagagttgggtttcttagtggaggttatgtgttttggggataagcatgggagcaagacagaagaacaatcc

SEQ ID NO: 768891 - DNA, 639 bp, Homo sapiens
  misc_feature 626, 627, 628, 629, 630, 631, 632, 633, 634, 635, 636, 637,638, 639: n = A,T,C or G
aaatgatgacaaatatatatttatagacatggaaatatgtttgtaatatgctctgaattttacaggtagatattacagattgaactgtgtcattccctccctactgcctaccccaaattcatgtttaagccctaacccyccatgtgactatatttggagataaggcctttaaagagatagttaagattaaatgaggtcacaagggtaggaccctaatccaacaggactagtgtcctgagaagaggaggaagagacaccaagcatgcttatgtatgaagaaaaggccacatgagaacacagtgagagagcagctgtaagtaagcttcagagagaccatccccgatcttggacttctagcctcccaaactgtgagaaaataagcttccgttgtttaagtcacccagtctgtggtattttgttatggtagccctagtagactaacacagtaggttacaagtctacagaaaattgtattctggttttttatatttacatacatatataaatagaggttaacatcataagagtggttaactctgtggtgcttaaaggtgcttttgcttatctgaatcttctaatttttttttctaaaaataactattactagtataaaaaaagaaataaannnnnnnnnnnnnn

SEQ ID NO: 768892 - DNA, 528 bp, Homo sapiens
gtggtttaattgcatatttgggttagtctgtatgtaaatgtttaacatgtgtctctgtgttaaacaggaatcctatccatcttcttcaccgatatggtttgtggattctgaagacccaaatctgacatcagttctggaacgtctagaagatactaagaacaacaatttggtaagaaaataagccaagctattttctcttttcctcatgaacattacatatagaaattaaatgttaagagataatatgatataaaagcatgattaatgattataatcttgtaggaattaaagactagtttgtttkttttttttccttcaaattctatttactacctggtctctcttttatttcccacatgtataaccttaatttagattacaaattagggatctctttttccctgaattctaaccattaagccaaacaagcattttgggtagagaccactagccaaggtgggaagcagaaaaaagaccaaggtaggagtgaagggagagatggggagaatgacaccagaactagtatga

SEQ ID NO: 768893 - DNA, 527 bp, Homo sapiens
gggccgttccccttgccggcctgggctcaaacaacagccggagctgcgccgccccgccccgccccgccccggtcccgggagcaggccggctgagggcggccatggaccccacaagggcttgggccgccgcggactyccccctcggggctaggagacggggaccgagatgggccagaagcccccaagccagcccctggcgagaagccggaaagacgcgccctccgcctcctcccacccaagcctcgcgcagtcccagcccggcctgggatgggcaagtcgcgggggaaaggggcgggcctgccccgcccggggagccggagcctctccggggcaggctcccctttgtcccgggactcgaagcgccccctctccgtcctcgccctgccccgcggggccgcggccgggcgcctcaccgtgatgttgcagtggagcgtgagtggcggcggcagcgagtgcgggctgccctgctgcggcaccaggaactggcagtgcagctcgtccagcttccaactgacgatgcggaatcg

SEQ ID NO: 768894 - DNA, 623 bp, Homo sapiens
gaagttcttgaaggacaatatatataaaaatgtaattattcaaccgtaagcagaattatgttcagtaagccccttagccaatgtctactacaaaatggaatgaactattatcttaataattctttaaacacgttttttaaattgttaaccccaaagtgacaaaacctgagaccatttcccttcattcacagacgaaatcagaagcacacaagacatacttttcagaagtcagtgatgacaggttgtccacctggcctccagccaagatgatattcatatcactgaaagtgctgactacttgctgcagataattactggctcccaccttacagcaattataaccaaagacaaggaccacacgaagttcagggttatctaaaagacctgcagagaaatgaagagcaacagttaaagacagccttaaaacagaaattattttatacatgctgcaaaatgaaatgttactgamttgcactccaccttaagggcaatttagtggcttaagctatcaaattttccattttttattttttatcttattttatatcctcttcgatctctgtatcaagttttccattttttacaaacattatgcaaaatcttaattattttttctattaaaa

SEQ ID NO: 768895 - DNA, 650 bp, Homo sapiens
tccatattccttcacagtctaagcctcttagaagagtgtgattaaaaaattgcggccgggcacggtggctcaatcctgtaatcccagcactttgggaggccgaggtgggcggatcatgaggtcaggagatcgagaccatcctggctaacacagtgaaaccccgtctctactaaatatattarccgggtgtggtggtgggcgcctgcagtcccagctcctcgggaggctgaggcaggagaatggcgtgagcctgggaggcggagcttgcagtgagctgagatcgcaccactgcactccagcctaggcgacagagccagactcggtctccaaaaaaaaaaaaaaaaagaaaagaaaagaaaattggattagtacttggagacaaaagatttcccagcaaaaagcctcatggatcacagcgtacatataccctcaaatacgacttgtggagatgtttccataagcaataaagtaaataatttttaaaaacacactgcttcctcaataattaaacatagaattatatgatccagcaattccatttgtggatatataccaaaaaaagtgaaaacagggactcaaacagatgtgtacacccacgttcatagcaaaattattcacaacagccaaaaggtagaagcaactcaggtgtc

SEQ ID NO: 768896 - DNA, 596 bp, Homo sapiens
ttaccatgaggcctacaaatactatcttataacccattattttaagctgataacaacttaacactgtgtgcgtaagtaaacaaataagcaaaaagaaaaccaataaaactctacaccttaacttcatccccctgctttttaactttttgctgtttctatcttatcatactgcctgtttcttgaaaagttgtagttattatcttggatgagttcatcatttagtctttctaattaagagtggtttacgggctgggtacagtggtgctggcctgtaatcccagcactttgggaggctgaggcaggtggatcacgaggtcaggagttcaagaygagcctggccaagatggtgaaaccccgactctactaaaaatacaaaaattagccaggtgcagtggcaggtggctgtaatcccagctactcaggaggctgagtcagaacaactgcttgaacctgggaagtggaggttgcagagagcaaagattgcaccactgcactccagcctgggtgacagaatgagactccatctcaaaaaaaaaaaaaaaaggtgtggagccaagatggccaaataggaacagctccggtctacagctcccagc

SEQ ID NO: 768897 - DNA, 536 bp, Homo sapiens
ttaggcactctctaatcagatgtcctaggtcctcccaattcttagacctttaatacctgtttttctccctctcttattccatttagtttctcaattcatataaaactgtatccaggccatcaccaataattctaaatgacaaatgtttcttctaacagtcccataatgtcaccccttaccacaaagtcttccttcagcttaatccctcccactctaagttctcatgacgcccctaatcccgctcgaagcagccctgagaaacatcccccatcatctctccataccatcccccaaaattttcrccgtcccaacactttaccactatttcgttttatttttcttattaatataagaaaggaatgtcaggcctctgagcccaagctaagccatcatatcccctgtgacctgtgtacacatccagatggccagttcctgccttaactgatgacattccaccacaaaagaaatgaaaatagcctgttcctgccttaactgatggcattatcttgtgaaattccttctcctggctcatcctg

SEQ ID NO: 768898 - DNA, 642 bp, Homo sapiens
ttccccactaacccttgaactgttttttattccttgtgtgtaatgcagtgtgtaacatagaaagtacacaacagatgcatgaggagtgaatagccaggcctgggtgatgctcatttgcccaggtccatttcaagcactgcagagcagtgtttctcaatcttgagaacacaagaactcagagaataagctatggatccccagtttgagaaaataygaaaaaagtcaaacactgccattcctttagcaccagtgaaatgaaaatacaagcacaagtgtaagcattgaaatttggtagcatatattaaatatttttaaatcaaaatttgagattattttagatacttacgcatctctcacagtatatttgtgaactcttagggacatgagaagcacaatttgagaaacagcttaatagaggaaacgaagaaaggagtgtagtcttgggagtatcacctaaatgtgctgatgtgcagctgcagtgtcagcaaccaacaccagagataatctatgccaatgaactgtggagtcaatatactccaactggctagaaaccacttctgcctttccaggcttatggttgcagcatttgtggaaggtaagaagagaatagcagcttgaggtggaaaaaaaatcataaagttg

SEQ ID NO: 768899 - DNA, 551 bp, Homo sapiens
acaaataaccccaaaatagcaatggcttacaaataacagattttattgtaccatgttggctgcatggtaactgcagttcaggtttgtgtgtttcctttattttagaatccaggctgaaggagtttattagtcygttctcatgctcctaataaagacatacccgaaactggctaatttataaaggaaagaggtttaattgactcacagttcaccatggctggggaggcttcagaaaacttacaatcacagcgtaaggggatgcaaacacatccttcctcacatggtggcagcaaagagaagtgccgacaaaaagggggaaaagccacttaaaaaccatcagctcttgtgagaactctctcactatcacaggaacagcagcttgggggtaactgcccccatgattcaatcatctcccaccaggtccctcccatgacatgtgggaattatgggaactacaattcaagatgagatttgggtgagggcacagccaaaccatatcacgatgcaacccctatttatggaaagagcaatgatagactcactcattagtt

SEQ ID NO: 768900 - DNA, 660 bp, Homo sapiens
acaatacaaaagcacgtagtttaagagctgagacaaacttgtctaattacactcttggggttccaaaaggaaaaacagaggtttctccccaaaagagagtctgaaaacttcttcattttctttaagaaaccttaggctattacaaactattatagaccccccatgcagcagaagatgcaagcgaaaggagagacatcagaattaaatgaagaaaacagatttcagtcaactgggaagaaaaaaaaatttrctcaaaaaagacaaaaatccttggagagggagaaaaaaaaccaccatgaaatccttttaaatataaacacacatacacataaacagacacacacacacacacatatcttggatgtcagcttctaattaagctgagttttaaccattgagctcctttaattttttttaatctcattaccatatttcagctaggacaaattgctactctttcagaagtaccaagtatcaaaccagaaagggcttgatttaggaaacaaactcaggctgttgtggtgaaaaaaagaagacagaaccttaactatggaactgcagcatggggtgacaaccattgctctttcaatttggcctggctagaaaaaaggtgaccttgttatgtaaataaagccccgtacatagtcaaaatcttttttt

SEQ ID NO: 768901 - DNA, 588 bp, Homo sapiens
aagactgaaataacaacaaaaacagaaacagacaatcacaacaacaaaaacaattaagcaaatcaaacacatgatcgtacaacttatgtgattactgagtgctctaatgctaaggagaaattaagaccagctggttgttaatcttaacttcaggcaagacaaaccccaattcagttacttacctagggatgggtctcagactgaagactgctctctatcatcctagaagcagaaaaaaactcaaactcatgttccctgttggaagygagctcaaacaccatagagaaattacctgccttccatcatcatggaagcaggaaaacttgccttccttgtgttggcagcaagtaaaactccagaaaaaggagttgtactgtaataaactttttaaatcatgaccacattttgggagattagggattctctcaagggggtgcttccaggcctcagcaaattttcctattgatttgagccataaagatagctcaagttgatagcaagcacagataggcgatttgttcaaggtcaggggcacctcctctcagaatccctttatggttaccaaaatgtgaaacccgaatatctgag

SEQ ID NO: 768902 - DNA, 588 bp, Homo sapiens
aagactgaaataacaacaaaaacagaaacagacaatcacaacaacaaaaacaattaagcaaatcaaacacatgatcgtacaacttatgtgattactgagtgctctaatgctaaggagaaattaagaccagctggttgttaatcttaacttcaggcaagacaaaccccaattcagttacttacctagggatgggtctcagactgaagactgctctctatcatcctagaagcagaaaaaaactcaaactcatgttccctgttggaagtgagctcaaacaccatagagraattacctgccttccatcatcatggaagcaggaaaacttgccttccttgtgttggcagcaagtaaaactccagaaaaaggagttgtactgtaataaactttttaaatcatgaccacattttgggagattagggattctctcaagggggtgcttccaggcctcagcaaattttcctattgatttgagccataaagatagctcaagttgatagcaagcacagataggcgatttgttcaaggtcaggggcacctcctctcagaatccctttatggttaccaaaatgtgaaacccgaatatctgag

SEQ ID NO: 768903 - DNA, 628 bp, Homo sapiens
tttagtatcagagtaatactggccttgtagaatgaatttggaagtatttcctcatttattttttggtaatactttgagtaggattggtattagttcttctttcaatgtttggtaaaattcagccgtgaagccatggggtccacggctttatttttttgctgcaggacttcttactatgctttcaatctcattacttgttattggtctgttaaggttttgtgtttcctcatagttcaatcttagtcagtttctatgtgtcaaggaatttatttattctaggttttccaatttattggcatatagtttctcatggtaacctttaatggtcttttgaatttccatggtatcaattgtaatgtatcatttttcatgtctgactttatgtaattcaaatgtctctattaatttttatttttagttagtctggctaaaagtttttctattttgtttatctttgcttcattgatattttgtattgttttctttgtttkaatttcatttatttctgctctgatctttattatttgttttcttctactaattttgggtttagtttgttcttgcttttctaattctttaaaatgcatcataaagttgttcaattgaagtttttctactttttttgata

SEQ ID NO: 768904 - DNA, 541 bp, Homo sapiens
atattgagcctgctgaaaataaataccatttgttctttctgagtgtgcctgcaggaagagtcttttcagcatgaattgcatatttaagtttcctgctgctttcaatccatctaggattaaccagaatttacctgtttacagtaaatgaaagggatattggatatttgatcaaggacagtcctcaggccttatagttccttcyatttgttaaattttaatgtcgtttagcctctgagagtggagaacaagtttcctcgagaccagattgctctaatttatagggaagctttttgaatgaaatggagctgcaaggctagtttttatttgttttggcttaaaatgtttgctttttttctatcacttgtttgtcacaggggatccattgaatgtgtggatttttacagatccgaaaaatctgtcgatatgagatgagttggtctgtatttgctgctactattacgatctcttctctcctgggacatcatctacaaacacagttcataaaaaggaagtgattacagtgttttaagtcatgattagg

SEQ ID NO: 768905 - DNA, 578 bp, Homo sapiens
atagtaaaacatgccaactttgtgtccccttttttcagatcaggcaatgtaattaaaaatgagtcacactttgggaaacacagaaagacaccttttcttgaaatttaggtacagtgttatttctggtagattccagtggtctaatttattcaaatgtccaacaataacccagcagggacagtgcctggggtcctatcataaagtttctgtctctcaaactactttcttgaaataaaaaagctatggaaattattttcccgtggccttctttgtccttcaawagaagcaaaaatgaaataatctcttccaccattctgtgtggccccattgctcctcaatccattgtaacaatcctacctctttgtctagaatgagaccatgctcaaaaggcagaaaggccagcataaaaaagcaaaatagtttgaaaatcaaaactgcagaataaaaccactataaacttccacaatcagtgtagtgcataaacatgtttctgctctctctgtagacatataatatataacatatttatatacacacacacatatatatatcagatgcatatgatatatatataagta

SEQ ID NO: 768906 - DNA, 578 bp, Homo sapiens
atagtaaaacatgccaactttgtgtccccttttttcagatcaggcaatgtaattaaaaatgagtcacactttgggaaacacagaaagacaccttttcttgaaatttaggtacagtgttatttctggtagattccagtggtctaatttattcaaatgtccaacaataacccagcagggacagtgcctggggtcctatcataaagtttctgtctctcaaactactttcttgaaataaaaaagctatggaaattattttcccgtggccttctttgtccttcaatagaagcaaaaatgaaataatctcttccaccaktctgtgtggccccattgctcctcaatccattgtaacaatcctacctctttgtctagaatgagaccatgctcaaaaggcagaaaggccagcataaaaaagcaaaatagtttgaaaatcaaaactgcagaataaaaccactataaacttccacaatcagtgtagtgcataaacatgtttctgctctctctgtagacatataatatataacatatttatatacacacacacatatatatatcagatgcatatgatatatatataagta

SEQ ID NO: 768907 - DNA, 517 bp, Homo sapiens
taatgctagaatgagctaaggctatggggattgttggcaattcatagatcatcaaggctgccactcctactactgacctggagagcaaggctgttgggatggaatgaacatatttttgcctaaaagaagaacttaaattctgaagcaccagctgagggaaractatggactaaattgtgttctggcaaaattcatgtgttgaagctcaatcccatgtttctgtattagagacacggcctttaaggaattgattaaggttaaatgaggtcattaggatagatcccacatgtaataatactggttcccttataagaaaaagaggaggcaccagagctttctctccaccatgtaaggacatagtgagaaaatggccatttacaaactaggaagagaaccatccccagagctcagccatgttggctccctgatattagtcttccaacctccagaactttgctgtttttaagccatcccttttatgatgttttgttttgaaagactaacctggttaatacac

SEQ ID NO: 768908 - DNA, 594 bp, Homo sapiens
aaggtgtttgaaaaaattacttttggcttaaatatatatttataatcccttctagaccagatattacagcaatttctttttcttatacatctactggcccaaaactttcatgttgctgaaaaaagacagcagacaagtataaaaatttcaaatattcatacaaaatggtctctacataattcattcttattctcagaatttgttggaccaacttaaaacaccagaagaaatctcttaatgcctcagtgattctcatttatacaattaaattacacaaaatataatacaataataaagaaaggaaatacctaaaattaagaatgttaacttttgaaatacccaaagtattggtcccagaaagaactcygagttgggtaaaaggaattttgtttgaccatttccttatgagatgtctcaaagtaatgttgtctgctcttacattgcttgagatgccattaagaatttcagagaagcagcatattcatttatttatttacttactaacatttgtttgttccatgactatagaaatgagaaacaagaaagatacacaatatttaaattcattgtaactttcatttaaagttttccttt

SEQ ID NO: 768909 - DNA, 599 bp, Homo sapiens
cagttgtttcagtatcatttgttgaaaagactatcttttcttcattgtgtggcctttgttcttttgttaaagatcagttgactgtattcaagtgggtccattttggggctttctatcctgttccattgacctattggtttattcttcacccatactacacttgctcgattattgtacctttatagtaattttgaagttgagtaatgttcgttcyacagcttattgttttccttaatattgtgttggctattctcggtcatttttttccatatataatatgaaattagtttgtaaatatgtgaaaaataacttactggaattttgattttcttttcattgaatctatagatcaagttgcaaagaatatcttgacattattgagtctttgtatccacagacacacaatatgcctttatttagttttttgattctttaatcacagttttgtagtttttgtcatataattcttatacgaattttcttaattatatccaagtattttattttttgcatgctattgtaaattacattgtgtttttaatttaaattttacttgtttatttctagaatagaggaaactaaatgacttttgtatatta

SEQ ID NO: 768910 - DNA, 599 bp, Homo sapiens
cagttgtttcagtatcatttgttgaaaagactatcttttcttcattgtgtggcctttgttcttttgttaaagatcagttgactgtattcaagtgggtccattttggggctttctatcctgttccattgacctattggtttattcttcacccatactacacttgctcgattattgtacctttatagtaattttgaagttgagtaatgttcgttccacagcttattgttttccttaatattgtgttggctattctyggtcatttttttccatatataatatgaaattagtttgtaaatatgtgaaaaataacttactggaattttgattttcttttcattgaatctatagatcaagttgcaaagaatatcttgacattattgagtctttgtatccacagacacacaatatgcctttatttagttttttgattctttaatcacagttttgtagtttttgtcatataattcttatacgaattttcttaattatatccaagtattttattttttgcatgctattgtaaattacattgtgtttttaatttaaattttacttgtttatttctagaatagaggaaactaaatgacttttgtatatta

SEQ ID NO: 768911 - DNA, 533 bp, Homo sapiens
aaatagccctaaacactccattgcatttactggtatttgctatcatatcaacattgtctcaggtctcagtccttatctaaatagttcacacccttgctgaactcatttcgaatgctgtatttatcctgatgactttccagtgttttctatagcatrgacctttcccttcaactccagaactgcaaccccgagatgtactagacatcttcacttgaatgtttaataaacagctctcaaacacaactcgaccaaagtaaacaccaactgctgagttcctaacaggcctggggtttgcttttaccccacttataagcaaagaaattagcttgtactctttaatggatgttatcagaagacacaaaactcttgggtcagagataaaagactattactatgacaccacaaacagtattagcatcaatatattagcatggttttcccttgccttccagtcctataatgttagggggccaggatggatgatacacttgcagtggattttcattgctgctgaacaataccggctttgcata

SEQ ID NO: 768912 - DNA, 611 bp, Homo sapiens
gaccccagctggtaaaatgggcttgttcatttcctcatggccctgttttcccaccatgctacagctggcccactaatatgcttgtattattttcttacatagtttgtttacagcccatctttttccactagaatctaagtcagtggtccccaaccctcaggtcatggaccagtactggtccatggcctgttaggaaccaagtagcccagcaggaggtgagtgagctttgcctcctgagctccacctcttgtcagatcagtggtggcattagattctcayagaagcatgaatcctgttgtgaactgcacatgcaaaggatctaggttgcatgctccttatgagaatctaatacctgatgatctgtcactgtctctcattccccccagatggaactgtctagttgcaggaaaacaagctcagggctcccactgattctacattatgatgagttgtataattatttcattatatattacaatgcagtaataatagaaataaagtgcacaataaaggtaatgtgcttgaatcatcctgaaaccattctcccacccgtttgtagaaaaattgttttccacaaaattgttccctgatgccgaaaaggttgaggacca

SEQ ID NO: 768913 - DNA, 568 bp, Homo sapiens
tggagattaaataggcagacaacctccctgggctgtgagagaaggctagactgtgtgcttattggtattttcacaggtagtttcaagttgactttggaaaaaaaaaatggctgtctatttcaggtttcatattaagcaaaggattgctctgaaaaacatttagtccctacccttaccaaaaccaaacaaacaaaaaagaaaaagaaaataaaagattaaaactgtttattttgctgttttcagtagaaaacacagataaatagccataaaagtatagctacaattcttagcaccaactatayatcagcataatctggggagtattttattaaaagtatgaattccaaggcaccaattctggctgatgctgaagtacatccttgagtagcaaccattgaattgtaaaatgaggaacagaaaactaaagcttgccaataagtacaattgccatgactacagaatttattgcaggatgctatgtaattgtaataatgagtttttaaaaagtagaaaagacactgacaataaagattctagttaaaaataaatatataatttcaaaagatgc

SEQ ID NO: 768914 - DNA, 642 bp, Homo sapiens
agaagacttggattataaagtgaggttaatttcagctcttagcactcaccctgtacacatgtttctggaaattctgcacaaattttgttgtggggcaagacaggtatattaaatccttttcaccaagtattggggatttatgctctgattttttattgctgcttttgaatactgaggtgaagacagataagttgggagycattgaggttgtactgctccttttgttgcaagctgctccaatttcagctcaagggacttcccagaggttttaaagggataggacccccatttttgctttttaaattttttccctttttctcatttttgggagtcagacattaaagattagaaaattcaataacaactacatatatgggtaaaattagagaataaccacacatacctaggtaaaagcaaaagcttacagaatatttgaaaaaacaattaattttacatcaggctaatccttggcagacagataagctgcaaccatcccccatcctaaaataataacataaaaacagaaaactttggtgacggataacaatatgatttccacagttacaacagcttcaaatgtccagtttataaaaaagactcacaaggcatacaaagaatcaagaaagtttggaacatttaaag

SEQ ID NO: 768915 - DNA, 609 bp, Homo sapiens
tattaatattgtaaccacaaataaaatatttatagaatgtagataagaaaataaaaatgaaacatacttttcaaaatcaaaacataacaaaaaaatcaactaaacacacaggatggtggtaatgcaagaactgaggaacaaaaaatatcaaagtgaaggaagtaagttagtctttatctgcaattactttaattgtaaatgaattatacttcccaattaaaagatatagattagtaaaatggataaaaataaacgatctaaacttatgttttctacaggagactcaatttagctgctaggaaacaaataagttgaaaatgaaaagatattccacacaawttttaacgaaaatagaacaagggtggcaatacaaatgtaaacaaaatatacataaatcaaaaagtttatgagacaaagaaagatattataattaataaaataaaaatattataattaataaaacatttaataaagaagataacaatgataaacatttgtgtaccttataacagaccatcaaaatttgtaaagaaacaactgacagaattgaaagaagaaataaataattctacaataatatttggagacttcagtactccacattcaata

SEQ ID NO: 768916 - DNA, 478 bp, Homo sapiens
acttcagcattcagttataaaacaacatttaagaggcaataggaaaaaggactaaaagtgactaggccgggactttatatatctaaatccattcttagtgggattttaaaataaacatagattgtaagccagacagttgcacaacagtgactggaacctgaaagagtgtagcctggggaaaaawaaaatggaactcagttttagaaatgcacagcaaaataggaaaggtgcagccaatcatgtggagaaacgatctgtcgttcaatgggaaaaaagaacccatatgactcccattatttacatactagttcctttagggattggacatcttggggactcaagaaatttaggcaaagaagggttgtctacacagcttggtaccaccattgatgaagggtttgagtgagatggggtagttgccactgccccaaagtgcttagtattactatcttagtctgcttgggctgccataacaaaa

SEQ ID NO: 768917 - DNA, 478 bp, Homo sapiens
acttcagcattcagttataaaacaacatttaagaggcaataggaaaaaggactaaaagtgactaggccgggactttatatatctaaatccattcttagtgggattttaaaataaacatagattgtaagccagacagttgcacaacagtgactggaacctgaaagagtgtagcctggggaaaaaaaaaatggaactcagttttagaaatgcacagcaaaataggaaaggtgcakccaatcatgtggagaaacgatctgtcgttcaatgggaaaaaagaacccatatgactcccattatttacatactagttcctttagggattggacatcttggggactcaagaaatttaggcaaagaagggttgtctacacagcttggtaccaccattgatgaagggtttgagtgagatggggtagttgccactgccccaaagtgcttagtattactatcttagtctgcttgggctgccataacaaaa

SEQ ID NO: 768918 - DNA, 552 bp, Homo sapiens
tatttccaatcatttctttcactctgccatatcagcaatgctttctaactcccactgcagcctccactgctaccaccctagtcacagccaccactcttcccactgttggtattcttttgttttttgagatggagtctcactctgtcacccaggctggagtgcagcggcacgatgttggctcactgcaacctcctcctcctgagttcaagtgattcttgtgtctcagcttcccaagaagctgggactacagccatgagtcaccacacctggctaattattttgtatttttagtagagacggggtttcgccatgttgaccagcctggtcttgaactcctgacctcargtgatctgcctgcctcggcgtcccaaagtgctgggactacaggcgtgagccactgcgcctggccccactgtttctattcttgaccctccatagtatgggccagagaacttactctgtgaagggtcagatggtaagtattgcaggctttgtgggccagacagtttctgttacaactactcaacactaccattataatgcaaaagaagc

SEQ ID NO: 768919 - DNA, 548 bp, Homo sapiens
  misc_feature 1, 2: n = A,T,C or G
nntagcttcttgtttcttattttccttgcttacagtatttagtctgcttatccaattcaacccttttgcattaatattttatttcttgcttccccagttagattgtggtctagactatgcctcatatgctttttttgccctttaaggctcagcttagctattaccttctctagaayccttgccttactatccttttctccgaccctgaacatgtatatatatatgtacatatatacatacacatgtatatatatacacgtgtatatgtacatgtatatatgtatctatacacatatatatgtatctatacatatatgtatctgtatagatacatatatgtatatatgtatctgtatagatacatgtgtacttatatatgtacacatatatatatatatatatatatatatatatatatatatatatatacacacctccatttttgtgcccctacagcactgagtccaggatatcctaactgattacttagactattttatagtaatctggtttcttcttttcgtctctcactattgcattatttccat

SEQ ID NO: 768920 - DNA, 682 bp, Homo sapiens
tttgggagaatgctgagaatgatcattttaaacatttgtttactttgtatgaaaatttttggataatcacataaaggagagtgttttctccatgccacccttgggcaaatacagttttgatgcaacaatattcggtagtatacttttaaaaatattttatctagctgatattaagcaatcccatcaagggattcttcattttgtaaaatacaattttcttttaaatatcttgagcaaaactttcgtatacaaagaaggctggctttaaaacaagacatatccagagctaaatgtagtttctgtcacctattaacattgtaaccttgtgtttaaatgttcccagatgaggtgtctttatgtggaacataggtcaataatactcaaacgtgatagtattagtatcaaaggagatagataaggcctaaaagagtctctggctcaaggtcatggctcagtaaagattcattccttattctttccaaacatgagaacgcatacactgagaaccctgatactgtttaagtaktctagataaaattcatagatatggctagtaaaattcagtggtatatagacattaccccttaactacacaagtaaatatgttttatttcaacacatatttgggcacctatattacaactggaaattatatatttagctgtagttaaggtccattgat

SEQ ID NO: 768921 - DNA, 552 bp, Homo sapiens
aacagaagttggagtgagaactatattaaagaaggaactattacgcaggagtggggccaatgaaaatgacagtgatcaagagccttgaaacagaaaacataggaggaaaagaattaggtcacataggctaatatgtgcaaagtctgatcagttcaacccagtaaagaaaaataagaagcaatcaagagtaaaattaagaactgatagctgtttgctctttgctccagtcctaggctaccatttgaatataggtggtcataacttgcaagatgggttttattttggggaggtatggtctcattggttctgccatagccaaattcttacaaaaacaaaggctcagctttttttgagggttataaaatgctcaatgytaaatccaagtgcatttgatttattgcttataagccagtgtattctagggagttatatagttaatatatagcaaattatatagataatattgtgaaaatcatgtgtaaaatctgagtcactagggctgaaatcaagaatccatggcactctcattagtcaagttcgtagacttagtag

SEQ ID NO: 768922 - DNA, 562 bp, Homo sapiens
agactgcaacccatggaacttcctgttgtcattgaccttggtgatgtgagtattctggaaaagctggggggctttgtcacagagctaaacacacacacctgacccagaaggtagagatgctgaagcaggatccagaggaaggtggagcagttccaggcccagacactgcctcaccrgtgagatgagtcaaaaagccagcaacagtggatgtagtggatgtgaaacacataaggactgcagcctcccttcccccttccaaacctcccaaaagtatctttcctgtggttttcccctaagtcgaaatatacaggaaaggaaatgctttggaatttagttcagtcaaattgtgttgacacattataaagctattaaacttcacaaaagttattttaatggcaatcagtaaaaacaaaatattgaactgcaatgggttaatactactgtctctttcccctgcccttcccactgttacacttctcaagccaggtggcattggagaggccacagaaacttttaagatccagtgaggggaaatgatgctgtggatacatatttagtttac

SEQ ID NO: 768923 - DNA, 599 bp, Homo sapiens
tctgagcctccatttcctggctcaagaaaagtggcgatggtggggaggcataatatttacccttctggaattataatgaagatttagtgagcttacgtatctaaggcgcatggccttacaaacgttagctccttccctgatagtgcctgacaactaataaaatcctgtctccctctgaggagctgcccattccatattcttatcaacttacaccaggaaggatatttaaagccatggcagatggtagagttcctgttctcaggtcaacaatcaaactccagttgttctattgatctgcccatctgttcaactgcctgataattttcccatcccctttccttgctataccccaaaccctaaatccagaatggatgcatgtgatattctttcctttccaagaatgtsttaccttgacattcttgtccaggttggctctgagcatgaatgttatccactttcaccctaataacctctgttctgtgccttctatttgacctggaattctggcactctcatttcctatcagaagggccaacctttagctggtccttcagtttggcctgatacagtgaatttgactttgaggttgagaggtagtt

SEQ ID NO: 768924 - DNA, 594 bp, Homo sapiens
tgcacggtatgtgtggttctttgtcagggccctggctcagctttactctctattcagccctccccagcgctggagccatacatccaaggtacacctcgccagtgccctcgcattgggctggtgctgatacactctccctgcttaatcccccgaaaaagaatattagctgtgatttcagttttaatcattgaaaaatcgaaacctactaaatccaacatattgctgtagttactgagggtctcacactggaggatccatttmttctctgcagtcgaaaaaattagtggctatgttaataaatatacatttacaatcagtcttcagctcattatttttgcaatataattcagatccttaagcctctgagatacgcagtctgcagttgtagggcatagaaatacacaggtgttaaattatctgcagagagcacgtttactgtaattttgaattcagtagaagtacattatttattgcttggaaaaattatagcactaaaatagaatataaaaactataacattcaaggaaattgtgttccccagctcagaaccaaaactatatctacgtacaatgtgtggaattttgttataatgtg

SEQ ID NO: 768925 - DNA, 532 bp, Homo sapiens
ccaacatggtgaaacctcatctctactaaaaatacaaaaattagccaggcatggtgatgtgtgcctgtagttccagctacttgggaggctacttgtggagtcccagcataagaatcgcttgaacccaggaggcagaggttgcagtgagccaaaatcacatcactgcactccagcctgggtgacagagtgagaccctctctcaaaaaataattaattaattgaatgtgataattatttaatgtgataacaawtaaatttgaaaataattaatgtgattttatatccgaggttaattttttttcttacaagtagaatattccacatggttaattccgcaacatttatcaaatgtatataatgtacaagtcaatatgctaggctcagttaaagaatacaagttcacataacaaaaactctgtggtggacttactaagctctatatattcttttgaaattgctatttatatttagttatatttataaatttattaaatatatttacgttatatttatattaaaacccctttgtagg

SEQ ID NO: 768926 - DNA, 548 bp, Homo sapiens
ggtgctgggagcctgtagtcccagttactcaggaggctgaggcatgagaatcacttgaacccatgcagcagaggttgcagtgagccaagatcactccattgcactccagcctgggtgacagagcgagactctgtctcaattaaaaacacacacacacaacaaacaaacaaacaaaagtaaggcaactccatgtggttgtccaggttgtgcactatactaagagggaaggttcaccattytccacccacctcgccctatgtttggtcagagctgtatctgcctagagagggtggctttttctaatttgtacaaaggcattatatgaggtaagatgactaagagccttgtgggctaggtgaggatttaagatttttatactgaagttgaagagaagctacttgaattaatcagcactctctgagaaacagaaccagtaagatgtgtatgtatagatagctatatctagagagagagaatgcaagagagagattgattgattttaaggaactggctcattggattgtgaaagctggcatatccagaatctg

SEQ ID NO: 768927 - DNA, 621 bp, Homo sapiens
cctcactgcagccttgaactcctgggctcaagtgatcttccttcctcagcctctagtagctgggactacagtcatgtgccaccacacccagcaaattaaaacaaaacaaaacaaaaaaactattttagagatgggatcttgctatattgcccaggctggtctcaaactcctggtcttaagcaaacctcctgcctcagcctctggagtaactaagattataggtgtgcctggcccaatgaaaatctttattcctaaggtttttataaaagatcaaaggcaggagaccagaattcagtaagagggggtctctttaattgaaccctaaagcaaaggctacttgtgagccaagcaaagcatgggctggctggctactcaggagtcaagcccagctcctggtaccgtatgtcctagaaatctactgcctgctctgggtaaagattttttmattaaattgcggagcaggctgagcatgttggctcaagcttgtaatcccagcactttgggaggccaaggcaggaggatctcttgggcccaggagtatgagacctgcctggaccacacagggagaccctgtctctacaaataactaaaataaaaaaattggataggcatggttgtgga

SEQ ID NO: 768928 - DNA, 522 bp, Homo sapiens
caaactgaacacatacacacatgtgcctctctgtgttcttggcagttaaggggacagcgtccatatagtccctaagcagagaaaccccaggcttatctttgactcctctttgtgagacctatgatgttacaattatctcttgaatataccctcccatttctgtccccactgctcatgatctatttcagacacaaataattacaacctactatggggtctccctggcttgagcctctcccttctccatagttctgccagcgatcttttcaaaacacagatygatgcctcctggctccccatgacctatagattgaaatccaaatcccctcatgatcctttcctgcttcatctcctgcccccaccttcctaccctgggctctggcagactgcttgtcccctgaaaagcccacattcctactcattttggtatacttgttccctttactccctcctccgagtctgaccctttcttctcttttctgctgctcttatttgactttcagctccttcctgggactgatc

SEQ ID NO: 768929 - DNA, 625 bp, Homo sapiens
tgggcccagtgaggagcaggacttgaggctgtaggcaaggggagttgttgaagcgttttaagcaagtgggtagcatggttacagagctgtgcatttcacacaaatcacccaagctacagatcagagaaacattcccaagggacggaattggagcctgtgctggagagtgtctggggagaaatgatgaagtcaagaagacaaaggcatgggcgggattagctagttgtggagattgatttgatgtgaactgtggaagtaaaagttgcctcttggcttctgacatgggtgaatgctggtgtcctggactgaggtcagaaatacagagggaggaacaggtgtggaggggaaggtggtggcttgattttgkgcatgttgagcttgtaaaatctgtgagaatgctagtacatctattccattggaagttagatatgtatcactgaagcttggagaacagggctgtgtttggtgaacgctgagcataccattgggtggtagatggagattgcaaccctaagcccagacatgctctcctaaggtaattgtgtggtgggaggagtatatgagtcaacactgagattccaggagacatcagttccaaggatcccacagaggagactagaaaagg

SEQ ID NO: 768930 - DNA, 596 bp, Homo sapiens
ttttactgccctaaaaaccctctgtttactttattcattattattattttttgaaacagggtcttgctctgtcacccagattggagtgcagtggcacaaacatggctcactacagtctcgacctcctgggctcaagcaaccctcccacctcagcctcctgagtagctgggactacaggcatgcaccaccatgctcagctaactaaaaattttttttttgtagagacagggtctccctgtgttgcccaggctggtcttgaactcctggtctcaagtgatcctcctgcttcagcctccaaaatacctrggattataggcatgagccactgtgcccagcctgtttacttcttaaggatcaaattaatagactgtagcttacagtgttaatgtaaggatgtagcatgacttctgctaaaaaaaaccactttattttgcaaggctcttggtctcagttctgcctcccctgccctatgcctgtgtgtctgagactgtcggggcagggctcagggccatgactgggtggtcgcctacacaggcagtggccagcatggctttggaggctcaccctgtttcctagctcctctttcagactcatag

SEQ ID NO: 768931 - DNA, 600 bp, Homo sapiens
atcccattcataattctctgtctagtctaaaccatagatacttattgctaatgtcatataaagctgtgtgtgtgtgtgtgtgtgtgcacgtgcacatacatgtgcctgtttgcacataccttgtacaaaagtgctactttgcaggagggagtagaacaaatcacataattcaattctttgttgcatgaccctgggtgcttggcttagtccaattcaggtcataggctgaaaacaaactactagtcccagcccaattttgaggatgtccaagaggcagactgttttkatcccagataaccaaagaaaagcatgtaaggatctggaacagatactaattgtgagaacggtagcttaagcctagaagataccgctgtactggttgatttcttttttctttcttccttcctcttccctccccatggttgattttaagctgtttcttagctgcaaagtgaggaattttctaagaattatgttaaaatcagaatcaattaaagaatccatatagtacctgcaagtaatttttttctgaatatagttaccccctgaattagggatgtactcttaaatacggagtctattatgcactaattaacaaga

SEQ ID NO: 768932 - DNA, 619 bp, Homo sapiens
gacagtaaatataaataaacaaatatccagggtttttttgtgtgtgtgtgtgtgtgtttttttgtttgtttgtttgttttctgaaaaatggctattataacacactaaaagcatggtcagtttcactgtggttgcttttcttgataaaattatctctaattctccttatgtacctayttaatttgtattgctattaatgaatcctcaaatacatgaaatctcctaagttgctataagttaatttttttacatgatttcaatggctttttcttttttgcatttgaaggaggaattagaaggtcttcatctatgtcttatgttgatggcttcatagggacatggcccaaagagaaaaggtaaacaaagagaattacttttagtgtattcagattattaagaaatgcaaattgcatctgtgtctctcttttattgataaccaaattgctaaaacttttaattagttcctaaatttgaaaaaggcagtataggcagatgatagagatgtaaaagaggctaactttaaaaagtagctagatagccctccccttaccttgaagacagtatgattatgagaactggggaaagaaaggaaatgtaatttcaaataattcttgttaaa

SEQ ID NO: 768933 - DNA, 558 bp, Homo sapiens
gccttagataacattttaattattttatttatttagttttgagatagggtctcactttgttccccaggctggagtactcagccttagataacatttttaattatcttaattaatgaattaattattttcgagacagggtctagctttgttgcccagtctggagtgcggtagcatgatcacagctcactgcagcctcaacctctaggcttcaggcgatcccctcaccacagcctcccaagtagctgagacaacaggcacacaccacatgcccagctaatatatttcttttatttttagtagagatggggtctcatatgttgcccaggctggtctcaaactccttggcttaggtgatccccctacctcgccctccygaagtgctgggactataggcatgaaccactgcacctagatgacattttagaaaaggcaaaactatagggacaggaaacaaatcagccattgccagggatggggaatggggaaggggttgaccatagagtcatgggggaattgggggggtgatagaactgttctatagcttaattgtggctgtag

SEQ ID NO: 768934 - DNA, 603 bp, Homo sapiens
aaagatcaaaatgtatgtattaagaatgtaataaataactagttctttttaaagattttttattttgttgttttattttacatgataacagaaaattcaaacagtacaataaaaaataaagaagaaaacaaaacacccccaagmctcaccaccaataactagttcttaacagaaattgctaagttctattagctggaaacataatttcctgtttttgaagatcgactattattctatatcatttattaggccactgcacatattcttatctgtctaaataatctgaagctcctaataaaaaacaaccctgtcaacttagacctaaatggaggtgttttaccattttattctttctccacagtttccatggaaacatgacggttatgacaatgcaggaagggagaatgatgactgttattcaaagataaaaatgatcacagaactaaatacttaggattagtaagaacttaaaaagcaccctggaattagtatttgagttatttaagtagtgaagagaaaattaaatacatattcaccatgtaaggtaaaacacagctaatgttttctcgctaaagtttccgtttatgtggcctttgtctctgg

SEQ ID NO: 768935 - DNA, 532 bp, Homo sapiens
tagttggatttttctctaagtagcagaattagaattggttgatgatccaagtctctgtctaaacttcttgatcttcttttcaacctataaatacagatagagtttatcaatgtgtgctgggttcattatattactggaagattgcaaaacacaagcgtgtttttaaaaacctgccattcttatttacaactcttcaaaattaagctaaggcttttaartttgttaatttttatttactttagtgatcacttataagtaatacctcacatttttaagcccattcttactgacttcaaattttagagtgtccgaatgacaatcagtttttaattttaattaaatatttttatcaattttgaattaattatatttatggattaattatcctaatggaatcatttaaatcaaaaacttatagtcagatatttgccaagaacattttgtgttaaaatatatgaattggatatagtcaggaaaaagtctaaccctatgattttcatggttcaaatgagaactgaaaaaatggaaattg

SEQ ID NO: 768936 - DNA, 601 bp, Homo sapiens
atgcagtttgataaatatttgttctgtggaaagaaataatttgtttgagaacttcattggtgactgatagacatagtttttatgacttagcatcctgtaattgagccaaagaaattgtgtttacaatggcatacgcagtgtaatctaactcaagagaaaggaaaaatagtaattttgtaatggccgagaatgacttcaggaaggaagaaacaatgagcaaatagaatcaggaaaaactataataattagaatgataataaaagtagtaatgacattatattagttttctgtgattaatgtgacaaattrccacaaaatgggtggtttaaaataacagaaatttattctctcacacgtctggagcccagaattcctacattcctgtcacagggcccaatcaagatatcagaagcacacttcttctgtaggttctggaggagaatcaagttctctcctcttcagattctggtggctactggcattccgtggtttgtggttgcgtcactccaatctttatctctgtctttacctttccttttggggtgtgagtgtgtgtgtgtgtgtgtgtgcatgtgtgtgtaagctcactctgtttcctttt

SEQ ID NO: 768937 - DNA, 590 bp, Homo sapiens
atttttgtggagtcagtggcattgtcccctttatcatttctgattgtgtttatttggatcttctctctcttttctctagctagtggtctatcattcttatttattctttcaaagaactaacttctggttttattgatctttatatggtttttcacatctcagttttcttcagttcagctctgattttggttattccttgtcttctgctagctttggggttgctttgctcttgtttrtctagttcctctagatgtgatgttaggttgttaatttgtgaccttctaactttttaatgtggccatttagtgctgtaaactctccttttaaccctgctttagctgtgtctctgtgattctggtatactgtatctttgttctcattagtttcaaataattccttgatttctgccttaatttcattgtttaacccaaagtaaatcaggagcatgttgtttaatttccatgtaattgtatggttttaagtgatcttcttagtattgatttctatttttattgcattatggtctgagagtgtggtggatataatttcatttttttaaaatttgttgagaattattttatggtcaacta

SEQ ID NO: 768938 - DNA, 654 bp, Homo sapiens
gtcttcttattgaattgaacattttaccattatataatgcccttctttgcctttatttatcattgtcggattaaagtctgttttgtctgaagttagaatagcaacccatgcttttgttttgttttgtttttcatttacttggtagatttttctccatccctttactttgagccaatgagagtcattgcatgtgagatgggtcacttgaagacagcatacagttgggtcttgcttctgtgtgcaacctgtcgcttggtgcctcttcattgtggcatttagcctgtttacattcaaggttaatattaatatgtgtggatttgatcctgtcaccatgttgttygctggttattattattattattattattattattattattttttgtttttgagatggactcttgctctgttgcccaggctggagtgcagtggcataatctcggcttactgcagcctccacctcccaggttccagcaattctgcctcagcctcctgggtagctgagattacaggcatgtgccacttgcctagctaattttttatttttagtagagaccatgttggccaggctggtctcaaactcctgacctcagatgatctgcccacctcggcctcccaaagtgctaggattacaggtgtgagccactgcaccca

SEQ ID NO: 768939 - DNA, 654 bp, Homo sapiens
gtcttcttattgaattgaacattttaccattatataatgcccttctttgcctttatttatcattgtcggattaaagtctgttttgtctgaagttagaatagcaacccatgcttttgttttgttttgtttttcatttacttggtagatttttctccatccctttactttgagccaatgagagtcattgcatgtgagatgggtcacttgaagacagcatacagttgggtcttgcttctgtgtgcaacctgtcgcttggtgcctcttcattgtggcatttagcctgtttacattcaaggttaatattaatatgtgtggatttgatcctgtcaccatgttgttcgctggttattattattattattattattawtattattattttttgtttttgagatggactcttgctctgttgcccaggctggagtgcagtggcataatctcggcttactgcagcctccacctcccaggttccagcaattctgcctcagcctcctgggtagctgagattacaggcatgtgccacttgcctagctaattttttatttttagtagagaccatgttggccaggctggtctcaaactcctgacctcagatgatctgcccacctcggcctcccaaagtgctaggattacaggtgtgagccactgcaccca

SEQ ID NO: 768940 - DNA, 608 bp, Homo sapiens
cccaaactctaggatcccctactctacaaaggagtgtgaatacataagtatccaacttgctgacacccaaaagtgcaacagtagcatagaggaagtaagggttctgcttggaagaaaagaaagtaataagatttcagattacccaccaggatataacttgggtgcacatctctcactgttctcatttagcccaaaatccacagcagcatgaaaatatgcaaacagagaacagtatgctggtgtcatttagatgcacaaactttgatatcacacatacagtgacatctaaggaatcatcaccgcactaacattcaatttccttacctataagatggaggtcatagataaacacatctcagactttggagcgagattgagagtatgtatgtatagcactttgtgtagtagctagcatgcagtaagtacaattactcttggaaattatttttattttytaaagaaatagtagctatggcttcacaaacaaaccatttaaggattctttaatagccctatgagactagagcatgaagtttgaaaggagtggctgtgaagaaagaggccagataaagattacacagcgaagttccattaatgccccccaaagg

SEQ ID NO: 768941 - DNA, 536 bp, Homo sapiens
tttagatttaattattcaatatggaataatagaaactacaagcaagcattaacccaggtttacagttactcaaatagcaaggattaaacaatatacaatgggttgacaaatgtgctgtctcctactggataggagacaatggaaacaagtttcattggtggcttgggcaactgatgcaaatgtactagctgggagataaatcagacctcagccctgttggtagtatagacatcatcacaaaggatattttaataatgacactgtggctagcctttcttttccttcctccgttactctctacttataatttgcataataaatgaaactcctattttatctctcattccaatggcttctcttaggaaattaatggtttaraaaaatagcttacagctgggagccgtggctcacacctgtaatctcagcactttgggaggccgaggcaggtggttcacaaggtcaggagttcaagaccagcctgaccaacatggtgaaaccctgtctctactaaaaatacaaaaattagctgggcgtgg

SEQ ID NO: 768942 - DNA, 646 bp, Homo sapiens; identical to SEQ ID NO: 756767

SEQ ID NO: 768943 - DNA, 573 bp, Homo sapiens
ctttaaaagtatatccaatttaggccagataatatgacaaaattctgaaatattgtagatttgtgatgaatacatttttaaaaatctatatgcacagaagatatcttcaaaatgaagcactattttgtatttattatatttttaaaggatgtgggcactttcttaatagtcaaatggaaatatatttcagraaaagctaaatttagtattatattttctattttgtgatggtagtttgtttattattgttattcatttatttgtttttggctggcagcaattgatagtaacttatgctgccatgaacaactaagaaataagtcattcacataatttatgaagaacccaatgagcactacagaagtttcctgcccattatgttcatttcaccaaaaattcccactatgaaagtgataacgaattgaaaatacattgcttacatctatggagcagaaagaaaatccccactgtgtttctgaataggagtgttttataaaacaccagatagagcctccacagagacaaccatgaaggtgttggggatgaaaagaattagaaataataaacaacaga

SEQ ID NO: 768944 - DNA, 628 bp, Homo sapiens
agagtagggtgggagagattaaaggcagcgaaacagaggatgcttctgaagtaagaatgtcaataacctgaataaggcagtagaagtagaaaggaaaaagaggaacaaattcaagagagattgcaaaggtagaccggatggrcttgggtaaaagggaaaggtcatagataacaccaagatttctatcctgaattattggtaggtgataatgccattagaaagtcagaaaaacctaacagcaagtctggatggaagctggttaatacagttatggttaggttgagcttgaggtacaggtgagacatgcatatgacactgagaaaaatgatgacaatatgtatccggagagttcaaggatacggatatagatttgaaggtcatcggcctggggatctgaactgaagtcttaaggttaaatattattttatgggaaaacttaaatcagtgtactatgtaagaactaagttctaataaaaatcagactcctgggatcaaattctagatcactttccagctatgtggtcccaggcaagtttatgtaacctctgcttagccttgtcacttatgtattctcatctaggtaacattggcaatgcctggagacattttttgttgtcacaactgggtt

SEQ ID NO: 768945 - DNA, 628 bp, Homo sapiens
agagtagggtgggagagattaaaggcagcgaaacagaggatgcttctgaagtaagaatgtcaataacctgaataaggcagtagaagtagaaaggaaaaagaggaacaaattcaagagagattgcaaaggtagaccggatgggcttgggtaaaagggaaaggtcatagataacaccaagatttctatcctgaattattggtaggtgataatgccattagaaagtcagaaaaacctaacagcaagtctggatggaagctggttaatacagttatggttaggttgagcttgaggtacaggtgagacatgcatatgacactgagaaaaatgatgacaatatgtatccggagagttcaaggatacggatatagatttgaaggtcatcggcctggggatctgaactgaagtcttaaggttaaatrttattttatgggaaaacttaaatcagtgtactatgtaagaactaagttctaataaaaatcagactcctgggatcaaattctagatcactttccagctatgtggtcccaggcaagtttatgtaacctctgcttagccttgtcacttatgtattctcatctaggtaacattggcaatgcctggagacattttttgttgtcacaactgggtt

SEQ ID NO: 768946 - DNA, 524 bp, Homo sapiens
atgtgtttgatgtgtcccagtgttgatttccattcatctggtggaacagttatctcttccaattttattgtataggttggatagggaaagattttactgatgtatgtgggtcttaggatgttggtttataggagtgtgttgacttttattgtagkttagtgcagcagtgtagtctccgtgtagtttcttcagctgtaatccatgctagtgatgttcgctagtatcttagtggcctaggctgaggatttgtgttgttggtggtgtaactttgccagacatcggcttgtcaggctgtttctcaggttaggagcatgtacatgcgcacggtgagttggccaatttgaggtccggctcacagggatttggaccatggggctgttactctggctgggggcatgggtgcacaatttcctgcccaggctgggggcatgccagccaggtgtggcccatggggctgtttcttagtcctggtacatggctgcctggcttctcagctggcctgagtgtatgtctgttggaggtgt

SEQ ID NO: 768947 - DNA, 524 bp, Homo sapiens
atgtgtttgatgtgtcccagtgttgatttccattcatctggtggaacagttatctcttccaattttattgtataggttggatagggaaagattttactgatgtatgtgggtcttaggatgttggtttataggagtgtgttgacttttattgtagtttagtgcagcagtgtagtctccgtgtagtttcttcagctgtaatccatgctagtgatgttcgctagtatcttagtggcctaggctgaggatttgtrttgttggtggtgtaactttgccagacatcggcttgtcaggctgtttctcaggttaggagcatgtacatgcgcacggtgagttggccaatttgaggtccggctcacagggatttggaccatggggctgttactctggctgggggcatgggtgcacaatttcctgcccaggctgggggcatgccagccaggtgtggcccatggggctgtttcttagtcctggtacatggctgcctggcttctcagctggcctgagtgtatgtctgttggaggtgt

SEQ ID NO: 768948 - DNA, 571 bp, Homo sapiens
acacaatgacattttggtcaacaaacagaccacatatgcaacaatagtcccatgattctaatggagctgaaagactcctttcatctagtaatatcatagccctaaacaaacctactgtgctgccaattatatgtaagtatagcacatatgattatgtaccttgcatagtacttgataatgataataaatgactgtgttactagtttaagtatttactacattatgctttttattgttattttagagtgtactcctacttactaaaaaaaagaaaagggcttaatataaaagagcctcaggctagtctttcaggaggtattccagaaaaaggcattgttatagaagataacagctccatgtgtgttattgcccctgaagaccttccaaggggacaagacgtrgaggtggaagacagtgatattgatgatctcaaccctgtgtagacctacactactgtgaatgtttgtgtcttcatttttaacaaaaaaacttcgaaaagtaaaaaatacaataaattaaaaatagaaaaaatcttatagaatatgtaaagaagaaactatttctatacagc

SEQ ID NO: 768949 - DNA, 669 bp, Homo sapiens
ttatcttgtgcaattagacatctcaaatgtcagatgtttttatcagaaaaaaatgaaaatatgcaaataaatacatgatgcctaaagcagttctttcttgggcttaattccacaaaaatattcagcatttgctgatgataatagctcagcaggtgttaaaaaatttgtaaatgttgagttagttatatttttaaatatttgtatttttcaattcacagggctaaagagcaacttaaatattacgaaagcactctatgtttacttattgagttaacaatttaatagtatagtacttgtctattctactagaagtttatttaagaaaagagttatacttcatgagaaatatccaaagataagtcaacatcaacaaatatatatttgtttattagaggaaaaagcacatttctttgctaaaataaataatagaacatattacttgaaagtcaccttggaattccactcwatgattaacatgcaaaaggcctgaagtaaaaaggacaacccatgagtggaatgataaaaatatatctgggggaggcatcacagctgccactgaaaaatactccttaatccaattctacaaacattcattgagcaaccactatgtgcccagcactgtgcttaaagttgagaatacaggatccctgcttacaaattattccccaa

SEQ ID NO: 768950 - DNA, 630 bp, Homo sapiens
tttagagcaagcactaaaaaagcttcgcacagagagacactcaaaaacactacagatgtgtcatactacaattacaaaaacaagttcaagtaactcacagcaagacagaaaaaaatcagatatgcgaaaaaaacagaacaatcagaaaacaataaatacaatgacagacttaagtctcaacacattaaagagaaaagcaaaaactatgaacgacgttacagacataaatttagcaacttaggtgaaatagaccaattcttacaaaacacagactattataactcccctagtataaaatgatcattttaatggccataagagctattaatgaaattaaatatttaatttaaaattccccaaaacagaaacatctaggccaaagtgatttcactgcrgaactctaccaaatattaaaagaagatttaacatcaattatacaccatctccaaaaaataagagaggaggaacatattcaatttgttttattcagttagcattactaataccaaaactaggcaaagatagtgcctaaaacaaacaaacaaaacacaaaaacaaaagctggggaccaatatccctcataaatatagatgcaaacatcattaacaaaatattagcaaataaaattta

SEQ ID NO: 768951 - DNA, 641 bp, Homo sapiens
actaaaaaagcttcgcacagagagacactcaaaaacactacagatgtgtcatactacaattacaaaaacaagttcaagtaactcacagcaagacagaaaaaaatcagatatgcgaaaaaaacagaacaatcagaaaacaataaatacaatgacagacttaagtctcaacacattaaagagaaaagcaaaaactatgaacgacgttacagacataaatttagcaacttaggtgaaatagaccaattcttacaaaacacagactattataactcccctagtataaaatgatcattttaatggccataagagctattaatgaaattaaatatttaatttaaaattccccaaaacagaaacatctaggccaaagtgatttcactgcagaamtctaccaaatattaaaagaagatttaacatcaattatacaccatctccaaaaaataagagaggaggaacatattcaatttgttttattcagttagcattactaataccaaaactaggcaaagatagtgcctaaaacaaacaaacaaaacacaaaaacaaaagctggggaccaatatccctcataaatatagatgcaaacatcattaacaaaatattagcaaataaaatttagcaatatattaaaataattacat

SEQ ID NO: 768952 - DNA, 611 bp, Homo sapiens
tgcagcctaaaacattctgactgatacatatgtcatattttgttttaggaaatttagtcattggttatatttgctaaattatttgtttctccctggagatgctaaaacttattggataggttatttttccattttcttactcttcaaagagtatccagaacatactgtacaaaatttagctgagcaaggaaacagccaaactatcaaacaagcaaattccaagtttccaattcctaggaaaaaaattaaagagctcaaaatgagagggaactggtgagtcaggcagtccatacatagtggctcgggataggctttaagggactcatctacctggtgtagctgccataatcctttcagagttagatattagytaagggcccttgccagattctggtttgggtatgcacaagctattcaccagtagtcctctcacataatctcttttgaaagtgacaacatgttgctgaatatttttatcacccataaaggaactccctacccattagcaatcactccccagaccatctctcagcctctgacaaatactaacctattttgtgtctctataggtttgcctaatcaggacatttcatataaatcaaattgtataa

SEQ ID NO: 768953 - DNA, 541 bp, Homo sapiens
aggtgtagggaaaatatgagaaaagagtcattttgtcaacatttaactctcaaaagagctccagaacgaatggccaatctgcttcttattgcatatcttcacacagatacattctttcaaactgataactgctgaagccattggggaagctattttatttccctctaaattttgtctgttagcaaaccaaaatttccagatttgcatagaagggataaaacttcaatgaatgcatgccaacgttgcatcagctgttctcattttcaaaatcctatccagattttttytcattccacccacagaaaaagaggaaatatagtcagaagttgcttttgcagcaatggacaaaatgtttttcccattgcagcagcatcatagtgttatatgtgtgtgtatgtgtgtgtctgtgtgtctgtgtgtctgtgtgtgtgtgtgtgtgtctctgagagagagagaaagagacagagagagagactgaagacagagagagacagaggaagacagagacagatagatagttcttggaaaacaaaacatctgt

SEQ ID NO: 768954 - DNA, 330 bp, Homo sapiens
ctattaagttaatgtgcctttatgaccactaagagaagacgacaggcaggtaattgattttgtgagtttaaacttcaagggacaaagagaagtcaaacatataaatgcaacatctacatagtttatcaacttctttaaaaatgaccaagaaaacagagagcacacttgtgttttttctatataatttgkgaattttagaaataactcaagctacttttccaagcagataaggtaagccattctagtgtacaatgcatgctcatgatcttatcaaatcaaaaacacagggatttattgaggtatttcagtgagatgtttactttattcctt

SEQ ID NO: 768955 - DNA, 634 bp, Homo sapiens
ctctggaatgagactaccccaggactaaaattctaaatctactacttatctttgaaatgggattatttataacagtaactacctcacagggcttctgaaaaggtaataacatccaaaacaaaacgtgcaaagggccttgaaatggctgattggtacacatcccatttaatacatytttaataattaaaatccaaagatataaatctctgaaaccataaagaaaaatttttttaaagagagcattcattttatgaaagtcatctgtcctggcacctacagagcacaacttttaaaatatctctaaacttggtttaaaacattattattgggaaacataaaattagtttctcatgtgtgccatacagtatgcctctgcattacaacgaaacactgaagaattctgatgtaggcttcaactaaaactactttaactataaataaaatacattatgttattccaattacttaatttcaactattaactcataaatgtgaactcacaagaaaatttaagagaactcaacaatactatcaattaataattaggaacactcccaaaagacatttctcaactctgagcctctgtttcatttgtaaatgaagactggattaaattatctctcaaaatcccttt

SEQ ID NO: 768956 - DNA, 563 bp, Homo sapiens
ttgtgaatatttctgcctttggagatggctaaagaaatagcattattaagccggtgcagtggctcatgtctgtaatcccagcactctgggaggatgaggtgggtggatcacctgaggtcaggagttcaacaacagcctggccaacatggtgaaactctgtmtctactaaaaatacaaaatttagctgggcgtggtagtgggcgcctataatcccagctacttgggaggctgaggcagaaaatcacctgaacccaggaggcagaaggaggttgcagtgagccaagatcatgccactgcactccagcctgggcgatgagagcaaaactccatctcaaaaaaaaaaaaagaaacagcattattattaaacaatacgcacagaattcatggaagaaacatgaacttcccacatataccttccttcatttacccagcttttccccactgctcttcaaacaagatcattcttatctgcactaattgctgaattgtggccacaagatgaacatactcctctttcactgacacctacaagatatttaagcttacattttaagattgctaag

SEQ ID NO: 768957 - DNA, 599 bp, Homo sapiens
tcttgctctgtgggttcaggtgacagctggttgtttaaagcagcccggcaccttccactctcctttttccttccattctcaccatgtgacatgtctgctgttctccagccttctgctgtgactgtatgcttcctgagacctcatcagaagcacatgccagcatcatgcttcctgggtagcctgcagaaccctgagccaagtaaaccacttttctttataaattatccagtcaggtaatttatagcaatgcaaaacaaactaacacaagttactttccctctctggacattatctttaaaaagatgatgtcaccagagcaccttcagcaatccttcctgcgccataaatatcttctataatcaagcaatctattagagattcactaaaatttgcagcactttcaaattaacttactttccctctttctatgarcaatggcaaataatctgtatggttaagagatatttttcagacgttaagactttttttttcaagagaataagcacctgccaaactattttcaggaacaaattccctcagtcctctgaagttatttggagtttgactgtagctgtcaaaatggatagacttcaacacac

SEQ ID NO: 768958 - DNA, 581 bp, Homo sapiens
ctggatcctaaatagtatgtctttaattcttgcttactaattcttgagagcttccagaatcctgccctttccaagctgtagtgatgatccagcttttctgtccatcatatgagctacccagtatccttccataataaagcctttctgtttccygaaaactgccagtgtcagttgctgctccttagaaccaaaggatacttaccaaagatattttaattggacgaaaggaccaagtacctgaacagtgaaggctgttgctaagctgtccaataagaccaatctgcaggaggaacatccatgcattgaccaaaataaaccccactgtggcacagaggccacaagcaattctgagcgacatgcacggatggaggccaaagcagctggtagagggctgagcccaggaaaagcactgtgaggagggctcttacgagatcccccactaggcactggtgaggggatggggctcccccagtggcatcactaaggtaaactgagatgtatctatgttagatgtttccatgttagtcatttaagactcattttaactgcccagtgggttcactttgcccactgcctagaca

SEQ ID NO: 768959 - DNA, 619 bp, Homo sapiens
ttctttgggataatcatttaccagtgagaaataacacaaatgaaaccaagaaatatcagtgactgatccgtaattcttctagccagctctacatagcaggaatatttgagaggaggagactaggtaatgtgctgagaaaaaaatatgaagttataagcagctgaaaaatacttaaattgagcttgaaatagaaaacawaatgaagattggggacccaatgaatatttaaagctacaagaaacttttccagagataagaacatttgaatccatgcattaaaagggcccatagagacatggtggctcacacctgtaattccagcactttggaaggccgaggtgggaggatcacttgaggcccaggagtttgagaacagcctggccagcatggcaaaaccccctctccactaaaaaataaaaaataaaaaaactagctaggcagggtggcaggcacctgtagtcctagctacttgggaggctgaagcgtgagaattccttgaaccagggaagcagaggttgcagtgagcaaagattgtgccactgcactccagcctcggtgatagagactctgtctccaaaaaaaaaaaaaaaaaaaaaaagtccctacagaacacctatta

SEQ ID NO: 768960 - DNA, 626 bp, Homo sapiens
ttccacttcaccacccataataaatcccactgacttgaacttcagagcttacctacatactcagattgacttctatagccctagacatagaaaaaacaagtaggttgattgcatctttatagagccatattgcccaaattcacttgattgtatttttgatcacttatccatactatggagtagagtgaaatttctccaatacacaaggccaattattttgagatctttacaaagatatctctatctgtctatatattatatgtatgaccctatgcagaatgttgtagtttgtatgtgtgtgaagaatttaggcaagctgcaaactttaaaaggaacactccctaagaccatccccaactgcaagtttggrgggaagatttttcgaaactaccctaagttttggtaatttgcttagaaggactccgaaaattcaatgaaagctgttatactaacaatacaatttactacagggaaaggatatagattaaaatctaccaagggaagtgcatgggacagggtccaagcgaagtgtcaaatgtggagtcctgtccacatgcagtcatagacatgttactttcctgtatctttgtgtgacaatatgcagagtattgctaatcagggaagct

SEQ ID NO: 768961 - DNA, 626 bp, Homo sapiens
ttccacttcaccacccataataaatcccactgacttgaacttcagagcttacctacatactcagattgacttctatagccctagacatagaaaaaacaagtaggttgattgcatctttatagagccatattgcccaaattcacttgattgtatttttgatcacttatccatactatggagtagagtgaaatttctccaatacacaaggccaattattttgagatctttacaaagatatctctatctgtctatatattatatgtatgaccctatgcagaatgttgtagtttgtatgtgtgtgaagaatttaggcaagctgcaaactttaaaaggaacactccctaagaccatccccaactgcaagtttggagrgaagatttttcgaaactaccctaagttttggtaatttgcttagaaggactccgaaaattcaatgaaagctgttatactaacaatacaatttactacagggaaaggatatagattaaaatctaccaagggaagtgcatgggacagggtccaagcgaagtgtcaaatgtggagtcctgtccacatgcagtcatagacatgttactttcctgtatctttgtgtgacaatatgcagagtattgctaatcagggaagct

SEQ ID NO: 768962 - DNA, 577 bp, Homo sapiens
gttatttaggctattaccttaaacatttaccatttctttggagaacatttcaaatcttccaactattttgaaatatacaatatattgttgttaactatagttaccatactgtgctattaaacagtagaacttatttyttctatccaactgtgtgattgtgcccattaccaacccctcttcattccccgaaccccacccccgacccttcccagcttctggtaaccatcattctactctctaccttcatgagataaacattttaggcatcacaagtgagtgagaacacatgatatttatctctctgtgcctggcttatttcatttaacgtaacgaccttcagttccatccatgttgctgtaaatgacaggatttcttttttagggcccagtagtattccattgtgtatatataccacattttctttatgcacttatttattgatagaatatttgattgattccatatcttggctattgtgaatagtgctgcaataaatgtggaagagcaggtatccctttgataaactagttttatttcctttggataaatactcagtagtgagattgctggatcctat

SEQ ID NO: 768963 - DNA, 577 bp, Homo sapiens
gttatttaggctattaccttaaacatttaccatttctttggagaacatttcaaatcttccaactattttgaaatatacaatatattgttgttaactatagttaccatactgtgctattaaacagtagaacttatttcttctatccaactgtgtgattgtgcccattaccaacccctcttcattccccgaaccccacccccgacccttcccagcttctggtaaccatcattctactctctaccttcatgagataaacattttaggcatcacaagtgagtgagaacacatgatatttatctctctgtgcctggcttatttcatttaacktaacgaccttcagttccatccatgttgctgtaaatgacaggatttcttttttagggcccagtagtattccattgtgtatatataccacattttctttatgcacttatttattgatagaatatttgattgattccatatcttggctattgtgaatagtgctgcaataaatgtggaagagcaggtatccctttgataaactagttttatttcctttggataaatactcagtagtgagattgctggatcctat

SEQ ID NO: 768964 - DNA, 577 bp, Homo sapiens
gttatttaggctattaccttaaacatttaccatttctttggagaacatttcaaatcttccaactattttgaaatatacaatatattgttgttaactatagttaccatactgtgctattaaacagtagaacttatttcttctatccaactgtgtgattgtgcccattaccaacccctcttcattccccgaaccccacccccgacccttcccagcttctggtaaccatcattctactctctaccttcatgagataaacattttaggcatcacaagtgagtgagaacacatgatatttatctctctgtgcctggcttatttcatttaacgtaacgaccttcagttccatccatgttgctgtaaatracaggatttcttttttagggcccagtagtattccattgtgtatatataccacattttctttatgcacttatttattgatagaatatttgattgattccatatcttggctattgtgaatagtgctgcaataaatgtggaagagcaggtatccctttgataaactagttttatttcctttggataaatactcagtagtgagattgctggatcctat

SEQ ID NO: 768965 - DNA, 636 bp, Homo sapiens
tttcatgaaaaaagagacctcacctgtcttgttcaacgcagcaattaacacttattgtaggcactcagtgagtgtttgctgaatgaatgaatcacatggctgtagaagggcaacttcagccccttttcctacaccttgactggtgcctgccctaacttccatccaagcacagaccagttgcctatagcattagctgggccatgacgtcagcaggtaggctaccaaggcatttgaaagacacacagttggccgggtgctgtggctcacgcctgtaatcccagcactttgggaggccaagcggggcagatcamctgaggttgagagttcgagaccagcctgacatacatcaagaaaccccatttctactaaaaatgcaaaattagccgagtgtggtggtgcacgcctgtaatcccagctagtcaggaggctgaggcaggaaaatcacttgaacccgggaagcagaggttgcagtgaactgagatagcgccattgcactccagcctgggccacgagagcgaaaatccatctcaaaacaaaaccaaaagacacacggttctgtgtgtctttcttatctttcttaggcttcccacatgagatgtcaattgggttttaccttgcgggaaagatccacaacac

SEQ ID NO: 768966 - DNA, 611 bp, Homo sapiens
caacttttttaaattgcaaacaaacttgggatttccacacgcattattacttattaatcattcattaagcatctgttatcaaataggtcttagccaaaccaaagggcaattaactttttcaagagtaaacagaaaatgagttcacaaattcccaactgttcttccctgcttctgacatagataggctcaagtatacgcactcaaaaacttggaagagaacattaaaatgaaatagtaaacgcttgattcttctttggctttagaattcacgcarattagatgtgcagagtctaaaggatttccttatttaattggcctcaatatttcatttgcacttacttattggtctgtgtatttcagagtgctttatctatttgtaacggcttcagactatctggtttaggttgaatacctgtagagggcagcatgtcatatttatttaagggatgaatccagaatctctgctaaaggtgataatggaggaagttgtcatcaccaccatcatcatcaccatcatcattgttcttatcatatccctgggttttgatcttagagaaaatctctgttacaaagtggcaaagtagactatacaatctccccccatctttatg

SEQ ID NO: 768967 - DNA, 611 bp, Homo sapiens
caacttttttaaattgcaaacaaacttgggatttccacacgcattattacttattaatcattcattaagcatctgttatcaaataggtcttagccaaaccaaagggcaattaactttttcaagagtaaacagaaaatgagttcacaaattcccaactgttcttccctgcttctgacatagataggctcaagtatacgcactcaaaaacttggaagagaacattaaaatgaaatagtaaacgcttgattcttctttggctttagaattcacgcagattagaygtgcagagtctaaaggatttccttatttaattggcctcaatatttcatttgcacttacttattggtctgtgtatttcagagtgctttatctatttgtaacggcttcagactatctggtttaggttgaatacctgtagagggcagcatgtcatatttatttaagggatgaatccagaatctctgctaaaggtgataatggaggaagttgtcatcaccaccatcatcatcaccatcatcattgttcttatcatatccctgggttttgatcttagagaaaatctctgttacaaagtggcaaagtagactatacaatctccccccatctttatg

SEQ ID NO: 768968 - DNA, 530 bp, Homo sapiens
aaagttatgggaacttcaaacctacaaactgaaatcatgagtatcagtgagcactaacaatatggctgtgtccctgtcacctctgatattgttaacctggaaatgaatgcattataaatctgaaaggggggcttgaattttattcgtgwtattgacaacatttatcagcatttatcactctcctgtgagtgtgggaagagccttcttggcaggactcacacgaaacagatctttctgctttgttgagcttatgagacctcaaaaggtttctagaggaggaaactggaccttcctgaaataccaaaaacagctggaaaacaggagcaccttgagtcagtcacactgtatgacactccacatcaatcctgctttcttcctaggaacaaatgttgtttattaattatattagttaaggccatggccaatttgcacttcgtgtttctgaaacaaagcaaatatttatctcaatacatctgtcagaagggcaaggggacacacacaataataacccaacacacattcaccaaaaa

SEQ ID NO: 768969 - DNA, 567 bp, Homo sapiens
ctcttttgatctttgttggttaaagtctgttttatcagagactacaattgcaaccccagctctttttcgctttccatttgcttggtaaatattcctccatccctttattttgagcgtatgtgtgtctttgcacatragatgggtctcctgaatacagcacagagatgtgtcttgactctttatcaagtttacccgtctgtgtcttataataggggcatttagcccctttatatttaagtttagtattgttatgtgtgaatttgaccctgtcattttgatgctagctggttattttgccctttagttgatgcagtttcttcatggtgttgacggtctttacaatttgatatgtttttgcagtggctggtaccaattttcctttccatatttagcacttccttcaggagctcttgtaaggcaggcctggtggtgacaaaatacctcagcatttgcttgtctgtaaaagattttatttcttctttgcttatgaagcttagtttggatggatatgaaattctgggttggaaattcttttctttaagaatattgagtattggcacccacttt

SEQ ID NO: 768970 - DNA, 567 bp, Homo sapiens
ctcttttgatctttgttggttaaagtctgttttatcagagactacaattgcaaccccagctctttttcgctttccatttgcttggtaaatattcctccatccctttattttgagcgtatgtgtgtctttgcacataagatgggtctcctgaatacagcacagagatgtgkcttgactctttatcaagtttacccgtctgtgtcttataataggggcatttagcccctttatatttaagtttagtattgttatgtgtgaatttgaccctgtcattttgatgctagctggttattttgccctttagttgatgcagtttcttcatggtgttgacggtctttacaatttgatatgtttttgcagtggctggtaccaattttcctttccatatttagcacttccttcaggagctcttgtaaggcaggcctggtggtgacaaaatacctcagcatttgcttgtctgtaaaagattttatttcttctttgcttatgaagcttagtttggatggatatgaaattctgggttggaaattcttttctttaagaatattgagtattggcacccacttt

SEQ ID NO: 768971 - DNA, 603 bp, Homo sapiens
gacacttagcaggagttgatgtcctggtattccacctgcaaatggtaggtctgcagggcacaccaagcacgatgatattcatcctggaaatgtagtgctgagctcagaagtaagtagggtgttaattatccatgactagtcacataaaatcatgtcttatactcagttctggcctggaatgcagggtacacaaagggaggtactcattgataccagcaggagctatatgcaagcttccaaaggaacaattagtccttcagtgcctcattcaaaggctgcttagggggttgctctccttgagttaatgggagtrtgagtgttcaatgaatggagattagccccagaagacagggaagcaaattaaacccctattttgatttgaattgggagtgaataaagtgttcactgctcactaaactcaagtgaagttaacatgcaggaatgaatggagactaacttctctgtgtggcaaggaagacctcaaggcagttagcacctgggaacctccagggatagagctgagacagaggtggtcattcatcattctctggggtgataagagtttttcagtaaatgctgtatcaatgtagataaatcttccta

SEQ ID NO: 768972 - DNA, 528 bp, Homo sapiens
tcctccttttggccacagcatctcgacttttatacttgtcgttactgagttgcctgctctcccatctcaatttggaaatctgagaccagagttgttgctccatttactcaactaatgttgctggtgatagatagtaggrctgtcacggagtcctttggattcctggcccagtgttctttccactgagctagtctcctacagtgtgctctgtggaacctaagcccttggggaagctctgcagaaggtactttttcttccctctaaatgtgattttagcatcctgacataatcccctccacactgctagtagcccgtgatactcttgcctagacctggatacaaattaagatcacagttttgtcccaagtcacctacattcagagggtccaaaatgtaaaatgatgcttttaaaagaatatgaagaatttatcctctgtggttacaggaaagttagctaatctccctgaacctgagttttgttttttttgttttttgttttgttttgttttgttttgttttccgggtagt

SEQ ID NO: 768973 - DNA, 352 bp, Homo sapiens
ggcttggggcttgtcggattacttaggtagaaggagacaaaaacaaaatacaaacaggactaggcaaaaatttgtcttcttggctcaggtaagatgtttcatgattctacggtactgggtatgattctaggttctttggatgatggaatgaatcacagtaacactyagatacagaaaaagcagaactctgcttcttacagctccaaatgaggcaaagggcacacaggaaattgtacccaggaacagaactacagcaagcggggactgttggaggtagcttgcgaatggaaaatggcatagagatggctaggctttgcaggcctccggaggattgggtattttaaataatttt

SEQ ID NO: 768974 - DNA, 487 bp, Homo sapiens
ctgggtaataaattgctttgggaaaactaatctcagaggctgccaagtgagccaacagaaggggatccctagatagtgagtcacgcgtcaaaaagaacaggctgaaggtgatatatggttggtcaagagcatattttataggtagttcatattatccctccctcaccgctgttctctgaggagtatttcctgtaccattctgctttctcttacagctttttttctttctgtagagatgtgattaaggattttcccaattcttaaactttgcttaaactctcctctgcaaggcacccattttataaacagtcactgcatttgatcacawtgtgttcataacctgtcaaacaactcaaccatgtatatttcctagaggctgtttagaattctccaagcctaaaacgatgatacaaaaagcaaggcggtttcagtaaaaagagaactagagtcagcctaataggagaagagacattgtgacatataaagt

SEQ ID NO: 768975 - DNA, 517 bp, Homo sapiens
catgtatttgcctggttttgaaggatccttttggagttgatttccaattttatttcactgtggtctgagagagtacttgatataatttcgattttcttaaatttcctgagacttattttgtggcctatcgtatggtctatgttggagaatgttccatgtgctgatgaatagaatgtgtattctgcagttgttggatagaattttctgtaaatatctgttaagttcatttgttctagaatatagtttaagtccattgtttctttgttgactttctgtcttgatgacttgtctagtgctgtcagtggagtgttaaagtcctccactattattgtgttgccatctrtctcatttcttaggtatagtagtaattgttttataaatttgggagcaccagtgttaggtgcatatatatttagaactgtgatattttcctgttggactaatccttttatcattatataatgtccctctttgtttgtttaaactgctgttgctttgaagtatgttttgtctgata

SEQ ID NO: 768976 - DNA, 530 bp, Homo sapiens
gcatctgtgaaataatgggttactatttttaaaatgaacactgaagtgagaaagagaagtagctcagagaagtctgaaaaatgtgtggtatgcaaaatttatcaggtccagagagacacaatcttcagagaatgaatcttcagtcacacccacccctccccagagaatcatgcctaggaacaattgtttaaaggcattttgttctttctttccttccatgtagtttccagactggctgataaattacccaaaatgctatcacaagttgcacaatatgaccctcacccattatcttcatgttcctggaatttgtgatacaaagaacaacatatgccaattagtagcttatgttcaatttargaactgccccttcttttttcctttaaaaacccacttgttggccaggcgcagtggctcacacctgtaatctcagcgctttgggaggccgaggtgggcggatcatctgaggtcaggagtttgagaccagcctggccaacatggggaaaacctgtctctactaaaaatacaaa

SEQ ID NO: 768977 - DNA, 456 bp, Homo sapiens
gggtgggctgcttggtagcaatacctgggggcccagtgaggcaggaaaccatctcctctgcacctccactttcctgtgctgaacgcaggcacctctgggtccacaggaggggtcaatggttacataaggggcactgtcatcaagtgtttgtmtgattgtaactgtaataaaaaccatatccatagaggtggcatcctcatttgattcccccaaaattcagtattgtagggacaattattatccccattgcatagatgaggaaatcaaggatgggaggccagaatttacctagcaaagagtcagtgttctatccaagtggctttggagcaggaagtaagcgagagaaggaaaaacagctttgtatcacatgagaaagagcagacactaagaggctctgtgcagtgggctttcctgctctaaacagaagacagcgagaggggtccggtagagtgcacc

SEQ ID NO: 768978 - DNA, 601 bp, Homo sapiens
gaaaagtggcaaaggttaaaagtcccattttcagcatatttacatgtagtaacaacttgataacacagcgctgagaatgccaggctcagaggagccaagctgggctcccgtccagtcagcctctagctcaccaggaaaccctgagcaggtcactttgcctcattttctttatctgtcaaatgagaactcagatgatctcaaaacagccttktctgctgtagtgtttcaggatgattcttgtctctggatgtcgctgtcatgatgggagaggaattagtaaattcccaggtcagtttacactgcagagtgatcttgatctgcatgaatcagtaaggatgggctggataacaagttggaaccacagttatgagtaccatgacattaactgaaacaaatgagaagggattgaaaaatcggcggttaagtgtcttttaaggtcatttccaacaaaactacaaaggacctatgaaaggcttttcaggcacgtactcttgttgcctagctgaacacatttctccaataaagctttcatttgagagttactcttcatagtacatcccctgcccccctgcctgcctggcacattataggtattcatgaa

SEQ ID NO: 768979 - DNA, 603 bp, Homo sapiens
caaaaacaaaggaaaatgattaatttgtcaaaagaactgaatgatacaacaactttacctttccatttagcaaccagtttaggatctgaaattgtgaagcttggacggcttcttgaaagaataccttttccaaaataacccttccaggaagagagaaaatgaagttagttcatgcttagttaccagttttttagctgaggtagaatatacagtaatccctcagtatccacagggggctggttccaggacctctggtggataccaaaatcggcagatggtcgagtccctgatataaaatggtgcagtatttatatatagtctacgtaggccctcccatatactttaagtcatctctaggctacttataatacctaatgcaatgcaaatgctatgtaaatagttgttatattgtttaatataagaaaataaagtccccgttkggtacacatgcaatttttctcccaaaatatcttcaatccaaggttgggtgaatccacggaagtggaacccatgatatggagggccgactgtacccatctgagttaacaagaggttcgccccacttttcatgtctttacattttccctctgattatctaatgat

SEQ ID NO: 768980 - DNA, 589 bp, Homo sapiens
aaaacagatgtttcctctgcctattcataaccttattcttcatatgcatgtaggtgttttggtacggtatacctgttttataacaggtgccattctctaagatattataaaaagctaactttaatttcaattttatggctgagtgtcagatgctatatatgagtttgcccacatcaccatgacaactatgtgggaaggtttttgccacagccctcatggttggcctagtgttttgacatttcagtaattgccagtgtcactacctttaaaaattacagagaactgacacctagtccagatggctactaaataaagaaaccgctgtccccacagctgtgacatggtactgaagacaggagagccttctatcaaagatatggtcactaagaaatgatgtgaaagatcttgacttataaaatataataaatggcygggcacggtggctcatgcctgtaatcccagcactttgggaggccgaggtgggcaaatcacctgaggtcacgagttcgagaccagcctgaccaacatggagaaaccccgtctctactaaaaatacaaaattagccagtcatggtggtgcatgcctgta

SEQ ID NO: 768981 - DNA, 590 bp, Homo sapiens
catatttttattttacaaggctattgtacaatgaaataagatataatatgaaatagcacacagtactttgaaggaacttgataaatatgttttcttctttaaccagccaccagatatatctctatgcctaccaactaatggaaatatttgatctacaaaatgccttgtgggaggtggggaagggaaggagttgggacatagaaggtgagaccaaaaatgtgwgtccaggtgattgagaaaaggtagaaaacttattttagccaaagggctagagaaaaggatattcctatctttttcttgtttaatttctttccttgttaccaaaggaatgctgcttgggagaagagagttgttaactcacagaattatgcctgaggcatacttttctctcatattaagtgttatgttctgaaggaaatatgatttgcatgcaccagatacggtgcagcaagaccacttctaagcaggactaatgtaaataaaaggaacatttcttgagacagaattttgaaaataaaactgcttagtttaccttaccattcagagaatttataacaattaatcaaaaacatttcaatcaaatttaagta

SEQ ID NO: 768982 - DNA, 589 bp, Homo sapiens
gtatatttcctaatcttctaaaatctgtccatattgataaaaataattaggaatttgtattgggtagaacatagcaaaagattaagattttcctggagatgatctcttgatctctttctacgaaaaatctgattcaacaattcaacccattctttcctattttggtagccttgttttgtttgaaggtagatgaggtcactgagactattatatacctcttaatctatctgacttttttaaggtaatggaaaataattgaaataatttaacagttgaaagagtcacagatgttattctttcgaaatagatgtaccttttcttccccaccattggtgcatgaaaagcctctcyggaatagacagcattcattaaatgttcttttaaataattaaaactgtgattaatattcagcaatgaccagagacagtaatgattacactttatatttctagtcttagatgctaactctagtaatgacctttgataataacatcagctagatacctatagccaaatataattgtaagctgacaactgtttgttacattttcgtagtatttcttgtgttgactcttaaaactacaaaaat

SEQ ID NO: 768983 - DNA, 430 bp, Homo sapiens
aataagttaacatgtgtatagtgtctgccacatagtaagcccttcttaagtatttgctattttgattaactaagttaaccattgtcagtcttcttttactcatgaaagttactgtacccaatacacaatctggatgatcttaataacaaagacagcactwtaaacggcagcacaaacctatggagacattgattatacaatctgagttttacagggcatctcgatcttcatgttgtccagctctttgccattctgtatagcacatcctgtcttccaatttaagcagagcaagctccttagggatggaggccttctttaccttgctcatcactgtgcctccaatacctacctgtaccttgaagggtgcttgacacatagaatatgctcaataatgatttttggtatgtttgttgaatgaatttgggatggt

SEQ ID NO: 768984 - DNA, 542 bp, Homo sapiens
tcttactccctagttgtactattaacttttataagattaaggcaacagtgccctgtattacagatatctctctcactcctgtggtcatcagtctctgctctagaatcggatcactgatcccttgctttactatagttataaagtttctctagtaacattcaataaatattttcaactgttttgtttctaatttaataaacaaagggacaawcaaaagcaacaaattttactgatagtgccaaccactagaaaacggaaattctaaagatttttgttgcaatattttaacttgtttttcctacagggccatgtagtttttttgaaatctgtgcatttggatgttagaatctgaaagagggtaaagagaaacctttggcaagtgtttggtcttctttctgcaatcttggcaaatcttgatctgtctatgtgattatagctgacacaggccacagtctgattatatggagatttcttttttgacatcaactggcatattcaagctagaacctgcttttgatatggataagaaaaaggggcaggga

SEQ ID NO: 768985 - DNA, 542 bp, Homo sapiens
tcttactccctagttgtactattaacttttataagattaaggcaacagtgccctgtattacagatatctctctcactcctgtggtcatcagtctctgctctagaatcggatcactgatcccttgctttactatagttataaagtttctctagtaacattcaataaatattttcaactgttttgtttctaatttaataaacaaagggacaaacaaaagcaacaaattttactgatagtgccaaccactagaaaacggaaattctaaagatttttgttgcaatattttaacttgtttttcctacagggccatgtagtttttttgaaatctgtgcatttggatgttagaatctgaaagagggtaaagagwaacctttggcaagtgtttggtcttctttctgcaatcttggcaaatcttgatctgtctatgtgattatagctgacacaggccacagtctgattatatggagatttcttttttgacatcaactggcatattcaagctagaacctgcttttgatatggataagaaaaaggggcaggga

SEQ ID NO: 768986 - DNA, 563 bp, Homo sapiens
agctagactaagaaaaaaagagaaaacactcaaataaaattaaagataaaaaggagacattacaactgttaacatagaaatataaataaacataaaagactaatatgaacaactaaacaaatttcataatatagaaaaaaatggataaatatcaggatatatacaaattatcaagataaaattatgaagaaataaaaactctaaacagactaatgatgagtgagaaaattgaatcagtaattgaaagtcttccatcaaagaaaagtccaggacctgatggctttaccgcaaaattctaccaaacatttaaagaaggactaataccaattttcctcaaactattccataaaactgaagaggagggaatatttccaagctcattttacaaggccaggattaccctgaytccagaaccagacaaagacacaacaaaggaagaaaagtatagaccaatatctctgatgaaacttagatgcaaaattctcaacaagatactatcaaaccaaatccaacagcacattgaaaagatcatttactatgatcaagtgggattcatcccaggg

SEQ ID NO: 768987 - DNA, 476 bp, Homo sapiens
cacccaggctggagtgcagtggcacaatctcaactcactgcaacctctgcctcccatgttcaagacattcttgtgcctcactttccgagtagctgggattacaaatgtgcacctccatgcccggcacatttttttgtgtatttaggagagacggggtttcaccatgttggccagctggtactgaactcctggcctcatgtgatccacctgcctcggcttcccaaagtgctgggattataggcgtgagccaccatgcctggcccattattttttcattcaataaatatttactgtgttcctatcacaacacaggccaagatytacaagctgtagattcagcatgcacagagtgtacaaaagtccctgcccttgggaacttacattctaaggaggtctcaagacagaagcacactggtgttcagtgtaatgtagaataatggagagaaataattgatcatggagagcctccctgagga

SEQ ID NO: 768988 - DNA, 564 bp, Homo sapiens
attgagaataaaagagaaaacagattaccaatgtcaggaatgaaaaaggaggtatcactacagatcctaattaaccaatgggttgaagaagaaatcacaatggaaagtagaaaatattttgaatagaatgataatgaaaagatgcaactcaaacttgtaacctataactaaagcagttcttggaatcattttaaacaaattattagtaaagaaaattaaaaaccagtgttctaaatttgtattttaagaagctagaaaaagaaaagcaaatcaaattcaaaatgactgaaataataaatacaagaacagaaatcaatgaaatagaaaacaaacaatagagaaaaaccaacaaaaattttcgaagaactaaaaaaatttgttctttgaaaagatggataaatttgataaayccctcatgagactgatgaagaataaaagaaagaaaacaaattaccaatattgttaataaaagaggacattcctattgatcctgcagatatttaagcaattgtaagaggatgttttgaataacatacatatgaacaaatttcctgaaaaactaaa

SEQ ID NO: 768989 - DNA, 537 bp, Homo sapiens
gacagatgaatctctaagtaaaaaaaggtttcatttggcagtaatgtataagaagtaggattgcatcagttattaacattgttttatattgctttagggtttttggtttttttttttttttttttttgagacggagtcttgctctgtcacccaggctggagtgcagtggcgcgatcttggttcactgcaagctctgtctcctgggttcacaccattctcctgcctcaccctccctagtagctgggactacaggcgcctgccaccacacccggctaattttttgtwtttttagtagagatggggtttcactgtgttagccaggatggtctccatctcctgattttgtgatccgcccgcctcagcctcccaaagtgctgggattacaggtgtgagccactgcgcccagccggtttttgggttttttttggagacagggtcttgctctgttgcctggactggagtgcagtggtgcaatcacacctgattgcaacctctgcctgctgggctaaagcaatcctcccacctcagccttccaag

SEQ ID NO: 768990 - DNA, 615 bp, Homo sapiens
tggaagggtgaaagttttggcatctgaaagaaaacctcactccctaacaaggccaaatgttttgttctagtctaccatcctacttaagtctcttttctctacctttaaatatacttgaattgtgaataaaagacaaattatgctttctaaactatttgaaacttgattttgaaaggttttctggctagaagtggcacactatatttcataggctagaaaaggaagcttattttggtacctataattatgttagacaatttgtaaaattctacttgtgtaaaaagagaacagtttttttaatagtaatcaagaagataacagagctgattacggctgataggragaataatgaacatagacatttctgattttaagttcctcctctctaagtacctggataaacttcacatctggctgatatcttggaggcagtccaaaatgtaaaatccaatttagtctggcaccaaataacacaattacatcagcaaattgcaaagccctattaaaaaaattgatatgaaagtataactacatttcttatttgaattattcgaaaattcatctctgaagtatttgaaaagtctaaatcatttggagcttacatcagacttcaga

SEQ ID NO: 768991 - DNA, 516 bp, Homo sapiens
cgtcctgcccagtagttaacagtctagtttaaaactaacataaactagagacagatgattctccctctgtaatcttctgagatttaacccccacaacctttcaatttctttgtatttgaacatgtgttcattaagtaaagacaacttaattgtcaatgtccttcacctcttgggctagcgctcccctcctggtcattctctattaacctrtacactgctctatttctattcttacatggcaattacatggcattacatatttgtttattgactccctgaacccagctagaatgcctataagtgatggttactatttatttgttgagtgaataatttttctagtccctggatctaacactctagattttgtgcaggagaaatctactgtgttcgtggtatcatcatctcatttaacactacatatcagatcaatacaatggctaataacaaagataataagcccagaaattcccttcaatttagtttatcaagcatttattaagcactcatcttatt

SEQ ID NO: 768992 - DNA, 597 bp, Homo sapiens
gacataccttcctcactaagcttaatcatttctagcttttgatttaaagtgagagatgtgtgactcttcctttcacctcaatgcttggagcctgttgtagggttattaattggcctcatttcaacaatgttgtgtcttaggaaatagaaatgctcaggtgagagaaagagagagagagacagcaaacagctggtcagtggaggagtcagaacacacacaacattttttccactaagtttgccattttatgtgggagcagtctgtggcccttcaaaaccactggaatagtaacatcaaagatcagtgatcatagatcaccataacagacgtaataataatgaacaagacagaaatatttgcagaattaccaaactgtgacaaagagacacaaagtgagctattggaaaatgacgccagtagacttgctggacacaaggttgccacaaacctgcartttattaaaaaataatgcaatatatgtgaaacacaacaaagcaaagcataataaaacaaggcacgcttacatatattgattttatagatatttccagtagaatatttaacaaacctacattccctcagtgtttcctttatctt

SEQ ID NO: 768993 - DNA, 493 bp, Homo sapiens
tttctttctttctttctttctttctttctttctttctttctttctttctttctttctttctttctttctttctttccttctttctttccttctttctttcctttctttctttctttttctttctttcttttttcttttttttttaagacagagtctagctttgtcactcaggctgtagtgcagtggcacgatctcagcttgctgcaacctccatctcctgggttcaagcaattcttctacctcagcctcctaagtagctgggattacaggtgccagacaccaagcccagctaatttttgcatttttagtagagacgtggtttcracacattggccaggctggtctcgaactcctgacctcacgtgatctgcccacctcggcctcccaaattgctgggattacaggtgtgagccactgcgccggccagaattattcttttaccagtcaggtggttacctagaagaccccatttgcaaggctattcatatttgat

SEQ ID NO: 768994 - DNA, 535 bp, Homo sapiens
tcacatataataaactatgtatgtttaaggtgcacaatttaataagttttgacatatacaccctgtataagtatgtcatcacaatcaagattacgaacacatccataacctctgaacgtttccctatagacctttataattccccctcctgcccatctctaacctgctcctgtcccgaggcgaccaccgatctgctttttgtcaataaaattaggttgcattttctagaatttcataaaattaaaatcaaactttctgtactcttttttcatctgacttctttcacttggcataattttttgagatccatccatactattgtgtgtatcaataatgagtttmttattattgcggagcagcattctatttcagggttataccacattttctttctccattcagctgttgatagacatttggattgtttacaatttttggctattacaaataaagctaatacaaacatttatgtactagtcattgtatgaacctatgcctttattattttgggtgaatacctacgggtggaatgact

SEQ ID NO: 768995 - DNA, 681 bp, Homo sapiens
aaccactaacactataaatgatgacacaggaagcagtggaaataaaagataacacatagttcctatttttctcaatcctttccttactcatccataagaggacggtagagaatgttaatataatatatgtgtctatccagccgagccctgtggctcacacctgtaatcctcgcactttgggaggctaaggcaggcggatcacctgaggccagcagttcaagaccagcctgaccaacatggagaaaccccatctctactaaaaatacaaaattagcctggtgtggtggcacatgtctgtaatcccagctattygggaagctgagacaggagaatcacttgaacccagaaggcggaggttgcggtgagctgagatcatgccattgcactccagcctgggcaataagagtgaaaccccatctcgaaaaaaaaaaaaaaaatatatatatatatatatatatatatatatatatatatatatatatatgtctatccagtaaaataaaaacaaccgaggtgtttttgtgaagcatctccattgtttcataagaataaaatacaaattgtataattgcattgatcctgcatatgtgctaaatgctcttatacttgcatttaaaactgacatttgtagaaagctgaaactggatcccttccttacaccttatacaaaaattaattcaa

SEQ ID NO: 768996 - DNA, 490 bp, Homo sapiens
ctgtgcatttacttgtacagggaaatggtggtttacttacaaattcagttcttcaatatatgttctctaatactggcatctgggctcaaattgccatcaacagtaagttgaaggcaatttcaacttactgtttctaatttgaagagggaacattaaraatgcctctgtaatactgtaattatgggaagaaagcaccagaggcaacattttatcctgagcaccagatttagatcctgttaaagggctcaaacttaaaagggctggccgggtgcggtggctcacgcctgtaatcccagcactttgggaggtcaaggtgggaggattgcttgagccagaagttcgagaccagcctgagcaacatggtgaaaccctgtctctaccaaaaatacaaaaattagccgggcgtggtggtgcacacctatggtcctagttactcggaagactgaggcaggaggatcgtttgagctcaggaggttgggtctgcagtgag

SEQ ID NO: 768997 - DNA, 490 bp, Homo sapiens
ctgtgcatttacttgtacagggaaatggtggtttacttacaaattcagttcttcaatatatgttctctaatactggcatctgggctcaaattgccatcaacagtaagttgaaggcaatttcaacttactgtttctaatttgaagagggaacattaagaatgcctctgtaatactgtaattatgggaagaaagcaccaraggcaacattttatcctgagcaccagatttagatcctgttaaagggctcaaacttaaaagggctggccgggtgcggtggctcacgcctgtaatcccagcactttgggaggtcaaggtgggaggattgcttgagccagaagttcgagaccagcctgagcaacatggtgaaaccctgtctctaccaaaaatacaaaaattagccgggcgtggtggtgcacacctatggtcctagttactcggaagactgaggcaggaggatcgtttgagctcaggaggttgggtctgcagtgag

SEQ ID NO: 768998 - DNA, 490 bp, Homo sapiens
ctgtgcatttacttgtacagggaaatggtggtttacttacaaattcagttcttcaatatatgttctctaatactggcatctgggctcaaattgccatcaacagtaagttgaaggcaatttcaacttactgtttctaatttgaagagggaacattaagaatgcctctgtaatactgtaattatgggaagaaagcaccagaggcaacattttatcctgagcaccagatttaratcctgttaaagggctcaaacttaaaagggctggccgggtgcggtggctcacgcctgtaatcccagcactttgggaggtcaaggtgggaggattgcttgagccagaagttcgagaccagcctgagcaacatggtgaaaccctgtctctaccaaaaatacaaaaattagccgggcgtggtggtgcacacctatggtcctagttactcggaagactgaggcaggaggatcgtttgagctcaggaggttgggtctgcagtgag

SEQ ID NO: 768999 - DNA, 549 bp, Homo sapiens
acctcccagccttccccactgattctaggtttaggcccaccattctcttcgggattccctcctttccatttttcgttttctttttggactatgctttttcctgcttcaacatctcttactctcagcacagagtctatacaaggagcatctccacatttcatgaagcccaaagagaggtgcamagaaaccactgctatttccaaaaaaaggctggaagcaactgtttgccaagacacaggcatgctccaagagatgagcagaaaggagaaaagtgcccttcagccattattgtgctgatttcccataacactaagttttaaaaacttctctttaatttctagctccctgccaggcgcggtggttcacgcctgtaatcccagcactttgggatgccgaggcgggtggatcacctgaggttgggaattcacgaccagcctgaccaacatgaagaaaccccgtctctaccaaaaatacaaaattagccgagtgtggtggcgcatgtgtgtaatcccagctactcgggaggctgaggcaggagaatcacttgaa

SEQ ID NO: 769000 - DNA, 480 bp, Homo sapiens
ttttgaactttggaaattaaattgcaacaatccaagtagtgttaatatttaagaaaagtggcagaatcctggtaagaaaaaaagctttgtgacattttaatttatcctagtcccatccccatggtaaccttgaaaaattaaagygtacactaacagtgaaaattagcatggtggcagccacctaagggaacagaattggcctggagctcgttaaaggcccattaccagagagctgtcattatttgacctgtctggtgattctctggaagatccccctttgtaaggttgtctgtatttgacctgactctgaacttacacagtgtgaaaagctcttttccagggccatttatcagaaacaattacagccaaattgattaacttcatggatgcctgagggagtagaaaacagctggggcaaataacagaccaaccaaaaagcttaaaatgaaaagttggggaataggatatctacagggggca

SEQ ID NO: 769001 - DNA, 660 bp, Homo sapiens
ccacagccccggctctcagcagactgccagcaccttgagggcagggtctgcatgccactcagctctgggtgcggcacaatggtggctcccagacctggcctacctgacaaacccccaggggcccctgcccagggctggtcccrggcatttatatttttaataagctctgtagggaatatgaataattagttttgggaatggttgctgcatggtgtttgtatacagtaagtgctttatagttgctggtgtaatgggaaagactggagtcagcttcccaggagtgatcatcctggctgtctttgagttgcccatggacacagagctgccaggaccctctttgcatgttttgaggtggtcctgtcactctgggtgggcagaccctggccctccttgttggtgagatggcacttgctgacaggatcaagaccttccaattccaggagctggaagaaccccagagggttgggacacttgagaagacagccagcttgaaatgggctcacccaattagttccaatcgggccacctcaggatgactcagttagaatgtcagggccttctaaaattaatcacagctgcctctgaaatcagcaccttgcatgaagtccccagcccctcttggccccacagaggtcttgggaacttgagggagctggttct

SEQ ID NO: 769002 - DNA, 565 bp, Homo sapiens
tgattgtatattaaatgtaaggtgcataatgatttctgtgaaaagcataaccaaaattccattagcacacacacaaaatgataataaatgtttaaagtttacaaatcattcctgatttgtaaacattttgtcattgtttcataatttcatacatgaagagggtacagacattaaaaaccttattagttatcatttaaaatattccaggccatggaatttatttataaagccaaraattcatttcattcactccccaatttgttctataaagccaacataacttcaaaaccaaaacctgctaaagagagtgtaaagaaagtaaactaaagcagtttggttgatgagtgcgtgtgtgtgtgtgtgtgtgtgtgtgtgtatcaacaaattccctgtgaatggagcccagtagcatggcagatcaatgatacactgggaccagggagggttcatatcagaatgagacagagcactgcccattaacctggggggaacccacaggctatccgatgggaaaggaagaggcagaccagcatgtatactgtgtcctgtgagtaagatgcagcgg

SEQ ID NO: 769003 - DNA, 588 bp, Homo sapiens
agcattgcacgcacaccctgcctgtctcacagcttcctctaaggtaggagtcattgacttcattaacaggtggggaaactaaacaaccaagcccatcatctcaaagcttttcctttgcacgggtgcttcccggccttgaataaggcacgccccgcacagacctacatcttaaaggggcaaaaaagcctcaaggctttatttttattgtaatatcacttaagcatgtaaaagcgaaaaacaaaacaaaacaaaacaaaaacaaacccacacagcataaactccttattyttttggattttgtgcaacaataaaacaaaaagtatatgaactaaatgcaaactaaatgatgcaatcaatgagaattctaattaactacctgaatgtgatggtgtggattcgctcaaattaagacaccacttgaaaggtgaagaaatcaatgaatggcttcgtcgctgagcttgtgcctcctgtcccctggtggtaactaagaacatcacaatgaggtggcattcagaaggaagctgttccttttagcatcctacaatagaagccagggaacaaattcttacaacttcatactgattttta

SEQ ID NO: 769004 - DNA, 588 bp, Homo sapiens
agcattgcacgcacaccctgcctgtctcacagcttcctctaaggtaggagtcattgacttcattaacaggtggggaaactaaacaaccaagcccatcatctcaaagcttttcctttgcacgggtgcttcccggccttgaataaggcacgccccgcacagacctacatcttaaaggggcaaaaaagcctcaaggctttatttttattgtaatatcacttaagcatgtaaaagcgaaaaacaaaacaaaacaaaacaaaaacaaacccacacagcataaactccttattcttttggattttgtgcaacaataaaacaaaaagtatatgaactaaatgcaaactaaatgatgcaatcaatgagaattytaattaactacctgaatgtgatggtgtggattcgctcaaattaagacaccacttgaaaggtgaagaaatcaatgaatggcttcgtcgctgagcttgtgcctcctgtcccctggtggtaactaagaacatcacaatgaggtggcattcagaaggaagctgttccttttagcatcctacaatagaagccagggaacaaattcttacaacttcatactgattttta

SEQ ID NO: 769005 - DNA, 588 bp, Homo sapiens
agcattgcacgcacaccctgcctgtctcacagcttcctctaaggtaggagtcattgacttcattaacaggtggggaaactaaacaaccaagcccatcatctcaaagcttttcctttgcacgggtgcttcccggccttgaataaggcacgccccgcacagacctacatcttaaaggggcaaaaaagcctcaaggctttatttttattgtaatatcacttaagcatgtaaaagcgaaaaacaaaacaaaacaaaacaaaaacaaacccacacagcataaactccttattcttttggattttgtgcaacaataaaacaaaaagtatatgaactaaatgcaaactaaatgatgcaatcaatgagaattctaattaactacctgaatgtgatggtgtggattcgctcaaattaagacaccacttgaaaggtgaaraaatcaatgaatggcttcgtcgctgagcttgtgcctcctgtcccctggtggtaactaagaacatcacaatgaggtggcattcagaaggaagctgttccttttagcatcctacaatagaagccagggaacaaattcttacaacttcatactgattttta

SEQ ID NO: 769006 - DNA, 602 bp, Homo sapiens
catctgaaaaaaatggaggtgtcgaactaacaaatctctggggagctgttctggctctaacctagtaattctgatactacagaatccaggatcccagtgtgtggtgggatcggggacctgttcagatggacatccaccctgaggccatctgagaccctttctggctgcccctgccctgctcatcaatgtctctcagaagatcttctctagcctcttgggggtcctccctgaacagctcaggaacctcgacagcctctgagaccagccaagttaarggtcttaggacagggctgaaacaccacctctgtctcaagcttggtgctgtctaccaagagcctgactgggggacatcaaggcaaccttccctgacttcatcaaacagttccaaaagcctgcaaacaggtgctggctttttaagagaagtaatttctgtggctctccactctagccacattagtcattcaagtgctgagggacaatataaattcctgtcatcctactttatgtgaccactaagatttattccaagcgacaggtcattaacgtctcttctctttatttttttttctcagattcactgaaaattcatatttctgctttat

SEQ ID NO: 769007 - DNA, 587 bp, Homo sapiens
tcctcttgccgtcaggcattagactccaggttctttggctttgggactctgggacttgaacgagtagcctcctcggtccctcatactgggagcatccctggttctaaggcttctggaactggactgagccaggctatgcgcttctctggttctccaacttgtagatggcctattgggagacttctctacttctgtgatcatgtaagccaattcccctaataaattccatttcatagattctcttggttctgtatctcygggcaaccctgactaatacaatagcctaaactaaatgttttaaactatttgagcaagagctggaaaagaaaattaagggaaagtttgagaataaagaaataaagcatttctaatgatttcctttcattttgctcttagagagagataggtaaataaacaatttgttgggagcaagttgataattgctgtcataatcagacataagagataaaacatgttcaatgatgattcttggggctaaaaaagtaaccacttgcagaattgaaaagcagagaaatacttccaaattagcaagaggaaaaaagaggggttaaatgacaatttactca

SEQ ID NO: 769008 - DNA, 658 bp, Homo sapiens
caacttgtagatggcctattgggagacttctctacttctgtgatcatgtaagccaattcccctaataaattccatttcatagattctcttggttctgtatctccgggcaaccctgactaatacaatagcctaaactaaatgttttaaactatttgagcaagagctggaaaagaaaattaagggaaagtttgagaataaagaaataaagcatttctaatgatttcctttcattttgctcttagagagagataggtaaataaacaatttgttgggagcaagttgataattgctgtcataatcagacataagagataaaacatgttcaatgatgattcttggggctaaaaaagtaaccacttgcagaattgaaaagcagagaaatacttccaaattagcaagaggaaaaaagaggggttaaatgacaatttactcaagctagcagattaattaattaaaggaaaaagaggaagcaataacaragcaaaacacagagaagcataaaattacatgtcaggatatttactatcctaaatgccgatggtctgaattcctttattgaagtacaatatattgaattaaaaaacaagaaatacactttaaaagataggaagtaagttaaaataaagggataccaaacaaattcaaacaaaatgaaagc

SEQ ID NO: 769009 - DNA, 713 bp, Homo sapiens
ttgcaggttctatcaggggagtgcagctactcatatgcccttgattgaagaccagtcctcctctattggggatggtcatcctcttcaaccaaggatgtagcttctggagggaggcacatggaacagtgagggaggaaggggacacctgcctaggcagccagatcagccaaacaaccgtggccatcaatggggcaacagatgtcacagccaggtsaccctcacatctggaaaatgccttatttaaaaaaaaaaaaaatgaagacttaaaatgagtatttttcttaagaaactaaaaaaagggaaaacaaaatagtataaaagtttgaggaatgaattgataaagataaaaatgaaaaataatgaatagaataaaagagtataaagcataaataaattcaaaatctgggttttttttaactactatatgaggcatttttctttttaaaaagtatattttgtatttttcagttcagggatttccattcggctcttccttaaaataatttcaacttctgttttagattcaaggggtgcatatgcatgtttgctacctaggtataatgcataatgctgaggattggggtatgattgatcctgtcacccaggtactgagcacagtacccaatagttggtttttcaacccttgtcccgcttcctcctgtagttctactgttgccatctttatgcccatgtgtaaaaatctgtatttttaa

SEQ ID NO: 769010 - DNA, 565 bp, Homo sapiens
tcccctttctaactggacctgggaggagcttaggctctctttttatggaccaactgatgttcactcaggtaggatgaaatggggtgcaagaaattaggtttttcagccccttttgcagctgccaattttgaaatgatatcatttgatttggaaaatattaagtgtccaccatgtgcaggggcctttcacatgaattatcttacatgttaaaaactcacagaaactytgcagaatatagtgggaccataactccttttagggctctgggtatacaagaaatgttattattctttatttcctttaagtcaactttggactctttgagttcttgttttaccaagaattttttttttttttttttttttttagcattctgcttcagttgttattggggtcccccttcctgtcttccttcctccttccctttcttttatccacctacttcccttaatcccctctatcccctttcattccccttccattctgctcttccccacctcttcataagtcccttctgactccctcttccctctgctcttcctcctcccaccttccttttctctct

SEQ ID NO: 769011 - DNA, 600 bp, Homo sapiens
gttcctggtgcctggaatgcatattcctcttttccgctcaccaaactttcatttatgcttagaagcataaatcgagtcacaccccttgtgtgtaaagccttccttggacactcccagcggagttggttacattctgcttgggattcccactttgcatgttcttctacttgtcacaggctattgtcttcgttttgtttgtttgttttaagagactgtttyccacaggcaggaaggaggacaggcttcctattccctttcagaagtccaagggccaggtagattctggtgcttgttagcggctcctttttgaaagaacaggaaggtatgaagtctaacctgttgacaacgccaggatggttttactttgtattattcattttgagcaaatttccaaggggactttgagagaccaatggggaacaacgtggaggactcctgagatgcagactcctggaactttccctgtccctgagttgtggttcaatagaaaatgtgcacttagaaagatatctgcccaagtcaaacctgtgtcccagggaaagggagggccaggtggagacggcagatctcatccccacagacctccaaagggccctttgg

SEQ ID NO: 769012 - DNA, 633 bp, Homo sapiens
acttgctttagtaaccatgagaggtgctggtaagcgggctggaggatggaatcaggaaacctagcctgagtcttggctgggtcaactagttgtgtgacctgagtttagctgctgtgtctctcagtggttcattttcctcctctgtagaatgggaataatacaacctgtagagatctctatgtaaaggggacctgtcagtggtgcagatgtgctgggctacagtgattacatgtcaagagcctcaggtcttcccccaggctcactctgacttggagatttgcttctggctcctgtaaaccacttctgggagtcacctctggcagtgtgccataggtctgcaacatctaaatgcaaggtgaatgtggaagtttgcatacctgccctctacccccacygtcagaggcatttgaaccagagggactccatcttgaacaggggctgggtaaaataaggccgagacctactgggctgcattcccaggaggttaggcattcttagtcacaagatgagatagaaggtcagcagaagatacaggtcacaagaccttgctgataaaatgggttgcggtgaagaagctggccaaaactcaccaaaaccaagatggcgttgaaagtgacctctggttgtcctcac

SEQ ID NO: 769013 - DNA, 640 bp, Homo sapiens
accaaaaccaagatggcgttgaaagtgacctctggttgtcctcactcctcattatacactaattacaatgcattagcatgctaaaagacactcccaccagtgccatgatggtttacaaatgccatggcaatgtcaggaagttaccctatatggtctaaaaaggggaggaaccctcagttccgggaatygcccacacctttcctggaaaactcatgaataatccaccccttatttagcatacaatcaagaaataactgtaagtataatcagtcgaacagcccacaccactgctctgcctatggagtagccattcctttattcttttacttttttaaacttgctttcactttagtttttggacttgccccaaattctttcttgtccaagaaccctctgttggggtctggataaggacccctttccagtaacaccactccatcctacatccccgatccaggtgataggctccactagccttcttttctttctttgctggaaagaatgttagatgggacaaatgatgagataacaattgctggacacttttacaaagctcttgcctatttgttttcttattgtctgtacaaccattctactaggtcaaggagttttattaacctcattttacaaacaaagacac

SEQ ID NO: 769014 - DNA, 597 bp, Homo sapiens
ggtattcattagcatatagatggtaatgaaagttctgggaatggaggagctcatctaggacaaaaaggtaaaagagagtggaaaaagagaccagaactgttccttaagacacttaaatatttacagtgggcagagcagcacttcactaagaggtcagagatactgatttccccaggtactggattagccaggctgagcctataccagctggatcccctgggccagctgcctctgagaaatggagactctattaatgactccgccaatggaagttagagcagtgggctctgatggtataccctacaatctatataaatggggagcatgaggaagacatgttcacttgctaatcctctacacaggctgaatgcagttaaggagatgyctgaccacccagacgctctatttgagcagctagctatggtttacaacatggttcattttgagcaaaatatcatgctccagatcccaagaaaacaaactgactttgaccagcttcttgttaactctccatcatttacatgtatatttatatataaatatgcttttctccagtattttaaagaacgagaattatttaatagagcatatagtgaa

SEQ ID NO: 769015 - DNA, 565 bp, Homo sapiens
tcattatatattattttaatcatctgacaagttttgtcctttacctttgaagtcttcagcatttctttctgggaaggtgtcctgaataaatattgatgcaacaaaaataccattctgaccctgattattttcttcttgggtataaattagtgtttctttaatttgtttactttgcacctggaccgattaccttgttttgctatagtaagggctaaataaggtaaggaccagaagttcattccctgtttaggtcagtcagggttacactgaagacatatttctttcatgcttacagatgtacccctaatcctgaccatctgcttagcaaatgagcagaagggcacagtaggtaacagtggactgtagtataaaacacaatcccagagctaagcrctgtatcccactaatcacaacatcatcatatttaaagacgagagcacagctgagcagatgtcttgggtgtgatccaggaacaatgccaatgggagcgagtagaatgagaaaaatgaaagctttagatgaaatggcatccaaccgggatcctgaacatgctgatttagatgtt

SEQ ID NO: 769016 - DNA, 629 bp, Homo sapiens
gaaggcttggatcccttggatcctcagtcacgacttgggtggctgcagccccacctgggagggtgggtttcctgcctgctctgtggattgagaggcccaggtctgcagccatggtttgggtggctgcagcagcagccagggagctcccacccctactcagaagtggcagggatcacttttgtccctggctcccattkgctccatggagagtgcagccctggccacgcctccctgctgcagcaggtatgatggcagcagcaggccatctggagaggccactgccgtcaattgtaccatgttatgttgtcaaatactaggccttactcattctttccatttctgtggcatccattcaccatccccacctccccaccaatacaaacccacttccctttccagcctttggtaaacatccttttaatctgcatctccatgagttcaattgtttggattttaaaatcctacaaataagtgagaaaatgtgatgtttgtctttctgtgccttgcttatttcaggtaacatacataatgacctccagttccatccatgtttttgcaaatgacagcatctcattgttttttgtggctgaatagtattccattgtgaataagtaccacattttcttttc

SEQ ID NO: 769017 - DNA, 629 bp, Homo sapiens
gaaggcttggatcccttggatcctcagtcacgacttgggtggctgcagccccacctgggagggtgggtttcctgcctgctctgtggattgagaggcccaggtctgcagccatggtttgggtggctgcagcagcagccagggagctcccacccctactcagaagtggcagggatcacttttgtccctggctcccattggctccatggagagtgcagccctggccacgcctccctgctgcagcaggtatgatggcagcagcaggccatctggagaggccactgccgtcaattgtaccatgttatgttgtcaaatactaggccttactcattctttccatttytgtggcatccattcaccatccccacctccccaccaatacaaacccacttccctttccagcctttggtaaacatccttttaatctgcatctccatgagttcaattgtttggattttaaaatcctacaaataagtgagaaaatgtgatgtttgtctttctgtgccttgcttatttcaggtaacatacataatgacctccagttccatccatgtttttgcaaatgacagcatctcattgttttttgtggctgaatagtattccattgtgaataagtaccacattttcttttc

SEQ ID NO: 769018 - DNA, 578 bp, Homo sapiens
atgagaaagatatataatagatcaaattgtgaatgtcatggatcacattaacttttaagatggtagtaatacattaactgtgctatttccaaatgttcatttaatttatttgtttagtatgtaattttttgtttattcagcgctccatggtatttcagaaaagctaatgcttcctttttccaagtcacatatttggggttggtaaatcaaaaaattatgaaaggaattttaacctacctcccaaaaatgtgccttcttctcctcttccttctctccctttttatttttgctcttctttcttttccttttccctctcattattatkatcattatcatcatcatcatcatcatcatcatcatcatcaatccattacccttagaagtcatggtagatcatgtctctttttaaacgtccattattttgcatttattaaaaacttaaaagatgattaaacactgctttaaatcacatttcaccattcatttcatttcatatttcaaaactgtgttgatcttaaaatttaatgatacacttataatttttttaccttttaggccacatagtataattagatgtg

SEQ ID NO: 769019 - DNA, 632 bp, Homo sapiens
taatacattaactgtgctatttccaaatgttcatttaatttatttgtttagtatgtaattttttgtttattcagcgctccatggtatttcagaaaagctaatgcttcctttttccaagtcacatatttggggttggtaaatcaaaaaattatgaaaggaattttaacctacctcccaaaaatgtgccttcttctcctcttccttctctccctttttatttttgctcttctttcttttccttttccctctcattattattatcatyatcatcatcatcatcatcatcatcatcatcatcaatccattacccttagaagtcatggtagatcatgtctctttttaaacgtccattattttgcatttattaaaaacttaaaagatgattaaacactgctttaaatcacatttcaccattcatttcatttcatatttcaaaactgtgttgatcttaaaatttaatgatacacttataatttttttaccttttaggccacatagtataattagatgtgatttgtaaaagtatttaacatataattttctaacatacattaaactacaattttaggggagtaaaatgtggtaaccagggactgggacaatggagcggtgagtgtgttggggagatattg

SEQ ID NO: 769020 - DNA, 632 bp, Homo sapiens
taatacattaactgtgctatttccaaatgttcatttaatttatttgtttagtatgtaattttttgtttattcagcgctccatggtatttcagaaaagctaatgcttcctttttccaagtcacatatttggggttggtaaatcaaaaaattatgaaaggaattttaacctacctcccaaaaatgtgccttcttctcctcttccttctctccctttttatttttgctcttctttcttttccttttccctctcattattattatcattatyatcatcatcatcatcatcatcatcatcatcaatccattacccttagaagtcatggtagatcatgtctctttttaaacgtccattattttgcatttattaaaaacttaaaagatgattaaacactgctttaaatcacatttcaccattcatttcatttcatatttcaaaactgtgttgatcttaaaatttaatgatacacttataatttttttaccttttaggccacatagtataattagatgtgatttgtaaaagtatttaacatataattttctaacatacattaaactacaattttaggggagtaaaatgtggtaaccagggactgggacaatggagcggtgagtgtgttggggagatattg

SEQ ID NO: 769021 - DNA, 467 bp, Homo sapiens
gtgtcataatacaggttagcaaatttaaagctatttgaagtttgacaggaatgaacctgctttgttgaacgcagtttttctctgactatatttaattaacgaacccatcattcacagcgtgtctattaatttcctgtggaactagtgagaaatgcttttctacagcagagcgtgaggccatggctataagcagagataaattggctcaagttgctgagaaaattaaactcttcggtcaaaaaacaaaacgaktcaataatttaatgtgttggcattgatccattgacactcttctttccaaattttatttttgacttagttgaatatgtgtgagaatgcaaatgaattattcctggaaaaataattaaataactcaatagtggccacagtgaaaaccactacaacaaattcattttattgaaacaaccaaagcatactcttttataacatttttgcaaaagattatt

SEQ ID NO: 769022 - DNA, 640 bp, Homo sapiens
aagaccaggtcacaccaccgtgagcgcaggcggagtcctcaatgaccagcactggcactatgtgcgggtggaccgatttggccgcgatgtaaatttcaccctggacggctatgtgcagcgctttattctcaatggagacttcgagaggctgaacctggacactgaggtgagagactagggaggtgctatttcgtggtagggtagatgctggatgagtgagtgcaggtcggtctctccctttctcttttcctctgtctctcagaggaaagacctggcattcaggctgtgggtggtggctcatgcctgtaatcccagcactttgggaggctgaggtgggaggattgcttgaggccaggtgttcaagactcacctgggcaacatagtgacatcctacctctatttaaaaaaaattttttttttcaaagacctcgcattccaattcctgaatatcctagcagcccttggcaaacttgccactcaccagaaaaaggcctgttttttttttttttttttttttttttttttttkgggggggtggtggttgttaccttgcaaactcccaggccctttttcaaaactaatgaaagggggttgggaaattcaaattttggggactaggcaagggaggaaaattgttccc

SEQ ID NO: 769023 - DNA, 651 bp, Homo sapiens
atcccagctactcaggaggctgaggcaggaggattgcttgaacccaggaggcagaggttgcagtgagctgagattgtgtcactgcactccagcctgggtgacagagcgagactccccctcaaaaaaaaaaaaaaaaaagttttaaaattagccaggcatggtggtgcatacctgtggtccctgctactccacaagctgaggtgggaggatcgcttgacccgggaggtcaaggacagtgagctgtgatcacgctactgttctccggcctgggcaagagagtgagaccccggccactccaaaaaaaaaaaagaaacattccatgatggggacaaaaaattaaataaaataagaacaacccccccgcccccagaaatcttcacattcccttagtcctagsaaaaccaggacagttggtcaccctaaatgaaaaaccaccacggagaatgattagaaaatcgcaaagcagtacatataaataatcagggctgaattaaggcctggtagatatttgttcatgaattaagcaaggatttattaaaaacggagattgagttgctcagcactaagcttcacaatggaccctacctaaaggggttcccacttttactagaggggtgatatagcattgttaccatttggatagtgttttac

SEQ ID NO: 769024 - DNA, 477 bp, Homo sapiens
atacctctttttcaagttgagtagaagccagattcctattatcagtcgtttgcattactcaattctaacaatcacttgggaacataaataatacttggtaaaattaattcttttccaagacaaatgaaagaaacatatcacatatacttgtgccatacatacgcktaaccaacaaacacatcatctggggaagaaaaagcaaacccagacacatataaaatgaaatcatcgtaaggtttcattttatttatttattattattattttttgagacagagtttcgttcttgttgtccaggctggagtgcagtggtgcgatctcagctcattgcaacctccacctcccaggttcaagtgattctcctgtctcagcctcccgagtagttgggattacaggcatgcgccaccatgctcagctaattttgtatttatagtagagacagggtttcaccatgttggtcaggctggtctcgaactc

SEQ ID NO: 769025 - DNA, 477 bp, Homo sapiens
atacctctttttcaagttgagtagaagccagattcctattatcagtcgtttgcattactcaattctaacaatcacttgggaacataaataatacttggtaaaattaattcttttccaagacaaatgaaagaaacatatcacatatacttgtgccatacatacgcttaaccaacaaacacatcatctggggaagaaaaagcaaacccagacacatataaaatgaaatcatcgkaaggtttcattttatttatttattattattattttttgagacagagtttcgttcttgttgtccaggctggagtgcagtggtgcgatctcagctcattgcaacctccacctcccaggttcaagtgattctcctgtctcagcctcccgagtagttgggattacaggcatgcgccaccatgctcagctaattttgtatttatagtagagacagggtttcaccatgttggtcaggctggtctcgaactc

SEQ ID NO: 769026 - DNA, 481 bp, Homo sapiens
ttccacgtagcaaacacaggccaaggccaaaatctgtagccacgttccttcttttgggttgtctctcatttatgcctttgtgcattttaccagcaatgcatattcagtctaagagtcagaatataaaccaaactctgagcaaaccctggaaagggcctcactgggataaaagttacagtcctctcagattagtaaagcattagccatgaaggaaaaagaagacatttcttcagtatctcacacagatcaagagatggttcagaactgtgtcaagaattatagttacttcaaaaataaaccatgagaagtgtaagaggaggttctggcrccttgccgagcccccagcgatgggaatagaaaaacagaaatacccacattgctcctggactagaggtgggaccacagctagcacagaactaatgtttctgaaatttgaatccaggaaatatgacatagaaagttccaaaattttaggaattaa

SEQ ID NO: 769027 - DNA, 655 bp, Homo sapiens
gaacctcaattcttgacttttgtgtatcttgacttttgtgctcaacatcatgtggaagctgccaaggcttggggcttgcaccctctgaagctatggcccgagctctatgttggctcctttcagccacagctggagcagctggaacacagggcgctaagtccctaggctgcacacagtatggggaccttgttcctggcccttgaaaccactttttccttctagacctctgggtctgtgatgagagcagctgctgtgaagatctctaacgtgccctggagacatttccccatgttgtcttgggtattaacattcagctgcttgttacttacgcaaatttacgcagccagcttgactatttyctcagaaattgggattttcttttctattgcattgtcaggctgcaaattttctgaacttttggctctgattattttataaaactgaatgtcttcaacagcacccaagtcaagtcttgagtgctttgctgcttagaaatttcttccaccagataccctacatcatctctcaagttgaaagtcccacaaatctctagggcaggggcaaaatgccaccagtctttttgctaaaacataacaatagtcacctttgttccagttaccaacaagttcctcatctccatctgagaccacctcag

SEQ ID NO: 769028 - DNA, 599 bp, Homo sapiens
atctttttttgtgaagtatctgttcagatattttgcccattttaaattagattgtgtgtctacttattttttacttctttatatatagaaagatatgttcttgatacaagtcctttttcagatatatgtattgcagatattttctctcattatgtgatttggttgtcattttcttgatggtgtctttttttactttttttattgtcttttgaaaagcagaagttttttcttttaatgaagtccaaaataacacttttattttatgcttaatgtgttctacttaaggaatctttgcctatcccctgattgtaaaatatttttctcctaacagttttaaaattttagtttttgcrtttaagtcaattatccacttaaagttaaattttgtgtataacatgaggtaagggttgggatttattgtttttccaatatggatacaaagttgattcagcatcatttgtggaaaaaaactattctttccgtattgaattctagaaaacaaacacttttgggatatagatgatgagagaacatttcccaactcattttataatacaggtagaacaaaatcaaacaaagaaacgacaagaaaataaata

SEQ ID NO: 769029 - DNA, 579 bp, Homo sapiens
ctctgctacctcaggccttcctctccattcaagtagcaagatcaaatctctgtaacctggcatagagattctccaaaatctggtacctatctttcactgaagacaatatagtggctgccacctcccacagatagttcccttaactttaaatgtcttttttcattcctccctttcacatggtcaaattctatttacactttatgatttaatccaagcatcacttcttctaggaaactatctctatatcaccccattctatcctctaagattgaatcaagtgtccagccttcagtttttctatatctttacttatctctatcactaaatttatcatgtgcctttataattatttttatgcatgtttactccactagcctgtgaatccattaaggacagagaatacagcttgtttttctttgtattttagtacttsccagatttagcaaataaaaaaagtacacccaattacaaatttaaatttcaaaccaatcaggaatcatttttaatgtaagtatgccccattaaatatctgtgcacacttaaactaaaataaattatttgggataatctttattttat

SEQ ID NO: 769030 - DNA, 438 bp, Homo sapiens
tctttgaagtctttaagcagaagtagcagatcactttgtgagtatattaaagagagtgttagatgtgaagatccctgcaaccacttgaaccattgctgactgctatttaatttttattttggagagaaaaatttcctaatagttaactaagtaacaaagacagtaagaccatcttgcccctataaacttttgtgaacaatgctttattaagtttttaagttgcaccaagatatttttatgagctggccatgctgcgtwtttgaaagttacattagtgcaaaatgggccattagagatccagtcctgagaacttttattcctgacacaagtcccaaatgcccaggtgggaggaagcaactggagggaaaagaaaagcctccatgaatgtggaagggaaaagaaaagcctccatgagtgtggaagggaaagaaaacgggc

SEQ ID NO: 769031 - DNA, 587 bp, Homo sapiens
agggcctaattgctcaacaaactaatatctcagactgcaaaattcagtgacctatctctggaattcatttagtttcttaacatcaagtgacattaggtgcgatatgatcaaacctgtctcatctgtcatctgtcaggtctttggagctattaaggtcagacaatgaggacgaaagagtaccaataaaactgccaataactctgtctatacacaatagaaaaatgtttgaagtgtaaattaaaatacccctcatgaaactatgaataaamctacatcatccattttaccttcattacaacattgagtcacaggactgggaatcttaagttacaagataattctttggctacggattatgccatttgagattttatggtacctaagttttattttcatctttgattttactttattttgaccaggggcagctcttgcctaaaactaacctttcgctttagtgacattaaagggctcagagtgttacccaaagcagagatataagaacacccaaggaaagaaatgaagagaatcttcaggcttccttcaaacttatctcctattttgtatctgggtaagaaaaaatgtag

SEQ ID NO: 769032 - DNA, 540 bp, Homo sapiens
aattggataataccatttgcttatttcatagccctttaatcttgagttttgaaattactatgatcttagtggtataagtatgatttggaagtggggtatactcagattctgattttcatgtcatttcctcttttcattgggccataattttagctgrttaataatcagctcatgtttggtcttggaaaacaggcttcaaaaggtaagagctgcaaacacctctgtggtttccctttgtttctttcatgtagtagttcactctattggcgcgcactaaagtgagaagggggcctcagagatggaatggtataagcaaccattttttggccctcctaaaagcaatcatttgcttataagaccacaatagtgtggtctgtgtctccttttggcttagtttttccacaatttcagagttggggttgggggcagactgaaggaggtacgggtgggaggggtctgtttcaggttttccttggtcagggattttatgtatctaaggatgatttgtgcctccagggttgctttttatttgacatagca

SEQ ID NO: 769033 - DNA, 525 bp, Homo sapiens
gcaacttcgaattgcctgaaatactgaacatattgagacatgaatgctgcaaacatctaaaaatattagtagtgtggctgcctacaaagaagatggagggcctacctgaggcggcagagcctcttacattggagggttggagagaatcatccacctgcaggaggcccccagtcaggaggttagaagaccatatttaagaagaaggaatcacagtccaagttcrgcctcaaaccagtacattttaagagtctcagtagatagcaaagagatcataaaaatgactcaccaaaaggcatatattaaaattggactgggatgcatttttaagaaagccagaaaactccaagagcatagcttcagaataagaacaacacatggttttttgggggggaagtttaataaactgcagttttggattaccttaatccatatccttaatccacaaaattctgtcattcactgttttgggcaatgtgacattatattttattgtaaagtattatagtatatttctgtttgatgagt

SEQ ID NO: 769034 - DNA, 589 bp, Homo sapiens
ttacaggcatcaataccatagctaaaaattgaaataaattaattctgagaaagacttaaagaacttaaacaatggcccagaaatagaaccccctaagggcatgctccctgctttatcttcatgactgctagtaagtaagtagtccagtggacattcctatagccatggaatattgagacccaaatggttgctgtacccaaggcatgcccttcagccagatgacagcagcagtgaagtgttgactcgggccagagatagtttcktaatgagccaccactgacttaatcaagtcaacactcatgagctaaccctagaagacctcccatccatgtttaatgtaattgattggtttatgaaaagaaatagaggatataagcacaattggaggcaattacaaataaagacaagctaaaaattattattatagatgaatgcaaactttcgaataggggatactcttctacagagttggactgccccaggagtaattctaagacgcaagagggagacaaagtttaaaaagcatcaattcttcttggggctttccttgtactgtgcaccttcgtacagaggccagcgatacagtttg

SEQ ID NO: 769035 - DNA, 676 bp, Homo sapiens
attaaattatgtcccttctatgccaattttgctgagggttttaatcataaagggatgtcccttctatgccaattttgctgagggttttaaacagcaaaagcttttaaaggaatgctggattttgtcaaatgttttttctgcatctattaagatgatcatgtgatttttgtttttaattctgtttatgtggtttattacctttattgacttccatatgttaaaccacctctgcatacctggtatgaaacccactggatcatggtggattatctttttgatatgctgtttgattcacttaactatcattttgttgtggatttttgcatctatgttcatcagagatattggtgtgtagttttcttttttgttatgtcttttcctggttttggtattatggtgatactggcttcatagagtgatatagggaggattccctctttctctatcctgaggaatagtgttattggattggtaycaattcttcttcgactgtctgatagaattcagtgaatccatctggttctggactttttttttttttggcaatttctaaattaccacttcaatcttactgcctataattggtctgttcaaagtttctatatcttcctggtttaatctaggaaggttgcatatttccaggaatttatccatcgcctctaggttttctaagtta

SEQ ID NO: 769036 - DNA, 549 bp, Homo sapiens
ctcttcatgtacctgaacgaagtcgtgggcaagcagggtgtgggctgtattgacatcatggagaaccgcttcattggaatgaagtcccgagggatctaccaggccccagcaagcaccatcctttacctcgctcatttagacaccaaggccttcaccatgggccaggaagtgcgcaaaatcaaacaaggcctgggcttgaaatttgttgagctggtggataccggtttctggtacagccctgagtgtgaatttgtctgccactgcatcgccaagtcccaggagcaagtggaagggaaagtgcaggtgtccgtcctcgagggccaggtgtacatccttggccaggagtccccactgtctctctacaaggaggagccggtgagcatgaacgtgcagggtgattatcagycaattgatgccaccgggttcatcaacatcaattccctcaggctgaaggaatatcatcgtctccagagcaaggtcactgccaaatagccccctgtacaatgaggagctggggcctccttaatttgctgatcccccaagtacagg

SEQ ID NO: 769037 - DNA, 623 bp, Homo sapiens
atgtaccatttgcatcctggtttacatacacacacacacacacacacacacacacacacacacacacacacacacacgggggagggtttcttaccctgagtatgaatcccactggcttgtcttcagaatgcaaactgtaagtctaagaagtcatatggtttaatttcaagaacctactcaggatttgtccgggatgtaatgtacatgtttccctaatcctgtktgggtttgctaatatatataatgatatctttaagcttgtgcctaagctatgcccaccactgggggtccagtgaacagctagggcagcctaaccaagccaacgtgcgtaagaactgtggaccctataggatgagtgaagggatcaaggatcaggaagagtttgcctcagtcagaaaaatcctagttgtagaatgggaaggaggaatgttggaccacatactgcttttattttatgacattccccaactggactcaggtctcacttctggagaaaattggctgatggttaaacactgaaagagctctatgtggtgggcatttgttgctttgtttgcctggaacagcactgtcctctttttagtaggattctgatggggctgccaaccatagttcctaatgct

SEQ ID NO: 769038 - DNA, 646 bp, Homo sapiens
attcaattaaaaagaaataaaattaatcagcttctcttaagaaacagacttacaggaatgaaaactagtgtgtttcacacagtaaaatggaagaagcttaagagctaggttcaaattccagactctaccattaattattcaatcttagcttctstggcttccagttctataaaatggagccaacagcaaagatcaaatgacataacactgaaggcattttaagcaagaagaatatacaaatgctgagcactactgcctgaaatactaataatgtacttatccgagaagcctttaaagttacatggttctacacaaaatgttagtataaacataactggcaagataatattatcagttttgccatttaaagaacttcctaacaatcaaagatatgcaacatttattctacccaaagttaaagtgtcctgccctaacctctactttgagacacttggtaaataattttcggaagagtgtcaagatacataatattataggagacgatgtcaaatattaaagcttcaataataagtggactagagaatgattctactcacagctcacagttcaatccatctcttcttctcactgacttctcaaccattctgtgcttttccatgttttcctccttcttcccactctaccc

SEQ ID NO: 769039 - DNA, 332 bp, Homo sapiens
acacatcactgtcattcatatttcatgttgatgatgctgacagtgattgcttcctgtatataaatggaaaggaaaaaaaaaaaacccacaacagaacaatacctctctaaaagctacagcctataattgaaatccacttgcattttcagtttggtaatttygaattttgaaaaagaggcctctttgctgatagctcattccaggctgatctgtccaacgctgttatttccctagagtttacctgtctgacacattgtataaagctattatttggcaagggtgcacctttgcacttgggccaggatggataaaattaaacttattacagagaa

SEQ ID NO: 769040 - DNA, 610 bp, Homo sapiens
ccaaggatccatctgcacctgcagttacttacatgaattgggagaaccttttgtttcttgaggccccaaaacaaattgaggatcttaggcctgtcagaaagtgactctctctatttaccacaggacaggaactctctaaaggcacagcatagataaggtacaaagccaacccttccaaaaggctcccattggctctataaagtcaattycaattttttagagcaatctgcttatatccaaaaacatgctattccagtcaaatccatgataaaataatcagtgcttccaattgtaccccattattaaaagaaaggactcttatcaaacttatgcaaaaaaccacattgtcatgaattaagaatattcataaatagttatgaattctgtagaaatcaggcagagatagagaaatatgcctaaaattctgtttataagggtatactttactcaatagttaaaggctatgaataattcaaaagaaaattgttcttcagaccctgaaaaataaagcaaaaagaatcagcaatatttcaatctatgcaatcaactctggctctgcttcgtattgagttagctatcattatgaacacattagccttttaattgtagt

SEQ ID NO: 769041 - DNA, 563 bp, Homo sapiens
caataatcataggaaccttagttttgtaaacactgccatgtagataatttgaggaaagcaatggaaggccaataatatgagtcaaactaacgacaggagaaaaacaaacttgttctgagagtcaagactctggagttctttttgctgtctttttccaatctgtatgccttgaatatggcacttcactcattggattcaattctgtaatcattaaggggctaaaacggtcaaccaccttgcatcaagttttataatgaggaggtagttaagatcaccagctctttgaccagagggctttagttcaaattctggctctaatgtatattatataaaacaagtttctgtcttttaaaagaaaatacttctgtttaatttcagttttgtcacatgtgtcatggcataaataatagtttytaaataacaagctgatgtgtcatttaaatggataaatatattggaagcttatacaatggtgcccgcaacaatgcaaattctcaatagtgattagctaatgcttcattaaagacatttatttctcttatatttttgacaagacttacttt

SEQ ID NO: 769042 - DNA, 347 bp, Homo sapiens
aaggagggatttttctgtgttctgtttgttaccatattcctaacacccacagcagtgcttggcaaatagtcggtgctcaataatgatttgttgaattaacaaataggtcaaagtcttctgtgtataatctgtaaacgctgaatgagagaacggaaatagctgtastatagggtaatttgtgggaaaatatctggttgagttacattaggaaatgttaactgtgaagtaatggtgctcattttaatggtatttggtggtatagcattaatgattatgattggggagcttagaaatgagtaagctttttcccagtaaaattaatacgatgtactctttttttactttga

SEQ ID NO: 769043 - DNA, 605 bp, Homo sapiens
tgtagtgccagagaaaccatgacggtcccatatgtaaacaaagggtgtatctctggtccaataaaactgtgtttaccaaaacaggcagaggacaagagttggccagcagactggtttgccaacaccctgtcctaggctagtcctgattcagagagaggttttcacaaagattttgtaaacttccaaatgacaacagcctttttagcagcccccatcaattctactcacctcccataaaccacccacaatactaccccttctctatacagtgggtttctatcgttctttactatttcagctaggcttgaacctggctccttgacagcccacggccaaccttgaatatcctaaactttgtataccagctcragggaagtctgcattcgttgccattcttacatgtagacttgtttacaggaatattatcactgaattcaaggtctggcagatatttttgcttacacaaatacattctaactcaattaactgggaggtgaaggaaaaaagaaagacaatacggaaatgtcaagtcatttggaaccatctgctgtaagagagctcctgagtgtctgtacacaaatattaatctaactcaacaggcatat

SEQ ID NO: 769044 - DNA, 669 bp, Homo sapiens
tgatgaagaaccagagcatccagaatggagtgctgtccccactggatcctgcagggaaggacccccagagcccaggggtccccacagcctcacaatgtaattggaattagactcaaggcacagtcatctgggcatctccaaggactagatcttggttctctccttttatcccagatatgtgtcatagtgcctggcacatggtaggatggcagtaaatatttgttgaatgaatacacatatgaatatgagtcacttgtgctcccataagcgttagaagacaagcaaacagctctgaaagcagcagttagtctcctgggggtatctgagaaagcttcctagsaaggaaatagcaaaatcaggtcccagaaggtgagttcaagtgagttctgtcagaagcgtctgaaccagagtgactccatcttgaatacaggctgggtaaagtgaggctgagacctgctgggctgcattcccagaaggttaggcattctaagtcacaggatgagacagaagggtggcacaagacacaagtcacaaagaccccactgataaaacaggatgtggtaaagaagctggccgaaacccaccaaaaccaagacagtcatcctcaatgctcattatatgccattataaagcatcgcatgctaaaagacactcccaccagtgccatga

SEQ ID NO: 769045 - DNA, 704 bp, Homo sapiens
cccataagcgttagaagacaagcaaacagctctgaaagcagcagttagtctcctgggggtatctgagaaagcttcctaggaaggaaatagcaaaatcaggtcccagaaggtgagttcaagtgagttctgtcagaagcgtctgaaccagagtgactccatcttgaatacaggctgggtaaagtgaggctgagacctgctgggytgcattcccagaaggttaggcattctaagtcacaggatgagacagaagggtggcacaagacacaagtcacaaagaccccactgataaaacaggatgtggtaaagaagctggccgaaacccaccaaaaccaagacagtcatcctcaatgctcattatatgccattataaagcatcgcatgctaaaagacactcccaccagtgccatgaccatttacaaatgccatggcaatgtctggaagttaccctacatggtccaaagggaagaggaaccctcagtttcaggaaatccccaccactttccaggaaaactcaccaacaatccattgtttcccatatgatcaagaaataactattaaaatcgccaaccagcagccctcagggctactctgtctagggtactccattcttttatttctttgcttctctgataaactgctttcactttactctgtggacttgccccaaattatttcttgcataggatccaagaaccctctcttgg

SEQ ID NO: 769046 - DNA, 704 bp, Homo sapiens
cccataagcgttagaagacaagcaaacagctctgaaagcagcagttagtctcctgggggtatctgagaaagcttcctaggaaggaaatagcaaaatcaggtcccagaaggtgagttcaagtgagttctgtcagaagcgtctgaaccagagtgactccatcttgaatacaggctgggtaaagtgaggctgagacctgctgggctgcattcccagaaggttaggcattctaagtcacaggatgagacagaagggtggcacaagacacaagtcacaaagaccccactgataaaacaggatgtggtaaagaagctggccgaaacccaccaaraccaagacagtcatcctcaatgctcattatatgccattataaagcatcgcatgctaaaagacactcccaccagtgccatgaccatttacaaatgccatggcaatgtctggaagttaccctacatggtccaaagggaagaggaaccctcagtttcaggaaatccccaccactttccaggaaaactcaccaacaatccattgtttcccatatgatcaagaaataactattaaaatcgccaaccagcagccctcagggctactctgtctagggtactccattcttttatttctttgcttctctgataaactgctttcactttactctgtggacttgccccaaattatttcttgcataggatccaagaaccctctcttgg

SEQ ID NO: 769047 - DNA, 617 bp, Homo sapiens
ttctaactgataggagggtgcatggaccaaggccagctcaatccagcagcctcctgcattggaacagccctcgggcaggaatctattttggggaagtggtagatggatgagccaacccattgcactgcttgctataccttttctggtggtggggagggggctcagactaccgtggggagtgaatgcagttcagggcaccacagaccagcccgctggcgggggaggctgcctccaaacgcctccccgcacactatgtctgcagggatgcagaagcctgtgagtcacaggccttctttctgcccagcacagtcatgcatttgtgtctgtgaaaggtgctctttgcccgatgggggctaggaggcctccaggccgatgtccccacccatagctgtgttttagagccttgtcttagctgtgggcaagactggctgcccgccttcctccttggacacaggtcctctccagaacctgargtgggcatcagcattctcagactggcaccggctggctgcatgccccctccttcttctgtgtccctgacactcagcatgtacctgtccgtctgcacgcagctggggccggctccagtcagctgcacacagtttgcccagctcacc

SEQ ID NO: 769048 - DNA, 501 bp, Homo sapiens
ctgtaatttcatcctatgtatgggtcccacattttgttcactgggtgtcttcaatgctcctttaggttgcttccaaattgtctctactgtgagcagtagtgcaatgactggttttgctgtgtacctctgccttttgaactgtacagttgtaataggagatatcttagtgtaggcagagtcttcattctagggaaatgcatgcccaggtctccctgtcgsctcaggcccggcccacccatgcttcatgctgagcacgtgctggtctttgtcctggcattttccgcgctctgtgtctttgctttgatttttctgtgtctcttctgtcttaaatgtgaaaaaaggtgcccctgcttctgagaacagagagaaccaagtgacaggccccgaatttcctggtgcaccagtgaatggccacttcgcttgctgtccgtgagctgatcgtgaagctggatggtttttaacctgggccaagccatgggttgtccccgcctttgtcctgtg

SEQ ID NO: 769049 - DNA, 618 bp, Homo sapiens
ataaaattctaacctaatggaggaagtgctgggcggggtggtcaagaaacacaaacacctgcatctgtacagctatgatgaggagttaatgcaaacaatgtctactgcacacctctatccactcatccattcttttaatcactcgttcttttgtttctccagttcacaacagaaccccacacatatgcaaaaccctagcaatttaaagatgcagaaactatcatcccttccttctatgggccaaacacttgagtcaggcaaccccatccaygcctggtttatttcattactttctcaagaatgttaatgcaagattgctgggatgaccacacttaattaaagcaacatgaccaagaagaaatccccaggaaccacgtggaagtgcagcgaaagcttcagatattccccctgtaattataagttgtgtggcctgacagctgctcccaagagaggctttttgtaaattatttttattattatttttttagaaatctggcatgaaaggattggttataaaggcgaatccttgctggtagaaatcttgagtggactgtctccaccccgtagctgtccagacatagagaagaggttgaaaagagagcagagaactaaacagag

SEQ ID NO: 769050 - DNA, 562 bp, Homo sapiens
atgactcttcgttggaaggacggatccttaaccaacctgctgctcgcctccctgactgcatttcttctatgtgtgctacttcgttcagcctgctggccctgcttacatccgttcagggaacagaatgaaggaggccagggtcattttctccaggaagtcccgccgacaggcaaaaatgccccagtgtctgacaatagacttctgttagtttgtttccagttctgtgatcatgtttttcattttttataatttttccatttagaaatttgasacccaacagccaaagtactttatatgccattgtaaagtagaacctggaatataaaagtctggtagctcaaggctattatgtttctttctttctgttggaaagaagacttgcagttggggcaaaaaatgggacagttgaggaaagaaaccacgcaaatgtttctgagccattgtggcccccaaaagactcctactttccctagtcctccagaatccaggttgacaccagcagtggggggatctgtgctcaggctaaggaaggggtggccagaaaagggatcaggatggctcc

SEQ ID NO: 769051 - DNA, 486 bp, Homo sapiens
caaaacaccttatcaaaagtttctattgtcaagcttccaactcagaaaactcatttgtatatagcaacagcacacccccatgctgacgacacaccaggtgctgtgctcagcacctcacactcacctcattcaggactstcagctccctcccaaggcaggcgtgtgtgaacatcatctcccctctaccagtgggaaaactgagactggtgggagggggtgtggggactggggtttgagctgtgtgtccacagtcacacagctcttaagtgacatgacaaggaatcacttccaggagctccagcaccattgttagggtttttgtctccacatgtctctctgcctggagatggctcaggacaggagccctggctttgccacttaaagattcaatgggcctttggtaagccatctagctgctgtaggcccagctgtcaaatctgtaaaagcagggagttggatgagctcaatgattttcaaaatgtgagc

SEQ ID NO: 769052 - DNA, 486 bp, Homo sapiens
caaaacaccttatcaaaagtttctattgtcaagcttccaactcagaaaactcatttgtatatagcaacagcacacccccatgctgacgacacaccaggtgctgtgctcagcacctcacactcacctcattcaggactctcagctccctcccaaggcaggcgtgtgtgaacatcatctcccctctaccagtgggaaaactgagactggtgggagggggtgtggggactggggtttgagctgtgtgtccwcagtcacacagctcttaagtgacatgacaaggaatcacttccaggagctccagcaccattgttagggtttttgtctccacatgtctctctgcctggagatggctcaggacaggagccctggctttgccacttaaagattcaatgggcctttggtaagccatctagctgctgtaggcccagctgtcaaatctgtaaaagcagggagttggatgagctcaatgattttcaaaatgtgagc

SEQ ID NO: 769053 - DNA, 599 bp, Homo sapiens
tagtgacagagagtggctcggagagtggcgctccactgcaggacataaggcccacccctcaagcttccttaacatgcgaccactctgtagtaccaagggttctgtggcctctctggtataaacggcttgaaaatcccatgcaggataagtgsgtagacaggcttcccatgacacggcaggtccattccaacactgagaggagaatccacttcagccccatcctgcacccgcttttccccgcaacggggcaagcttccaggagccctcctcctcacggtgatctcttacatcattcacggtagcaagtctagtgctttatatgtgtgaaaatttaagagctaactcattttaccagaagcccaagaggctgtccggtccacccaggtggggaccggagcccaccccgatctcaggtccaatatttgctcacgttcaggcaacaaaaaacatccttccactatgttccggtgagccagcagttcaccactgaagaaataaaaacaacaacaacaacagatccagccagttgaaacacttgttgatgctaagtgccactttagtgtgtgccgttcccggaaggctcagaacaaagcaagctg

SEQ ID NO: 769054 - DNA, 599 bp, Homo sapiens
tagtgacagagagtggctcggagagtggcgctccactgcaggacataaggcccacccctcaagcttccttaacatgcgaccactctgtagtaccaagggttctgtggcctctctggtataaacggcttgaaaatcccatgcaggataagtgggtagacaggcttcccatgacacggcaggtccattccaacactgagaggagaatccacttcagccccatcctgcacccgcttttccccgcracggggcaagcttccaggagccctcctcctcacggtgatctcttacatcattcacggtagcaagtctagtgctttatatgtgtgaaaatttaagagctaactcattttaccagaagcccaagaggctgtccggtccacccaggtggggaccggagcccaccccgatctcaggtccaatatttgctcacgttcaggcaacaaaaaacatccttccactatgttccggtgagccagcagttcaccactgaagaaataaaaacaacaacaacaacagatccagccagttgaaacacttgttgatgctaagtgccactttagtgtgtgccgttcccggaaggctcagaacaaagcaagctg

SEQ ID NO: 769055 - DNA, 591 bp, Homo sapiens
agctcacctgtgtaggggtggctcaggaaggaatgactgaagggtatacaaattactctgtggcttcagggggttgagtctctaattcaaggtcttgctgctaattctaaagtcatgcttggcaaagcacatcactctagagtttctacttttgcttcctgcattcccttgacatttcacatgccgctgcaacagaggggtggctggtctcctttttgcttgaatagctggagtccatacgctgggctggctttgacgctgcgcctggctctctcggctgcctacgccaccatgtggagaccatgtaaacacacaaaatgccatgcggccagcccgtgcctggaacacccaccaggcagcagagctcctccaagacagtcttcagcaggtggctgaacagcaacaaacagaaaagggacgtcctaggctgtatcagggragggatctgatgtgaccatccacccaatgtctccaccagatcaaatccaaactgctgatatgcggggtagaatttggcccgcatcacacaaagtagagtcagcttacctggacccgggggctggcctcggaggtactgaagagcacagagct

SEQ ID NO: 769056 - DNA, 669 bp, Homo sapiens
gtccatggcagtccgtgtagctgggatcatgtttgaaagcgaatgggatccagataggctcaccgccttgacaacacaaaacacacctgctaagggtaagcactccacagtgtgtcttctcacacaaagtgccaggaaattgcactgacttcctgggccttcctttccttacagggctttttgtttgtttgtttgtttgtgttgttgtttgtttgtttgtttttgatggagtctcgctctgtcacccaggctggagtgcagtggcacgatctcggctcactgcaacctccacctcccgggttcaagggattatcctgcckcagcctcctgaatagctgggattacaggtgcacgccaccacacccggctaatttttgtatttttagtagagacggggtttcaccacattggtcaggctggtctcaaactcctgacctcgcaatccgcccaccttggcctcccaaagtgctaggattacaggaatgagccaccgcgcccggccttgcagggcttttttgagcaaagttttcccgccctccttctctttctttgtgttttttagtactaaagtacatttgggccgttccatttacctgaacgtatttaaagtatacacatttcaataagggattctcagagttaagaagtctttaaacggcaaggaaaata

SEQ ID NO: 769057 - DNA, 658 bp, Homo sapiens
aattacggtaacaattaaaaccaaatactaaaactgaatctagagccattctttggaattgctatacctctaagaatttaaccaagatttcaaaaaataatgagtatcatctaattacatgcagtttaccaaaatattatagttgatactatttgtggaagcaaaatatgtcttgccctattgataaataaaatattaaaatatttcaattatctcttatctttcttagcattctctttatattttagaatgtatattaagcataatagtatatacataatttatatctaaatacaaatwtattgagaatgcttgctcagatattttactgatagaagtaggaaatctaaaaatttcaattggtgtaaggcaccagtcaatgagatccttatataatggaaccctagtggctcaaaagataaacattttttccaaacagcctaacttactatcaggagattcccttgcttagaaaagactatagcttatctattgtaggttaagataatagggtacttacatttctccacaagctcagagtaagaaaaatagaaagaaaaggcagattttctatggttttagtttgacaatttattaggcacttatttagactgaaatatttggccacagaatgacaaagaagtaatactaatctaaa

SEQ ID NO: 769058 - DNA, 517 bp, Homo sapiens
gtatttgtcactaacactagctgaatagatttgaaacagtaagtgtaacaggctcaaatggacagtgcctattatcttttcccttttctctcctgcccttttatggcctataacttcattcaatctgtagctacatttatgttccttttacaacaaaaagggtcataatgctgtctctgataatactgaaattgcctaatttgttcgtcttctttcaacgccttggaaatggtcaccctctccagttatgcctgggtttgtccccatcaactttgaaaattaaggtcctgtttagtcactggcaatygcaccaccaaaacgccttcgggcattttgttcagccaacagggtgatagaggccgaagaggcccaggtctggctggctcaggaaacgcactcctgaagccgcaggcccacctactactactagaacaaccccgggtgtcattcgcgtgcctctcggtgcggtgggggcggacagttgcgccaatccccgaagcaagggagggagcagcgg

SEQ ID NO: 769059 - DNA, 599 bp, Homo sapiens
cacaacaggaatttatttcttcagagtctggaggctaggagtccaagatcaaggtttcagattggtttctcctgaggtcccctctttggcatgtagctgtcttctcctgtgtcttcccctggtctttcctctgtgtgtgtctgtgtctaatttctccttcttataaagacaccagtcatactggattagggctcayactaacgagctaattacctctgttgagaccttatctccaaatatagtcacattctgagatgctgagttttaggacttcaatatatgaattttcacaattcaacccatagcatcagggttaaaattcagattattgtccattaattgacaatttacttaatcagcttcaatgatgatatctaatctggtttgctatctttaattctttctcacttatatatttccctagacttttctataggatttacagtgaaggaaaagataaacacatggactcaaagtgctatcatcagaaatcttctgatattttctaatgcctgtgggaaaaacaaagggaagagagagcacaccatcagtgaccactaaagtgtactactctgccctaaccacgaaggagatgagct

SEQ ID NO: 769060 - DNA, 621 bp, Homo sapiens
aaaaaataaggtactatatgtaaatcttgaaaaagatatgtaagagcattatgtagaaaattagaaaatattattgaaagacattaaagacttaagcaaattcagaagtacagcatgtacatagatagaatcaattttgtaaaaataggaatttttcccaaattggtctgtagattgaaggcaatttcaaccaaataatagacttttttttctaatggaggttaattaactatttctattatatatatggaagattaaagagaaagagtatccaatatactactaagaagtgcaagatagaggactttgctattaaatatcaaggttaagaataaagttaacatgtttaaatcagtgttatattgatgcatgaatagggaggtcaatgcaatactggaagtaagcaccaaaagagcctcgtgagtacatggagacttaagcaatgagagaccaggatattcagataggttggaataaatagaccrtcccatgattggtatagttataattggtatctacacagaaataaataaaaacaaaaaaatgctactttaaacctacacaaaaaatcaattacagaggaattaggaacatacattatcaaaacaaaattttttgtat

SEQ ID NO: 769061 - DNA, 590 bp, Homo sapiens
aacacttaacatatattagctcatttaaccctctcaacaagtctacaaggtaggaactactgttacttacattttatgagatgtaagttaagggcagagctgggattccaagttagatctcttaacaacctgctttccctctagatcagaagttctcaaccccggttgcacattcgattcactagagagcctgaaaatatgaaaagtcattcacataaggtcatgcattgcagctctgtttgtaatagcaaaaaactggaaataacccggaaagagagctatggcatgttcccatgacagactactaaaaaggaatgaggaagatctccacatggcatagggaaggatttycagcagggagtgaaaaaagcaaagtgtgtggtatgctgctttcattcaagaaagggaaggatcatgtttatatgtgtgacataaatcacattacatatgtatgtatatatgtttctatgtgtatatgtatttatattttaatataagtaaacatacatgtatatatgcatatgtgcattccttaaagtatacgcatatacatgtatattcttttatgttttattataaggaaaatacat

SEQ ID NO: 769062 - DNA, 619 bp, Homo sapiens
atgaagaaatcaaacacagaaggtctcgtttttaagcagtgtgacatcctggtaaaacctgcaagaaaagctggtagtgaaatattgcccccggtaagtgaatgagttgtctttgctataaatggttgtcaaaagaaagaagttgcgaaggttaaagttgtaatgtacatcttgatcaggaggcaagaagaaacaaagagactggaggctggaccttgagagagctggctctagtctacactgggatcrtagccaaatgggaaaccaggtacttgctaattgtcctcgcccatgaaatggggctattcaataccctaccctactccatagggtagccacatgagtcaaatgacgcaaagtttgctgaagtatcttaaaaaattgtaggccagtcaccgtggctcatgcctatagccccagcactttgggaggctgaggcaggaggatcacttgaggccacaagttcgagaccagcttgggcagcaaagcaagaccctttcgctaaaaaaaaaattttaagttagctgtatgtggtgacttgcatctgtatttccagccactagagaggccaagccaggaggatcgcttgagcccaggagtttgaggctgcagtgagcta

SEQ ID NO: 769063 - DNA, 592 bp, Homo sapiens
cagctttcacttataaatgagaacatgcagtgtttggttttctgttcttgcattagtttgctgaggataatggttcccagcttcatacatgtcctgcaaaggacatgatctcagtccttttatggctgcaatccatgggcatatgaccacattttctttatccagtctatcattgatgggcacttaggtggattccatgtctttactattgtgaatagtgctgcagtgaacatatgcatgcatgtatcttcataatggaatgacttatattccttggggtataaacccagtaatgggattgctgggtcaaatggtatttctacctctaggtctttgaggaatcgcatgctgtytttcacaatagttgaactaatttacactcccaccagcagtgtaaaggtgttcacttttctccacaatctctctaacatctgttgtttttttgactttttagtaatagccattccgactggcatgagatggtgtctcattgtggtcttgatttgcatttctctaataatcagtgatattgagcttttttatgtatatttgttggctgcatgtatgtcttcttttgggaagagcctgttca

SEQ ID NO: 769064 - DNA, 592 bp, Homo sapiens
cagctttcacttataaatgagaacatgcagtgtttggttttctgttcttgcattagtttgctgaggataatggttcccagcttcatacatgtcctgcaaaggacatgatctcagtccttttatggctgcaatccatgggcatatgaccacattttctttatccagtctatcattgatgggcacttaggtggattccatgtctttactattgtgaatagtgctgcagtgaacatatgcatgcatgtatcttcataatggaatgacttatattccttggggtataaacccagtaatgggattgctgggtcaaatggtatttctacctctaggtctttgaggaatcgcatgctgttttycacaatagttgaactaatttacactcccaccagcagtgtaaaggtgttcacttttctccacaatctctctaacatctgttgtttttttgactttttagtaatagccattccgactggcatgagatggtgtctcattgtggtcttgatttgcatttctctaataatcagtgatattgagcttttttatgtatatttgttggctgcatgtatgtcttcttttgggaagagcctgttca

SEQ ID NO: 769065 - DNA, 599 bp, Homo sapiens
gatcttctcactgagtatcttactggagttctctggatttcctgaatttcaatgttggtctgtcttgccaggttggggaagttctcttggatgatatactgaagtatgttttccaacttggccccattctccccatctctttcaggtagcccagtcagtcataggttcagtctttttacataatcccatatttatttgaggttttgtaattccttttcatwcttttttctctattcttctctgcctgtcttattccagaaagatagtcttcaagctctgagattctttcctccacttggtctcttcagctgttaatagttgtggttgcattgtgaagttctcatattgtgtttttcagctccatcaggtcatttatgcttctccctaaactggctattctgattattggctcctgtaatgttttaccatgattcttagcttctttgcattgggctacaacatgctcctttagctcagtgaagtttattattacctacctcgttaagcctacttgtcaatcatccatttcagcggcctcagcccagttcagttcccttgctggagaggtgttgcggtcatttggagaagaggcagtctgg

SEQ ID NO: 769066 - DNA, 639 bp, Homo sapiens
atagttgtcggttgattctctaggtaaaaccagaccattttcaacgtgaattgcggttgtcaactaacttatccttgttagtgatactgagatgactgggataacgatctgatatctgcttttatgtccagagcagcagaagtccatggagtcatttactggtggtgcaaggaggtcaacactcgtatcattctaagccattcccaataaatttccatgctatatagactcagygtgcttgctaagcaaaccctgccttaagataatttccctatctttcccttgtcccatttcagctattttttcctaattccttcctaagtgaaaatcttggagtagcccacgaattagggtattacatccatcagtgtatttcttgtaggctaaggaataatattttggaagattatatttgtattgatttttatatataaatataaaacaagatcatgagcaaaagccaactgtagttctcttggtagaacggctttctatttatgtgtagttagaaaaggcatttgcaggaagcaaacctttaggggcattttggctctgtgctgggaatgtaagtttgctgtagctaaatcctcaatggtagtgacatttcatttagcacttcgaaaagttgtagaaagataa

SEQ ID NO: 769067 - DNA, 571 bp, Homo sapiens
actttactggaatttttctcccacagtcgtatccacataatcagaaaacttagtcagttgatattgtcaaataaacaagtagaatctgatcatttctcatcactcttattgctattaccttgctgaaatcaccattatcttttgcctgcaatattgaaataggtacttgctgktttttctgcctctgccttagtactcatgccacagtgatatagttaacatgtaaagcagattatgtcatttcactgctcaaaacccttcaatagctcccaatcctgtgcaaaatgtgatgcttaattttatgtgtcaagatagacaaatgggattacattagactaaaaagctgcacagcaaaggaaatagcgacaagtgaagagacaacctgtggattgggaagcatatatttgtaaaatgtacatctgataaggggttaacatcctatatctatatctatacatttatttttattttaagttccaggatacatgtgcaggatgtgcagatttgctacataggtaaacatgtgccatgatgtcccatgaaggtttgcagcacctatcaactcatcacc

SEQ ID NO: 769068 - DNA, 544 bp, Homo sapiens
ctcatcaaagggataagacaaaatataatcatcacagagagtataaatgtctgagtgcattgtaacaaggtagtttagcaaagagaagagatggtatgggtttgaatattctgagacctgaggagaagttagaaaataagtagaattaagtttgtgaagaaatgtcactttgataaagggcaaagcaatagcaaagacgcagaggcaggaatcagaataacgtatttcaatatagccagttcagcttggctgcagtgtagttttcactgcagaagagtgggagagaataagtggaaaagctggtgaatgccagaagcggaaatgtgttgctcaacaagaaccgygaggaccttgttgttaaaacattagccaatgggtggaatgggaaaagtactaagctaggattcatgaggacagctagcatttgccattaaccagttgtgggtctttgggcaaaactgtctgactctgagtctgtgtcttcatctgcagtaaaagaaacattgaattgctgagtcttcttcccacttaaacaccctaaggt

SEQ ID NO: 769069 - DNA, 644 bp, Homo sapiens
tgatggtttcataaagggcagttcccctacacacgttctcttgcctgctgccatgtaagatatgcctttgctcctcctttgccttccaccatgattgtgaggcctcccagccacgtgaaactgtcagtccactaaatctctttttctttataaattacccagcctcaggtatctcttgtagcagtgtgagaacagactaatgcacccttatagtagtcaactgtcacagcctcacttggtctggatccattctctccccttgtttctacctgagccctgtactgaggtrtgggtaatgttctctactgggcaccattaacaagcagaaatgagatttgattagcaaccactgccttattcaagaatttctccccaaaggtaaagctggccgcagacccaccactacctcctgcagttaatgtaaccagtggtactggtttactttcatattaatgttcatttaccagaagatgaggaagttatatacactccatagtacactgtgtttcttatcatatttttaaaagcaacactaatacatttttgttactagtttagcctaaataataaatgtgtttaaaactcaaaatgactatggccacttcttatatcagaggggaaagttaaaattcctgtcattgaga

SEQ ID NO: 769070 - DNA, 603 bp, Homo sapiens
taggcatgtttgtcactactactgggatgtcactgcatcaaggccccctcggcatacagagctgtgcaatatgtgcatatatattagctgacataacatatctatatttatttctgttatctacctgtatatatgtattaaactaaacatgagtccccactgatacctctgactcagtcaacacagggttcactctagccttcctctgttgcttatttttaacttcttcctctgatagtaagaaacctggtgccaagggctgaactgtgtcccccacaaaattcatatgttgaaactctaatctgcaggacctcagactataaccatatttgagatagggtctttaaagaggtaattaaattaaaatacggtcactaggaaggttcccaatccaatatgactggtgttctaaaaagaggatatcaatacagatacatatggggagamgatacatgaagacacaacgagaagatggccatctataagccaaggagagaggcctggaacatagccttccttcgtggttctcagaaggaaccaaccctgccaaacaccttgatctcagacttgtcacaattataattaaataatcaatattgatac

SEQ ID NO: 769071 - DNA, 633 bp, Homo sapiens
gcatttgcctggattcataaaattggaaataggaaaataagtaactaagtaatcatataatagctaactatatttgtgaagccaagcagaaagtctgaactttaaacaactggagactgaaaaatcaaaagctctgaaactacatatgcactgcaaatttaagaagaaaccagtttgacagcaaaccaatatgaaacagagtttgatgtggaaagagatgaggcccgaggagaaaaataaaaccatgagaaactctaaactaaggaaagatggtccctagcaaggaaaggctggtagtaagaaccagaactgtggcttttcctcgtgatcttgcctggctcactcattcacgtatggacgtcctctcacatctccagaaggcaatccctttagccytatgatacccagccctctccttggcctctcaaagaacacctggtggatctggctgcagaactcctgccaaatggtagaaatctgataggctgtaacttcaattaagtcgatcaggtatttatttattttcataacattgcctgagccaaatccattttcgtttacatatttttcttccaactagactatgagcttgagggggaaatcactttgtcttattcatccagatatcctcca

SEQ ID NO: 769072 - DNA, 593 bp, Homo sapiens
tgtctgcttctgacctaataccacccctcctcagcccacacttatgacttcaggaaagtggtctatgagtcatggactacaatggaaaagttttgaacagcatctagagaaggctctgtgtgatattctggcaccatccgaaagatttgctgaaatgtttagcagccatttaggcatgcttctgagggactatgaaaaagagaaacctccctgtgagtagaaacttgagagctcttttgtccaatttgcctgtaattatcaatggcttgaagttaaatctatacaggttcacaggaatgtgctaacggtttggtcagatattcagatatttggaaggaatgagattgaaggattggagataaggtttggagaaatgtatataactctccaaayggacccaggttgtgaggatacctatcgcctacaggagtactcaccgaaagacctaagaaacaaggatattccccaaccctgtgtgacccacgtattgtcctgccttctccttcttgcagttatttcctaacgctagatggttgcctctcacatgtgtactgatcattacttaaagactcaaggggatccctctagagatc

SEQ ID NO: 769073 - DNA, 598 bp, Homo sapiens
caaagttttcaaatcagcatttataaagtacttcactctttccagtcattaatacataaatgagcagataagttcaggatatttcagatccaacaggggcatgaattgtgtgtatacctgatttaaaaaaaaacaacaaaaacaatggggacagttttgaaagtgccatccttcctaagataattgttgtagaagaaaaaagaaagtgccatccactagccaaagtgaagcatgtgctagtttttctatgttagatttagtggtaaatgtaaaaaaaaaatctatttacttcagtcaaatgcctaatcaagaatagttcaccatttaatatgctttgtaacactgaaggaacctcaaaatcacccagtgtctttggtycagaaggtcactgagcttgccaaattctttttattcactgaataagagtgtttttgaaagcaagcattacactgtgtgtgaagaggcagaagtcatacatgattgaataatttggcagaagagatttcttgtatttttcacctctatgatctttgaaacaattgctgcgcttgtatttggagagtggttgtggcctacaaattttgttaagtacatgctg

SEQ ID NO: 769074 - DNA, 543 bp, Homo sapiens
aaaggtgaccactggttgtggtagccttgacagatggcaaagcctggtatggtacagtagtagtgcagaacagagatacacataggaagtagaataacacagggtttagtgacagactctgtgtgggagataagaggacatgataagtcgtaactgatgatgagcatggatcctcaaggaaagacatagtgggagaatgaaatgttggggttttctggagcttggaaccagttcttactytggttctgtattctaacttttctagactaaaaactccagaagggtagaaatcttgcagtctaatttctccctactcattttgtatgtgaaagaacccacagaacagttgagtttgaaggtcagctctgtaatttattaactttgatacagtatgaggaagatacttaatgtctattcagggcccactacattttgggctctaggaagacaacagtgatcgagaatgaaaaatctttacctttacgaaactctagttcggaagagagacaataaggaaatacagaaacaccggataattacaaa

SEQ ID NO: 769075 - DNA, 629 bp, Homo sapiens
aaattcaccctctctttttgttcaactttcaaattagccttggtagatggagggaaacaaacttttaaagcaactcagcactgaatgaagagtttaatagaccttatttcattgttaatgcaggagtttttttgttttgggctttttgttgttgttttttgtttttgtttgtttgtttgtttttgttttttggtggagcctgagaaaataaaagtcaagagcagcccaaaaagaaagaattgaaaactctgctctttcaaggagctctggctgtagtccctcagggtctgcctctgactggcggcatgctgcctaatgctggttggtagaactggtgcaattttgttgatccactacaatttcctcctacactcrgaactgatctgcagactgaccttagacaatttgtcttctttcagggagaaatgtcacccaaaaggaagctattaagtcaagaaggtaattctcttagaacagtccactgtataaacagaacttgacctcaagtaatttattgctggtccctaacaaagagacttaagagttaggtctgatatagttgagatctgaatctgtcaatacaaagggcaagccagaatcttgcaagatttcttttgagtggccatgtt

SEQ ID NO: 769076 - DNA, 615 bp, Homo sapiens
aaaaaaatataaattatcctcaaatgaaaaacattacctctccaggaatcaaattgacacaaattaagacaatacatatttcattggaaaaaaattactgtttttgaaaataacatactcagttttggcaaggatgtagtgaaaatgtgaatttttatttccttgtgaagagagcgtaagtttgcattaaaaaatttactctttgttttccaagaaacaaacaattcctcctctaggaatcttcggtaattcctttttgtctcattttactttctctttttcttcttaaagatagaattaaattatactttgaattaaaagttttcttagtatcatctcatctgccttagcttgcaytgccataccaaataccatagactagatgcttaaacaacagaaatttattttctcacagttctgcagtctggaaagttcaatattaaggagccagtgtggatgagttctggtgaggactctttctttctggcttccagttggccaccatctctttgtgtcctcacatgacacagagagagagagaaagagagcaggatcttcctcttcttataaggccacaatcctatctgattaaggcaccagccttattacctgctg

SEQ ID NO: 769077 - DNA, 581 bp, Homo sapiens
ccttggagagaacattttgtggatccagaacttagcatgtgtttatcttttgggccaaaaattatccagagatgaaactcagtttctaattatgcaaataagtaccaaatatactccttttaaaagaaagcaattatcatatagtgtaaacagtctctgaatttcaatttcagttctgccaattaaccaccacacgaccttgcacaagttgcagatgaaacctggacactgagtgatctgaactgaaacaaatacaagcagaaaaaccaaaaccaaaaactattctttttcactatgtctcttcaaatgtactcttgacctgtttcttcctcactgttacaatgaaatcttggcaggtttcaaaatctttttattatgctcaggtaatagaagtgctccagtcacttttatgtgtacccayagtcttattacagggctaagaatgtaataatccctgctccttattcttaccactgccaccacctctcaccttgatattgctttaagcctggaaatacagaatgagggaaaagcacatttcacttctctcttttctccgtctatttttcctcatcctcctg

SEQ ID NO: 769078 - DNA, 584 bp, Homo sapiens
caaaatgggtgggaaatggagtggaattcttttctgaccatcctcctgccaatctgtgatcagagcccaaggtccccagtctgcaaaggccattcctgctagtagccaccaccacttttgttatttctggagccagggtacttgcactgtcatgatcacatacaaaacttccattataccccattttcagtagctcaaaatcctttgaaaaataatgctcarggccaagtattccagttagcttcagggtaaaattatattttggaatatttaaaagaaataagtttccccaggtgatctatattgggggtgatgatgggtctcacacacacacacatacacacacacacacagacacacacagacacacacatacacatttttctccattgaaaaatagtttgaaactgcttacaatgttcaggatgtgtgactttggactggcatatggatgtgtgtgcaactgagcaaagactcagggacatcaggagaagcatgacacatttcatcattcagtggttttgtcttttaaaggaaaatagcttaaaaatggtaaagtgataatgttaagaatctgttcttaa

SEQ ID NO: 769079 - DNA, 628 bp, Homo sapiens
atttgcacatttaatttgcatacacattcttctgtatgccaaatatttataagcacagattttcacacactggcaggtttcataagcacccaataataggcttgtctgactattgcatgtcggtggtttgggaccccagtgtggagacctttcttactttctttaaaagaagaagtaaagaaaccctccactaacactttggctcattcggtcctgctaggtgccaggcactttcataagccctggagatataagatgaataagacgaggttcctctccacaaggaattcayggtctagtggaggaactacgccattaagctttaccacaatcaggtttaaaaaaaagcaaaaacataaaaacacatgaaactttcaaaattcccaggatgaggagtaggtgaaggacaataacatgttgtctcccttaggcgagttttctggatgaagaagaatatacctttcctttccactggtaccttccaggctaatatttccaaaatacctcctatagaatactaatcctttgaaacaattttcaaaaaaggtaggggaggggtcctcatggtcaaataattttataaaatctatagtctatatgccctacttgtaacttcgtagttcatatt

SEQ ID NO: 769080 - DNA, 620 bp, Homo sapiens
gaaaacaaactgttccccaagcagtgggtctcaaccctggctgcacattagaaccacttgggggagcttgtaaaagtatcaatgcttgggcccaccccagatcaatttaattagactccttgggaatggaacctaggcgtccacagttctgtaagcttcccaggtgatctgaagtctaagctgagaatcactggtctaagaggagtgaaaagcacsaaagttaggacccaggataccaggcatgggaaaaagaaacagccaagactttgctaggatttaagccctatgagggtgcagacttcgtatggttctccctgtatccctggagcctaggagagtgccagctacaaggtaagtgctcaataaacattgggtagatgaacaaatgaacaagataccatagattagaagttgtcaatttcaacagtgaaacccagcttgtcatcttgttttatagataaagttttattggaacacagccatctctgttcatttgtgctttgcctatggctgctttcgtgctgcaatggcagagttgagtagatgtgacagagactgcatggcctacaaagctgaaaacatttaccatctagcatttcacaggaaaggtttgctggctc

SEQ ID NO: 769081 - DNA, 624 bp, Homo sapiens
atgtcattgccatacttacagtcctcacagcttttgataaggaaaaatgttctacccagtttccagtggaactatgttgtgatcctgtgacactgtcatctgcagccatggccgaaggaatctgagtcaagggcagcaaaacaaaggctgcctgcttatggtataggaggtcaatctaggggctagaagcattgcccaaatagaaatgagctggggccatcagactatcactcttggcggtgtgaactgggaaaatctggacaaatcaggctattaccaggaacagaagctgaaaggcattcaggtagagagaatgagagtctggaaggatcactatggacaaggagatgwcagttaggaatcagcagaggctatactagacaaaggtaaacaaggagaagggtcctaagagatctggaagtctggaggaaattcccatttccacatgccctcatattcttacaattaccttccttcttgttggtttttattcattatatcagaagcatctaattaaatcagggccacattttataagtagacttgatctattttgtgtataccaaatttgttgacctgagtaaagattgagaaattccttttgagttcatattgaatgtccaa

SEQ ID NO: 769082 - DNA, 544 bp, Homo sapiens
ttagttctctacctgtattttcttgcatcttactgaacttcattaagatgattattttgaattttttgtaggcaattagtatctcttcatttcttctttcgagttgacaactggggctttataaggtccatctggtgatgtcatgtttgcttgattcttagctatccacatagtcctgcactggtgttcatgaatttgaagaagcaaacccctcttttagtcattacagactggtttcagcaaggtgaagtattttcctgttaggtctctggaataacgggattgcctctggaattgcagttgaatggkgttggatccacatcatatggttgatgctttgtctgaagtgaaggccacatttgtttggcctatgtcaggggaactggtgggtatggggcctatctgggacctaggaggacttgactatctccaggattttggtctgtgaggctgtgatgagtgtctgcttcagagttcacaggcagtaggcctgttaccaagtgcaacgacagatgtagcttcctcagggtctctgagggtgtcc

SEQ ID NO: 769083 - DNA, 544 bp, Homo sapiens
ttagttctctacctgtattttcttgcatcttactgaacttcattaagatgattattttgaattttttgtaggcaattagtatctcttcatttcttctttcgagttgacaactggggctttataaggtccatctggtgatgtcatgtttgcttgattcttagctatccacatagtcctgcactggtgttcatgaatttgaagaagcaaacccctcttttagtcattacagactggtttcagcaaggtgaagtattttcctgttaggtctctggaataacgggattgcctctggaattgcagttgaatggggttggatccamatcatatggttgatgctttgtctgaagtgaaggccacatttgtttggcctatgtcaggggaactggtgggtatggggcctatctgggacctaggaggacttgactatctccaggattttggtctgtgaggctgtgatgagtgtctgcttcagagttcacaggcagtaggcctgttaccaagtgcaacgacagatgtagcttcctcagggtctctgagggtgtcc

SEQ ID NO: 769084 - DNA, 539 bp, Homo sapiens
aaatctactgtcactcatggacaggcactggactgcaggctttccatgcatcatcttgtttaatcattgccataaaactttaaaatgtgttacatatacttcacagtaaaagaaagagaagttcagggaggctgagagaaaaagttgtggcatcaggattgatgccctgttatattggaatgcagagcccatacacttcactttcctcaagcctcagggcctgggagaggagcagaagttggaggtgtttgatcagaagctgaagcaggactggatcttcagtgaggtccatcagcagactcagctgtgaagagcgctgcacrgagaaaagagcaagtacacagctagcaggtggtcatctattcagtgctgtgtccctccaaaccactctttgcagactccaggccaagctcagacatgacacagcacatcagtgctgccctcaaaaagcttataacctcgtctatttccccttgaagtctaaacaatcttgttgtagcttttcatttgttgtcttcaataatttcttacattgtaca

SEQ ID NO: 769085 - DNA, 535 bp, Homo sapiens
atatattttcttaatatttaacaaaataaattagaattacacaagtcaaaagctcccaataatatattttgaatatattttgaatttattttgcctctgtcatattgtttatgaagaattgttatttttcacactttctacttctacaagtcaaatttattggtgacttcctacttctacaggttcaatttataacctattggaatgataaattacaaaacgkcatggtttatagtgttagaatttattctctatttctatagattgattgatggaacattacaggatggggcgttatcaggaatttttgatgtactggttggttggctctttttttttttttttgacggagtctcgctttgttgcccaggctggagtgcagtggcgcgatctcggctcacttcaagctccgcctcccaggtacactccattctcctgcctcagcctcccgagtagctgggactacagtcgcccgccacccacgcctggctaatttttgtgtgtgtgtgtttatttttagtagatatggggtttc

SEQ ID NO: 769086 - DNA, 535 bp, Homo sapiens
atatattttcttaatatttaacaaaataaattagaattacacaagtcaaaagctcccaataatatattttgaatatattttgaatttattttgcctctgtcatattgtttatgaagaattgttatttttcacactttctacttctacaagtcaaatttattggtgacttcctacttctacaggttcaatttataacctattggaatgataaattacaaaacgtcatggtttatagtgttagaatttattctctatttctatagattgattgatggaacattacaggatggggcgttatcaggaatttttkatgtactggttggttggctctttttttttttttttgacggagtctcgctttgttgcccaggctggagtgcagtggcgcgatctcggctcacttcaagctccgcctcccaggtacactccattctcctgcctcagcctcccgagtagctgggactacagtcgcccgccacccacgcctggctaatttttgtgtgtgtgtgtttatttttagtagatatggggtttc

SEQ ID NO: 769087 - DNA, 628 bp, Homo sapiens
ttgttttacaaactgaaggtttgtgacaatgctgcattgggcaagtggcatttttccaataacatattgtcacttcatctctccatgtcacattttaataattctcataacatgtcaaaattttcattattatttctgttatggtgaygtataaacaatgaaatttgatgttactcttctaattgcttttgggtgtcacaaactgtgcccatgcaagatggtgaacttaatcagtaaatgttgtgtttgttctgacttctctactaatcaaccattcccttgtctttcatttcatccttgaacatctctatccctgagacacaatattgaaagtgtgaaaattaataaatatacaatggcctctaagtgttcaagtgaaaggaagagtcacatgtctctcactttcaatcaaaagctagaaattattaacctgagtgagaaaagcatgttgagagccaagatagatctcttatgccaaattagccaagttgtgaatgcaaaggaaaaattattgaacgaaatcacaaatgctactccagtgaacacacaaattataagaaagcaaaacaatcttttttgctgatacggagaaagttttagtggtttggatataagatcaaaccaacca

SEQ ID NO: 769088 - DNA, 622 bp, Homo sapiens
tattatgttaaataataattaagatgtgttttactccactgtattttgctttagcattacttttcttggagactttagtagaataatagaaattttttcaatatgtggacaagtcctatcagctgttaaagagcagttttgatagttgctgtttttaagtacaaaatttgggtatattcttctgggaacgttttcatatacacatataataattattattttttattggacttcccratgggaatttaacttagataactacaacatcttatggaattaaataaatatatgttatgaggtttttatagacattactactgtttattttgacctagtatagtcaattatgccacagtacatttaatggtaatgatcatatcagtaggatattactttggttaataaagttacatgaaattatgctgaattgagattgaatatgatgtaaacttttctcctccaacactagagcttaaaagaaactctagtttaacagtttttaaataagtacattatttattattcttaggtttaaggtaagaatggttaattcagcataaaacgtttattttaggtgagcaattttaatccaaagaagcaggaattttttattgttaccata

SEQ ID NO: 769089 - DNA, 624 bp, Homo sapiens
atataatcaatatgattgtatttatatggttttatacatttctactaaattttccattttgatcaaagttttggagaggtttctaactttaaatagaaaagtaaaatttaagttagaaattcagagaacatagataatatattttgtgtatcatccctacatagtgaaaaagacataacacaaaatagttaacaaatttttggtatattgcatcacaaatcagaatggcttctgagactaactagaccttaatattataaatggtaaataatattagtacaaataactaacatttaaagattcttgctacrtgttgatttctaaaatttattgtgtaatttaagcacaatagtaaaattgtgattatatattttctttcacctaaaaattgagcatcacatacatttgatatttacacatcaaacatgcaagagtaagtgctatgtacaaatgagcattgtggcataattaggagtttaagatttaaaaaaatgtattggctgttctgaaccatattacttgtctctaatgattttttaaatggagagtacattacgattttacataattataaaaatgaatatatactatttcctaataaatttaactagttcagttccatca

SEQ ID NO: 769090 - DNA, 521 bp, Homo sapiens
taacttttgagattatgtaatgaaggactcaatttttagaggaacttcaagccaggaaatgttttattactttaagttatagaagcttagtgataaaaggaccaattgaaggtcaccttttccaaatctccaacttgtacttaaattccttctactacacctatttaatatgatcgatttcctaacattaaaggccagtaccaacactaaatatagtacttcccaatctattttatcccaccaataccagatgttctcaagttacacttacaaagtttttgtaacataaaacataaagacaaatgcctgtttcatcaaaaaagttgatattggaaacaaaatcaatstatgatttatatgcgtgaatatatggttaatttttatagtaggcattttaatttaaatcatttcaaataatgactttagctgattaacatgaaaattagatgaggtttaagtaagagtcaatcaatatctttttttgtaagtttttaaatgcaattttgaatttatattgatct

SEQ ID NO: 769091 - DNA, 624 bp, Homo sapiens
ctatgttccacagtctcttgtgtcctatgtttctatgaaacaatacttatttttagccaagataatattttgcatcaatattttatttcattcaatgaatactacatactgagtttctaccttttgctagctattgttacatgatagaatgcaatggtgagcatgggagataacgtgaacaaagggataaacaattaacaaaaataacagaatatgtttgtactatgttgctgtgttatattaaatatggtcacatattctttgtgactcttgactaagaggtagagtaggtgtgacsctactaagagatggagtctatttcccacccacttgggtaaggatgtcctaatgacttgctgtgaccaacagagtgcagcaaaagggatgatgtgtgacttctggagcttcactttcaatattctttgtagcttccaccttggatctcttgggatgctttcctcaaactgccactgatatggtttcactgtgtccccacccaaatctcatcttgaattggaataatcctcatatgtcaagggcaatgccagatggagataattgaatcatgggggcagttttccccctactgttcttgttcttgtggtagtgaataagtctcatgag

SEQ ID NO: 769092 - DNA, 624 bp, Homo sapiens
ctatgttccacagtctcttgtgtcctatgtttctatgaaacaatacttatttttagccaagataatattttgcatcaatattttatttcattcaatgaatactacatactgagtttctaccttttgctagctattgttacatgatagaatgcaatggtgagcatgggagataacgtgaacaaagggataaacaattaacaaaaataacagaatatgtttgtactatgttgctgtgttatattaaatatggtcacatattctttgtgactcttgactaagaggtagagtaggtgtgaccctactaagagatggagtctatttcccacccacttgggtaaggatgtcctaatgacttgctrtgaccaacagagtgcagcaaaagggatgatgtgtgacttctggagcttcactttcaatattctttgtagcttccaccttggatctcttgggatgctttcctcaaactgccactgatatggtttcactgtgtccccacccaaatctcatcttgaattggaataatcctcatatgtcaagggcaatgccagatggagataattgaatcatgggggcagttttccccctactgttcttgttcttgtggtagtgaataagtctcatgag

SEQ ID NO: 769093 - DNA, 624 bp, Homo sapiens
ctatgttccacagtctcttgtgtcctatgtttctatgaaacaatacttatttttagccaagataatattttgcatcaatattttatttcattcaatgaatactacatactgagtttctaccttttgctagctattgttacatgatagaatgcaatggtgagcatgggagataacgtgaacaaagggataaacaattaacaaaaataacagaatatgtttgtactatgttgctgtgttatattaaatatggtcacatattctttgtgactcttgactaagaggtagagtaggtgtgaccctactaagagatggagtctatttcccacccacttgggtaaggatgtcctaatgacttgctgtgaccaacagagtgcagcaaaagggatgatgtgtgacttctggagcttcactttcaatattctttgtagcttccaccttggatctcttgggatgctttcytcaaactgccactgatatggtttcactgtgtccccacccaaatctcatcttgaattggaataatcctcatatgtcaagggcaatgccagatggagataattgaatcatgggggcagttttccccctactgttcttgttcttgtggtagtgaataagtctcatgag

SEQ ID NO: 769094 - DNA, 606 bp, Homo sapiens
ccacagaagtgaacttcataaaaagtgggatggtccagatcccttcaatatttgtggttgccagcgaggtcaggctcctctgagggccatgactacctgcatcccacggtagacgattatcctagggagctgctgaggcttgcctccaggagtcttgcccaggagtcttatcttcttcctgtgggtctttgctatgcagtggtacatgtccaggttcttagtttcaagtgacagaaacccagcttcaagaaagtagccccaaagggaaatttattagaagactcatgtgagtgttgaggagggatagcctggtctgggggagargaggaactgggttctgtctctctctcttacctctatctttatctttcttatcctctacctctcttgttccattttgctcatttatgtgttcacaatatcccctctgactaacttcttctattgtcaagaaatgtccactggcattttctttgcattatactccacagtttaacctccaaagagggccagcccctcttctcttagttctgggtccaaaactctcaaggaatgcctttgtctgtctttgcaaaggtctctggttcatgatttgtctacaactga

SEQ ID NO: 769095 - DNA, 606 bp, Homo sapiens
ccacagaagtgaacttcataaaaagtgggatggtccagatcccttcaatatttgtggttgccagcgaggtcaggctcctctgagggccatgactacctgcatcccacggtagacgattatcctagggagctgctgaggcttgcctccaggagtcttgcccaggagtcttatcttcttcctgtgggtctttgctatgcagtggtacatgtccaggttcttagtttcaagtgacagaaacccagcttcaagaaagtagccccaaagggaaatttattagaagactcatgtgagtgttgaggagggatagcctggtctgggggagaagaggaactgggttctgtctctcyctcttacctctatctttatctttcttatcctctacctctcttgttccattttgctcatttatgtgttcacaatatcccctctgactaacttcttctattgtcaagaaatgtccactggcattttctttgcattatactccacagtttaacctccaaagagggccagcccctcttctcttagttctgggtccaaaactctcaaggaatgcctttgtctgtctttgcaaaggtctctggttcatgatttgtctacaactga

SEQ ID NO: 769096 - DNA, 440 bp, Homo sapiens
attacagtttctctttattctttctcaggagaatgagggagggggcaccagcccttcctgcacagttacgggagagggctgagagggagcgggcccggcgcccacgccccccctacatctaaggcgtgagcggtcttcctcctccgcagccccaggacctgtgcgcggtcaagtccagcttcccacagcagggggtctgacttgggctctcccacctctaccaactccctcagytcccctggcccagcgtagacaattcgctttgaattctgcctctccgaacccccagccccaactctgctgccaggaggaatggggttggggagggaagccggttcccgggtcagtctcccgctgccaccgccgtccagccagcgcccgccgcgtgggagccgcgaggccaggctccgcagacggcgggctcccggtctcgctgctcc

SEQ ID NO: 769097 - DNA, 494 bp, Homo sapiens
ctttctcctgatccctgcttgctcagcgcctattagaggggcttcaccacagtccccctcagctcctgcacagcagtcaccccacttctcttatttcattccgtgactcttttcatctctgacttttatatttcttctggaatttatgcatgtatttttgcatctgtttatcatttctattccccgcctggaatatgagctcaatgaaaacagagctccttgcctgggtgttcacggctggactccaatgccaggtcagtgtctgatacaccagaagctcccataagtatctgctgaatgtaaaaataggtgaggacccccaggcgtgtccctccttgacctggtggactcatgggratcatctgcctcacaggggtcttgggtgtggcatccctggaaccgaaacgatggtcagctgataacgtcttcctttgtctggataagcagacatggtctgcactagtgagcaaaagactcagttaactaccacatta

SEQ ID NO: 769098 - DNA, 528 bp, Homo sapiens
gggggaatcctggatcctcttctgcagggaccccagtcctgagaggcccagcctggggcttagtccactattctgagcaaaggcctgtggagatcagggaacaatggagttttcacccaggtctgacttagtgggcatgataggtccagaatctatgtattgtcatttcttaaagttcgaaagcatcattgaattgacacactcagcaaatggaagcagccacatattctgcactcctggacccggggagtgtgggccattatggtggcaaaggtgcaggggagtcctggacctgctcctccctgtgaaaacgktgaaggaagcaatgccaagctcctggagaaatggaaaggtgcagagagggcatcaggcacttagaggtgttggtgacagctcgaggttcagctggccggggcgtgcacatgagacatggagtcacagctcagggcgtctgtgtccatcaggttcacgtgtgattcatggatcaggcacagggaaaaggctgaaggaggctcacagagaattcca

SEQ ID NO: 769099 - DNA, 547 bp, Homo sapiens
gacgacggcacccagcatgctcaggagcaggggcagctccaggaccaggagcaggacgtaggggctgctgaacagggagctgtggggacacggtgatggcagtgagtcatctccccaggggaagcccaggtgccctccaccttctgcctgtctgtgaacccaggtcctgtggccacacaaatccctgtgaggacaaactctgtatatgacaactcctctaaagagatcattagaccctgaccttcagcctgagrgtccctggagtctcaggactgcctataaggaagcacgtggccgtgaaaatggtgcatgaggacagggagggatccaggtgagaaccacacccacaagatctctacatcccggggttattcactggcgcatggaatcagtcatgtagtttgatgcctgtatggccatcatttcccgagaaggtgaggactattcatgttattcacaagtaactggtacctgccctctggttgcaaatatcagcctgtaaaattcatggttgttgaaggaatggaaggaatgaatgaatggccca

SEQ ID NO: 769100 - DNA, 613 bp, Homo sapiens
ccaggtcacaggtagataagagacaaacagttgcatttttttgagtttctgattagcctttccaagggaagcaatcagatatacatttatctcagagagtaaagggatgacattgagttacatctgtcctttgtccgtaaggaatttctttgtgaacgwattgtgagggaggtatgtagcttttttttttaaatcttagtagctatcttttttagcaatagaacgggaggcaggtttgctctaaacagttcccagcttggctgttccctttggcttggtggttgtggggtctggagatttattttccttccacaaacttcagggctggttggcagaagtattgaacccatacatttatacgtatccttttattatctgcccccttgcagacagtgtcttgctttgctgcccaggctggagttcagtggcacaatcatagctccctgcagcctcaaattcctggactcaagcaatcttcccacctcagcctcccaaaccgttgggattataggcgtgagccactgcatccagccacaatcttctttttagagctcaattaattatactttattgctttttgtgtaccaagaaattgatctgtgaacttccctca

SEQ ID NO: 769101 - DNA, 613 bp, Homo sapiens
atgggagtgagcttaaaatctcttctatcattccgaggcactcttagcctctattttaaaataaaataagtcaatgggcatccgtcagccgggtacatacacttagtgttggctgccatactgaagactcgaatgtgaggcttgctgctgagaacacggagaaccccccaacacccctgggtcattgggaatgttggccatgttttaaatcagcttcttttcacgggaagacctcgccattgtgcaaggctgggaaaagttctaaggcaactaacaatttctggccagagcacaccctggcatgattcaaaggcccctggactggacccagcctctggcggcccattctgggtgttggcaaagaatcctcaactatcttgtcacaaaactctccttccttctctatctgcggtctcttacactttctttgtgtgaaatgtgtagcgagttttacagcctaggaaagtaatcctgtyaggcaaaatcaggaagatgcccttgcaatcttctaggaacagagttctcccctttctcccaccgtgaggttactcactaccacgtctctagtgagcacatagtatttctaagccaacagtgccacctagtagaaata

SEQ ID NO: 769102 - DNA, 623 bp, Homo sapiens
agaacaaaattcgactgggcgcggtggctcacgcctgtaatcccagcactttgggaggccgaggcaggcggatcacgagatcaagagatcaagaccatcctggccaacatggtgaaaccctgtctctactaaaaatgcaaaaattagctgggcctgttagtgtgtgactgtagtcccagctactcaggaggctgaggcaggagaatcgcttgaacccgggaggtggaggttgcagtgagccaagatcctgccactgcacttcagcctggcgacagarcaagacaccgtttaaaaaaaaaaaaagaacaaaattctatcatttgtggcaacatggatgagcttggaggacgttatgtgaatgaaataagtcaggcccagaaagagaaatactgcatgttctcaagttgatctcaagacatagagaatagaacagtggttattagagggggggcagtgtattgggggttaggggatagccagagatttgttaacagatacaaaagtacagctgcataggcagaataaatcctcgtgtgctatagcactaggggatgtctataattgtcaacaacttattgtatattttcaaatagctagaagagtagattttgaatgtttccaac

SEQ ID NO: 769103 - DNA, 623 bp, Homo sapiens
agaacaaaattcgactgggcgcggtggctcacgcctgtaatcccagcactttgggaggccgaggcaggcggatcacgagatcaagagatcaagaccatcctggccaacatggtgaaaccctgtctctactaaaaatgcaaaaattagctgggcctgttagtgtgtgactgtagtcccagctactcaggaggctgaggcaggagaatcgcttgaacccgggaggtggaggttgcagtgagccaagatcctgccactgcacttcagcctggcgacagagcaagacaccgtttaaaaaaaaaaaaagaacaaaattctatcatttgtggcaacatggatgagcttggaggacgttatgtgaatgaaataagtcaggcccagaaagagaaatactgcatgttctcaagttgatctcaagacatagagaatagaacagtggttattagaggkggggcagtgtattgggggttaggggatagccagagatttgttaacagatacaaaagtacagctgcataggcagaataaatcctcgtgtgctatagcactaggggatgtctataattgtcaacaacttattgtatattttcaaatagctagaagagtagattttgaatgtttccaac

SEQ ID NO: 769104 - DNA, 623 bp, Homo sapiens
ccaccaactctgatgtcagggtgaatcacagaagagggcaaaaatttgctactcctaactacacagaatttcttcctcagccctactctgctatgtgagtttccttaaaggtcatgggaaatgaggagagagagagagagagagagagagagagagagagagagagagagagagasgccttattttctaagccagcaactcaggtgcttcctgctctgtctgggttccttgctttccagtggtggtgaccaaactgaaagctatggtgggcttgcttctgggcctcaaccaggttctgtactcctccaaccaggccttggctcttgccacacccagtctcctagagctgctgaaaagtgagctgagtttctttcttacttttactcctgatagttgggagggaatgcatgaaattgtttccatccaatatctctgcttataaagattcttttttgcaggattattgcaagtctgaaggaagaactccaagggagatatttggagccaaatatcataatttcttctgagcagaaaagtgaagtatcctgtgagatgagttctcactattaaaaggcggttataaaccttgttctttaatactttaccatagaaacagcccttac

SEQ ID NO: 769105 - DNA, 602 bp, Homo sapiens
ggaggtgccagcctcttttaaacaaccggagagagcaacctcatcaccaaggagatggcactgagccattcatggctgatccacccccatgacccaaacacctcccactaggccctgcctccaacgttgaggatcacattttaacatgagatttggaagggacaaatatccaaactatattatccactcacaagtgtttaccaaaaggtttcagaggcagcaccttttgttgactgaygatttccctatatagacatttcagtacgaagacatcctgaatacctccttaaaagaattacctagattctccaccttctctctttcttcttcctgagtgcttcaatctctctttcttctggggccctcctgctgcaatgtcctgcaaaccagcttcctggaaagtctctgacatgttcgtctgcattaaggtgtaatggacttactgatgtatcaagcagggacagggtcaccttttgtgctagttaattgtatgtatcaatttgactggattaagggatgtctaatagttggtaacacactttttctgggtgtgtctgtgcaagataacggagctcctggttctctgtcattggcacttgggc

SEQ ID NO: 769106 - DNA, 669 bp, Homo sapiens
gtggtgggagtatatgacatctgaaattgacatgaaagggggtgcagttattgatactcgtaaggtttagagtgcaaccataagaacaggtagctggagtgatgtggaggacaagatgatggcaggagagagcaccaagagcctgaggggctagattattgtaaggatcttttcaatgatattgaaatcaccaagaattaggagaaaactgctgttggggagatgacagtgggtaaggcatgagaatcttcaaggaataatgcgaagtgactatgaagtctgtagatgattggacatatggagcagtgaggtgacccatggctgaacttcagaggaagcaaggatgtgtttagggagaaggaaaggaggataagctgaaattggcagtgactattcatagctgcagaaagatcaggtttcatttakaataaagagacgaaggtgatgtagagactacttcaaggatataggaaattttgctaatgacccacagtgaactccaaggaacagggtggaagagtgtattgtgggaaagggtgtgagattgggtcatataaagaaatgaacagagctatacaagaatgtggtttacaacgatgagtggtgaattggggcttcttttggtgactgagatggcctgagtgtatatagttttcacttgctgaaaaa

SEQ ID NO: 769107 - DNA, 616 bp, Homo sapiens
aggattatgtgcttatcttgggaagaagtgaaggatttcataaacagatctccaagatacaaaccacagagcaaagatttcaaaattttataacactgaggttaagaatctgctgttcaggccaggcatggtggctcacgcctgtaattccagcactttgggaggctgaagcgggtagatcacctgagatcaggagtttgagaccagcctgatgaacagggagaaaccccgtctctactaaaagtacaaaaattagctgggcatagcggcccatgcctgtaattccagctactcgggaggctgagtgargcaggagaatggcttgaacccgggaggtggatgttgcagtgagccaagattgcgccattgcactccagtgtgggcaacaagagagaaacatcgtcttaaaaaaaaaaaggaatctgctgttcatcaggagatgtcattaaaagagggaaagaacaaactacaaatttgggggaaatattggctacacatgtaactgataaagatattcggctatattaaaagtttttacaagtcagttaggaaaagacaaataatccagtagaaaatgggcaaatgatattaatagtatttcagagaagaaaacaaa

SEQ ID NO: 769108 - DNA, 616 bp, Homo sapiens
aggattatgtgcttatcttgggaagaagtgaaggatttcataaacagatctccaagatacaaaccacagagcaaagatttcaaaattttataacactgaggttaagaatctgctgttcaggccaggcatggtggctcacgcctgtaattccagcactttgggaggctgaagcgggtagatcacctgagatcaggagtttgagaccagcctgatgaacagggagaaaccccgtctctactaaaagtacaaaaattagctgggcatagcggcccatgcctgtaattccagctactcgggaggctgagtgaggcaggagaatggcttgaacccgggaggtggatgttgcagtgagccaagattgcgccattgcactccagtgtgggcaacaagagagaaacatcgtcttaaaaaaaaaaaggaatctgctgttcatcrggagatgtcattaaaagagggaaagaacaaactacaaatttgggggaaatattggctacacatgtaactgataaagatattcggctatattaaaagtttttacaagtcagttaggaaaagacaaataatccagtagaaaatgggcaaatgatattaatagtatttcagagaagaaaacaaa

SEQ ID NO: 769109 - DNA, 645 bp, Homo sapiens
taataatatacctattagtcttctttccttggacattttattgtgaaggctcagatcccctcaatgccctgcctcgtagcatgtgttctgacatggtttcatttgagttagaagacatacacagttaccacatgcttacagactataaacactaattatctattttaatattctgctgtttgaagacccagtcttttcaggttttagaaaatccttgtttgttcagtctcctcaattatatcttatatcaatacagttattcattgagtctccccaattgtagttttatctcctatatcagtacacagtttatctgtaatatccatacttttagtgatgttaaggttatgttcatatgtaagaataatgatttctaagaaccagtgaggatatttaggtcaattcttgggctggcgaggctaatggggccagtagcattaagctatattaagctttagtggcrtagccatgatgtgttccctccagaagtgttgggttgactgttgatagtgtttcatttggtacccaactgtgacgagcaagtgcatgggagaacaaataatttgattcttgagtcagtttggttttagctgaagtttattaaaccacaaggaagggatgtgaccagaattagacttagccaag

SEQ ID NO: 769110 - DNA, 639 bp, Homo sapiens
ctaagtacaatactgaaaattttgctgaatattacattttagttttaaggcttctaggcattaaaatgaacagaagtaggtagtagatacatgcttgataactctatccaggccagaaggtcttatgacaaagaagtatgatgccataacattatttcagaactttggtcagataacagtaattcaagccttaagtagtttcttaatttgtttgaacacaaaaaacacctggctgaaatttctgaccatccttagaatttgaaatagtgccaatcaatttattttgtttcatttttagaaatattctttgacaagaactcwgcattcattgagagcataaaagagttgatacttctctctggctgcttaagaaataaaagataagaaaacacactgatttttgaaaatagccaacctatatggaggcgaaatgtgtaaattaagggaaaaagaaattggctgagaacctgctacacaatgacataacaaaggttttcttgtctcttcaagatgtttcctaagattaataagatcagttttacctggaaagaaaaataacactttaattaataactataaaaatttaatgtttataaaactgctaatataggattcattaaatacaaatgaatatcaatg

SEQ ID NO: 769111 - DNA, 628 bp, Homo sapiens
ctaaaatatctattttcccctattcaatctaaatgacactatcatgctgctaactccctttatatctccaaccctcaactttctattaatctccgaaactgaaatttatctattaaatctgtccacaaaatcttactattacttcaaactctgtaagtccaaaacaaaacacaaaattgtcctttttgttctccaaacttaacttttctattctcttgtattactgagtcagtggatgatgttaccatccaccggattccaagtaagaaatytaaactgcagaaaggcagtgtggactatggaaaatacactactcacaagtggtttgatattgacacatcacttcctgtaactggagttcaattccttattattataaggttctgtatgtatctcacattttcatcattcattaaaacaccaattaatgatcactcagcgtgcacccaaaccatcaaagttaggtaaagttaaaataaatatgcatacacatatacaaattttaaaatgaaaaataatcctttttacaagtataggtgatgttgacatttgttttacattgttttacatgacactgtttacaatttttgtaatttgtcaccataatgggtagtttgaatcagattcc

SEQ ID NO: 769112 - DNA, 576 bp, Homo sapiens
agatgtgggttcttacatttttttatctgcccttaaagaatcactagctcttgaaaagcaagaattatgtttaattcatcttcatatgtgatcaagatacctcccacaggttttgcctttaggatgtgctttcaatatattagttgaagctgatattgagcagtacactgctgataaatagataatgaacaaatgactgactgaatgaatgactaaaaatataataataaatccgttttttctatggctgataacagtttcaatctccycagaatgcctggggttgaataaggatctgagtccaaaagttaaagaaataaagttctactgacaaacaccaaacgttcttgtcacagaagagtgatcatcacagaagaggtggtcctttgttcatttggtagtttgttttttgggaagggggagtaagggcactgagcctgaccatgcgtcattcatatgtgttctttctgatgattgagataggcaattttaataaatgaacacagaagtgcttgtagggttgaggaggtggaacaagatggccaaatagaagcctgcactaattgtcctccctgc

SEQ ID NO: 769113 - DNA, 538 bp, Homo sapiens
aatgcatcagagtctcttaacagcaaaattgattcagcagaaagaaaaaattagtgcgcttaaagacaggtatctgaaaatacaaagtcagaggagacaaaagaaaaaagaataaagcatgcctgtaagatctagaaaatagcctcaaaagaaccaatctaagagttattggccttaaagaggaggtagagagataggggtagaatgtttatgtaaagggataacaacagagaatgtcccaaacctatagaaggctaccaatatttaatattgatacactctatacaagagtgttacagaacactaagcagatttaacccaaaaaaacactatcttatggtatttaataatcaaactcccaaaagtcaagaatgaaaaagaatcctaaaagcagcaagagaaaagaaacaaataacatacaatagagctccaatatgtcttgtctctcagcagacttttcagtggaaagcttacagaccaggmaagagtggcatgacgtaaagtggtgaagaaaaaaaaagaacttttaccctagaat

SEQ ID NO: 769114 - DNA, 627 bp, Homo sapiens
gttggtacttttctccagtgtaaaggtctggtaaataaaattacaagaaaatgtagtgaaaaatattagtaaagacagagttctgactagatggagttacaagtggctcaagtgacacattttgatacaaaatgttttgttttgcttatacaaaattaaattactagataatttaatgggctccagtgtaatgaaaagcacaattccccaaaagattttagtctgtaagcaaagattcacagtggatttgagggtcattattcagcatggtaggaaagcgctaacaggtgatgtttagaagttttggagtgctagtattgacttgctttctctttctttagatcacggtgcctgttctttacmgccatatctgctcgttactaggaattaccttatatttggatcagaattccttcttttaaaaaaaatctatcttataggatcagggttttttcctgatcaggacttttctttgcaattctaactgcaagacaaatatctgagaaagggtgctttgttgtacacactaaactttcccattctctatttcacattgacggatcaattctcctgtcaagtttgacaactgtcattaataaaaaggaaatttgactgtcatgcatatac

SEQ ID NO: 769115 - DNA, 586 bp, Homo sapiens
ttctgccccattccccccactacttttcccagactctggtaatcatccttctgctctcgatctgcacaagttcaattgttttaatttttagctcccacaactaagtgagaatatgcaaagtttgtctttctttgcctggcttatttcacttaacgtaatgacatttagttctatccatgttgttgcaaatgacagaatctcattttaatggcatattttgatggctcaatctcattctttttatgcctccattgtataataatactccattgtatataggtaccacattttctttatgcattcacctgttgatggacacaggttgcttctaaatcttggccactttgaatagtgcaacagtaagcatgggagtgcagctatctctyttatttcctttctccggtgtatatacctaacagtaggattgctggatcaggtggtagttctatttttagttttttgagaaacctccaaactgttttccacagtgattgtactaatttacattcccaccaagagcatacaagggtttcctgtactccacattcaagccagcatttattattgcatgtcttttggatataag

SEQ ID NO: 769116 - DNA, 633 bp, Homo sapiens
aaatggactagaaggaaattcaacatggaaattttaaagctgtgactgaagaaataaaaatataatgtttttgtctccatgtatttcatggccatgtagtctttaaacaacgttagaaaggaagaataaaaggactaatggactgttaatgtagaagctcaaatgtgaaactkaaatacattatatctttgattacgtaaaagtaaatttagctctcttatcaaacataagttatttagaaataagagtgacaaagtataataatgggatgcatagattgaaatttcatacaaataacctagaatcattcacttgtaattaataaaaggcatgatgagaaataatatgaaaatgtcccaggtactgtcaacaccattataatttcttactatcttgtttgagaaaaatgaggtaatggcagaaaggattcaagagctctgttgaatgttccatttttgtacaaaaacaaacagaaaaagagttaccaaaaaaaagttttaaaaattcattgaaaccaatatttcgaaaatgtgaatcaagtaaaatatgtgagatatttattatttaaaagaccatttgtgctagtcaatggttggtttaaaaccacagaacaacattcagatcattctgaaa

SEQ ID NO: 769117 - DNA, 549 bp, Homo sapiens
gctaagagggcaaattagatagaagagtgtatgccttccattaaaccaggaggcaaagtggagaggacctgtgcagccggtagataagagaagctgcaggatggctgaagactcactgcctcaaggcttctgtcttttttttttttttgagatggagtctccctctgtcacccaggctggagtgcagtggcgcgatcttggctgactrcaacctccacctcctgggttcaagtgattctcctgcctcagcctccccaagtagctgggactacagccgtctgccgccaccccaagataattttttttttgtatttttagtagagacaaggtttcaccatattggtcaggctggtcttgaactcttgacctcaggtgatccacctgcctcagcctcccaaagtgctgggattacaggcatgagccaccacacctggctggcttctgtcttatctttgaaaggagtaggagataacatctgctgagaattcagatggaagtaagtatgtggaaagtttgaggacagggatacggtctaccagggtggttttt

SEQ ID NO: 769118 - DNA, 630 bp, Homo sapiens
attattttttccttccatttttctgtgttaggcttggtctttcctgtttgttttttaatgtggaacgttaggttattgatttgaaattcttttttttaacatagatgtttacagcaataaatttccctctgattactgcttttgtgcatcccatgagtttttgtgtattgtgtktgtttgtttcttttatctcaaggtgctttttaatttccctggtgatttcttctttgaacaagaaattgttatgtaagaatatgttgcttaatttccatatatttctgaatttgccaaatttgcttctgctattgactttttattttattccaatgtagttagaggacaaattttgtattatttcaatctttttaagtttaatgacattcattttatggcctgagtggtcaacagccagtagaaaacttatatatatgcaatccacgttttaaagaaatagcctattttataatttaaatcaatgtagttatactatttgtaacatcataaagtcctattcttgcctttgataactttgaatccattaacgcttgtatacataaattgtgacttaaatgcataaatacctatcctttctaaatatgtttattttcattttattttatccttttgatt

SEQ ID NO: 769119 - DNA, 443 bp, Homo sapiens
tcgtaaacagatgatgtaaatttacagtgttgataaatacagcacaatactgtaaatggattttctcttccttatgattttttaataacatttcttttctctagctagcctcattgtaaaaacacagtatataatacatgtatcatataaaatatgtgttaattgactatttgtgttatcagtaagccttctggttaatgtaggctatcastagttaagtttcgaggtagtcaaatgttatatatagattttttttactgcacaagggtcagcacttctatctcctgcattgttcaaggctcaactgtatctcaaagagatagagaaagaatttgtaactacacatttttctagggtaaatgctctaagaaaaggccaggggcctgtctaaagtttgatgcagctgagagaaacaacaaggttctcttggtcagttgctatta

SEQ ID NO: 769120 - DNA, 443 bp, Homo sapiens
tcgtaaacagatgatgtaaatttacagtgttgataaatacagcacaatactgtaaatggattttctcttccttatgattttttaataacatttcttttctctagctagcctcattgtaaaaacacagtatataatacatgtatcatataaaatatgtgttaattgactatttgtgttatcagtaagccttctggttaatgtaggctatcagtwgttaagtttcgaggtagtcaaatgttatatatagattttttttactgcacaagggtcagcacttctatctcctgcattgttcaaggctcaactgtatctcaaagagatagagaaagaatttgtaactacacatttttctagggtaaatgctctaagaaaaggccaggggcctgtctaaagtttgatgcagctgagagaaacaacaaggttctcttggtcagttgctatta

SEQ ID NO: 769121 - DNA, 489 bp, Homo sapiens
cgtgaaagtttaatatcagccctgattttaaattcttaataaaatagagaaggaagtttccttacaatgattatgaaatatatctggccaaaatccaatagtagtctttacaaagaaatgttaaagaaattataataaatggaataaggcaagattgccaagcagtaacactctttttaaaatttttctagccaaagcaataaataaaaagagggaggtataatagaagatataactgtctgaaaagaaggcaaaactttcattatctgtaaatgatactrttatcaacctaaaaatgattatcaacccccaaaatgattgaataatcaattaaacttataagtgttttctatgtttagattttgaaagaatatatataaatcagctcttccataaacctcaaatagctcattgaattaatcacaaagtaataataatgtcaaaatgacttcacatataaaattatttgcaatacttttaataagaaat

SEQ ID NO: 769122 - DNA, 608 bp, Homo sapiens
cactcaaatgtggaatctaaaagaattgacttcatagtagatagcagaacagtagttaccagaggcaggggaggaaaggaaggaaaggtaataggcagagattagtcaatgagtacaaagttacagttaggaagaaaaaatgctgattttctattgcayagctgggtcactatgattaacaatactatattatatattttaaaatagctagaaaatagattgtattagttcgttctcacactgctaataaagacatacccaagactgggtaatttattaaggaaagagctttaattgactcacagtttagcagggctggggaggcctcaagaaacttacagtcatggtggaaggggaagcaaacacatccttcttcacatggtggcaggagagagaatgagaactgaacaaagtggggagccccttataaaaccatcagatttcatgagaacttaccgtcatgagaacaacatggggaaaaccacccccatgattcgattacctcccaccaggtccctcccatgatacatggggattatgggaacaacaattcaagatgagatttgggcagggacatagccaaaccatatcagaagttttgaatgtta

SEQ ID NO: 769123 - DNA, 662 bp, Homo sapiens
ttcttatataaactggtattcagattgaggtcacctttatgggagattattccttgtaagtgagcaaacaatatgcaatgaatttaagaggtataaaaaaaccagctctggaaatgattaactttactgctttcaatcaggtgtgtggatcagtatgacagaaaattgaattggtagccaattcttaagaattggatgaaacaggcagacaaaacctggagaatctgagaacagcaagttggtataggaaaacctccccaaaaatgagaaccaatgagtaattcagaacagtttccagaaaaaaaaaaaaaggagataatyagagtacctggttatatttaagagtgaaaacccaatgcagaaagctaaacttttgagtatgccaatataagttgtattagcaaaatatttggctgcaaatcacatatattccaactaacagaggcttaaacaaataagagtttcttttcctcatataaaaagtctagagataggcagttgctggaaatactttatctgttcatggaaactactctgctcactgcagcctccacctcctgagttcaagcaattctcctgcctcagtttctcaagtagctggaattatacgtgcatgtggccacacccagcttatagcatatatatatgtatatatatatata

SEQ ID NO: 769124 - DNA, 662 bp, Homo sapiens
ttcttatataaactggtattcagattgaggtcacctttatgggagattattccttgtaagtgagcaaacaatatgcaatgaatttaagaggtataaaaaaaccagctctggaaatgattaactttactgctttcaatcaggtgtgtggatcagtatgacagaaaattgaattggtagccaattcttaagaattggatgaaacaggcagacaaaacctggagaatctgagaacagcaagttggtataggaaaacctccccaaaaatgagaaccaatgagtaattcagaacagtttccagaaaaaaaaaaaaaggagataattagagtacctggttatatttaagagtgaaaacccaatgcagaaagctaaacttttgagtatgccaatrtaagttgtattagcaaaatatttggctgcaaatcacatatattccaactaacagaggcttaaacaaataagagtttcttttcctcatataaaaagtctagagataggcagttgctggaaatactttatctgttcatggaaactactctgctcactgcagcctccacctcctgagttcaagcaattctcctgcctcagtttctcaagtagctggaattatacgtgcatgtggccacacccagcttatagcatatatatatgtatatatatatata

SEQ ID NO: 769125 - DNA, 333 bp, Homo sapiens
gtttttgcattgctataatgaaataccttataacataagttataaagaaaagtggtttatttggctcgtggttctataggctgtgttctataggctataggttctattattgcattgctataatgaaataccttataacataagttakaaagaaaagtggtttatttggctcgtggttctataggaagcatggccctggcatctgctcctggtgagggcctcaggaagcttccaatcatggcagaatgtgaagggggagcaggcatgtcactcagtgagagtgggagcaagacagagggagcaagggcggggaaggtgccacagtgttttgaa

SEQ ID NO: 769126 - DNA, 583 bp, Homo sapiens
cttgacctcagctgatcctcttgcctcagcctctcaaagtgctggaattgcaggcgtgagccaccacacctggccagttttgctcttttgtataaatcatgtggacaaaggaatacataatgtacgtacatatatatttctttaaattttaataaaaactatgaagtaaacatcagtgtatccatcatccagtataacatatgaaagattaaaaacaagtttgaagcccttcttacagttctctccacatccctctccctcttcccaggagcacttaggattctaatattcttgtaaattrctcctttgttttccgtgcagttatgatatttaagtgggaatctctaaatactatagctgagttttgattctttggaactttgtataaataaaataaaaatagattgtctgccatgcagcttctataaatcaaacaaaaggatttctgtgaagcttaagggcactgtccctcagctgtctagcaggagcccaaggtagagaaggggtactcttaaagagacttgtggtgtaagtttgtctaacgaatatatggaaaagtccagcaaaattctcagaagggtta

SEQ ID NO: 769127 - DNA, 583 bp, Homo sapiens
cttgacctcagctgatcctcttgcctcagcctctcaaagtgctggaattgcaggcgtgagccaccacacctggccagttttgctcttttgtataaatcatgtggacaaaggaatacataatgtacgtacatatatatttctttaaattttaataaaaactatgaagtaaacatcagtgtatccatcatccagtataacatatgaaagattaaaaacaagtttgaagcccttcttacagttctctccacatccctctccctcttcccaggagcacttaggattctaatattcttgtaaattactcctttgttttccgtgcagttatgatatttaagtgggaatctctaaatackatagctgagttttgattctttggaactttgtataaataaaataaaaatagattgtctgccatgcagcttctataaatcaaacaaaaggatttctgtgaagcttaagggcactgtccctcagctgtctagcaggagcccaaggtagagaaggggtactcttaaagagacttgtggtgtaagtttgtctaacgaatatatggaaaagtccagcaaaattctcagaagggtta

SEQ ID NO: 769128 - DNA, 642 bp, Homo sapiens
actacaatattatgtcttatctgcaatccagattatgtttactgggtgaagtctaagtaggtaagtgaagggagtcatttgaaaattaactcatttaatgcctaaggcaattttttaaaataaaaagctgcattattgtgatttaaagtataagatttccatagaaatagaatttgcaacgaatgtttttgggtgtaggttcagcacaccatgctatcacaaatgaaaatcacttacttattttagaacttcttaccttattaaaatgtgtcattattaaagtcccttgttacacattcaaatattaaaaggaagaaaataaagcacacctggctgtatataattgtccttgattctaatagcaaaatcatcaaaattgctctttagttaaagatgttcacgttatagtcactgatcttgctattaatagttgtatagcactttaatggtggcctgcttaaaaatacatgtgaataaatttcatwtttttcacaatatgaaataggggagacatgcagaacctgacactcacctcatcccaccctaaatcttggcattattacagaccatacaaagtccctttattctaagactatggtgtgacctagggctaatatatttttgtttgggtcaaaataaatt

SEQ ID NO: 769129 - DNA, 616 bp, Homo sapiens
ttctcccattctgtaggttgtctgttcactctgatgatagtttcttttggtgtgcagaagctctttagttagatcctatttgtcaattttgtgttttgttgcaattgcttttgatgaactggtctgctgattaaaaatgcagcttccctggcccaattttagagatcctgaatcagtaattctgaagtgagtgcaggcaccatgacatgaacgagactccaaggtaattctagtgkagacgtctaataagtagccatagggagggagggagggaaatatgagctaaaagaagtcatagaagcaatttacaacctgacaggaagatctagaacaactatataatctactgaaatatttcttgagggcacaaaagggaagacaaaatttaccatgaccaccttccctcattcaggctgaaaaaattcagaagacagaagaaattgctaaaaattattttaaaattttcaattcaatttactgtaacaatcaaattcagtgcatggcaagcagtcagaaaaaggggattttattttaaaatggaaaaaagtgggttcaagtccccgttctgtcccttggtgacagcatcactatttatatgcgacttaactgttgcaca

SEQ ID NO: 769130 - DNA, 627 bp, Homo sapiens
gggacattacagtatgcacaaataaaagagaatcaataatattgtttgttgacaaagaattaggaaaaattataaatggagtttaaattggtaagtattgcatagtcatttgagaaataacattcaagacaccatcagccaaagtcttaatttcagaattcatttgttggctttgcaagttgcatgtgaatgcatgcacacatacacatactttattcatatgagctagaagagttacactgtggaagtgtgctcggctcatattttatagacacgttattgtaacatatttaagattatagtagcattttttacatgcttaatatacttcatgtttttaatttttttatactttaagttctgggctatatgtacagaacatgcaggttttttatacagstacacacgtgccatggtggtttgctgcacctatcaacacgtaatctacattaggtatttctcctaatgctatccctcccctagtcccccatcccccgacaggccccagtgtgtgatgttcccctccctgtgtccaggtgttctcattgatcagctcccacttatgagtgagaacatgcagtgtttggttttctgttcttgtgttaatttgctgagaatgatgatttc

SEQ ID NO: 769131 - DNA, 559 bp, Homo sapiens
agtaaattaaaacaactagcactaagacatgtctgacttacgcaatggttccacggcatcattaatttatgacagctgtcagaactgtttgactcaactactataaggaggcaaaggcaatcatttaacagatcaatcacatgttagagactgataataaaataacgcttttgataagaatagaacaagacataatgattatttgaatcaaatcatgcaaaagtcataagagtgggtgactgttgctagaaaacttgtctgatcatgtatgtgactttatttatttacatactttcagtccctgcagtcatgagaccttttgtaatgggaggaaaatttagcattatgtcctgctgttaagttcactagctaygtaactttgggcaatttatatatgctttttgattctcagttttccacatcttcaaagtgagccttgaggtacaacctaggttacactgttgtcataaagattaagtcatgtgtgaaacaatttataaatagagaagcaccatccatttctaaatcatagcacttcttctacttttgggggaagctt

SEQ ID NO: 769132 - DNA, 602 bp, Homo sapiens
gtaggtgacgattgtaatgttcctaaatggttaggaatctaggatctaaagaagacctttcctggtagatgaaacataatagaaaggccctagggtatacatttgcttcattggtaggaagagaaagaaggctgtggtsgtccgaggaaagtaagtcattaagtaagtcattaagaaaatggcgtgcaatagaaatggtggaaacaaagaatggttcagatcacagaaggccttggggactgtaatggatgccattggcttacccttttatattcattatctactctgtcatgtgctttatgtattcagaaatgtaaactgtataaattgctgcagtgggttgatttatttttggttttgctgttgggtttggcaaataggtgaccccaggaggatatccagaaattaagaagaaaaagaggtgttagtactacttcactatgactacggtctgaatatttgtatacctacaaatttgtatgttgaaatcctaacacccagtgtaatcatggcagaaggtagggcttttggaatgtaataaggttatgatggtatagtcctcatgaacgggattagtgccttagaagcctaagagacacctc

SEQ ID NO: 769133 - DNA, 601 bp, Homo sapiens
tttatcatgaaaaccaaggcttactcttattctatgttatagatgaaacatagtatgtaaagcagttagcctaaggacacgcatttagactacatacactgaacccccaaggttgaccagcgaaagcatcgactgtcttaggctaggttattttttagtagcagaaaactgtaaaaaaattaagtggcttaaagaacaaaggtttatttgtacctcacaccctatctattgtgaggcaactgtgtagggtttttttgttgttgtttgcttttgttttttgtttgttggatkgtttcagattattttatttttctgtccttatcagacagacaactcctatctgagctcctactattggttagtcttgtggaaaaggaaaatgtataaattaagactaataataaaactgtgtgatagctttcagaacataacttcagaattttgttataacattttctctcacttttttgttaaataaagtaagacacatgtccaaccctggtgttatagatagaaagtgtaatttttccgtatatagggactctggaataaagaacatatagtgatgggtagtgaatagtttgaaatatgtcagatcata

SEQ ID NO: 769134 - DNA, 566 bp, Homo sapiens
gaaaaatagtggaaggaaatataccaaagtgctaacactagaatgtgggtttataatttttattttcctcatgatgactttctatagtttccaaatttagtattctatgtaaaatggtgggggggggggggctattatttaaaaaaaataaaaataagaaagtcaayactagaacttagatgaaaatttaacttccaggctaaaatccattttataatttttcattcccatctcttcaatgtaaaatgcaatttataatatctcatatcaatcagatactaacagctatttaaaactaatttgaaaaacacacacaagtaagtatgcgtaaaactggtgaaataggaataaatcatgtggattatacctatttcaatttactggttttgatactgtatatactacagttatgtaaaaagttaccactgggggaaactgggtaaatggtagggacctctctgtaacatttttgcaaagtcctgtgagtctgtaactatttcaaagtaaagagttaataaaactaacttaaaggtttatagggccaatattcaaaggaaactatacta

SEQ ID NO: 769135 - DNA, 566 bp, Homo sapiens
gaaaaatagtggaaggaaatataccaaagtgctaacactagaatgtgggtttataatttttattttcctcatgatgactttctatagtttccaaatttagtattctatgtaaaatggtgggggggggggggctattatttaaaaaaaataaaaataagaaagtcaatactagaacttagatgaaaatttaacttccaggctaraatccattttataatttttcattcccatctcttcaatgtaaaatgcaatttataatatctcatatcaatcagatactaacagctatttaaaactaatttgaaaaacacacacaagtaagtatgcgtaaaactggtgaaataggaataaatcatgtggattatacctatttcaatttactggttttgatactgtatatactacagttatgtaaaaagttaccactgggggaaactgggtaaatggtagggacctctctgtaacatttttgcaaagtcctgtgagtctgtaactatttcaaagtaaagagttaataaaactaacttaaaggtttatagggccaatattcaaaggaaactatacta

SEQ ID NO: 769136 - DNA, 538 bp, Homo sapiens
cctgtcccagctagctcttgcctgaaaagtaggtgcttaatgatacaggtaggtctaaatagtaaaaagatttattccgcaagccactaattaaaatcagtctggtcttgatctatttagcctagagagattgacgattttagggagaggattgtggggccccaaatccagaaaactggaaaagatcggtagcttaaaaccattcattcatttatttattcacttattcattatttcaatatatatttataaagaacccctagcttcctgggcaaggaactcatagtytagtaggggagacagacaagattaaggaaaaaaaaaaaaaaacacaggactttgcttagagaaaaagagaaagttcatcatttgagattggagagagttctgagaggatgatgtgggaatgtgcgatgtgatgaactgaaaaatgctggatgacttcaaactttcccattaaggtggcatgatagcatcattggaagaggagagggagagcatatggggattgaaagagagaataactccagtgggaaat

SEQ ID NO: 769137 - DNA, 571 bp, Homo sapiens
aaaaaatgctaaatggaaaaacagcaatgtgtcaataatgttattctctggctaggagatttaaaatagcttttctttttgtgtgtatgcatttcttcattattttatggcaatatgcatataatagttcaaaataaacttatttcaggcatataatgtcagtgaaaattaaacctgtaaagagtttaacaatgtgccaaatatttgtcaatggcaggtagaaaaccaagtagtaactgtccattttattaattgagtttgtattattattaccagatgtgtttgaatgtastgtcataaagtcctatggaaatcaggagaaagcttaattgctacctccagagaacagtgaaaatttacacatttgtttaaacactacctcatagaaataagatgtgcttgagtttggagtcttacaatttcacaaaatatcaagcacttttagaactaaccttttgtaaatttttatattttttacaattaaaaaaattacaataaaattaaaaacaaaaatacagtttaaacattcaaaattttattttaactatatcacataataatgattttactc

SEQ ID NO: 769138 - DNA, 559 bp, Homo sapiens
agatgtgcgattatataaggattcatgggctgtagccagtggtttggctggatgatcagcgacttggaagaagcatgattaaagaattgatgacacagaaatttggggaagaggtatgtggatggacctctctgagtggtcaaaaaccatgaagatatttgtatttcatgagtgcccaccaacgggtgacctcagcaraggagaattttaataatcaagtgtgtaggatgacccattctgtggacatcgctcagcctctttccccagcaccacctgtcatagcccaatggactcatgaacaaagtgaccatggtggtagggatagagattacgcatgggctcagcaacatggacttcgactcaccaaggctgacctggctataaccactgctgagtgcccaatttgccagcagcagagaccaacgctgagccctcaatatgttaccgttcctctgggtgatcagccagctacctggtggcaggttgattatattgcaccctttccctcagggaaagggcagaggtttgtcctcactggaatagacactaactccagata

SEQ ID NO: 769139 - DNA, 621 bp, Homo sapiens
gaactgacatgtaaacatatatttatgtgtctttatatgtgtatattggtgagggtggtgtatagtttattatctatctatctagctagctctatcttatctctatgaagtccacttcttctgttctgaaaagtattcggcaggtatcaataaacagaaagaaagccagttagcaacacaaagtattttaactttcacagggggcataatagtttaacaggctcttgaaattccctgggtgttaagacatctgttagggctgaatgccagtggtttgtgaagctctcagaagcaatagggaatacaaatcaaaactgtttaaaggatgttttcctttctgccatttaccaggagttttacagaattctgtggctatttaatctgatatgaaatgggaaattarcagttgctttctaacccacatctggtgataagtgaggccacaatgccgtccagatgccattcattgctgcatattttctactccccattttggctgacatctctaactacttcaatatggcacaacatatacagagagagagagagaattgcagcctggatgaatgaaatgaataagaacagtctattttcagtgaaataaataaacagttaccatga

SEQ ID NO: 769140 - DNA, 575 bp, Homo sapiens
gaaaatgaattgtgctaataacctgattgagttggaattgtaccctgtgtcagtcaagccctcagatgagaacacggtctgaactgacatcttgattgtgactttgcagaggaccatattcagattggtaacccacaagtactgtgagttaataaatgtgtgaagtttataagatcctaagtttgtggtgatttgttgttcagcaatagaaaattaatacatggggatacaaagaattgcaaatatgctagaaaaagaacaatttcagaagagaaaatattcaggagagcctgttgttaccaggggtccttgctcccagagctctcaagatggtggcgggccacttccaaaatggcgggtggcttccaagatggtggcaagactcacgttctctgacctggggttcttggcctcacagatcccaagtattaraatctggggccatgctgtgagtgttatagctctattagaagctgtgggtcacagaagagaaacgggaacccagtgattagtgttcagctcaattaggacgaacctgggcacttagccatgcaggaacaatggcaagcctttag

SEQ ID NO: 769141 - DNA, 522 bp, Homo sapiens
tagccccagaaaatctactgcagtcgtttttgttctgcaacatttatagtaccacgattattcccatcatctcaggtagcacagattattgaattaaggctggttattgttggatcagattgggtttgagacaggtactcggtggagaggcctgagggtgggtttagaagccagatgttgctctttgacctatttaataccgagcttgacacacacacacaatctctctctctctctctctctctctcwcacacacacacacacacacacacacacacactcctatgcccatccctagagtgtagggtgggcctaagactgcgcttctaacaagtctcccagttgctgctgctgttggtgctggttccgggaccacattatgagaaccactgaactgaatgaagcatgtgaaaattcacatatattaaagtgaaaattggagaaatggaaacaattacagtacccttcaggggactcggggtgggggagggggagccttatttctgtaaacctaggcctcaa

SEQ ID NO: 769142 - DNA, 444 bp, Homo sapiens
aagtttcttatacattttactatgaataaatgcttcattactatcaatcctatctatttcaacaaagaagttgctcacatcgttaacctatgagtttagctctgacatgaatatgggttgtattttccgatacattagtgagtaagagaaaagtaaaacaatgaagatgtacattaggaaaatttaaattaatgatgatgtgcaagacttctttactgaattagataatagtgttcaaatactgaaagaatattgtctcaattmtgtatgttattcacaatgtaaaaccacagacagaacacactttaaaatttaatctgtagtgttatttttttccatcactttcttaagattagacaatcaacgaaaaacaaatcaagccctgatttgtagtgcgtgctgatttctatggtggaaatactgccaccatgactagtttcaagc

SEQ ID NO: 769143 - DNA, 444 bp, Homo sapiens
aagtttcttatacattttactatgaataaatgcttcattactatcaatcctatctatttcaacaaagaagttgctcacatcgttaacctatgagtttagctctgacatgaatatgggttgtattttccgatacattagtgagtaagagaaaagtaaaacaatgaagatgtacattaggaaaatttaaattaatgatgatgtgcaagacttctttactgaattagataatagtgttcaaatactgaaagaatattgtctcaattatgtatgtyattcacaatgtaaaaccacagacagaacacactttaaaatttaatctgtagtgttatttttttccatcactttcttaagattagacaatcaacgaaaaacaaatcaagccctgatttgtagtgcgtgctgatttctatggtggaaatactgccaccatgactagtttcaagc

SEQ ID NO: 769144 - DNA, 668 bp, Homo sapiens
atgttttgttacaatacccaatatacttttttaagtaaaaccatgatatcaaattcctagctatattctccaaatttatgttatatttcaaagccatacactttaaaaaacagagtatattatttttaataaacacttttctttgccaagaaagaataaaatctgtttatactctgcctatttacagcatgttgtgaaatattcctacagtttatacccattaatttgcattaagagaataacaaaagaaggaagcatgtatatgtatatgtgtgtgtgtatayatatgtatatgggtatgtatgtatatatgtgtatatatatgtgtatacacatatatatacacatatgtgtatacacgtatataatatgaactgccgttggtaaacaagactcaaattcaaattaaagtcactttacacaattatgttgtaaaatgctggcaatttttgattgtttattcttatttttcacaaggcaaacaatataatctgtgtgatttttgccttaaaacttaatgtcagtaacaaacatttgatttcaataaaaagtttaactaaagagtaattctcatctgattatttatattttctgttcgaagatgctttttctaattgggtaactcttgtttataatatacaagagattataggaatattgtgcatata

SEQ ID NO: 769145 - DNA, 621 bp, Homo sapiens
tttcttctttattctgtaaatatcatggactgcattgattaatttttaaatagctttattgagatataaattagttaccataaaatttatctttcacttaagtacacaaatcattgatttcagaaaatatatataggggtacaaccattactacaatcctgtttcagaagattaccatcatctaaactagcctttgtgccagttcacgattattcttttgtctccytttcagcctatgcaatcttccccatacttaagcaatccacatatttaacatttctgatattctttgtatctttctattaatttaatttatggcatagtgttattttatttcaggctaaagaagttcctttagtatttcttgtaaggtaaatctgctagcaacaaattctaatagtgtctgtttacatggtattaattcagtttttatttttggagtagtattatctggatgtaggattcttagaagaaatggttcgttctgagccttaagtgggttcttccacttctttcttctgtttgctattatttctaatataaaacagccttcaagagaattgaagctcccattgaatcattttctgttgctgcattcaaaattttcactttgtctttgtt

SEQ ID NO: 769146 - DNA, 621 bp, Homo sapiens
tttcttctttattctgtaaatatcatggactgcattgattaatttttaaatagctttattgagatataaattagttaccataaaatttatctttcacttaagtacacaaatcattgatttcagaaaatatatataggggtacaaccattactacaatcctgtttcagaagattaccatcatctaaactagcctttgtgccagttcacgattattcttttgtctccttttcagcctatgcaatcttccccatacttaagcaatccacatatttaacatttctgatattctttgtatctttctattaatttaatttatggsatagtgttattttatttcaggctaaagaagttcctttagtatttcttgtaaggtaaatctgctagcaacaaattctaatagtgtctgtttacatggtattaattcagtttttatttttggagtagtattatctggatgtaggattcttagaagaaatggttcgttctgagccttaagtgggttcttccacttctttcttctgtttgctattatttctaatataaaacagccttcaagagaattgaagctcccattgaatcattttctgttgctgcattcaaaattttcactttgtctttgtt

SEQ ID NO: 769147 - DNA, 673 bp, Homo sapiens
tttattttgtttatcttatttaaaatgtgctgaaactcttggatatgtagactcagcttgcataaaatttgggaagttttaaattatttatcaaatatttttctgctctccctctccagttccttagaactctgattacacatatttttgtaaatccagtgtttgtccaaagttctctgaggcttggtgtatttattttttaatctttacatttttttcgtcacatgaaataatttactgctagttagaattatactatgtcagatagtgcagtactgtttcaagtataaaaaagagtcaatagaataaaattaagagtgcagaaatatattggcaccaaatatatgacaaaagatacaatgctggttgatgcagaaagaatggacaagtcaataaatagtttcacaaaagttattttaccaaagaaagggaattttaagttaaattycccagtaaaagtcaatactaggtgtattaaaattttaaatgtgaaatgtaatactttgaaagttttaaaagctttcatataaaaatagctttatgatctcagaagaaggagggtttcttaaacaagaacatgaaaagcatacatcataaaaaagctaataagttggattgcttatattaaagtcttctttgcatcaaaatacatgataggaaaaaaaagccacac

SEQ ID NO: 769148 - DNA, 519 bp, Homo sapiens
gctttttcctaatttaactcaaaacagtcctttaatcctgggcaaaagtttacatttccatgccttcttataaccttttactaaaaaacacattttactgttcttacacaccctgcatgcaaatctatttctagtagtttcaatgaacacctagcgatttttaactttaaagtaaaacttggtactttgctttaattgtgtggtaactgcagccaaggtttgcgttcttagttaaggatgtggttagttccgtatgtctccaggcattaccaatcayggtaaaaactttaaaaatagaggaaagagctttctttgcacataaactttataaactcaagaaataagtattacattctctaactaaagagttcctctggacttaacccagactactgctttttagtgatgaatattgcccttgtccaacagtccatacagaagactctgcgttttatgccaaataatatattaatatcaataattaatttttatttaataaggcttgttttccaaggaaga

SEQ ID NO: 769149 - DNA, 559 bp, Homo sapiens
gatataatattctctctcatggttacatggcaataagccttaggtttaaaaaaacaacaacaaacaaacaaacaaaaacagggataattgctgcttgttttactaggtgccaagttgattcaagagccaagggaagagtatatgtatgctggagtatggtgacccccacagaagagatacaaagggatttaatttgaggaagttagaaataagccactgtcattgtaatttcactcttttggtctagcctacatctttgaataaactcaagtggtttgctcaggctaagctaaccagttatgctttctggtttacttgaacaaaaaaaaaaatctctctcttaaaaggaacttaraagcttccagttggatgtaatatgccactgcacaagtgaaaattaggttgctatggtagataaaaattaggccaatattttccatttatatcttgtataaaaattaactactgtcagaggagttctttctggagttataaaatttcaggttatcatgagacttggaatgcaacattttttgaagatataagatattcaataact

SEQ ID NO: 769150 - DNA, 682 bp, Homo sapiens
atttttgtataaggtgtaaggaagggatccagtttcaactttctatttatggctagccagttttcccagcaccatttattaaatagggaatcctttccccatttcttgtttttgtcaggtttgtcaaagatcagatggttgtagatgtgtggtgttatttctgaggcctctgttctgttccattcgtctatatctctgttttggtaccagtaccatgctgttttggttactacagccttgtagtatagtttgaattcaggtagcgtgatgcctccagctttgttcttttggcttaggattgtcctggcaatgcgggctcttttttggttgcagatgaactttaargtagtttcttccaattctgtgaagaaagtcattggtagcttgatggggatggcattgaatctataaattaccttgggcagtatagccattttcacaatattgattcttcctatccatgagcatgggatgttcttccatttgtttgtgtcctcttttattttgttgaatagtggtttgtagttctccttgaagaggtccttcacgtcccttgtaagttggattcctaggtattttattctcttttagcaattgtgaatgggagttcactcatgatttggctctctgttggtctgttattggtgtataagaatacttgtgatttttgcacattgatttt

SEQ ID NO: 769151 - DNA, 693 bp, Homo sapiens
actcagaggctggcgggatcctccatatgctgaacgctggtcccctgggtccccttatttctttctctatactttctctctgtgtctttttcttttccaagtctctcgttccacctaacgagaaacacccacaggtgtggaggggcaacccaccccttcaatcccttccataacagaagtaatcaaatgtagtaagtgtgccaccaggtagctagctaatcaccccggggagtggtgtcgttttgtagactcagtgttggtctctgctgctggcagattgggcactcggcagtgactgtagccaggtcaccttggtgagtggaagtttgtgtttccaatcatatgcacaactttcatccctgtcaccctggccaatttgttggtcccattgggcaatgacagaggtggctggagaaaggagcagactggtattcactgaacaggtyattctacgcacttgattattaaagtctccctccactaaagttaccttttggtgagccttcacatgggtcaaaaatatcttcatggtttttggcccattcagagaggtctacccacctcctatctctaccccagactgttttgtcattaattttccaaccatgttactgtctaagtccctgaccatccagccaaaccattggccatagcctatgaatcagtatatagtcacctacaggagcaccccaa

SEQ ID NO: 769152 - DNA, 559 bp, Homo sapiens
caaattcaagcacatttctgtgttctagttttcttaattttatgacaccatgattcttaacccaacacaatgctccattaaaatttatgtttgcatttgaatcatagagtcaagtaattttactttattgggacttctaatctgaactgacagtaktattgacaatgatataagatgcttcaagtttgatggaaagattgcattttttatattttataaattgaatttgaaaagccaatttttattggagtaaataattttattttgaagtttccagtgacagatacacatctggtgatgaagtcaacaccttaagagctggcagattaatatcaacaaatgtacaaaaaaaaaaaaaaacccttgtaatctaaaatgagagaaaagtgtttatttttttttaaataggtcatgcttcttaaaatgaggcataaagtcacgttattcatctacaagtgtgaaagtgtaatcttcaggtttcatcttctttaaaaacctacttaccttagaagcagacaaagaggtgtctttagcagatttgtgtcttctggttttcatg

SEQ ID NO: 769153 - DNA, 635 bp, Homo sapiens
tctttaaaaacctacttaccttagaagcagacaaagaggtgtctttagcagatttgtgtcttctggttttcatgtattggtaaaatcaatattgtccccaaggtgagtagtgaatgccaacaagcattttgttcagattgtgtgtttatcatcaactttttgagaaactacaacccattccataatttttcattagacatgtactttcagttttgtagctcattgattcagactggtttattgttaaacaagcaaacaaaaaagaattacaaaacaaagaaaactccataaaatattgctttctgtagctcaagtctacttcctatccccatatttytaaacctagcttacctttcccactttcccactgattcactgattagcagcctggatgcttagtgtattttccagattgtagcctgaattacacaagctcactggctggtagcctgagtacaaggcaggggcagcatcatcatatacttcctcatcactgagagcaggagttagccgtccctagccatttctgtctcagagcccaagcacattttatttatcagcaaagcccttcttgctgtccttgaaagaaaacgttagttatgctgcttctggaaagcaccaggttattgctggtc

SEQ ID NO: 769154 - DNA, 637 bp, Homo sapiens
ccagcgggcatcaggtcttcacctcagcatagagctgaatgtgaggcacacttctggatgcctcaggagccagtgcagaggaacagaggtcctccgagttctggatacacactttctactctacaccacttacaccacctgggaccttaaatcactctggcaaaagggaaggaaaccttgagaggagggtggcgaagggcatcacatctgaaacccatgacagtaactcaaaagacatgaattatccagaaagaggctatttaaactagaaaagactgaattacttattgacaagcctgttttgtttttttcccctcctgtcaatggtawtgggggcttgaaagcaagacaaagtcagagaaaataaagaaaaatacactgtgtgtgtgtgtgtgtgtgtgcatttgggtcgtttcagaagtagtaagtaaatttacacaccactatattggaaagccgacatagaattcctaaggaagtagggacactaccaagctacatcatcctatcataagacacagggtagtctactaaaactgtacttcatattctaatatttgcctgaggtacaacacataatatcaagaatactggagggaaagctgatttgttctttcgggaaaggcttatttcttat

SEQ ID NO: 769155 - DNA, 637 bp, Homo sapiens
ccagcgggcatcaggtcttcacctcagcatagagctgaatgtgaggcacacttctggatgcctcaggagccagtgcagaggaacagaggtcctccgagttctggatacacactttctactctacaccacttacaccacctgggaccttaaatcactctggcaaaagggaaggaaaccttgagaggagggtggcgaagggcatcacatctgaaacccatgacagtaactcaaaagacatgaattatccagaaagaggctatttaaactagaaaagactgaattacttattgacaagcctgttttgtttttttcccctcctgtcaatggtattgggggcttgaaagcaagacaaagtcagagaaaataaagaaaaatacactgtgtgtgtgtgtgtgtgtgtgcatttgggtcgtttcagaagtagtaagtaaatttacacaccactatattsgaaagccgacatagaattcctaaggaagtagggacactaccaagctacatcatcctatcataagacacagggtagtctactaaaactgtacttcatattctaatatttgcctgaggtacaacacataatatcaagaatactggagggaaagctgatttgttctttcgggaaaggcttatttcttat

SEQ ID NO: 769156 - DNA, 659 bp, Homo sapiens
gcaccagcagcagaatcttgggaatttgttacaaatgcattctggggtcttgtcccagacctactttgaaactcttggggtgatgcacagccgtttgtgttgtactaagctctcaaggtgattctggtacttgataaagtttgggatcatggctttagttattgccactttgcaacaatccaaaacaataagctggggtaagaaatttccattaaaatcctctctttttgtgggctgtatgtgagcagcttactcttgagagaaatgattagcctttttctttcttataaataggagataattacagaggcctgtwttaaggtaagagagtagcagcatgctcctaactaatagtcatatcttaagttgtcatccctttcctctattaggattcttgtttgcggttaataactacctttccagtatttcaagattcctgactcttaagtcaactgaatagaagtcaaacttagagtttctctaagcaatgtcttattttcttccctcatgtttttagatgctagtataaactctgttttctctctctcaagcaggaatttattgaatataaattcaataaagtcaacacactctaacattctattttttttctcctaagtcctttaaatgctaacatttcaatgtacatgatctagttc

SEQ ID NO: 769157 - DNA, 538 bp, Homo sapiens
tggttggcttaagcagaagagaaacataattcacatatattttgaatgatcactctagctgctatgttagaaacagaatcgatggggaaagagtaggggcagggagcctatttaggtagctattacaatagtcctgcaaagtatgactgtgactgcccaggggtkgtagaaggcctgatgaatgcctggagtctgaatttactttgaagatagagccaacataatttgttaatatgaggtgggagaagtgtcaagaattattccaattctttggtctgagcaactatacataatatggaatagagtggtcctatactacaaagaagaaaactgagagaagctcttggaagggtgggatgtagaaaggggctgctgctgctgatggtgatgaaataaagaattccccttagaacatgctgagttcaagataactactggggaaccaaacagagagatctaattgagagtcagatacaaaaatccagagtttagcagagaggttccaggctagaggtatacatttttgagtcatctgaaa

SEQ ID NO: 769158 - DNA, 538 bp, Homo sapiens
tggttggcttaagcagaagagaaacataattcacatatattttgaatgatcactctagctgctatgttagaaacagaatcgatggggaaagagtaggggcagggagcctatttaggtagctattacaatagtcctgcaaagtatgactgtgactgcccaggggtggtagaaggsctgatgaatgcctggagtctgaatttactttgaagatagagccaacataatttgttaatatgaggtgggagaagtgtcaagaattattccaattctttggtctgagcaactatacataatatggaatagagtggtcctatactacaaagaagaaaactgagagaagctcttggaagggtgggatgtagaaaggggctgctgctgctgatggtgatgaaataaagaattccccttagaacatgctgagttcaagataactactggggaaccaaacagagagatctaattgagagtcagatacaaaaatccagagtttagcagagaggttccaggctagaggtatacatttttgagtcatctgaaa

SEQ ID NO: 769159 - DNA, 627 bp, Homo sapiens
  misc_feature 591, 592, 593, 594, 595, 596, 597, 598, 599, 600, 601, 602,603, 604, 605, 606, 607, 608, 609, 610, 611, 612, 613, 614,615, 616, 617, 618, 619, 620, 621, 622, 623, 624, 625, 626,627: n = A,T,C or G
atgcaagcaggattggagcagaaaaaataagttgtttgtgttaagcagtgatgggttattcttattaattgattaggctgccctgagttgtttttggaatcataagaaggtaaatattgtgaattgattattacattgccattcaataaatgtcatgcagtattttttacttcataaatttgtgtaaaatgtaatgtttgtttcatgtayaaggaaaaaggtgaaaggtctttcagagattttgagaatgagggggaaccatgtggtttccaaggataacaatgcctttttccacgtcattccctgcaatagtgcaaagcatctcaggttgtcagcaacaatagtgcaagatgcctggtgcttcatgccccaaagcctactgctactgtctttctaattagtctctggtaagttatggagagagcagatagataggctcttgggtgacaatatgcttcatcactcaggcatataataattatgttcattagcattacctagtttttaaaatagtaagttatgcactctgtatttggccaaacttgaaattcttctagaaccatgtagtccctcccatagtcagaaatgttnnnnnnnnnnnnnnnnnnnnnnnnnnnnnnnnnnnnn

SEQ ID NO: 769160 - DNA, 698 bp, Homo sapiens
agttaaaaaacttttaaatttccatctcgatttcatttttcacccaatgccattcagaagcaagttatttaatttccaggtctttgcatgattttgaaggttccttttggagttgatttccagttttattccactgtagtctgagagacacttgatataatttcaattttcttaaaatttttgaggctcattttgtgacctatcatatagcctaccgtggagaaagttccatgcgctattgaatagaatatgtgtcctgyggttgttggatgaaatgttctgtatgtatctgttaagtccgtttgttccaaggtatactataaatccattgtttcttcattgagtttctgtcttgatgacctgtcttgtgctgccaatggagtactgaaggctccctctattattgtgttgctatctcatttcttaggtctattagtaattgttttataaatttggcagtgccggtgttaggtgcatatatgtttagaattgtgatattttcctgttggccaagacattttaccattatataatgtccctctttgtctcttttaactgctgttgccttaaagtttgttttgtctgaaataaggatacctactcctgttcccttttggtatccatttgcatgaaatgcccttttcaacacttttcttgtaataatgacttttggatccatgacagtaataagaagcaat

SEQ ID NO: 769161 - DNA, 563 bp, Homo sapiens
accaagtgtgcctgcctctctatctacctcctctgccccctctgggacagcaagaccaacttctccttctcctcagcctactcagcgcgacgacaacaaggatgaaggactttatagtgatccacttcctcttaatgaataaattttctcttccttacgaatttcttaaactttcttttctctacctcactttattgtaaggatacagtgtataatgcatacaacatgcaaagtatgtgttaatcaactggttaagctatcagtaaggcttctggtcaacagytgactattagtagttaagttttgggggagtcaaaagttatacatgggttttcaactgtgcaaggggttgatatccctaatctccacattgttcaaaggtcaactgtattccagatctgtacatcccctgccatagctggcataaaaagtgaatatagtggctgcagatgagggtacagaattaggtttgagcaaagtagtgaaaggcagtgagaagcacagggaacatctggacttgatcctgtgcgtgatgggggcttgctgagtattaatcacagact

SEQ ID NO: 769162 - DNA, 588 bp, Homo sapiens
ggtcaggagatcgagaccatcctggctaacacagtgaaaccctgtctctactaaaaatagaaaaaattagctgggcatggtggcgggcacctgtagtcccagctactcgggaggctgaggcaggagaatggcgtgaacctgggaggtggaagttgcagtgagcagagatcataccactgcactccagcctgggcaacagagcgagactctgtctcaaaaaaaaaaaragaatactgctttactttctgatgattgtaatgaaaacacagttgaaacatattacaaaacacacaatatattattttcatgaattgggtgtctaaggtcgcattgaaactgatacagtataaactatttgatcaaattttaaacaccaaataaattctatgctgacataaatgataattgctaagtatgctgttaatgggcaagcattttaaaagttgtatcagcttttgatcagtagcataaattttccaagtatggctttgattccatgagtaaatgtgttttcaacttcattgcttcttccaatgaaattgatactaaaagagctgttgaccctgcatcagtggttctcaaacttta

SEQ ID NO: 769163 - DNA, 619 bp, Homo sapiens
aaatcccacttcatcatggtgtatgatccttttactatgctgttaaatctggtttgctaatattttatttaggtcttttgcttctgtgttaattaggaatatattggtctataatttccttttcttacagtgcccttttctggctttaatttcagggtaatggtggcttgtaaaatgagtttgggagtattccctcctcttcaatttgtattaaaaagtttgagaaaaactgatattggttcttcttcaaatgtttggtataattcagccatgaagccatcagtttctgcatttatctttgggagatctttcagtactgattcaatctccttacctattatcagtcttctcagrttttcaatttcatgattcagtcttagtgggttgcatgtttcaaaactaaatttattcatttctcctaggttatccaatttgttgatgtataattgttcattgcaagtctcctatgatcctttgtatttctgcaatatcagttgtaatgtcccctctttcatttctgattttgagtcttctctttttttttaagtccagctaatgacttgtcaattatgtttatctattcaaataaccatctctaaactttttaatgttttattgt

SEQ ID NO: 769164 - DNA, 634 bp, Homo sapiens
aggcttttgtttaaacagccagtagtgtcagtcatggaaaacattgatttgctatcaagacgtctcaaatgagcaatggataagagatagaatttcaaagagggggtctctcagagaatgaagatttcttgatatggtaaagaaaaagagggtgataaaatagattttaaaattctctactattcagtaaaatttactttatttctacttgtatattaggactatatattaacaaccaaaattatagttgagttttgatttgrcccaatttgaacatgtttgtgtttagtgggaattgaacaaagtttgagttattgtgatcactgatacctttttttttttacctcttttaaaattttatttttgttccacatttggaacaagttttttgtatttttctagattgctatgtttttgcttttatgtttgcctttatgttttacaaaagagcttcttatttatccaaattttaaaatcaaaagggaaatgctaacatatgagaagtttaacacaattttattttatctgcctctaccagatatattagtctttggggagactgtttttgatcaaaattgtttttataacattgtattctttttaaaaatataacagctttattgaaacataattc

SEQ ID NO: 769165 - DNA, 635 bp, Homo sapiens
taaaatgttttaaaaaattaagttatagcccgcagaatgacccttgagctttgcaataaatactattattgaaaacaattttattttgaaatgaaaaaagaagaaactgtcttcatagatcatcttcctatgaaatccttttgtataagaaattttctgtgaagtttttataacttcctatgagatcctttgtttcttgtttgcttttctaatactgcaaagaagcagccaagatttttcactgagttatctttctatactttttctactttagcatctaattccatacatgtatttagagggcgttcctcaaaataggtctaattccatttttctgcataattattctaccattttacaaatcttagatatgcattctttattcatttctacaatatgcttttacatggatgccacaaaaacaaatttaaaacatttctagagagtagagcccctaaatgtatactactcactcatctttaaaaatacccarattgttcaaaccaccattttatttttaactgaccacaaacatgcacatgttcttacttttgttaccaaataatcttttggttcatttctagtcattttcgactagatttttagaagtttctttccctcatcttcttccaatt

SEQ ID NO: 769166 - DNA, 606 bp, Homo sapiens
agctacatcagggtttgcgcctgctgattattgtttgatatgattatatttataaaaaacaacatatatgtaaaagatgtttagtccattatgctcctctttttacagagatgtgcttgtaaacattttttagctaatttagctgagccccaggatgtgacatttactaaaaacccaggataaaatacttatggagttaatacatttgtaactagcttgtcacattatgaacaaggagaagaagacagaaagaagataaaaaagagaagattgtgtggtctttcataaataaacacaaaaaattgcactgaaaagacgtagtgacaatcttaatatttacttttgaaaatacctttaatacaactgtcagatactatttgaagtagcgtttttggttacttaaacttttcagattgttttagattaggttaaaktacagtcatgcactgcataacaacattctggtcaatgatggcccatatatacaatgaaatctcataagattataatagagctgaaaaaatgtctattacctaatgtcataggcatcataaagtcataacacagtgcattactcacatgtatgtggtgatgttggtgtaaaca

SEQ ID NO: 769167 - DNA, 578 bp, Homo sapiens
ttagtctgttttactctgctataaagaactgccctggactgggtaatttataaaggaaagaggtttaattgattcacagttcagcatggctggcgaggcctcaggaaagtcacaatcatggtggaagttgaagggagagcaacacaccttattcacaaggtggcaggtaggagaatgaacataggagggacaaacaaacacttataaaaccatcagatcttttgaaaactcactcactatcatgagaacggcatgggagaaacctcccccatgatccaatacctccacctggtctctcccttgacacatggtgattatggggtttttggggattataatttaagatgagatttgggtggggacacaaagcctaamcatatgaaatatgtaaactgtgtaatttaacaaaaaggcaatttatttttatgtaaaggaaagtaaaattagcaataatgatgaagatatcaatacaagtattgtacttaatactccatataaaataaatgataacttctgggagagtcaaacataagttggaaacaaaagacaacctaacaagtaggaaataaattatatga

SEQ ID NO: 769168 - DNA, 619 bp, Homo sapiens
ggctaatttttgtatttttagtagagacggggttgcaccatgttgtctaggctggtctcgaactcctgacctcaggtgatccgcacgcctcggcctcccaaagtgctgggattacaggcgtgagccaatgctcccggccgagaataatttattttttaaagcctaaatatactatcctccaaaagaaaagagatacatgtgtttacattgaaattacatagccatttatcaaaggacaccataaaggaaaaaaaaaagagagaaastatcaactgaaaaagatatttgcaaaatatataactgaaaaatgacaattttatcaaaatgtataataatgcatacaagtaaatgagatagtcacgaaaacacagtagagaaatgaagaaaagacatgaacagaaatctcagaaaagagtaatataaatgggaattatttacataggaagatgctttttagtagtaatttataaagtaataattaagattccaataaaccaatactttataacaaaagagcagcaaaagattagaaatttgacagcaatttatccttgctcctcaaggaagggataggtttgatgtaatcaacctggcatccagtagatcttggggaactgag

SEQ ID NO: 769169 - DNA, 537 bp, Homo sapiens
catttaatattagatcaacttttgaagagaatcatgaactattgttaaaccatgtattattttgctaacctcataaacatcatatgggcagagataatgagtttctatttggtgaactgtgactaaaaatgtacagtgtaggcaccctggtaatctatttataatcaaaacaaagagcaagatctaattttttaaaaaataattaaaatgtaaattactaaatagtgagagcttcttttatttaattatctttccttcttttaaatatcacatatgctgcttagctagcaaagacaaaattagcacagatttatatacatatatagagagacatayacacacacacacacacacatatatggagagagagagagagaggataatgcttggaaaagagataatgacctttgtaaaaaacctagtaaaattaataccaataaattcagactttaaaaactgattgttaaaaaaataggttaataacaaaccacgtgtgtttattttgtgaatagcaaccagaattatttatcagatgta

SEQ ID NO: 769170 - DNA, 533 bp, Homo sapiens
gttatattcaacttattgacttttgattgttcatgctataaggtgtatatattgttttattatattgtttcaagttgggttctgtcctctactttctgactagatttcttttatattactcagtttggcccagatttattcaaattcccaaatccaagttttatatttctccaattttccttactgcattatagtagccccttatgtgatatataaatcagaaaagaatgtctataagtgttcaaaagtttaaaaggctaatattacataggctgctttaattttagaaatacatcaacccaataacgtgtattctcaaagsgtaagcatgtttggaatttcgaataatgatacctaaaattgcaaaggcataataaaattttgacatatatttcaaggaggagtgaactaatcatatatgaccatgggggactttagataaagaaatcctttcagtgaacagagtctgggttcatggagatcaaaagacaatcttgagcaacagatttaaccctgaagcagaggatggagtg

SEQ ID NO: 769171 - DNA, 583 bp, Homo sapiens
aacagaaaaccaaatactgcatgttttcacttataagtgggagctaaacattaaacacacatagacataaacacaagaacaacaaacactgtggactactagagggggaagggaagggggaagacatgggttgaaaaactacctgttgggcactatgctgactacctgagtgcaatatacccatgaaacaaacctgcacatgcaccccctgtgtctaaaataaaagatgaagtttaaaaaaataacatgaaacctcagaagtaatgataaacaagaacagaaacaaaattccatcmtttatgttttgtgttttgctttgctattatgaataagtaatagatgtttatatatatatttaagttaaattcatctaaatttaagcttatttatatttaaattaaattcagctaaattcatctgtattttatttcattttattcaaatttatctaaaattaaaattgttttattttattgataattgctctacaaaacatttttgagataaaacatttctttaaatacaagtacagcattttaaaacacatctttattttatatgccaaaagaaatttactttaaat

SEQ ID NO: 769172 - DNA, 630 bp, Homo sapiens
gtttttaaaattttgactcacttgctgttatatttctttttcttctacattttcaacttaatttcatgaataattttaccctatcatatattttaaaaatagactacgtacataaatagaacttatttctggaatgtggcataaagtacttttgaaataacatgttctgtttttgtaaaattcactattttttcttaacggtttaacatttataatagatataaaagctttatgtatataatacacttaaatttttcctgggaaaaattttataatggatcttaactcaygctttgttaaaatgtttttgaatgctcaattgtaatcagaattatacattttgaaaatgatattctatatcatgatttttggtaaataaatgaagtttaatagtgctgtttgtattataaagagttgtatcacaggtttgaaaagggtaaaattaactatagttcacttctgtgataaaggtatggcttttaaaataacttgggcttagagtaataataaacatttccaacgatatggagacacacttgattagctaaggtcttcagccattgttttacacatcttgtgttttactatacgcattggcttaattcagacatgttaacatcattgattttt

SEQ ID NO: 769173 - DNA, 556 bp, Homo sapiens
cccgttgcttctctgacctcatctcctgccaccccaatcccccagtgggctccagccacactcccttcttgctcttcctcaaatacatcaagctccttcctgcttcaagggctttgtcctttgttgttgcctctcctggggacacttttccctacctcctccatgccagacctccacctgacacctccagctcaggtgtcaccgcctcagggaggcctcccctgactgccatctattgaaactccatcctcagtcattacaacatcctgtgttgatttcctccaggacagccggattttactgttactggttttgtctgtctcaccattaaaatgcaagctctataaggcagggaccttgtctccctctctttttttytccccccctctagaactgtattccctaggaattaaaacagccctggcacagaatcagctctcaataaatcttcctgtaatgcaatgagaacagcaagtgggctttctccctaggcgcacaggggatactgcagttgtcctgagggaatgagttctttttgtttattgttttttttttt

SEQ ID NO: 769174 - DNA, 556 bp, Homo sapiens
cccgttgcttctctgacctcatctcctgccaccccaatcccccagtgggctccagccacactcccttcttgctcttcctcaaatacatcaagctccttcctgcttcaagggctttgtcctttgttgttgcctctcctggggacacttttccctacctcctccatgccagacctccacctgacacctccagctcaggtgtcaccgcctcagggaggcctcccctgactgccatctattgaaactccatcctcagtcattacaacatcctgtgttgatttcctccaggacagccggattttactgttactggttttgtctgtctcaccattaaaatgcaagctctataaggcagggaccttgtctccctctcttttttttyccccccctctagaactgtattccctaggaattaaaacagccctggcacagaatcagctctcaataaatcttcctgtaatgcaatgagaacagcaagtgggctttctccctaggcgcacaggggatactgcagttgtcctgagggaatgagttctttttgtttattgttttttttttt

SEQ ID NO: 769175 - DNA, 557 bp, Homo sapiens
gtatccttcccaacatcctgggtgcccccccaccgagctctggcctccctagtcaccccacttagatcctgtacatagcacagcctgtccccaagcggggaggaggaggagggtgccagaaattcctagggtgtccctgtcttcattgccccccacagcatccaacagagaagagaggagcggccacttcgatcaacagctccccccacaacctcgagttgtgctgcagacggcatcccgtttcctcccccctcacctcccaacacacacacacaacatcggtctctccccacccgaatcctgatgcttggaagaggctggaagggtgttccagaaccttgaggaaggggtgggagcttggggcgaggggtgctgggggcctggatgccctcaaggtccttggcgggggtattaatagcagactcatagctctgacatgggaggggagagcgagaggagagagggagaggaccrgctcgcgatggggggactgatgcagggaggggggtacagggagaaggtgagatagagagatggaggcacagggatatggggca

SEQ ID NO: 769176 - DNA, 629 bp, Homo sapiens
aggaagtggtgtaaccagaatgacacatttgaccatgtcaatctcctgctaaaaccctcccaaggcttctactgccctcgggaatcaggatcacacttcctagtagggcctgcaaggcctcacaggaccgtaaatcccctcggtcactccataccatccagactgtctttaggttggctgggcgcgattgctcatgcctgtaatcccagtagtttggkaggccgagagaagaggattgcttgagcccaggagtttgaaaccagcctgggcaacacagcaagatcccatctctaccaaaaaaaaatacatttatatatataaaaattagccaggcgtggtggtgcacacctgtggtaccagttactcaagaggctgagggaggtggattgcttgaacccaggagattaagtctatagtgagccatgatcacagcttggcactccagcctgggcaacagagaagactctgtcttcaaaacaacaacaacgacaaaccagattggttttagttcctccagccacagagactttgcacatgctgttggaagactctctctacacccttcctgcctccttcccttttcaccattgaagtcttactctctgtcatattctaggtccatcatcact

SEQ ID NO: 769177 - DNA, 629 bp, Homo sapiens
aggaagtggtgtaaccagaatgacacatttgaccatgtcaatctcctgctaaaaccctcccaaggcttctactgccctcgggaatcaggatcacacttcctagtagggcctgcaaggcctcacaggaccgtaaatcccctcggtcactccataccatccagactgtctttaggttggctgggcgcgattgctcatgcctgtaatcccagtagtttggtaggccgagagaagaggattgcttgagcccaggagtttgaaaccagcctgggcaacacagcaagatcccatctctaccaaaaaaaaatacatttatatatataaaaattagccaggcgtggtggtgcacacctgtggtaccagttactcaagaggctgagggaggtggattgcttgaacccaggagattaagtctatagtgagccatgatcacagcttggcactccagcctgggcaacagagaagacyctgtcttcaaaacaacaacaacgacaaaccagattggttttagttcctccagccacagagactttgcacatgctgttggaagactctctctacacccttcctgcctccttcccttttcaccattgaagtcttactctctgtcatattctaggtccatcatcact

SEQ ID NO: 769178 - DNA, 654 bp, Homo sapiens
attcgcagtccgttctcatgaacactttgcaattgcgcctctctgaaaggcaggctgggttggaatcttgccttggaaatttcccttcctttttctttttctttttttttttttttgagatggagtatcactctgtcacccargctggagtgccatggggtgatctcggctcactgcaacctctgcctcttgggttcaagcgtttctcctgcctcagcctcctgagtagctgggattacaggtgcccaccaccacacccggctaatttttgtatttgtagtagagacagggttttgccttgttggccaggctggtctcgaactcctgacctcaggtggtctgcctgccttggcctcccaaagtgctgggattacaggcatgagccaccgtgccgggcccacatgccatttcttgtggcaggctgcatatgctgttcccacagcaggaaaagctcttcccctacactgtcacacatctgcctcctctgtattctcccagcctcagctcattagtcacctcccgagagggaccctccctggccatccttcccccaggactgtcacatcaccccatcttatctccttcctggccactcgcaccagcaattgagctctgtgagggctgggatcctacttcttgttcaccccgtggccc

SEQ ID NO: 769179 - DNA, 654 bp, Homo sapiens
attcgcagtccgttctcatgaacactttgcaattgcgcctctctgaaaggcaggctgggttggaatcttgccttggaaatttcccttcctttttctttttctttttttttttttttgagatggagtatcactctgtcacccaagctggagtgccatggggtgatctcggctcactgcaacctctgcctcttgggttcaagcgtttctcctgcctcagcctcctgagtagctgggattacaggtgcccaccaccacacccggctaatttttgtatttgtagtagagacagggttttgccttgttggccaggctggtctcgaactcctgacctcaggtggtctgcctgccttggcctcccaaagtgctgggattacaggcatgagccaccgtgccgggcccacatgccatttcttgtggcaggctgcatatgctgttcccacagcaggaaaagctcttcccctacactgtcacacatctgcctcctcygtattctcccagcctcagctcattagtcacctcccgagagggaccctccctggccatccttcccccaggactgtcacatcaccccatcttatctccttcctggccactcgcaccagcaattgagctctgtgagggctgggatcctacttcttgttcaccccgtggccc

SEQ ID NO: 769180 - DNA, 622 bp, Homo sapiens
accctccctggccatccttcccccaggactgtcacatcaccccatcttatctccttcctggccactcgcaccagcaattgagctctgtgagggctgggatcctacttcttgttcaccccgtggccctagcacctagcacagttcctgaatgagtgaggaaatgggagttagcatctataaaggggtccccatgtgctcagcacaggccaccatttagggagcastgacaaccatcattcatgagcaggacaggacatcatgggacagggaagaagacatctgccagccccctttcagtccccagctccctgaaagtgccacctggggtgatctgtgatctgcagacacactgaaacctcagagagcaaagccaggtggcaggtgtggctccttggttgtcttggtttgtggaaggaaggtggggggcaccaggacctattcataacaactcatgcttttctagcatttacgacatccaaggcatcgctccttagggtgttaactggcctgagccttaaccccatgaggtaggtactgttgtcattcccattctacagatgaggaaactgaggcccaaaggataagaaacgtgtccagattcccactgaagcacgtagagtcc

SEQ ID NO: 769181 - DNA, 622 bp, Homo sapiens
accctccctggccatccttcccccaggactgtcacatcaccccatcttatctccttcctggccactcgcaccagcaattgagctctgtgagggctgggatcctacttcttgttcaccccgtggccctagcacctagcacagttcctgaatgagtgaggaaatgggagttagcatctataaaggggtccccatgtgctcagcacaggccaccatttagggagcagtgacaaccatcattcatgagcaggacaggacatcatgggacagggaagaagacatctgccagccccctttcagtccccagctccctgaaagtgccacctggggtgatctgtgatctgcagacacactgaaacctcagagagcaaagccaggtggcaggtgtggctccttggttgtcttggtttgtggaaggaaggtggggggcaccaggacctattcataacaamtcatgcttttctagcatttacgacatccaaggcatcgctccttagggtgttaactggcctgagccttaaccccatgaggtaggtactgttgtcattcccattctacagatgaggaaactgaggcccaaaggataagaaacgtgtccagattcccactgaagcacgtagagtcc

SEQ ID NO: 769182 - DNA, 608 bp, Homo sapiens
tccctgcaacctatgccccctgagctgaagcaattctcccacctcggcctcgtgagtagctgggactaccgacgcacacaaccacacctggctaatttttttgtatttttaatagagacagaatttcgccatgttgccaggctggtcttgaactcctgggctcaagtgatccacccgcctcggcctcccaaagtgctgggattacaagcgtgracattcttctttctttgttgattgatgtaccttggcaattgctcaatattcatgcacacatggatctcctcctttttatttatttattaattattattttgtagagacaggctctcactatgttgcccaggctggagtacagtggctatcaacaggcacaatcctcaagccctgcagtctccagctctcaggctccagccatcctcccacctcagcctcctgtgtagctgggactacaggtgtgtgccacctgcccagcttccaggtcctttttaatgagtgcatggtcctccatcatgcagatgcgccataactcctgtgatgtgtcctactgactgaccagattgtttccagctgttcactttgttgctgctacctggcgtcttttttttttt

SEQ ID NO: 769183 - DNA, 637 bp, Homo sapiens
tgatatttaatggaagaatgaagtgcaggagtcatctctttgaattgaggatgggaaaactatgagttaagatagtgcttaacttaaataaatcatttttctttaaagtctgattctcttaaagactgaagcaaaagcaagcccagttaaaatagttttatttcctccagcagagctatttctcagactattgtaaggtttataaaaastattcattagaggtaatgtagtttattaaagcaactcttttctcctctctatttctttacttgatatacattattatggaattatgtttcagattatggaaaatttttgaaaaatatttactttttttagggagtaagttttaccttctatatcaacatagcaatcactcatgagtggatctgaaacatttattgatggttggtgtgagatatacatctttgctaatggaggcaattaatctattaccacagatgggttctcagtaagtatctttcctgcacagacgtgaccttcttctttcttgccacatttaaaacttcatgacctcatttttcaaccaaggatggtcattttttagccacttactgctttaagaaccattctatcatccaccctctctattaggatttatgcatgtcttctggcc

SEQ ID NO: 769184 - DNA, 637 bp, Homo sapiens
tgatatttaatggaagaatgaagtgcaggagtcatctctttgaattgaggatgggaaaactatgagttaagatagtgcttaacttaaataaatcatttttctttaaagtctgattctcttaaagactgaagcaaaagcaagcccagttaaaatagttttatttcctccagcagagctatttctcagactattgtaaggtttataaaaagtattcattagaggtaatgtagtttattaaagcaactcttttctcctctctatttctttacttgatatacattattayggaattatgtttcagattatggaaaatttttgaaaaatatttactttttttagggagtaagttttaccttctatatcaacatagcaatcactcatgagtggatctgaaacatttattgatggttggtgtgagatatacatctttgctaatggaggcaattaatctattaccacagatgggttctcagtaagtatctttcctgcacagacgtgaccttcttctttcttgccacatttaaaacttcatgacctcatttttcaaccaaggatggtcattttttagccacttactgctttaagaaccattctatcatccaccctctctattaggatttatgcatgtcttctggcc

SEQ ID NO: 769185 - DNA, 637 bp, Homo sapiens
tgatatttaatggaagaatgaagtgcaggagtcatctctttgaattgaggatgggaaaactatgagttaagatagtgcttaacttaaataaatcatttttctttaaagtctgattctcttaaagactgaagcaaaagcaagcccagttaaaatagttttatttcctccagcagagctatttctcagactattgtaaggtttataaaaagtattcattagaggtaatgtagtttattaaagcaactcttttctcctctctatttctttacttgatatacattattatggaattatgtttcagattatggaaaatttttgaaaaatatttactttttttagggagtaagttttaccttctatatcaacatagcaatcactcatgagtggatctgaaacatttattgatggttggtgtgagatatacatctttgctaatggaggcaattaatctattaccacagatgggttctcagtaagtatctttcctgcacagacrtgaccttcttctttcttgccacatttaaaacttcatgacctcatttttcaaccaaggatggtcattttttagccacttactgctttaagaaccattctatcatccaccctctctattaggatttatgcatgtcttctggcc

SEQ ID NO: 769186 - DNA, 637 bp, Homo sapiens
tgatatttaatggaagaatgaagtgcaggagtcatctctttgaattgaggatgggaaaactatgagttaagatagtgcttaacttaaataaatcatttttctttaaagtctgattctcttaaagactgaagcaaaagcaagcccagttaaaatagttttatttcctccagcagagctatttctcagactattgtaaggtttataaaaagtattcattagaggtaatgtagtttattaaagcaactcttttctcctctctatttctttacttgatatacattattatggaattatgtttcagattatggaaaatttttgaaaaatatttactttttttagggagtaagttttaccttctatatcaacatagcaatcactcatgagtggatctgaaacatttattgatggttggtgtgagatatacatctttgctaatggaggcaattaatctattaccacagatgggttctcagtaagtatctttcctgcacagacgkgaccttcttctttcttgccacatttaaaacttcatgacctcatttttcaaccaaggatggtcattttttagccacttactgctttaagaaccattctatcatccaccctctctattaggatttatgcatgtcttctggcc

SEQ ID NO: 769187 - DNA, 634 bp, Homo sapiens
actcaccgcgaaggtctgcagcttcactcctaaagccagggagaccacgaacccaccagaaggaagaaactccggacacatctgaacatctgaaggaacaaactccggacacaccatctttaagaattgtaacactcacactcaccaccagggtccctggcttcattcttgaagtcagggagacaagaacccaccaattcaggacacagtgatacaagttagtagtgatacatgatagtagtgatacatgttacaatgtggaagaacttcaaagatatgctcatgaaataagccagacataaaagattacatattgtatcactcaattgatatgaagtttctagaaaaggcccatgcatrgagactgaaaacacatgagtgtttgccttaaggctgggcattgagtggttgccttagggctgaggttgacagaaagaaacaaaaaaaattttttgagctggtggaaatgttttaaatgtttagttatggttgtgtaagtctatgagcctcctaaaaataactgaaatatttacttaaaatagttaaattttatgatagtaaataaaactgttaaaatatgtaggaaagtataaataaacctgtcacctcaataaaactgttttaaaaagaaaag

SEQ ID NO: 769188 - DNA, 558 bp, Homo sapiens
tttgcagctgcctggaaatgaatatcattcctttcttttcagcaatggtgggtagttatgtaaaccaccttgactttagaacagaatgaattttagagtaagtaatacttcactcaatcttctttgtttaatcaaaagaattattttggttactttagttcatacttaatttgtgttactttatggatactacaggcagggcattgtcatttaattatgacatgcaaagctttactatttgagattactgaattgactggttgattaaaattatatgtcaatatttacatctatacatttatgtctacatgcatgcaaacatgtaataatagtgattataaaatatctactaagtgccaggcaagacaggcaaaccaggtcattgtcttcaagggttttagaatctatgtaytcagtatgtgcctacttgtctctagattgcgttttcacagaaacttccacactttttttttaactaggatagaagtggatgctcacctagatattgaaggagagtcctagaactaacattttagcatagagaatagcccagtagaa

SEQ ID NO: 769189 - DNA, 642 bp, Homo sapiens
tgctcctaaaacagaagcttatttgatactatgataactgtgatatttcttgacatctgaaaattttataaaatttcagtttctgtaataaagttttattggaacatagtcccaatcattcattatatattgtccttaaatgctttcacactacaatggcagagttgagtagctgcaacaraaactatatgcccacaaggcctaaaatgtttactatcctgttctttacattaaagtttgctgattcctgctctgtgccattttttcatacccatcctctgcaccacataaaggatttcagccaaaacctttctgtaaatagtctcagggtagtttaatacacatattcagatttcagaatcccagtttagccttctgaaggtaggatctcctacatttgtgtgtgtgtttgtgtgtgtgtgtgtgtgtgtgtgtgtgtgtgtgtagacagaaaagtttctggaacatggctttgtggattttacagacttcttttggctttacagtatactctgatttttctgtaataaacttgtaattattttatgctaagaagctaaattggagactgaaggtcaggagcagaagcgggctcttagttcatcaggatcctataatatcagccatgatgtaaagttttta

SEQ ID NO: 769190 - DNA, 572 bp, Homo sapiens
gaacttttccagagtttttaaaactcagaagatacaatgactaaatgcaaaaataatcctggatttttttgtcgtaaagaatattaatttgcggccgggcgcagtggctcacgcctgtaatcccagcactttgggaggccgaggtgggcggatcaccaggtcaggagatcgagactatcctggctaacgtggtgaaaccccgtctctactaaaaatccaaaaaaaaaaaaaaaaagaaaaaaaaaaattagcggggcgtggtggcgggcgcctrtggtcccagctactctactggggctgaggcaggagaatggcgtgaacccagggggcggagcttgcagtgagccgagactgcgccactgcactccagcttgggcagacagagcgagactccgtcaaaaaaaaaaagtatatatatttatgtgtatatatacatatatatacacatatatatgtatatatataaatttgcaaaagctgaataaaatccggagattagataatagtgttgtgtcagtgttaatctactggttttgatgactgaagtctggttatgtaagtgaatgtttgta

SEQ ID NO: 769191 - DNA, 591 bp, Homo sapiens
cctctccctctcccctttgcacagtctccctctgatgcccagccgaggctggactgtattgcagctatctcgactcactgcaaactccctgcctgattctcctgcctcagcctgccgaatgcctgggattgcaggcgtgcgcctccacgcctgactggttttcatattttttggtggagacagggtttcgccgtgttggccgggctggtctccagctcctgaccgcgagtgatctgccagcctcagcctcccgaggtgccaggattgcagagggagtctcgctcactcagtgttcaatgttgcccaggctggagtgcagtggcgtgatctcggctcgctacaacctccacctcccagccgcctgccttggcctcccaaagtgccgagattgcagcctctgcccggccrccaccctgtctagaaagtgaggagtgtctctgcctggccgcccatcgtctgggatgtgaggagcccctctgcctggccacccagtctgggaagtgaggagcgcctcttcccagcagtcatcccgtctaggaagtgaggagcgtctctgcccagccgcccatcgtctgggatgtggggagcacc

SEQ ID NO: 769192 - DNA, 634 bp, Homo sapiens
tattcttcagtaaatgagttggataaacagtggcctattcacaccatggaaccttattcagcaataaaaataaatgagctatcaagtcattaaaaggcatagcttaccatggctcatgcctgtaaactcagcactgtgggaggccaaggcgggtggatcacctgaactctggagtttgagacaagcctggccaacatgatgaaaccctgtctccactaaaaatacaaaaattagctgggmgtggtggtggatgcctataatcccagctactcaggaggctggggccagagaatcacttgaacccaggaggtagaggttgcagtgagccgagatggcaccattgcactccagcctgggtgacaagagcgaaactctgtctcaaaaaaaaaaaaaaaaaaaggcataggagaggcttaaatatatattgctaagtgaaagaagccaatccgaaaatgctacactggatgataccagctatatgacattcactataggacattctagaaaaggttaaactatgaagataataaaaatatcaatggttgccaggtgttcagagtgaggaagggagggatgaataagaggaaaaaaggagatttttaggggagtaagactattcttgatgacaatgtaa

SEQ ID NO: 769193 - DNA, 601 bp, Homo sapiens
gtgacattcaatgtttatggattggaaatctaatattgctaaaatggcaatactttccaaattgattcacagattcaatataattcctattaaaatcctggtttgcttatttgaagaaactgatgaattcattaaaaaatttatatggatatctaaagaccmagaagagccaagccaatcttcaaatgtgctaaaatataaaacttttagacgaaacataagcatatctatcaaagaagaaatatgaacagcaattaagagaaaaatttaaagaaagcactctaaactatcaagcacttttttaaattttatttcagatatggaggaaaacattaaactacataaaatcctacaaaacacagcaaaaaaatgaaaattacacagttgaactcataggattaataaactagcactagtgttaaagtagcatattataacattgatacataagcaaaaactgtgggtctaacttgcaagtttatgtggaaaaaatagaacacacccaaattaactttattctttattccaacattttacataggaatttcaattaccagcaagataccccaactccaggcttttgaggaagcctaaaaggttg

SEQ ID NO: 769194 - DNA, 601 bp, Homo sapiens
gtgacattcaatgtttatggattggaaatctaatattgctaaaatggcaatactttccaaattgattcacagattcaatataattcctattaaaatcctggtttgcttatttgaagaaactgatgaattcattaaaaaatttatatggatatctaaagaccaagaagagccaagccaatcttcaaatgtgctaaaatataaaacttttagacgaaacataagcatatctatcaaagaagaaatatgaacagcaattaagagaaaaatttaaagaaagcactctaaactatcaagcacttttttaaattttatttcagatatggaggaaaacattaaactacataaaatcctacaaaacacagcaaaaaaatgaaaattacacagttgaactcataggattaataaactagcactagtgttaaagtagcatattataacattgatacataagcaaaaactgtrggtctaacttgcaagtttatgtggaaaaaatagaacacacccaaattaactttattctttattccaacattttacataggaatttcaattaccagcaagataccccaactccaggcttttgaggaagcctaaaaggttg

SEQ ID NO: 769195 - DNA, 571 bp, Homo sapiens
aaaatcaatatgatgtaatataaaggctcacattggggtataaagaaagccagttctttcggggagagcttttgagccttcccttatggtctgtctctcacatgacaccaaatatccaagccagttcttcatagctgtcagtggagacagttggctgcttttctgagtggcatcttactttataagcaggatacagtccagttatgrtgacccctggtcttttcatcttgatcctcctagcatgaaacatgactttatcaatgagctagagcaagggcaattgaagttctattatttcctgcccatagaaactttttcctttgacagggactgcatagtgaaatggaaaccctggcctcttgatcacactttcctggagtttagtcccctctgcaatatgtacctgggagtcataagaaatgccagttacaaaaacttcctgtacagatatcctagcactcaactggaaaccggggagagtcacaattctgtctttccagccatatgtaactgaaatggagatcttttcaccctgagccaggggtgatgggaaagggagctggtcatggct

SEQ ID NO: 769196 - DNA, 571 bp, Homo sapiens
aaaatcaatatgatgtaatataaaggctcacattggggtataaagaaagccagttctttcggggagagcttttgagccttcccttatggtctgtctctcacatgacaccaaatatccaagccagttcttcatagctgtcagtggagacagttggctgcttttctgagtggcatcttactttataagcaggatacagtccagttatggtgacccctggtcttttcatcttgatcctcctagcatgaaacatgactttatcaatgagctagagcaagggcaattgaagttctaktatttcctgcccatagaaactttttcctttgacagggactgcatagtgaaatggaaaccctggcctcttgatcacactttcctggagtttagtcccctctgcaatatgtacctgggagtcataagaaatgccagttacaaaaacttcctgtacagatatcctagcactcaactggaaaccggggagagtcacaattctgtctttccagccatatgtaactgaaatggagatcttttcaccctgagccaggggtgatgggaaagggagctggtcatggct

SEQ ID NO: 769197 - DNA, 600 bp, Homo sapiens
ccaaaacacatccagcatacaattgtggaacaagaataggatgccaactacagacattgcaggtcaaaaggtaagaaatacaaggtaaaggaagggtcactggtccatgacaggtttgaaatacagctgtgctaactctacctgtatttccttgattagatttcagttcttaggaaaaatattgttcatggctttcagctatgttctttacatttttagttccagtcatcaaatagtccttccttttttataaaatttagcacatgtttatatcttagttttatcagtcacattccttccaatctgtagagtttttggtgtctggaaatgtcctttaattaygtatactctctttccttttggtccaagctagtggtgtttgtactgaactgaatttctaaggaagtctatgagtcctccatagacttccctggaatttactccattagacaaaatgttatggccgcagatcattctgagataatttttctgtaccttggcctattgctgggatagctgagggacaccacccttaaattacctacagactctctaatttgattaagacgatctgtaagtcacacccttaatgttttgaaa

SEQ ID NO: 769198 - DNA, 580 bp, Homo sapiens
tataacaaatctgaatacctcttccttcttgaaattcttcttttgtttgtcttccataatcatttgcttcccactttttccatggacaaatgctaaaactctaatgtttatcacagaataaagtgtgctcttggtgacaaaatatgaacctcaaactwtatttccactattatttgtcccctgagttacaaatcagtatacgtaaatggctattagatattatcatgtaatagttctataggcatttcacattccaagctaacctaattccttcttggatccctactgcattgattgtaccatctacacaataccttctttacaaccctccccctttttcaattgcttgtatatcaccaagttctttcttctgcctctatccatcactgctctcaatgaagtatgaaaagacacagtcatcactcgcctaaataactactagaccttcacaactggtctgcctgtaatcagataaaaactcttctaatttgtcctcctcactacacccagggtaatattttaaaataatcacattttggccttgcgtgttggctcacacttgtaatctcagcactttggg

SEQ ID NO: 769199 - DNA, 565 bp, Homo sapiens
tcctcactacacccagggtaatattttaaaataatcacattttggccttgcgtgttggctcacacttgtaatctcagcactttgggaagccaaggcgggcggatcacctgaggtcaggagtttgagaccagcccggccaacatggtaaaagtacatctctactaaaaatacaaaaattaaccgggcatggtggcaggtacctgtaattccagctactcaggaggctgaggcagaagaaccacttgaacccagaagatggaggttgcaatgagccaagattgcaccactgcactccagcctggaaacagagcgagactctctctcaataaataaataaataataaataaataaaatcataacattttaactctttgaagaaaacttttatgtttgttgttcagaawatttaaaatattttattgtgaaataattttaaatttacggagattttgcaaagaaattgtgaaattttccatatactgttttctccaagattttaacatctgtgcctgagttgctttatcattctctttctctttcctcctccatattatttgttatgaa

SEQ ID NO: 769200 - DNA, 643 bp, Homo sapiens
cttcatgacctgatctaagccattatgattatattgagccatgccttgcaaaaattaatgttgaaaaatgagatcatttatgagatgaaactacgatgtagctttgaaaatataaagcaattttataagttcagtatagtttttaaaaagtaatcttacactcaagagatctgaatctttctaattgtaaagtgagtaaaggagcaaaaataaaacatgttcacattcttttgaagaaacctccacaatagaccactgtatgtaatgattccttagccaaaggcaaatttcttcgaatttcttcctttggcctctacaatatacataacacatacacattgccagattttaaaaaaattagaaaggattaaaggaattaaataattaagttatttaaatatataaatatagcaacaaaggctatcatatcattawaaactgaatattataaaatgaatattaaaagttaacacagttcctttttattttaaagtcacaagacacatacctagataacatgtgcatcaaaagaaattcaagatgaaatttataactctcaaaagtaatgaaaaccatgatggtttatgataaaactattggtaaaagccaaatttcactcagtttataaactaaagtgtcttca

SEQ ID NO: 769201 - DNA, 637 bp, Homo sapiens
tgggtcctgtagcccctttgttttgaccaacttctcccatttgggatgggtgtatttaccaaatgcctgtaccctcattgtatctagaaagtaactaacttgcttttgattttgcaagctcataggaagaagggacttgctctgtctcagatgaaattttggatttggacttctgagttaatgctggaatgagttaagacgttgggggagtgttagaagggtgtaattatmttttgaaatgtgaggacatgagatttgggcatgtccagggcagaattatatggtttggctgtgtccccacccaaatctcacctggaactgtagttcccattttctccacattttgtgggaggaccagattgaaataattgaatcatggaggcagtttcccccattctgttctcatgatagtaagttctcacgagatctgatggttttataaggggcttcccccttcactgggcactcattcttctctctcctgccaccatgtgaagaaggacatgtttgcttccctttctgccatgagtgtaagtttcctgaggcttcctcagccatgctgaactctgagtcaattaaacctttcctttataaattatccagtctctggtatgtcgttattgaaagtgtgagaaca

SEQ ID NO: 769202 - DNA, 653 bp, Homo sapiens
tactcaaaaatggttttgcacaagtttgtcaccaagtagtaatcatagtacagaagatggtggaattctcaacaagaagaaagctaacgctgtcaggcaatgtgttggcagaattggtgaaaatctatcattaaattaaataycattgactttatatcgagaaatgttgccatgcacatccttaactcattaaacaatgcagtgttggaaagaagagaaaataatatatccctttcctattgtcaccctcattacagagaaaaacttagagatgttatttatcagaaaaataagcaattattttctatgatgaaattggctgtttttgaaatcattctgtaagtgaaatgtgaagagagggtctcatacaattctttggaataatgttatatggagagctatatatttttaaatatatcattgtgtcaaaagattagcatggagtattgaaactattgtgatctcacatgattatcataggaatataatgaaaaaaatagtgaagacctgggagaattgaccagcaactaaggaggaaaacagcagagcaaatagaagcgtatatacccataatacaattttaataattgcaaatgtattttttaaataagaaattaaaaaaacacatcaggacaatgaaggtcttgtagaag

SEQ ID NO: 769203 - DNA, 573 bp, Homo sapiens
cttctgatcttgggctttttttttttattgttgataggctttttattactgattcaattttggaacttattattgacctgttcagggattcaattttttactggtccattcttggaagattgtatgtgtccaggaatttatccatttcttctaagttttctagtttgtgtgtttagaggtgttcatagtagtgtctgatgctttttgtatttctgtaggatgaatggtaatgtcccctttatcatttctaattgtgtttatttgtatcttccctcttgttttcttcatcagtctacccagcagtctattgatcttactaattttttcaaacacccaattcctggattcattgatcttttctgtggtttttcatatatcaatttgcttcagttcagctctgactttagtgatttcttatattctgctarcttttgcattggtttgctcttgcttctctagttcttctagttgtgatgttaggttgccaatttgagatctttctaaccgattgatgtgggcatttagtgctataaacttctctcttaacactgacttagctgtgtccaagagatt

SEQ ID NO: 769204 - DNA, 648 bp, Homo sapiens
acagaaagataaaatgctataagccttatggtccacacagcatttcaccaacacatgaagatctaaaattactgaaaacagcatgagtaaaatatataaagacagtagtgatgggtgatttataggctgccctcttagaaatgtgcacgcatgtgcgcacgcgcacacacacacacacaaaaatgcatataaattgtgtactattcaaaaaataatggagatttttttcctttttttagaagaagaataaaagaaacaaagaaatgatggactttaatcctacctgagatctgtttctccatactcatcctgctgagcacaggtataacccttggaaatgatgcaggaggcattaagaagaactctgaaaggcagtgagaaaamtacaaattggttaggatcccaagacagaagaaacaacacaatggcagggtatcttacctctcccacccagcaaaagaaggacactcagattgatagagtctaagtacaactcagcaacagcatgtggcccaggtaagcacattcctcccttggacaactcaggagagtctgacaccaatgtaagagatcagtagggaacttatgccaaaaataagtggccaggagagatactttatttagcctctgggcctgagactctcttct

SEQ ID NO: 769205 - DNA, 617 bp, Homo sapiens
aggttctagggggacatctgtttccttgcctttgcagcttctggaagccacccgcattcctcggcttattccttcctccatcgtcaaagcaagctatgattgtttgagtcttcctccattctcacatcacaccattctgcactccttttctgccatcttctacttttaagtactttgtgattacattgcccccacccccgagatgatccaggataagctccctattttaaggtcatcttacttatgaacttaattctatctgtaacacattcacaggatccaaggataggatgtgtacatctttgaggagcaataattctgcttaccacaatacaagtggtcttcaaaaagttcatggaaaatgtgtattatgaaaaaactatacatgawttttttttttgcactaaaataaactcctactaatttgttatagcatgtctgaacaggatctagtttgaggcactaaggaggataagacatcagtttgaaaagagcccctatcagagaaacataagtttgctaaaattgaaacaagaatgacattaaatttatggtgaagcttgggtggcagattggtgaaatcattgatgccctacaaaaagtttatagggacaatg

SEQ ID NO: 769206 - DNA, 608 bp, Homo sapiens
ctggatccagcccttactagctaaatgattttatgtgaggtactccccctccgattcctttgttgcccttccaaaacaccctgccttgcacttagaactttacactgctattgctagtttgtaattatcctcaagtagactaagagctccttaactggcaggcaccatatcaggcttactcacaggcttattctcagtgcctaatatagtgtatggaacacaacagtggctcaacaagcatatgtgggtgaaaaccgaatcactacctcaaaggactgttgtggttatgtgtaaagaacctggtacagtaggccatgatttgagcccttaattaatctcattttccttaatctcacccaatgtctcccctgatcaccacctgagttctgatggaattatggccatccttgactgtagcccaccagatacaacgcatsaacccctctgtctagagaataggatcagcctatctctcatcccacttttagcattggtagaaggctttcttcaagaggaagaaccatcctgactgagccaagatgctgctctctaaccagtctgttctttcccatgccccatccaacagccaaggctactttgagtcaatg

SEQ ID NO: 769207 - DNA, 653 bp, Homo sapiens
gattgttatggagcctgcttctgacatatttattggtttcttggagaagcagtgagttgtccactttacctgacacagttttcagagggaaaaccattcattcattcctttgttcattctagttatttcatttatccattcatgagatgtttattgagcacctactatttgtcaggcactgttttgaatgttggggattcaacackaaaaagaaaaaaaatagtagtcttttgccttctacgttatggacataaagaatgctgtatgccattttttttaatgtttaaggacttgacaagatacttatgatctaagtggaaaagcagaatggaagtcagaattttcagttgtgtgtgtgtgtgtatgtgtgtgtgtttggagatgagtagaaacattatttattggagggaattatcccaaatattaaatatgtatatctctataccttttttttatattaagcatgcattttgttttcatccttgtatttaaatttttcaaattttccacaattaatattcattgcttagcaacaaaagaaataacctagacagttactggagccaaccaacatgatgagtggagtgtttttaggaggttagccatggtacatacacatctttgtgtaaaacagtgatttatttgaattctta

SEQ ID NO: 769208 - DNA, 653 bp, Homo sapiens
gattgttatggagcctgcttctgacatatttattggtttcttggagaagcagtgagttgtccactttacctgacacagttttcagagggaaaaccattcattcattcctttgttcattctagttatttcatttatccattcatgagatgtttattgagcacctactatttgtcaggcactgttttgaatgttggggattcaacacgaaaaagaaaaaaaatagtagtcttttgccttctacgttatggacataaagaatgctgtatgccattttttttaatgtttaaggacttgacaagatacttatgatctaagtggaaaagcagaatggaagtcagaattttcagttgtgtgtgtgtgtgtatgtgtgtgtgtttggagatgagtagaaacattatttattggagggaawtatcccaaatattaaatatgtatatctctataccttttttttatattaagcatgcattttgttttcatccttgtatttaaatttttcaaattttccacaattaatattcattgcttagcaacaaaagaaataacctagacagttactggagccaaccaacatgatgagtggagtgtttttaggaggttagccatggtacatacacatctttgtgtaaaacagtgatttatttgaattctta

SEQ ID NO: 769209 - DNA, 634 bp, Homo sapiens
gaggcctcacagtcatgatggaaggtggaaggcacatctcacatggcagccaacaagatggcttgtgcagggaaacccccgtttttaaaaccatcatatctcatgagactcattcactatcaagagaacagctcatgaaagacccgccccccayaattcaatcacctcccaccaggttcctcccatgacacatgggaattgtgggagttacaattcaagatgagatttgggtggggacacagccaaactgaatcatatattaaacgaaaacccctccaccataatctgaatcttgttttagatgattatattcttttcttggtacatgatatgtaaaatctgtattactaggacaatttggctgatttgcttcactaacattgggagggattgaatgctaaaggtctagtaaaatctggatccttctggttatgggcaaagatttgcaagcaaactcacctggagaagagaggagaccttttgggggcaaacatctccaagtaataaggtcacaggggcaggatgaggaagcggtttatctatctttctaatatgaactttgtccatggagaatagcagaaaatgccacccaaaaaagaacactttggcataaggattattttgagctaaagga

SEQ ID NO: 769210 - DNA, 634 bp, Homo sapiens
gaggcctcacagtcatgatggaaggtggaaggcacatctcacatggcagccaacaagatggcttgtgcagggaaacccccgtttttaaaaccatcatatctcatgagactcattcactatcaagagaacagctcatgaaagacccgccccccataattcaatcacctcccaccaggttcctcccatgacacatgggaattgtgggagttacaattcaagatgagatttgggtggggacacagccaaactgaatcatatattaaacgaaaacccctccaccataatctgaatcttgttttagatgattatattcttttcttggtacatgatatgtaaaatctgtattactaggacaatttggctgatttgcttcactaacattgggagggattgaatgctaaaggtctagtaaaatctkgatccttctggttatgggcaaagatttgcaagcaaactcacctggagaagagaggagaccttttgggggcaaacatctccaagtaataaggtcacaggggcaggatgaggaagcggtttatctatctttctaatatgaactttgtccatggagaatagcagaaaatgccacccaaaaaagaacactttggcataaggattattttgagctaaagga

SEQ ID NO: 769211 - DNA, 563 bp, Homo sapiens
aggccagagcaaactacaataatctgattcaggtcaaagtgtataatacatttaggagaaaaaggattcttttaattagatgggagagaaagcagattagtggttacgctgcatccgttcttgcccttctcagattcattcttctcccctctgcagctggcacatcatcttgaartgcatacctgatcatgctactcccgtgccaaccctgtcctctgtttaaaaatctatctgtggcttcccataggataaagccacaaatccttaacctggcaaaccctcattatcacagatttcacagtaaagaatgcaaggttaccaaaaataagaactgctgggccagctgattctacacggtgacgacatttccatttctccccacctattctgaagccttcctctctcatacatggtttatgctccaatcccaccaaatcacacctggatcatgtactccacaaaccctgtgctcctgggtgtgctttcagtgcctggcaccacacagcaacacacacacagagatacacactcactcctgtgcccataaaagtcccatagacgct

SEQ ID NO: 769212 - DNA, 643 bp, Homo sapiens
ttttttttctttttttaattatactttaagttttagggtacatgtgcacaacgtgcaggttagttacatatgtatacatgtgccatgttggtgtgctgcacccattaactcgtcatttaacatcaggtatatctcctaatgctgtccctccycactcccaagcaaaaaatttttaaaagaccctcagtaccaaggaatttaactctgtgctctgaatggatcagcatatcagcctcctgagcctgaaacttccgccttatagctcaagtatctcacagtgggatccacttaaggcttaggattccttaggttctgaaatcacaactatacactgttaatatcaggacaccacaggattagcatatacaatgtgcattgatctgtaccctgaatctcaggcttaggaaagggtttcaggatttccaaaatgaggaaaccccaaatataaaagtatgttatttgctataaattatagcaatgccttgcctgttgccattgtgttcaaacttcctatccattatcaggctgagataagagcagtgaagtaaactatttcatcagtaacaccagtaaaaactggtgtctttcattttactttaaaagatgagagtacagacagataatctctgtcagactttattaa

SEQ ID NO: 769213 - DNA, 607 bp, Homo sapiens
tttaaaaaaatgcccaagctaattaagaaatacatttcaataaaatgttactttttatatttattcaaattgggatatttgttattttgatcagctgaacactaattatagttgtaatcatacaaaaaattcctatgttagcatttaggagattaygatcacaggatatacacaaaatttaaatacagttgtctgttggtatatacctgggattggttccaggacccccggtataccaaaatcctctcatacacaagttctgcagctagtcctgcagaacctgcttacagtaaaagtcagctgtccttgggtttcatatacagcatatactatatttttgatcctcatttggttgaaaaaaatctatgtatgagtacaattcaaacctgtgttgttcaagggacaacggtatacacatattttttgctgcaggaaaggataaccaataaggcttatgcctaaaaccgtactatatagaattcttgttagtcagggtttctcaacagcacactattgagatgttgagtgggttaatttcttgttgttgggggttgtcttttgcaatgtaggatattttgcagcatccttggcatgttcccactagaca

SEQ ID NO: 769214 - DNA, 607 bp, Homo sapiens
tttaaaaaaatgcccaagctaattaagaaatacatttcaataaaatgttactttttatatttattcaaattgggatatttgttattttgatcagctgaacactaattatagttgtaatcatacaaaaaattcctatgttagcatttaggagattatgatcacaggatatacacaaaatttaaatacagttgtctgttggtatatacctgggattggttccaggacccccggtataccaaaatcctctcatacacaagttctgcagctagtcctgcagaacctgcttacagtaaaagtcagctgtccttgggtttcatatacagcatatactatatttttgatcctcattyggttgaaaaaaatctatgtatgagtacaattcaaacctgtgttgttcaagggacaacggtatacacatattttttgctgcaggaaaggataaccaataaggcttatgcctaaaaccgtactatatagaattcttgttagtcagggtttctcaacagcacactattgagatgttgagtgggttaatttcttgttgttgggggttgtcttttgcaatgtaggatattttgcagcatccttggcatgttcccactagaca

SEQ ID NO: 769215 - DNA, 607 bp, Homo sapiens
tttaaaaaaatgcccaagctaattaagaaatacatttcaataaaatgttactttttatatttattcaaattgggatatttgttattttgatcagctgaacactaattatagttgtaatcatacaaaaaattcctatgttagcatttaggagattatgatcacaggatatacacaaaatttaaatacagttgtctgttggtatatacctgggattggttccaggacccccggtataccaaaatcctctcatacacaagttctgcagctagtcctgcagaacctgcttacagtaaaagtcagctgtccttgggtttcatatacagcatatactatatttttgatcctcatttggttgaaaaaaatctatgtatragtacaattcaaacctgtgttgttcaagggacaacggtatacacatattttttgctgcaggaaaggataaccaataaggcttatgcctaaaaccgtactatatagaattcttgttagtcagggtttctcaacagcacactattgagatgttgagtgggttaatttcttgttgttgggggttgtcttttgcaatgtaggatattttgcagcatccttggcatgttcccactagaca

SEQ ID NO: 769216 - DNA, 618 bp, Homo sapiens
agtcagggtttctcaacagcacactattgagatgttgagtgggttaatttcttgttgttgggggttgtcttttgcaatgtaggatattttgcagcatccttggcatgttcccactagacaacagtagtaccccactccctagtttatgaaatcaaaaatgtctccakacattgccaactggcccctgggaggcaacagtcccttgctgagaaccactgcagtagagaatagaatagtaatacaatgtaaaactttgactatcaaaatggatgttagtatcaaactactatggtatttaattccatctgataatatttaaaacagtgatagttactgtaaaatgacattttacaatgcactggaaattacattatttgccattacttaaaataatggtcaagaactttaaatgatccactggttgaaagcatcctgtagtttataggaaaggtgagtaatgcacattaaccttcacttagagtttttttttttggaaacggagtttttgctctgtcgccaaggctggagtgcagtggcgccatctcggctcactgcagcctccgcttcctgggttcaagcaattctccagcctcagcctcccgagtaggtgggactaca

SEQ ID NO: 769217 - DNA, 618 bp, Homo sapiens
agtcagggtttctcaacagcacactattgagatgttgagtgggttaatttcttgttgttgggggttgtcttttgcaatgtaggatattttgcagcatccttggcatgttcccactagacaacagtagtaccccactccctagtttatgaaatcaaaaatgtctccagacattgccaactggcccctgggaggcaacagtcccttgctgagaaccactgcagtagagaatagaatagtaatacaatgtaaaactttgactatcaaaatggatgttagtatcaaactactatggtatttaattccatctgataayatttaaaacagtgatagttactgtaaaatgacattttacaatgcactggaaattacattatttgccattacttaaaataatggtcaagaactttaaatgatccactggttgaaagcatcctgtagtttataggaaaggtgagtaatgcacattaaccttcacttagagtttttttttttggaaacggagtttttgctctgtcgccaaggctggagtgcagtggcgccatctcggctcactgcagcctccgcttcctgggttcaagcaattctccagcctcagcctcccgagtaggtgggactaca

SEQ ID NO: 769218 - DNA, 668 bp, Homo sapiens
aatggtattgggaaatctagatatccacatgtaaaagaatgacattggacccttatctgctatcatatacaaaaatcaactcaaaatgtattaaagtctgtaagacctgaaactgcaaaactagaagaaaagataggggaaaatcttcttggcactgctcttgacaattttttggttatgttaccaaaagcacaagcaaccaaagcaaaaatagaccagtgggattgcaacaaactgaaaatcttttgtagagcaaaggaagcaatcaagtgaaaagtcaagccacagaatgaaggaacgtatttgcaaaccatgtatctgataaagggttaatatccaaaatatgcaaaagactcaactaaatagcaaaagaacaaataatccarttaaaaaatggacaaaggattggagtaaacatttctaagaagacatacaaatgaccgacagatattttaaaaggagctaaacattgctaatcatcaggaatacgcacaactaaaaccaccgttagatatcacattatattttgtagaattactatcatcaaaaatacaaaaataattgtttattagaatgtggggaaaagggaatgcttgtacactgttgataggaatgtaaattggtacagccattatgaaaaatactataaagtttcctcaaagtttaaa

SEQ ID NO: 769219 - DNA, 668 bp, Homo sapiens
aatggtattgggaaatctagatatccacatgtaaaagaatgacattggacccttatctgctatcatatacaaaaatcaactcaaaatgtattaaagtctgtaagacctgaaactgcaaaactagaagaaaagataggggaaaatcttcttggcactgctcttgacaattttttggttatgttaccaaaagcacaagcaaccaaagcaaaaatagaccagtgggattgcaacaaactgaaaatcttttgtagagcaaaggaagcaatcaagtgaaaagtcaagccacagaatgaaggaacgtatttgcaaaccatgtatctgataaagggttaatatccaaaatatgcaaaagactcaactaaatagcaaaagaacaaataatccaattaaaaaatggacaaaggattggagtaaacatttctaagaagacatacaaatgaccracagatattttaaaaggagctaaacattgctaatcatcaggaatacgcacaactaaaaccaccgttagatatcacattatattttgtagaattactatcatcaaaaatacaaaaataattgtttattagaatgtggggaaaagggaatgcttgtacactgttgataggaatgtaaattggtacagccattatgaaaaatactataaagtttcctcaaagtttaaa

SEQ ID NO: 769220 - DNA, 586 bp, Homo sapiens
aaccttatcaggaaaatagggaatgtgtgatcattcaatagttactacatgttacatcctcaaaactcactaacacatcctccatactcaaaggctagctactactttagccagctaaagcattgagggtgctctctctttcaatgtttaattaacgatctttcccacccccactagattaagttgcttgaggatagaaactaggttttcttcatctttaaatactcaaggctggctgggtgtggtgtcagacgcctgtaatcccaacaggcaggtggattgcttgagctagctcaggagttcaagaccagcctgaggaacatggtgaaagcccatctttacaaaaaaaaaaaaaaaaaatcaaaagtttcaagccaggcatggtggttcatgcctgtaatctctgtaatcttagcatattgggaggccgaggcaggargatcacttgagcccaggagttcaagaccaccctgggcaacacaggagaatattagccaggtgtggttgtggtatgcctgtgatcctagctacttgggaggctgaagtgggaggatcacttatgcccaggaggtcatggctgcagtga

SEQ ID NO: 769221 - DNA, 532 bp, Homo sapiens
atattggtgaaggaaaaaataactttttttctcgtactaaatgaatccgcctattgagacccatttgaagagaaagagtgaaaaacatgagagagaagagagagaagaaaaaaagagtaaaaggtatttgatggagggaaagaagaatgagagggggtagaggaagaagaaatggaaagagcaaaagggcagagaaagaaagaaaaagtgtgtgtgtgtttgtgtgtgtgctgcacgcacgcatgtgcagagtgggtctgaaagagggacagaggaagaggaaaaagagaaagataataggaatcatcaactagattctctagcagytctcacttgcttaaaattagtggaaacaaatgatggtcttctccctagagttctctcaagttattttcccttgaacacaagataaaatgtcaacattctacttggaaatttagtacttaagactgtatatactgttacttgggctccacttattcataaagatttcagcattttagaataaaaataattttatttaaaagtgctg

SEQ ID NO: 769222 - DNA, 478 bp, Homo sapiens
catcgtgggagtaggagtggagccagctttaggatgaagctgacgcagacagatggaagaacccaggtttttgggatatccttgagacattggatgaagcctcatctaaagtacctttatctctgggtttttcagttatgtgagcagataaattttctttattgtattgtttactttcaatctgggtgtaacttaaatattttccttccagtaaatggcttgtgttgccattaagatgctttgtggtggccaggcacggtggctcacacctgtaatcccagcactttgagagactgaagtgggtggatcacttgaggtcaggagttcragaccagcctgaccaacatggtgaaacctcatctcaactaaaaatataacaattagctgggtatggtggtgggcaactgtactctcagcttcttgggaggttgaggcatgagaatagcttgaacctgggagatggaggttgcagtgagcc

SEQ ID NO: 769223 - DNA, 549 bp, Homo sapiens
attggtagtggagaatcacagtgatagaatcaaatcatagttttgatttgctcacttaacatgacatcacaaacatttctcaagatttccacgaagtctgcacaatgaccatttcatggcaacacaatattccaccttattatgtacaatagtttcctaatatatttttccttccctttccttcccctttacttactttttcttttcactttctttctttgtttaccattacagatgacaaaataaacattctcaaggtgcagatttttactgcatgtatcttctctytttttttttttttgttaaatatcctgaagtcttttgtgttttagccacatttctaccttttcttctgaatttttctataggcaaatagttaaactcattctacttgaaatgtatttacactcacttgtcaacagacatttgtttaaactatactctccacttgaaatactgtcttctcccagtttttcaaatgcaaacctccctggctatccaaattagaaatgttattctgtcttttgagttttcttttgaactgaccta

SEQ ID NO: 769224 - DNA, 632 bp, Homo sapiens
agctgcaagacctttgcggtgagtgttatggctcataaaagcagtgtcgacccaaaaagtgagcagagcaagatttattgcaaagagcaaaagaacaaagctaccacagtgtggaaggggacccgagcaggttgcygctgctggcgccggcagcctgcttttattctcttatctggccccacccacatcctgctgattggtagagccgagttgtctgttttgacagggcgctgattggtgtgtttacaatccctgagctagacacaaaggttctccaggtccccaccagattagctagatacagagtgtccacacaaaggttctccaaggccccaccagagtagctagatacagagtgtcgattggtgcattcacaaaccctgagctagacacagggtgctgattggtgtgtttacaaaccttgagctagatacagagtgccgattggtgtatttacaatccctgagctagacataaaggttctccacgtccccaccagactcaggagcccagctggcttcacttagtggatcctgcaccagggctgcgggtggagctgcgtgccagtcccgcgtcgtgcgcctacactccccagcccttgggtggtcgataggactgggcgccgtggagca

SEQ ID NO: 769225 - DNA, 632 bp, Homo sapiens
agctgcaagacctttgcggtgagtgttatggctcataaaagcagtgtcgacccaaaaagtgagcagagcaagatttattgcaaagagcaaaagaacaaagctaccacagtgtggaaggggacccgagcaggttgccgctgctggcgccsgcagcctgcttttattctcttatctggccccacccacatcctgctgattggtagagccgagttgtctgttttgacagggcgctgattggtgtgtttacaatccctgagctagacacaaaggttctccaggtccccaccagattagctagatacagagtgtccacacaaaggttctccaaggccccaccagagtagctagatacagagtgtcgattggtgcattcacaaaccctgagctagacacagggtgctgattggtgtgtttacaaaccttgagctagatacagagtgccgattggtgtatttacaatccctgagctagacataaaggttctccacgtccccaccagactcaggagcccagctggcttcacttagtggatcctgcaccagggctgcgggtggagctgcgtgccagtcccgcgtcgtgcgcctacactccccagcccttgggtggtcgataggactgggcgccgtggagca

SEQ ID NO: 769226 - DNA, 621 bp, Homo sapiens
aatgatcctccttcttcagcctcttgagcagctaggactacagacacatacaccatatctggttaattataaattttttttgtagagatggaatctcgctatgttgctgaggctggtcttgttgcctggtctcaagtgattcttcagcctcagcctcccaaagcactgggattacatgtgtgagccactacaagtggccttatggtcttcatttatcccacttagggtgaatactgttataatttgttgcagttaattatgaggtgctgcyccagacttcaatggagttattccataagaagccgtatatgcatcatatcaccttcaaaatcaaaagaaacctgaattccaaaccatatctggccccaagaatttggggtatggaattctggacctctgctctgcttaaattccattggccaaaagttagtcatgggtccactgttagctacagggcacctgggaaatgaggcctttattctgagcagccaagtgcacagcaaaaatctatcgcaatgggatgaggaagactggacattgaggcccaaccagtagtctctgacacaatctcacttgttttctccaaagctttatcctaaaacatcctcagaacctcctgaa

SEQ ID NO: 769227 - DNA, 633 bp, Homo sapiens
aaataaatttaaaacagcctggttactgatattctctcttctgaattcagaaattctattttaactatttttaaatataaatgtaaaactagagtatattcacatattcctttaaatgttaaattccctcaaaatagaagaactagtcaaaacagcacaagaaacagataaataaaaactttaatacatatatggaggagtcttcagtacatatggygacatgtcttattcagtgtcaaagccagttgcagtggaaaattgtatttaattttctattcactacattaaaattgcacagtctgagagattatggccaaataatttttactaacataatttttccagaaatgggaaaaagagtgtttttactgtaaagctctaagatttcttttttaattcaataagctatttaggcttccatgtagaaagcttatgtatttaatttggggtacttaggcaaaagccatctctcttcttcttcagagagagaaaacacatcatctagactaggcttcttaatgattcctttttattgccctccattgaaagtcacagccagacacacaaatatgtaagaggcaagtgaataattgcctatgtttttcagatcataaactaaaccagttctgaaat

SEQ ID NO: 769228 - DNA, 633 bp, Homo sapiens
aaataaatttaaaacagcctggttactgatattctctcttctgaattcagaaattctattttaactatttttaaatataaatgtaaaactagagtatattcacatattcctttaaatgttaaattccctcaaaatagaagaactagtcaaaacagcacaagaaacagataaataaaaactttaatacatatatggaggagtcttcagtacatatggtgacatgtcttattcagtgtcaaagccagttgcagtggaaaattgtatttaattttctattcactacattaaaattgcacagtctgagagattatggccaaataatttttactaacataatttttccagaaatgggaaaaagagtgtttttactgtaaagctctaagatttcttttttaattcaataagctatttaggcttccatgtagaaagcttatgtatttaatttkgggtacttaggcaaaagccatctctcttcttcttcagagagagaaaacacatcatctagactaggcttcttaatgattcctttttattgccctccattgaaagtcacagccagacacacaaatatgtaagaggcaagtgaataattgcctatgtttttcagatcataaactaaaccagttctgaaat

SEQ ID NO: 769229 - DNA, 570 bp, Homo sapiens
ggctatatgtctaaatacttaaaagttataaatgaagccaacaaacagttatgtaaagtggttctattctaccttaacaaatccccctttattttattatttacttatttatttatttattttgagacagagtttcgctcttgttgcccaggctggagtggaatggcgcgatcttggctcactgcaacatctgcctcccaggttcaagcgattctcctgcctcagcctcccgagtagctgggattacaggcacctgccaccacgcctggctaattttttgtatttttagtagagrcagagtttcaccgtgttagccaggatggtctcaatctcctgacctcaggtgatccacccgccttggcctcccaaagtgctgggattacaggagtgaaccactgtgccaggcctgacaaatgcccctttataaggacagaaaaagtgaaactctgatttttatatagctaaagtcagcaaaatatgaaaaagaactgagtttaattattatcgcacatgtctaaatgttacattgatgaattacttatgtttgaaagagtaataaaacaaaaacat

SEQ ID NO: 769230 - DNA, 596 bp, Homo sapiens
taaggaggacaaatgcaggccataggctatatgtctaaatacttaaaagttataaatgaagccaacaaacagttatgtaaagtggttctattctaccttaacaaatccccctttattttattatttacttatttatttatttattttgagacagagtttcgctcttgttgcccaggctggagtggaatggcgcgatcttggctcactgcaacatctgcctcccaggttcaagcgattctcctgcctcagcctcccgagtagctgggattacaggcacctgccaccacgcctggctaattttttgtatttttagtagaggcagagtttcaccgtgttarccaggatggtctcaatctcctgacctcaggtgatccacccgccttggcctcccaaagtgctgggattacaggagtgaaccactgtgccaggcctgacaaatgcccctttataaggacagaaaaagtgaaactctgatttttatatagctaaagtcagcaaaatatgaaaaagaactgagtttaattattatcgcacatgtctaaatgttacattgatgaattacttatgtttgaaagagtaataaaacaaaaacatgc

SEQ ID NO: 769231 - DNA, 583 bp, Homo sapiens
agtctttgaatgattaggactttgttgtcaagctagagtttggtattttgttggtttgtttgttttgttttgttttttgagacggagtctgtcacgcaggctggagtgcagtggcgcaatctcggctcactgcagcttccgcctccggggttcaagcaattctcctgcctcagccaggctggtcttgaacttctgacctcaagtgatccacctgcctcagcctcccaaagtgctaggattacaagtgtgagccaccgcacctggcctagagtttggaatttttatcatttaggaattgggcttggttgctgactacttatatcctagttgctcttcagtttagcttctacctcagactccattggaactcttgtcaccaaaattaccrcttccttgatgctaaatctatttgacttttgtcttacttggcttcttaacaacactaaaaaatgttgcccattcctttcttcccatgcctttattttttctcctagctgtctagcccttctttctcagtctcctttgtgagttctttttttctcccttaaatgttggggctcagggtttagagctggtcactagg

SEQ ID NO: 769232 - DNA, 612 bp, Homo sapiens
tctgggcctcgatttcttcacttagatccagaggagctgcaagagataagtgttgggatccctctcagtccagcttcagcatcctgcgagtgcgtccccatccaggaaacatatgtgcattttaacggggccctttgctggctaaatgtgaaagtgtggtttgaggtaaagaacagataggcttctagctaaggcccatggacaagacagcttttggacaacttttctcagtaaagaggtggcatgggccttccacactgtccaacatgcctttcctctgtccctcctggattacattgtccccaggatcagggtccctatcctctctccacaccactcagcacagtctgctgtaaggaagggtctgagagagtagttttccctaaggcatgaatgactrttagggatggagctacccattctgaggagatttgaacttgggcaggcatagttttttatccagagaaattagactctatttatgaaatcccagcaagagactttgaaactggaaggatgttgcctccattcaagtcacagcagcctcattgcctggctttgctcgggcaggtgtggctgccagggcaactggttcaaaaacctgtggcacac

SEQ ID NO: 769233 - DNA, 612 bp, Homo sapiens
tctgggcctcgatttcttcacttagatccagaggagctgcaagagataagtgttgggatccctctcagtccagcttcagcatcctgcgagtgcgtccccatccaggaaacatatgtgcattttaacggggccctttgctggctaaatgtgaaagtgtggtttgaggtaaagaacagataggcttctagctaaggcccatggacaagacagcttttggacaacttttctcagtaaagaggtggcatgggccttccacactgtccaacatgcctttcctctgtccctcctggattacattgtccccaggatcagggtccctatcctctctccacaccactcagcacagtctgctgtaaggaagggtctgagagagtagttttccctaaggcatgaatgactattagggatggagctacccattctgaggagatttgaacttgggcaggmatagttttttatccagagaaattagactctatttatgaaatcccagcaagagactttgaaactggaaggatgttgcctccattcaagtcacagcagcctcattgcctggctttgctcgggcaggtgtggctgccagggcaactggttcaaaaacctgtggcacac

SEQ ID NO: 769234 - DNA, 530 bp, Homo sapiens
ataaatctcatggttaaagaaatttggaaaaatctatatactttcttagaaagtaatatgctaaggtttagcaaataaaaatacaggacacttggttaagttagaatttcagataaacagcaaatacttagtgtaatcccatgcaatatttggaacacacttataccaaaaagttatttgggcatcgtgtatcttgtctagtaaccctattagaaactcagtcacatttagcattttaactttttgtttaatcctyaatttatcattgacaaatttagaattccagagaaagcagcataaagaaaggaaacactgacagaagatgatagagaacaatggatacttttgtttggcttgaccccccacaataagtatgaggtaaagttggaggaaagaaagatagaaaaatataatggatatctgttgcttttccttgaccaagacccatatcttcataatatcaacagtacctcattggaaaaccatccctagctactctcagcccttctaatgtgtggaaggctaatcca

SEQ ID NO: 769235 - DNA, 625 bp, Homo sapiens
taacatttcttcaaagcccttctccccagccccttttttctcctacccaggtagcaccaatataataggcaaaactctaaactgataggcaaaaaccctaacaggaaaagtctgaggccattgggcatatgctaaacattctaggtttgccataaaataatttgcttctgagagtaagattaattctgctctgagaggatggtattcacttccacccctgcttataaagatactctaataaagatgattagaaataagactatgtataaaaagatatttcatggatagcaagaaaatgtatttaactgcagtaaaataatcyaaatacctgctccattgtttttaacttcacaaatttaaatatatatacatatatataaaattatatttttaatatacatttttatttcaatagcttttgagatacaggtggtttttggctacatggatgaattgtatagtggtgaagactgagattttagtgctcctgtcacccgagtagagtactttgtacctgatatgtagtgttttatccctcatcctcctctcatcctcctcccttttgagtctcccaaatccattatatcactctgtatgcctttgtgtacccatagcttagatccat

SEQ ID NO: 769236 - DNA, 414 bp, Homo sapiens
agagaaaaaaacaaacttataccaagttatgttatatatttaaatttagatagttacatctatatagctatagatatatatagatatagctttatatatacatatataaactactgatatataggtatagatagatgatatctatctacatacacacaaacatacatgcacagagagaaggatgtatatacgtatatatctttatatatccctctatatattatgggtatagatatacagatagataggtrtagatatctatttatctgtatgtacacagacacacacacacacacgcacccagagagagagcacctactctcattatgtgttatatttatgttctttatagttgctgtgaacacaggattactgagccattgctcctaagggaaatacaaaattcagtttctg

SEQ ID NO: 769237 - DNA, 525 bp, Homo sapiens
acatgcagcctacaagcatatgaaaaaaagctcaatatcactgatcattagagaatgcaaatcaaaaccaaaatgagatactatctcacatcagtcagaatggctattattaaaaagtcaaaaaatgacagatgctggtgaggttgtatagaaaagggaacatttatacactgatgggaatgtaaattagttcagccactagggaaacagtttggcaytttcttaaagaactcgaagcagaactaccatttgacccagcaacctcattattgggtatatatctgaaggaatataaatcattctacaataaagacacatgcatgtgtatgttcattgcaacactattcacaatagcaaagacatggaatcaacctaatgcccataaatgacagaatggataaagaaaatgtggtacacatacaccatggaatactatgcagccatgaaaaataagattatgtcttttgtgggaacatggatggagatggaggctatcatcctcagcaaactaatgcgggaacagaa

SEQ ID NO: 769238 - DNA, 525 bp, Homo sapiens
acatgcagcctacaagcatatgaaaaaaagctcaatatcactgatcattagagaatgcaaatcaaaaccaaaatgagatactatctcacatcagtcagaatggctattattaaaaagtcaaaaaatgacagatgctggtgaggttgtatagaaaagggaacatttatacactgatgggaatgtaaattagttcagccactagggaaacagtttggcactttcttaaagaactcgaagcagaactaccatttgacccagcaacctcattattgggtatatrtctgaaggaatataaatcattctacaataaagacacatgcatgtgtatgttcattgcaacactattcacaatagcaaagacatggaatcaacctaatgcccataaatgacagaatggataaagaaaatgtggtacacatacaccatggaatactatgcagccatgaaaaataagattatgtcttttgtgggaacatggatggagatggaggctatcatcctcagcaaactaatgcgggaacagaa

SEQ ID NO: 769239 - DNA, 583 bp, Homo sapiens
ccaaatatagcatcctgggcaagcccaaaatatcgatgccatcttgctatcctacaacccccaaaataaaaattcacaaaatattttttgacatgaatgtaatcacaatcatgtagagatgctaaaaaaaagtttcaatcaacttgtctgctttggtggcctgaacaggcataacagagttggtgaaaaccctaagtgtcaataaattatgttctgaaaaccttttgatttcttccctttagagtactaagatctagggctggctgtggaattattgctgtgcttgcattgatgttggtggtttaccattagtggaagcattcacatttctgtgggtagacttagagagaggatggcaacaracagtgtgtggttagtaaaacaaagccaaatgctgttcagtggaaatccaagcataaccaaaataggtccttctacagagaaagtgagtttttaagcctcagctgttatatttagttgattctgcaagatatcaaggaataatgcttgtatatatttaactgtggtgaacatttgtggcatttttttctggctgaagagataacttttttggtacttgctt

SEQ ID NO: 769240 - DNA, 582 bp, Homo sapiens
tataaaattatttctgtaagttttcttaacacacagacacacacaaatcacaaaatatctcctcatttttataactttctttacatctttctttcttcgtggttcctttatgttggagtgataagacccaccaccatgtcatggggactaccaagtctggyggagtcaaagaaatgagacaagacaagttaagagtacatagagtgggtccagggggccaacgtcagtttgggggctgtgaaggccccaagctctgggagctcacaatatttattggtaatcaaacaaagaagcatgtggtgagcacgttcagatgtgggggtagacaagtgaggatgtgaggatagaaaggtagtggtgcatcaagcgtagctgtgacggtttagcatattttctgctacttgaaataagggagaacaggttcttctaattcaagatacaatcaatttatgatcttgggagagcaaggagcaagggtccagtgagtttggacacattccagaggctacaagaggttttatgccctgtgccctgggctctctccaagccacaaggtgttttatgccctgggtttagattgta

SEQ ID NO: 769241 - DNA, 595 bp, Homo sapiens
ccttaataatgtttgcctcaaactagagggagaatatattttatacgcattttttaattcccttttttttaaaaaaaagccaacatagaaggataaatgtagattttttttcactggagaaaggagaattcatttgagcaaatgaatgagaaagtaagtctgcaaagttaccaatgcaaggrccccaaatcagagcttgaagagtatctgtagggccagagaaggggacgatcagaggggatctcatggaaagacctctgtgtgtttagaagagaaataattgtgggaatgctacatagactggaggagacatccagaataaaagtgtagtaatgtttgaaaaaagatgaccttaggagtgttggaaatagactagacaaaaatagaatacctagaatgactttcaaattaattctttggagtcaaatcaagccccataacctgccctaggcagctttaatgccttggatatggctttagaattgtctgacatgtttttcacttctacaaattattaaatatctcacataaagacttcagaagaaaaaagaagagacagagagaattacagtggaagtatccctgtaactgtcac

SEQ ID NO: 769242 - DNA, 600 bp, Homo sapiens
gagacatccagaataaaagtgtagtaatgtttgaaaaaagatgaccttaggagtgttggaaatagactagacaaaaatagaatacctagaatgactttcaaattaattctttggagtcaaatcaagccccataacctgccctaggcagctttaatgccttggatatggctttagaattgtctgacatgtttttcacttctacaaattattaaatatctcacataaagacttcagaagaaaaaagaagagacagagagaattacagtggaagtatccctgtaactgtcacatgaatcaagaarcagactactctcatgatctccaaagccactcgacatcctttctggcctcactccttcccttctccttacactcttagagcccatctcatcaggtcactgggaagattaaaccagagtgcttaggatatggtgcctaataaatactcaacatgcatttgccatggtttattctgctcacatagcacttggaagtcagctctaacattatatatagagttaaaagaggaaagaaaagaaagaaagaaatatgaaaatgatgtaagggcttgggaaaaaattaaaacatgttcttttaaaa

SEQ ID NO: 769243 - DNA, 604 bp, Homo sapiens
tatgtatcgagaatgccataagcaggaaatactgactattgaatcaaatatttatccttttcttaatcaatcatatatgtttccattttctttatagggactctgttttcctattatgtttgatagcagtaaaaaccactcacgtaagcaaagtgttatgtaatataatcacgtaatgatatatttgtccaacactaatacaatctttgatgccgtctttgtttagtcaacataatatgaaagttgacatttacataaaatggtccagatataatttttatagttgttaatccactaagaagtgagcattaaactatataacttgctttagtattgtgcatatgrtagcaaatgtcctgccacagccctccatgggaaaaaagtcacatttatacctactgtatccaaaagtttaaaagaagagcagcatacaaatgtatttgtagaaaaaaaatagcccatagctatcacttaatatgaccattagcaaactcacttacattatctaaaatgtatttatcttcacagttaacatgtttgctttcacactgaaagtataatttgagaatttgggggggaaattgcattatatttgtgtaaactg

SEQ ID NO: 769244 - DNA, 555 bp, Homo sapiens
acacaagggttccaatttcttcaccagcacttgttcttttttttgtaaatagtagccatcctaacaagtgtgaggtgctgtctcattgtggttttgatttgcatttccctggtggttcgtgatgttgagcattttttcatataccagctggccatttgtatgtcttctttggagaaatgtctattagagtcctttgctcttttttaattgggctatttgtttttctgctattgtgttgtgtgagttccttatatattttggatattaaccccttattagatgtatggtctgcaaatcttttctcccattcagtagtttgccttttcactttgttgatggttgcctttrctgtgcagaaacttaacttttggtaagttttatgtatcctatttagacattacaaaattaggagttgagctattcatactacacagatcatggcacactttcatcatcagtcagcacaggctattctattttttatttatttttcctcctttacccaaaatccctattcccattctcctctctccaacacagacaaatactctaaat

SEQ ID NO: 769245 - DNA, 590 bp, Homo sapiens
tactacccaccttagagaaataaaaaggaatataaggaaatactatgaatagatgtataccaacaaattagatgacctaaatgaaatggacatgtttctagaatgataccggctaccaaaactgactcaagaataagcagaaaacctgaatacatctataataagtaaaaacattgaaacagtaatttaaacactatctacaaagaaaaacccaggcatagatgactttactggtgaattataccaacatttaaagatgaattaataccatttcccaacaaattcttccaaaaatggaagaggagggaacacatctcaatacattctatgaggcttgtgttatcctaatactgaaactgaacaagtacrtacaagaaaataaatctgcatactaatatctcttgtgcatataaatgtaaaattcttcaacataatactagcaaattaaatctagcaatatatatgttttgggttttctggaattttggggtttgttttttcagacatggtctcactctgttgtgcaggctggggtgcagtggcacaatcatagctcactgtagcttcaaactcttgggtccaattgatgc

SEQ ID NO: 769246 - DNA, 623 bp, Homo sapiens
aactgtctttttgggacctttcttgggcagatggaggaagctttaatacttattggtcccagaagttactttgtttcttgagaggcaagagcttaaaagcttgcaggctctacaattagattgcctgttgaagtcctggctgtgtgaactgtgtacctyggtttgctcctctgtaaaatggggatgatatggtttcgctctgtcaccacccaaatctcatcttgaattcccacgtgttgtgggagggacccagtgggaggtaattgaatcatcggggcaggcctttcccatgctgttctcatgatagtgaataagtctcatgagatctgatggctttataagggggagcgtccctgcacaagctctctctctgcctgctgccatccatgtaagatgtgactggctcctccttccaccatgattgtgaggcctccccagccatgtggaactgtaaatccattaaacctctttcttttgtaaattacccattctcgggtatgtctttatcagcagcatgaaaatggactaatacaggggataagaataatatttacctcataaggttattgaaaagataaaatgagttgatacacgtaaaaagttatagagcagtgactggtata

SEQ ID NO: 769247 - DNA, 492 bp, Homo sapiens
aaatgtataaaacctttttaaattcagttcttatttttaaaatgtggatccttataacaatttgggaaaggcaaggcatgatgaagatgagagaaggctttatgaagatagaaatgtctgagctaagtcctaaatattgcagtcatccaggcagtgagcactggatgggtgatgaggagagtggagggaggtattcccgacagaggcagcagcaggtgcgaagcctcagagctgggtaggtagcacatcaggaggtggggtacagctaaagcaaagatgtaaggctagcaaaaraagtgctagcacagaagggatgaattaaaaaatgtatggcatatgcatatgatgtaatatacaacaattttaaacaaactagctatacacatattagtatggatagaacttagtaacttaaaattcaacgggaaaaaacaagctacagtataatatatgtcacatgaaacatttatgtaaagtttaaaagtacattca

SEQ ID NO: 769248 - DNA, 627 bp, Homo sapiens
tccaaccatgtccctgcaaaggacatgatctctttcttttttatggctgcatagtattccatggtgtatatatatatatatatatatatatatatatatatatatatataccacattttctttatccagtctatcatcaatgggcatttgggttgattccctgtctttgctattgtgagtagtgctgcaatgaacataactgtgcatatctttataatagaatgatttctattccttggagtatatacccagtaaagggtttgctgggtcaaatagtatttctggttctaggtctttgaggaattgccacactgtctaccacaatagttgagctaatttacattcccaccgacagtgtaaaagtgctcctatttctccacagccycatcagcatctgttgtttcttgacagatgaaacaacagcatctgttgtttcttgactttttaataaccactattctgactggtgtgagatggtatctcattatggttttgatttgcattcctctaatgatcagtgctgttgagctttttttcatgtttgttggccgcataaatgtcttattttgagcagtgtctgttcgtgtcttttgcccactttttaatgaggttgttaattttttttct

SEQ ID NO: 769249 - DNA, 633 bp, Homo sapiens
aggatctgagctgagactatgggtgcataccaccacacttgactaatatttatttatttatagagacaggatcttgccatgttgcacaggctagcctcgtattcctggcctcaagcaatcctgccatctcagcctcccaaagtgctgagattataggcatgggccactgtgtccagccaagccaaacattcatgtttataccatagaattacttccctattattattacttatycaagccctatctaaagtactatgacacaaggtggtgcaaagcttaactcccattatgtctcctgaatacacgagcatcaacaaggtaaataaaaccatggatttctgaccatcctcttatacaattttgtaagagaaaaacctatgataaatgaaaagggactgtgagtatgcaaaagaggccatacttgacaactacaattttagcatgtgttcatgggttctgtacctatttttcatttaagaaagtcaacttagtattttcttttttaagacattcatttcatattttttaggagcattaaaacatgatctgtagcagcagttttcaaaattttggcctcaagaatcttttacacatttaaaaatgatggtgaatactcatgagatttttcctatg

SEQ ID NO: 769250 - DNA, 528 bp, Homo sapiens
actagaattattattcaaattcaaagaaaaaacatgtttccaggaagctctgcttgaccccctgtcttccccaactcagaatgggttttgggtctctctccctacatttctaaattgattgcataaagctttcacagagcactcacaagatcatattgtaataatttttgtgtttatgacctactacttcttcaagracagtgattatattttgaaacaactgtttaattccagatcttgtcatgatgtcagatgtagagtaaatgttcaagaaatgcttactgaaaaattaatgaatgaataaaaaatgaatagatctccaaatggccaatttgccattttatttccccagtactccatggctattttaaatgtttaatttgtaatcaagatgtctttaaaaataccttttatccctgtctttaattatatttttcatatgaccagaaatacttacttttgtatccttctctttcatttacccatatgtcctactaggaaggatgtggtgggatgagtgttatttgg

SEQ ID NO: 769251 - DNA, 491 bp, Homo sapiens
actcactggctataaattgcggatcctaggacctcatcttcaggttgactaaattttctagagcagctcacactttacttacatttactcatttaccacaaagcatattttaaaggatacagatgaacagacaggtgaagaaattcatagggcaaggtatgggggaaggggtgcagagcttccatgctctctctggatgcacccctccaggaacctccacatttcagctatccagaagttccctagctttgtccttctgagtttttgtgggagttttattacataggcaatgattgattacatcattacccattggtggtcagctyaaccttcagcctctctcccctccccagaggtgaaggattaggggttaggggctggggctgaaagtcccaaccttccaatcatgccttggcctttccagtgaccagcccccatcctgaaataacctaggggctcccagctaccattagccaacaaaagatactctt

SEQ ID NO: 769252 - DNA, 588 bp, Homo sapiens
tactttcctgtatgttcttgaaagaatcccaagattttttaaaaaaaactacctaccattttttgattattttcagagaggctgtctgagttacctagcatctcacactttaagaaatggatgtgctctgcccactattaataagagttgtcagtatatccagtggtcccaacaaaagaaggagccccatggtccccacagggaaaatctgggtgatgagacatgcacttaatccttattgttatgtcacctggagtcccctgtgggatttcttatttgactggaagatacataccagtttctcgggatcttctggctgttggaaggacacatgcctccctctcacttctctccactgtctatgtgtgtggtactatggctagagtagtgagaagctagaaagcctgcttttatttcactcatgtstagggagaccacattctctctgtaaaaaccactcatttagagaaaaaagaacaaatgtttagtttctcagttggaatattacagagataagtctttaattagatattctcttacattctcataagtatatatagtcccatttgccatatcgtgtccttgact

SEQ ID NO: 769253 - DNA, 642 bp, Homo sapiens
agaaaaaaaaaaaccttgagtaggtatttaaaagtactctgctaaacatatttgtgaagaaatatatttaaatcatattttacattttcctctagagtcatgttttcaaaagactctatggtagcacttttcagaaaatcttaaaatacattttttatcataagctagtatacacatttataggtgtgtatataagtttcaacacttagactgacttgctgattgccctatgtgctgatattgtctattccatttatttttaaattctatttttagcccactgtagtaatttcataagctactcatgggtcataacagaagtttgaaaaacactgcttcaaagcacaattacttgcaaacctattcccacgttttggaattggtataaattccttaaatgtcaagccaataaatacgtcttaatgatacttactgtgccaggtgctgtgaataagacaraaggcacaaatgatatcatctctgggcccaaaggcttggtgcagtggcctgaatacagtaaacatgtaataactgttgtctatttttattgttgttattcttattaaggagacatcaagagttcacatatttatatcatgactagtacaaaggtcttcatgaacatttcccgatttattaatc

SEQ ID NO: 769254 - DNA, 635 bp, Homo sapiens
atcaaacaatcaaaaatgttattattaggcaaataactatctccaagactgacacattgtttgagtatgtctatggactatctgtgtggcccagctgggaatcagggttccagtgctggctctgccactcattagcaatgtgacttccttatatgcaaaatgagaagactgaatttatcctactgttaacaacaactgacatggggcaattagtctgtaccagaaataactctaagtgttttatataattgcacttatttcatcttcccagcaatatygtaaggcaggtattattattctctttttacagataaagaaactaaggcataagaggttaataacagggtcacaaaagtggctgagccaagatgtgaagtcaggcacggtggctcatgcctgtaatcccagcactttggaaggcaaaggctggaggttcacttgatcccaggagttcaacaccagcctgggcaacatagagagatcctgtccctacaaaaaatttcaaagttagctgggcatgatggcacatgcctgtagtcccaactatttgggaggctgtggcaggattggttgaacccaggaggttgaggttgcagtgagccaagatcatgccactgcactccagcctaggcaga

SEQ ID NO: 769255 - DNA, 617 bp, Homo sapiens
tgtcttttcacaagctatccagtgcccccaagatgaggattatctatgacagccccacagtccttggatgagagagaacagagcatcctcttctcagttaattaccatttcttgcctgtgcatttgatttcaataaagtctctctaattacttcaaatatcaccgtgcctcccccctccctctctcctgtgcccctctttctctttgagagcgtgagactgatgaactcaaacaccagcaagcctcaggcatatgctgcaacgagcaaagacttctcaaagttaataagccaggagagttaataaaccagacttcccaaagttaataaacctggaaaacacaattatcactacttttactattattaaaatattgccattatgattgttgttgttattctcagccttatctgcagctaccctaagaccctcccccgkgcctgcctgcctcctcttccttcccccatcctcaccagtggcagtaatattgtgtgagtaatcccaggggggctccccggcactgccctgttggaggaagcaatattggagctcgtgcagcccctggtcccttcaggcccagctctgcccttttatattacacactgttcagtcaaatcc

SEQ ID NO: 769256 - DNA, 621 bp, Homo sapiens
ttggatagggtggtaaagtatatatatgaagtctgtgcaaaattatgatttttctatcactgtgttttgaatcatagagtctcaacattgaacttagattcaaaggtcatctagtaaaacccaatcttcaatgcttgcctttcctrtataagagattggccaagacagtgcatgtgaatacagtacttgaacatatacagtgatactgactggaaaatagcctaatgcagagtttgacagttatgactactagttttttcttattattagagaaatatagctgatgaaaaataaaagtgggtaggatgactagcaaatgaatgtctaagtaagaagaaatgctaacatgaaacagctttacgaaaatagaaatgagttaacaaggaagttcagctggaaacagagcctagagtgggacaaaagatttcagaagaccacgagtccaaagcattgttaagagtagtgttcccacaaattttaagggtaaagtaagaaacaaaattatgtaatttccaaaaccaaagacatgttatatgtaatgtttgttcttagatttgtatccaaaagataatataattaggttgattatacaccctaaaattatctttaaaccatctagga

SEQ ID NO: 769257 - DNA, 590 bp, Homo sapiens
ttttcttctactagttttacagtttggggtcttatatttaggccttttatttattttgagttaatttttgtatagggtgagaaggcagggatctagtttaattcttctgcatatggatatctacttttagcaccatttactgaagagactgtgcttagcccagtttatgttcttggtactcttgctttgactrtttgtcaccttttatgcttctatactaattttagcttcttttttttctatttctgtggaaaatgtcattagagcacacccccgcaaccccacaaccctggccaaccagaagtgtcaggagaccatcaggtgatggtcaggtggttgctacgctgtctcactaaaataataattggtcacagctggcaccagggaggctcctaatagatacaaacacctgaaaatggtgagcagcagcttcccaataaaatctccggagttgggtgagtgggctcaagaatgtgcactaagagacaaaatcgtggagtttaactggtataggaccttcttctaggagcactcaactggtaagggaaaaatgcctcaagtgagcatgcgcacaactccagtaaacacat

SEQ ID NO: 769258 - DNA, 616 bp, Homo sapiens
attaatgaaactagaagaggatgaccagttgatttctttatgctctatttccaccaagaaccagaaaagccatatgaattttaatccattgttttacattttaatatatgctatttgcattagtgttcattttgatgaatggggtctattttatttctatattcattcaaacaatttagtgtttaggggctaaaagaaatcccaaacacaatttaaaacaaaccaaaaagaatctaaaacattagctacaaaatattttcaggttaaatgkacattaatgtatagattaaatcatttgctctgtgtaatagaaatatatctattaaatagaatcaataaaatgcacatgtatatttttaaaagtaggaaacatcactctatagctgaagtcatgtagcattcttaaaatggtttattttcaaacaagttagtaatgattttgaattttcaaaatattttggctaccttcaccatgcattttacatgttatcttggtttaacaaccatctcaaaaaaaaatccatatatccacattgttgaaagagcctatttggagagggggaaagagaaaaggaattgtagtagccaatgccaagatggccctcaaagatcccct

SEQ ID NO: 769259 - DNA, 540 bp, Homo sapiens
gtgttccaaaggccatcaaagttctaatcatcagacaattttttctagagttgattttgaccagagatatcattttctacatgttagctactgtgtgttcaggcgtatagtcttgccaattttatacatgctgccaagtaacatctttatggttacctaatgggtccscatagagctacagtgagtttagaggctgagagacaataggttacattttccatgtctttttgtcatttttgttgcttttctctaatttctttcaaaatagtgatctctaaacagtattgatttttataataagtataatgtgtaataaatgtactgcattttttgtagctctaaatagcattatcgcagttcagtgtaaagtcagtgtgtcatttgttgctatagttttcgacctcccatctctggtttatctattcattaccacagttaacttgttagtcacagcttttattagcttgattctgagttattgtaattgtttccaactaatttttttattctaattcattctacaaaaatctaggtaatttt

SEQ ID NO: 769260 - DNA, 540 bp, Homo sapiens
gtgttccaaaggccatcaaagttctaatcatcagacaattttttctagagttgattttgaccagagatatcattttctacatgttagctactgtgtgttcaggcgtatagtcttgccaattttatacatgctgccaagtaacatctttatggttacctaatgggtccgcatagagctacagtgagtttagaggctgagagacaataggttacattttccatgtctttttgtcatttttgttgcttttctctaatttctttcaaaatagtgatctctaaacagtattgatttttataataagtataatgtgtaataaatgtactgcattttttrtagctctaaatagcattatcgcagttcagtgtaaagtcagtgtgtcatttgttgctatagttttcgacctcccatctctggtttatctattcattaccacagttaacttgttagtcacagcttttattagcttgattctgagttattgtaattgtttccaactaatttttttattctaattcattctacaaaaatctaggtaatttt

SEQ ID NO: 769261 - DNA, 630 bp, Homo sapiens
caaacattcagaccatagaattccatccttggctctacaaaatgtatgttcttcttgtatgcaaaatatgtttattccaccctgttagctcccgaagtcttaccttgttccttatttatatatgtaaattaccttattatatatgaaaaaatatatyatatatgaataaatatatttatttatataaatatatttattccaccctgttagctccacaagtctacagtccaaattctcatctgaatatcagctaaatcagatatgcatgagtctcaagatatgatttattttgaggcaaattgccttacagctgtgagcctctgaaatcgagcaagttacgtgcttctgaaatgcagtagtacgacaagcatacaacagacattctattccaaaaggaggaaatcagaaggaagaaaggggtaactgaaaccaagtatatatgaaaaaaacttaaaggcagaatgaacaacttggattaaaaatcaaagtacatgaggggatggattcctcatttgccctgatgtgattattatgccttgtatgcctgtgtcaaaatatctcatataccccataaatacatatacccactacatactcataaaaattaaaaatttaaaaaatagacaatta

SEQ ID NO: 769262 - DNA, 621 bp, Homo sapiens
aaataaagtaggagaagtgctatagtcaaggtaaatccaaggtgctggggaaacagacatgtctagtgttaaaaaattgttagaggtgatttagtgcagccctctatttacttataaattccccggatacaaggctgcagaaccgtgactccattgactggtacggtggtttggttcaaatgctctttttggtgaaacttgaacaattagtcatctggtctcctttgacagaaaggaaattacttcaaagaaaagtattttgaaaaaacgtaagtcaaaaaaaatctgggaaaaaggttatccccaaaatgatgtatcaactgcakgtcataatttagataaatattaattttcatgcagtgtgcatgcaagccctgggattttagaaattttagcttaaagtgaaaaacaagatatttcagtgttaatggtagcacataataagaattttcatacataatgtcacactcaaaaaattttttaaaaacctctagtgttgtcataaaaagagcaagcttctacagctcaaattctggccatttcagaacttgaacaacatgtagagccttcctaattgtcagaatcctagtctgaaaagggccatgataatgcttacataat

SEQ ID NO: 769263 - DNA, 586 bp, Homo sapiens; identical to SEQ ID NO: 741855

SEQ ID NO: 769264 - DNA, 572 bp, Homo sapiens
gaccagcctggccaacatggtgaaaccccaactctcctacaaacacacaaaaattagccaggcttttgtagtcccagctactcaggaggctgaggcaggagaatcgcttgaaccctggaggtggaggttgcagtgagcctagatcgtgcccctgcaacccagcctgggtgacagrgcgagactccgtctcaaaaaactacactaaaatataaaataaaataaaatgcagcaggaatctgagaatagaaagattttgaccagcctacaaatagagagttaagcagcgaaggaatggaaaaatcatatgattttaatgagacattaattggtggttccaaagttgtttcctcatttgtacaatgacaagctttggttatacaattctaatttccagttctaaactcctatgcagacccatgtgattgtaagagaagttaggcattatgtataagcaattttgcttaaacggaagttctgtagcaggttcaacagacttatttcacacagtcttactctatatagtacttcaacccctaaaattcatgaaaagtgagaaatataaacttatgttc

SEQ ID NO: 769265 - DNA, 572 bp, Homo sapiens
gaccagcctggccaacatggtgaaaccccaactctcctacaaacacacaaaaattagccaggcttttgtagtcccagctactcaggaggctgaggcaggagaatcgcttgaaccctggaggtggaggttgcagtgagcctagatcgtgcccctgcaacccagcctgggtgacagagcgagactccgtctcaaaaaactacactaaaatataaaataaaataaaatgcagcaggaatctgagaatagaaagattttgaccagcctacaaatagagagttaagcagcgaaggaatggaaaaatcatatgattttaatgagacattaattggtggttccaaagttgtttcctcatttgtacaatgacaagctttggttatacaattctaatttccagttctaaactcctatgsagacccatgtgattgtaagagaagttaggcattatgtataagcaattttgcttaaacggaagttctgtagcaggttcaacagacttatttcacacagtcttactctatatagtacttcaacccctaaaattcatgaaaagtgagaaatataaacttatgttc

SEQ ID NO: 769266 - DNA, 561 bp, Homo sapiens
gctgtaatatctgttatcattgacaaggtctactagacaacaaatgttagatacattattgtatatataatgcagaaataacacattacatatctttaaaaatgatatagcttagttttcattagtgtttaatacaaacgtccattttacagtcaattgctctytaagtatctcttttacatttttctcttccttcttttcaagagcaattttaagagagaatcagaataggcagagagttaaaagaaaggttaatgaaaatggggagactctgctaatgtatttccttgggcaaattgcagaacactggcacaatcagtcggattgtttgcagcctccaggttgctgcctgtaggtaactggggatgagccattctctgtgctgagtgcctttcttgcagtgtgatgtgtcaggctgttccagctccaatgttggctttcctgtggggcgctcatcactgtcactcatactacaaagatgttaccaagtcagaaaggggaaaaagcccccaaaaacaacaacaacaaaaaacaacaaaaagctccacgatgcatgtttct

SEQ ID NO: 769267 - DNA, 603 bp, Homo sapiens
aaaccaaatgtaacttttcttgctaaaatgtctcctgtaagtataaagtaaggtacatttttgtttgaaagatgacacattttgtaaaacaaaaaactttaaaatctttccttttgcttccaggtccctaattttccttgctcaccacataattggyacattttccactgtgatctagaagttgaatgaaattcttgttttaacatttaccagtaaactttattcatttgggaaatgataagaggtacttagcgtcagttattggtgatccaagtactaagctctgcactccataatttacatgatatgtaacagaaactatgcaaacaagtcactatgtccatttatgaatgaagaaatactcaaagatgttaaatgcctcattcgaggtcacattataagacagtaagtaagcttgtatttgacccaaattctacacacccaattacattgcactcaatacaatttttttttttttttttttttttgagaggaattctcttcttaactgtgaattaccacttccccacgactcagttaagtcaactgtgcggtctgagacttctctctttcttagtgcacataagctatggaggcatgatt

SEQ ID NO: 769268 - DNA, 603 bp, Homo sapiens
aaaccaaatgtaacttttcttgctaaaatgtctcctgtaagtataaagtaaggtacatttttgtttgaaagatgacacattttgtaaaacaaaaaactttaaaatctttccttttgcttccaggtccctaattttccttgctcaccacataattggcacattttccactgtgatctagaagttgaatgaaattcttgttttaacatttaccagtaaactttattcatttgggaaatgataagaggtacttagcrtcagttattggtgatccaagtactaagctctgcactccataatttacatgatatgtaacagaaactatgcaaacaagtcactatgtccatttatgaatgaagaaatactcaaagatgttaaatgcctcattcgaggtcacattataagacagtaagtaagcttgtatttgacccaaattctacacacccaattacattgcactcaatacaatttttttttttttttttttttttgagaggaattctcttcttaactgtgaattaccacttccccacgactcagttaagtcaactgtgcggtctgagacttctctctttcttagtgcacataagctatggaggcatgatt

SEQ ID NO: 769269 - DNA, 624 bp, Homo sapiens
cttgtacccacatattaagctagcccatccttaacgcaaacttggtctttttccctcctcctttagctggttatatgggaccccctcacatgaccacaggtgaggctgggggaggggtgctggtgcaaccgtagtgartgacatggaaatctgggctaattgctcatgcagcttgagtgtgcgtgtgccctctggtcccacttgtgttcagtcccagatgtaccagttttatcctatgatggctttgatactgacccgccctgaccttatcacttggtgtgtctaacaggacgtagctgatggcagccagttttgaatccatgatcacttggtgtctccaccagggcccagtagaaagtaggagctgttttctgaaaggagtgtaatccttcactgcagttggcatgaccttgttacactatccaaggagtctgcattgtgattcctctattgggactcaccataaatgccatactacatctttttccatcactgacatctccaacatgagaagctgtgccagattttacagtccactcaaaagggctgcttgtgtcacagcctggagagctctttcctgttctgagcctcactcaaagctggcaatctctgtgtaacccagta

SEQ ID NO: 769270 - DNA, 624 bp, Homo sapiens
cttgtacccacatattaagctagcccatccttaacgcaaacttggtctttttccctcctcctttagctggttatatgggaccccctcacatgaccacaggtgaggctgggggaggggtgctggtgcaaccgtagtgaatgacatggaaatctgggctaattgctcatgcagcttgagtgtgcgtgtgccctctggtcccacttgtgttcagtcccagatgtaccagttttatcctatgatggctttgatactgaccckccctgaccttatcacttggtgtgtctaacaggacgtagctgatggcagccagttttgaatccatgatcacttggtgtctccaccagggcccagtagaaagtaggagctgttttctgaaaggagtgtaatccttcactgcagttggcatgaccttgttacactatccaaggagtctgcattgtgattcctctattgggactcaccataaatgccatactacatctttttccatcactgacatctccaacatgagaagctgtgccagattttacagtccactcaaaagggctgcttgtgtcacagcctggagagctctttcctgttctgagcctcactcaaagctggcaatctctgtgtaacccagta

SEQ ID NO: 769271 - DNA, 644 bp, Homo sapiens
agtttttttaaatacatacatacatggttggcagtaagaaacttccaggtttaacagtgaagaggaaaattcagtggcatttgacatgatcagtctcaatgcctagagcaggcaggcatctggtccctggttttctcattagtcgggttttctggaaagctgaaatgatgggagaagcatagaattcagttcatcccagtgctatggaaagagacccagaatgagagtgaggggacrattgttcaagtcctacgtcttccaccaactaaccgtgtggctgttgttctgagtgtcaggaaaactaacccgttaacagcatgcaagagacaagcaagctagtaacaagacaatctgtgacgacctcgaagctactcagatttcattgtacctccacaccccttataaaagaatctccgcatacgaatattgaacctaagaaagcccatccccaccccacaagtttgaaccagaagacttctgaaaaacgcaaacgacactccctgtgtgagttcaaacatgtccacacattcttggagacatcccccatgaggaagtagagtctagttctcctccccctgaatatgggcaggctctagtgacttgcttgcaatgaatagtatgtgtggagtgatgctgtgtggctt

SEQ ID NO: 769272 - DNA, 540 bp, Homo sapiens
tgggattgaggtctagagcaatctctgtggtggattgcaatggatggatcttgagtacattatgggagacgcagtacagctgtcaccagaaagtcaattagatgcctaggacaccactccaagaacgatatgatgagggctgatcgagttcatgccttagggagggataacaattatgagcaatatttgcagggtagaattagcaggagctggtcaccagcttttgagggtggaaagagaatagatagtgctaatgtagagagctcatcgggtgaccatattcaacagtaattgcaaagstttccctggcctcccattgtggaaatgggaaggtctagtctattcttttaaccagaaatgcagtggtcatctaaggagcctcaacctggttctcagagctcaccaaggaggaaagtgtgctgggaagtgtctcagggggcgagaggaatggaataggatacagtcgtcccctacagggttgactgtgcaggtgctcatcctccccgtgctgttctttccaaacccttgactttccatttg

SEQ ID NO: 769273 - DNA, 640 bp, Homo sapiens
acataaaaagaaccaatgacaaaaactatatgattatctcaatagatgaagaaaaggccttcgataaaattcaaacatcccttcatgttaaaaactctcaataaactaggtattgatggaacatctcaaaataataaaagctattcatgacaaacccatagccaatatcatactgaatggacaaaagctggaagcattccctttgagtggccctctctcaccacttctattcgacatagtattcaaagttctggccagggcaatcaggcaagagaaagaaataaagcgtattcsaataggaagagagaaagtcaaattgtctctgtttgcagacgacatgattgtatatgtagaaaaccccatcatatcagcccaaaaactccttaagctgataaccaacttcagcaaagtctcaggatacgaaatcaatgtgcaaaaatcacaagaattcctatataccaataacagacaaacagagagccaaatcatgagagaactcccattcacaattgcaacaaagagaataaaatacctaggaagccaactcacaagggatgtgaagaacctcctcaaggagaagtacaaatcactgttcagtgaaataaaggaggacacaaacaaatggaagaacattccatgc

SEQ ID NO: 769274 - DNA, 619 bp, Homo sapiens
agctttctgtttcaacaaggtatcaaagagaaggtaatctccaaatagggatattgtctcttattcatcgaatctaatagtgctggtccataagcaagcacccaataaatacatgttaaatgaatgaactattataatttgaatcaattatgtatattatgtatcttttggctaaaacaaaatgctctatttttaaaggtcaacttttagtgattytccccagagtatggttttctttgtctcttattcaacatgaaacttgaaggttataagaggcagtataatatgtaggtccaaacattgacattatatcataagagacagatgatgggcattccgaactcataaatttttctattatttgaaagtatgaaagcctttttctcatttatatttctgatgctgtatctgaaataaatttttttcctagttcaggtaatagtagataacagggaccaatctcagggatataattaagactgctttggttttaccctgattccaactgttcagaacaaaatataatttacttctctgaaaaactaatgaaatttaggtgagttttccttctaaaatatgtaggatattatcttctgttcataagcccatccacttagcc

SEQ ID NO: 769275 - DNA, 607 bp, Homo sapiens
tactatacagcaatacaaagaaattaactactgatatatgcacaacatggatgaatctcaaaaaacatcatgctaactgaaagaagacaggcataaaaagactacatattgtatgattccattaatataaaatttctagaaaagcaaaacagagacagaatcagtgattgcctggagccggcagtggaagcagaggctgactataaagaggcccaaggaaactttttgtactcgtgagtgttctaaagctggaatgtagtggcagttacataactgtatacacttactaaactccttgaattgcatactttaaraagttgaattttattatatatagattgtacctcaatgaatttgttttaaaagaaaaatcactgaaagaaaaaagttgtagtatgaatgtaacttctattcacttttgtgtatccctggggaaaaaaaaccacacacgaccatagacacctgccgcatttaaaggtttgacatttccttcagtatctttcagagcaagtttagtcttcatctctcaatcacagaaactttgtgagaatctttaaaaattcttggggtaaaagtaaaatgcaacatgttccataagactgtgata

SEQ ID NO: 769276 - DNA, 637 bp, Homo sapiens
aagagttttgtttctgggaaggtttttttgtaaaactttgaattcagtttccttaacagataaagtgctattcgggttatctttttgttaatgagttttggtagtttgcatctttcacaaaatttgtttatttcatctaagttgtcccttcattcattctygatactggcatttacttctttttctccctctggaccagtctggttagagattttatttatttttctattgctttttctgttttcaattcctatgatctttgctttccatactatattttttctatttgatttagatttaatttatcttcctttttagtaacttaaggtgcaaactttaaactattgatttaagaacttttttctttttaatataagcatttagcactacaaatttttctcaaagcactgatttagctgggtccaacacatttttatatattgtttttattttcatcccatttaaatgttttctaatttctcttgtaaattgctttttgacccatggattatttagaaatatgttgtttagttaccatgtatttggggatttgtcagatgtctttcttgtgtttatttctagtttaattccattgtggttgaggaacatacgctgtatgatttcagttcttttcagt

SEQ ID NO: 769277 - DNA, 495 bp, Homo sapiens
cagcaatggagcaaagtttttggtcagcaatctggctgctcccgttttattcgactagtggattttgctttccttgagggagcactggggaggaatatacagggactggactattttagcagagtctgctttttggtataagggcttcattttggggattgtyttagaggttgaatatcattgaccttccttgccaggattgggctttttctaggaatacaactgcaatgtaactgcctgtcagtcctcacattgctaataatctactccaaaagcgttatcaacatttaccagctcttatgtatgacccatggctattcttaagtcatgagaattattagagtgtcttctgttgcacttatggaatcattagagattatcttgttaaattgattccagttgccctgtttcttctgaaagctaccacataggctcatttacatttgccaaacaatattttatctccttgtttgatatttgaagtacactatagtt

SEQ ID NO: 769278 - DNA, 672 bp, Homo sapiens
cctagaatttaaaatatttattttgaaaaaaatgtgtttgtaattttaattgtgaaagtaatacataactactatttttaaaatttaacagaattatgtaggcgtataagctaacatgtcaatcttctgtgccactcattgtcgtccccaatactgagctctactatttacttggaacatattcttccagacattattatgtgtatattgacattgatatatatgtgtacgtgttgttgttttttccaacagtgagattatactatatgattagtgcagttgcatccccttttccttcattttatttaaaggctgcatagtgtctcatgaaccttaatttttttcaatcaagttccttttaatggattttcaatttgaatccaaccttccatgggaaaaacaggattgaaataaatattctcatatacattattctcacactcaygttcaagtaattctgaattctgaatggtagattcccaaacatgtaattcctcaatcaaggcttctctaaggtgcacacccaccagcagtttatagaagtgccaaaattatccactcttcacatacaattgtgaaggccttcctaaatgcattttttttttgccgtatcttatcacgatcagtcaatacataactcagttttaattaggcaattgtgtttgaactctg

SEQ ID NO: 769279 - DNA, 466 bp, Homo sapiens
acctgaacagtgagaatagacccttctctttgacaactgttcatcaaaatagatacaaaatcatttaaaaaaaaaacatactggtcaacccatcagatagacacaggtcattcaaatcactgaaggagaaaaaccacgagaaggaggggggctgtcaaccattaacatyaagttactgaatttatcaaaataacatgttgtttattcctgccattggatgaagaatggaatagatttttctgcaacaagtgcagtttaagtctgacccctctaacccaagttgtgcgggtccctcagccctcaaattcaaccacacaagtgataatatttttatgccaatcccatggtaacaagaatagttaataaaggagactttctctgattataaatgaagaacaggagaataatcagcagtcatcattcaaaaccaggaagctgtttgtaacactttagttacaaacacttc

SEQ ID NO: 769280 - DNA, 602 bp, Homo sapiens
acaccagtcagaatggctattattaaaaagtcaaaaaataacagatactggcaaggctgtgaaaaaaagacaatgcttatacacggttggtaagaatgtaaactagttcggccattgtggaaagtagtttggagacttctcaaagaacttaaaagcagaaccaccactcaacccagcaatctcattactgaattaatatccaaaagaaaacaacccattctaccaaaaagacacatgcacttacatgtttacatggaaacaacctaggtgcccattaatggtgaattagataaataaaatgtggtatatatacagaatggaatactatgcagtcataaaaaagaataaaattatgtcccttcaagcaacgtggattcagctggaggccattatctcaagagaattaatgcagtaacagaaaaccaaataccatatattctcacttataagtgagaactaaacartgggatctcagggacataaaggaactaaacaagaggtactcagggacataaagatggcaacagtcaaaactggggacttctagaggagagagtgagagggggcaagggttggaaaactaactattgggtactatgctc

SEQ ID NO: 769281 - DNA, 612 bp, Homo sapiens
tactgctaaattctgaattctaccaaactttaaagaactgacaccaatccttctcaaactattctgaagaattgaagcacaggatattcttcctaactcactctacaaggacaatactaccctgatatcaaaaccacataagaaaacaagaaaattactggccaatatacctgatgaacactgacagacaaatcctcaaaaaattactagcaagttaaatccaataacacatcaaaatataatacagcatgatcargtaagatttattctagggatgcaaaaatagttcagcatatgttgatctagtttgaatgtttatcacctctaaatctcatattgaaatttgattatcagtgtcagagttcgggtccagtgggagctgtcatgggggtgtatccctcatgaatgccttgaggtaataagtgaatacttgctctactggttcttgctatattggcatctaatccaagcagatttttgtgttatgctttttgaacagcctgcagaactattaaccaaataaccctcttctttataaattacccagcatcagatattcctttatagcaatgcaaaataaactaatatatatgcaggttaatttatgtgata

SEQ ID NO: 769282 - DNA, 550 bp, Homo sapiens
agactaatgaaggagcaaaggcccttctccacacctccaacaagctgcagttgacccaaggagagaaggccagttatttcccatgggtcccacacacaccccatggctcaccaccagacaggtttctccttgcttgggcccacagcacaaaccctccatcttgggctgactgcactgagtgactgctgacctgcatatctctgaggtggaacccccggagtcaagcaaactacctttggccacaactactgctaaaatttcttcctctgctacctctaagctggaaagggaacataaatactgtaatcacyccagcgctgcaatgggcagcccaggagtgccaagttgcgaactatagccagcaatcaagggggagagaaacccacactttcagagcaccaagagggaacaaggctgcaactgagaggaaacaaaggggagccacacaaccaaacaagagtctaccagctgacctataagcctaagtgtcacctgctggataacacctcaaagcttcaacatcaaaaatacctcactaacataccccgct

SEQ ID NO: 769283 - DNA, 641 bp, Homo sapiens
gaagggtgtagtttttaaggtaaaagataaagaaaaaagaacctatgacatattcactgccatagtcaatcttgtacgtgggctgcctcagacagtcacagaagttaaataaggaattggcttttcacatccaaactgtctgtttcctattaagtttctgccccttcatttcctttttgtttattcctctgaagtttcttcttggaagctactgatgtggtggtaagagaamaaaacttgctttaagcactcatcatacaaattaaattttacgtaaaagcaattggtattgctgctgagtaagttcttcctgtagatctctcagacactctgcaaaattgcctgctgacctactccatgggccagagatgccagtggcctgatagccaatagtatctatcataggtgacatttatagtggagagctcctttcagttgtgccaaaagtacacagcaactgcaaacaggctatttgagatgaaatgatatattatattaaattatatgctgcactttcaactgaaaaatgagcatcctaaagcactaaaatactcttgaaaaccaacctgaaaaaactgaaaattagaaaattttatttcgatgaacggagtaggtaaaaatgcataaagatggcatctgca

SEQ ID NO: 769284 - DNA, 616 bp, Homo sapiens
ttattagtcattcaaagaaatgggaaagtatatttcagggatgaaataaaatatttctgcggaaacaaatttgtcttgtgtggaaaaaagcaagggtaacaacagcagaacgaacaagtggttccaaaactggtctaaggggtaactcagtaccatgttatgtgyggtcttgaaggttatgatgaggagttttctattattctaaggataaggggatttccacagtgaagtgacataatctgatctttgctttttaaagtagagtctggctgctatgtaaatggtagaacatagtgaagtgagaatggaggtgaatgtacccttaagatactatttcaatagactaggtgaaagatgttaggtgttaggagtttaacagtgatggttgaattgcaaaaatatttttgaggtgaatccaaggagattaactaatgaattgagtgtgtcatgtgaggggatgtgaggaatcaaagacaatgttttgtgtggagaataaacaaacaattcaatagaatggtgcatttgttgatatgacgaatatttgggagagtagctttgacaaattaaaccaaaaaagtctaaaactcagtaatgagggaaaagataaaatttgaat

SEQ ID NO: 769285 - DNA, 573 bp, Homo sapiens
caagtatttaattaaaacatggagtatctaccttgtgctaagcacagtgctaatcactgagatacaacgataaacaaaccagacaaatttcttgccctcatgcagcttgtatttagctaacaattcttaaaagaaagatattgctacattgttttatatagtaactatgatataaaaataaatatgtrtttggtctctgcctctggtttctgacccagagatttaaaaattcttatttcctgagtaatggggctgatagcagcatcctacatagagttcctaaatctcttgaaattttctgggtgatgggagggtcttttagtctaataaggctcttggtgggctcctggatagcttcttgagaagcactggtcaccagagatatgaagccatgattagacgggtagaattttcagccccataccctcatcctctggggagggaagagtgggcgggaagtaaatgaataatccaccattcatacatgataatgctttcataaaactccctaaactacagggtttggggagcttctcagttggtgaacacaaacatgcgctgaaagggtagcac

SEQ ID NO: 769286 - DNA, 555 bp, Homo sapiens
gccctgacaccaaaaatgactgtgtttggagacagggcctttaaggaggtaattaaggttaaatgaagttattagggcaggatagggccctaatccaatagaactgttgtccttataagaagaggaagagacaccagaactctctctctctgtgcctgcacaagaaaaggacacgtgaggacacagtcagaaggtaccatctacaagccaaggagagaggcctctctggagaccaaycctgctgacaccttgattttggatttctagcttccagaactgtgagaaaatacatttctgttgtgtaacccatccagcctgtgtattttgttaaagcaacctgaacagactaataaaggatccaaccttatttttttctccatttagcaagataactccatctattaaacaattctctctcccttgatttgtggtgtcgtttttatcacatgtaaacgttgagttctcttttatgttttatgctatgtttcagttatcttatagcatcttatgagggcattcctgtgccaatgctacactgattttattactctagcc

SEQ ID NO: 769287 - DNA, 609 bp, Homo sapiens
aagcggcaggctccctgacgcctggctctctccccacccctatggccagcatggtgcaccccctaccactcccgggacaggatgcaaaagaggctccagagtcagagtgccaagccagggaatcccagtcccagactcagagcccgggcctgcactttgccccctgcccttgatcaaccccactgccccaccagagctgccagggtggcacagggccctgtccagcccctggcacacacttccctgccaggcctcagcctctagcataagctccagagagccagggcccatcagtttctctctgtggatttgtatctcagctccatgatgccttgggctttctgtctcctcaacaagagygcagcttgctgaatgtcagctgcctgagagagctggggcctgacttactagggcattaaatcctaagaggtcctactgaggtgtggcaggatcacaggccagtggaaaaagggcaggtcagatgggcaaggcccaggactttcagattaactgagaggatatcgaggccaagcatggcagggggaaggtcagtgggtgtcaagagacccaggtctgaccccggatgtttgctccatgtgacaaaagcag

SEQ ID NO: 769288 - DNA, 570 bp, Homo sapiens
tcaaaaaaaaagaagacccttgaagtgcaaactgtaaaaaaaaatatgaacatgactatatcagttcactcttcaattatacactatatatatttaacattgaaaaattaataaaactcatagatagatggtagactggaaggagatatttacagtccttaaaactgttgaggcgttaatatctacaatatayaaaaaactcttgcaaatcagtaagacccaagagaaaaacaggcgagagacatgcagagttaatttacaaaagaggaagcccaaatggctaacgagtatagaatggaatgctcaaactcactagtaatcagagaaatgtacatgtaagtgacataccaactaacatccatcaaaatggcaaaatgagaaaagtggataatgctaagagttgtcaagggtgtgggggaataagaactcttgtgcagttcttgtagaagtataaactggcatagactttttagcattacttagtaaaaatgggtattcctacgccatttggcctcatgataccattcctgggtatacagttgacccttgaacaacacaagtttgtgctac

SEQ ID NO: 769289 - DNA, 541 bp, Homo sapiens
cctgaaagcgctccaaatgtccacttccagatactacaaaaggagtgattccaacctgctctatgatagggaatgttcaactctctgtcctgaatacaaacatcacaaagatgtttctcagaacgctgcagtctgcaatttgtatgaattcccgcttccaacgaaatcctcaaaactagccaaatatccacttgcagattccacaaaaagagcatttcaaaactgctctatcaaaagaaaggttcaamtttgttagttgagtagatacagcataaacaagtttctgagaatgcttctgtccagtttttatgggaagatatttcctttttcaccttagccctgaaagcgctccaaaagtccagttccagatactacaaaaggagtgtttcaggactgctctatgaaagggagtgttcaacttttgacttgaatgcaaacatcagaaagcagtttctcagaacgctgctgtgtgctttttatatgtattcccgcttccagcgaaatccccaaagctagccaaatatccacttgcagattccag

SEQ ID NO: 769290 - DNA, 573 bp, Homo sapiens
ttatgggaagatatttcctttttcaacataggcctgaaagcgctccaaatgtccacttccagatactacaaaaggagtgattccaacctgctctatgatagggaatgttcaactctctgtcctgaatacaaacatcacaaagatgtttctcagaacgctgcagtctgcaatttgtatgaattcccgcttccaacgaaatcctcaaaactagccaaatatccacttgcagattccacaaaaagagcatttcaaaactgctctatcaaaagaaaggttcaamtttgttagttgagtagatacagcataaacaagtttctgagaatgcttctgtccagtttttatgggaagatatttcctttttcaccttagccctgaaagcgctccaaaagtccagttccagatactacaaaaggagtgtttcaggactgctctatgaaagggagtgttcaacttttgacttgaatgcaaacatcagaaagcagtttctcacaacgctgctgtgtgctttttatatgtattcccgcttccagcgaaatccccaaagctagccaaatatccacttgcagattccag

SEQ ID NO: 769291 - DNA, 575 bp, Homo sapiens
tgggaagatatttcctttttcaccttagccctgaaagcgctccaaaagtccagttccagatactacaaaaggagtgtttcaggactgctctatgaaagggagtgttcaacttttgacttgaatgcaaacatcagaaagcagtttctcacaacgctgctgtgtgctttttatatgtattcccgcytccagcgaaatccccaaagctagccaaatatccacttgcagattccagaaaaagagtgtttcaaaactgctccttcaaaacggtggttcaattctcttagttgagtacacacatctcaaataagtttctgagaatgcttctgtctagttgttatgggaagatatttccttttccaacataggcctgaaagcgctccaaatgtccacttccagatactacaaaaggagtgattcaaacctgctctatgatagggaatgttcaactctgtgtcctgaatacaaacatcacaaagatgtttctcagaacgctgcagtctgcaatttgtatgaattcccgcttccaacgaaatcctcaaaactagccaaatatccacttgcagattccacaaaaa

SEQ ID NO: 769292 - DNA, 611 bp, Homo sapiens
gttctactctgtgacttgaatgcaaacatcccaaagaagtttctgagaatgcttctgtctagatttgatctgaagacaatcccgtttccaacgaaatcctcaaggctaggcaaatatcctcttgcagattccagaaaaagagtgtttcaaaactgctccttcaaaacggtggttcaattctcttagttgagtacacacatctcaaataagtttctgagaatgctgctgcctagttgttacgggaagatatttccctttccaacataggcctgaaagcgctccaaatgtccacttccagatactacaaaaagagtgtttcaaacctgctctaccaaagggaatgttctgctctgtgacttgaatgcaaacatcccaaagwagtttctgagaatgcttctgtctagattttacctgaagacaatcccgtttcccacgaaatcctcaaagctatgcaaatatcctcttgcagattctacaaaaagagtgtttcaaaactgctctatgaaaagaaaggttcaactctgtcagtagagggcacacatcacaaacaagtttctgagaatgcttgtgtctagttgttatgggaagatagttcctttttcaacataggc

SEQ ID NO: 769293 - DNA, 497 bp, Homo sapiens
tctgagaatgcttctgtccagattttacctgaagacaatcccgtttcccacgaaatcctcaaagctatgcaaatatcctcttgcagattctacaaaaagagtgtttcaaaactgctctatgaaaagaaaggttcaactctgtcagtagagggcacacatcagaaacaagtttctgagaatgcttgtgtctagttgttatgggaagatatttccyttttcaacataggcctgaaagcgctccaaatgtccacttccagatactacaaaaggagtgattccaacctgctctatgatagggaatgttcaactctgtgtcctgaatacaaacatcacaaagatgtttctcagaacgctgcagtctgcaatttgtatgaattcccgcttccaacgaaatcctcaaaactagccaaatatgcacttgcagattccacaaaaagaccatttcaaaactgctctatcaaaagaaaggttcaactttgttagttgagtagatacag

SEQ ID NO: 769294 - DNA, 497 bp, Homo sapiens
tctgagaatgcttctgtccagattttacctgaagacaatcccgtttcccacgaaatcctcaaagctatgcaaatatcctcttgcagattctacaaaaagagtgtttcaaaactgctctatgaaaagaaaggttcaactctgtcagtagagggcacacatcagaaacaagtttctgagaatgcttgtgtctagttgttatgggaagatatttcctttttcaacataggcctgaaagcgctccaaatgtccacttccagatactacaaaaggagtgattccaacctgctctatgatagggaatgttcaacwctgtgtcctgaatacaaacatcacaaagatgtttctcagaacgctgcagtctgcaatttgtatgaattcccgcttccaacgaaatcctcaaaactagccaaatatgcacttgcagattccacaaaaagaccatttcaaaactgctctatcaaaagaaaggttcaactttgttagttgagtagatacag

SEQ ID NO: 769295 - DNA, 530 bp, Homo sapiens
aaagaaaggttcaactctgtcagtagagggcacacatcagaaacaagtttctgagaatgcttgtgtctagttgttatgggaagatatttcctttttcaacataggcctgaaagcgctccaaatgtccacttccagatactacaaaaggagtgattccaacctgctctatgatagggaatgttcaactctstgtcctgaatacaaacatcacaaagatgtttctcagaacgctgcagtctgcaatttgtatgaattcccgcttccaacgaaatcctcaaaactagccaaatatgcacttgcagattccacaaaaagaccatttcaaaactgctctatcaaaagaaaggttcaactttgttagttgagtagatacagcataaacaagtttctgagaatgcttctgtccagtttttatgggaagatatttcctttttcaccttagccctgaaagcgctccaaatgtccacttccatatactaaaaaaagagtgtttcaaacctgctctaccaaagggaatgttctactctgtg

SEQ ID NO: 769296 - DNA, 597 bp, Homo sapiens
tttttgtggaatctgcaagtggatatttggctagttttgaggatttcgttggaagcgggaattcatacaaattgcagactgcagcgttctgagaaacatctttgtgatgtttgtattcaggacacagagttgaacattccctatcatagagcaggtttgaatcactccttttgtagtatctggaagtggacatttggagcgctttcaggcctatgttggaaaaggaaatatcttcccataacaactagacagaagcattctcagaaacttatttgagatgtgtgtactcaactaagagaattgaaccacccttttgaaggagcagttttgaaacactctttttctggaatctgcaagtggatatttggctagctttggggatttcgctggargcgggaatacatataaaaagcacacagcagcgttgtgagaaactgctttctgatgtttgcattcaagtcaaaagttgaacactccctttcatagagcagtcctgaaacactccttttgtagtatctggaactggacttttggagcgctttcagggctaaggtgaaaaaggaaatatcttcccataaaaactggacagaagcattc

SEQ ID NO: 769297 - DNA, 587 bp, Homo sapiens
cctttcttttcatagagcagttttgaaacactctttttgtagaatctgcaagaggatatttgcatagctttgaggatttcgcgggaaacgggattgtcttcaggtaaaatctagacagaagcattctcagaaacttctttgggatgcttgcattcaagtcacagagcagaacattccctttggtagagcaggtttgaaacactctttttgtagtatctggaagtggacatttggwgcgctttcaggcctatgttggaaagggaaatatcttcccgtaacaactaggcagaagcattctcagaaacttatttgagatgtgtgtactcaactaagagaattgaaccaccgttttgaaggagcagttttgaaacactctttttctggaatctgcaagaggatatttgcctagccttgaggatttcgttggaaacgggattgtcttcagatcaaatctagacagaagcattctcagaaacttctttgggatgtttgcattcaagtcacagagtagaacattccctttggtagagcaggtttgaaacactctttttttagtatatggaagtggacattttgatcgctttcag

SEQ ID NO: 769298 - DNA, 587 bp, Homo sapiens
cctttcttttcatagagcagttttgaaacactctttttgtagaatctgcaagaggatatttgcatagctttgaggatttcgcgggaaacgggattgtcttcaggtaaaatctagacagaagcattctcagaaacttctttgggatgcttgcattcaagtcacagagcagaacattccctttggtagagcaggtttgaaacactctttttgtagtatctggaagtggacatttggagcgctttcaggcctatgttggaaagggaaatatcttcccgtaacaactaggcagaagcattctcagaaacttatttgagatgtgtgtactcaactaagagaattgaaccaccgttttgaaggagcagtttkgaaacactctttttctggaatctgcaagaggatatttgcctagccttgaggatttcgttggaaacgggattgtcttcagatcaaatctagacagaagcattctcagaaacttctttgggatgtttgcattcaagtcacagagtagaacattccctttggtagagcaggtttgaaacactctttttttagtatatggaagtggacattttgatcgctttcag

SEQ ID NO: 769299 - DNA, 527 bp, Homo sapiens
caaagaagtttctgagaatgcttctgtctagatttgatctgaagacaatcccgtttccaacgaaatcctcaaggctaggcaaatatcctcttgcagattccagaaaaagagtgtttcaaaactgctccttcaaaacggtggttyaattctcttagttgagtacacacatctcaaataagtttctgagaatgcttctgcctagttgttacgggaagatatttccctttccaacatgggcctgaaagcgctccaaatgtccacttccagatactacaaaaagagtgtttcaaacctgctctaccaaagggaatgttctgctctgtgacttgaatgcaaacatcccaaagaagtttctgagaatgcttctgtctagattttacctgaagacaatcccgtttcccacgaaatcctcaaagctatgcaaatatcctcttgcagattctacaaaaagagtgtttcaaaactgctctatgaaaagaaaggttcaactctgtcagtagagggcacacatcacaaacaagtttctg

SEQ ID NO: 769300 - DNA, 630 bp, Homo sapiens
gtttacatgacaaaatgaaggttgatatgtctggcctacaagctaagaatgagattctttctgaaaaactttctaatgctgaaagtaaaattaacagcctacaaattcagctccataacacaagagatgctcttggaagagagagtttgattttggaacgtgtgcaaagagacctcagccaaacacagtgtcagaagaaagaaactgaacaaatgtaccaaattgaacaaagcaaactgaagaaatacattgccaagcaggaatctgtagaggagagattatctcaactacaaagtgaaaataygttgcttcgacagcaactggatgatgctcacaagaaagctaacagtcaagaaaagacaagcagtactatccaagaccagtttcattctgctgccaaaaatcttcaagctgagagtgaaaagcagattctttcactacaagagaagaacaaggagctgatggatgaatataatcatttaaaagaaagaatggatcaatgtgagaaagagaaagcaggaagaaaagtaagtattaagaaagataaaatatttttcaaccttcctgaaagaaaatgtaaagtaatatttggttatggctaaatgttgtatctagttgaatataaaatgt

SEQ ID NO: 769301 - DNA, 622 bp, Homo sapiens
tggaatcataccgttgtagactagctgctgctgtacgtgactgtgatcaaagtcagacagcaagagacctaaaacttgatttccagagaacaagacaagagtgggttcgtttacatgacaaaatgaaggttgatatgtctggcctacaagctaagaatgagattctttctgaaaaactttctaatgctgaaagtaaaattaacagcctacaaattcagctccataacacaagagatgctcttggaagagagagtttgattttggaacgtgtgcaaagagacctcagccaaacacagtgtcagaagaaagaaactgaacaaatgtaccaaattgaacaaagcaaactgaagaaatacattgccaagcaggaatctgtagaggagagattatctcaactacaaagtgaaaatatgttgcttcgacagcaactggatgatgytcacaagaaagctaacagtcaagaaaagacaagcagtactatccaagaccagtttcattctgctgccaaaaatcttcaagctgagagtgaaaagcagattctttcactacaagagaagaacaaggagctgatggatgaatataatcatttaaaagaaagaatggatcaatgtgagaaagagaa

SEQ ID NO: 769302 - DNA, 629 bp, Homo sapiens
gcattaataaccatcatatattgaatttcttaagtgtgaaaagctttatatcaattatttctgattctcacacaactctgtgagataggatttttcccattttgtacatgagaaaactggagctcaaagaagttaaatgacttgcctccagctatgasgtggtagatcccatatgtaaacatagcctgtctcattccgaagctaatgatcctttcaaacatcatatttttcacaaacattactcctttcaatgcacaccaaacttagggtagttactacctctcagtggaaaaggaagagtataaagtttcagctacaataagtatagagttttatttcttaaaggtaataatataaagcaaatatggcacaatgttaacattgaaattgatttttgttaattttttccatagttttatgtgggtttgaagtatttcatttaaaaaattgctcccactaataaattataaagttgaacttcttagctaatgaaattttgccaggaatccaaaacattactcataaaatcaaaataggatggcttcaataagaaattaaaccccctctttcctcttcctaccaatagagattaatgactgtcatgaatacagtcagttccctttacagag

SEQ ID NO: 769303 - DNA, 629 bp, Homo sapiens
gcattaataaccatcatatattgaatttcttaagtgtgaaaagctttatatcaattatttctgattctcacacaactctgtgagataggatttttcccattttgtacatgagaaaactggagctcaaagaagttaaatgacttgcctccagctatgacgtggtagatcccatatgtaaacatagcctgtctcattccgaagctaatgatcctttcaaacatcatatttttcacaaacattactcctttcaatgcacaccaaacttagggtagttactacctctcagtggaaaaggaagagtataaagtttcagctacaataagtatagagttttatttcttaaaggtaataayataaagcaaatatggcacaatgttaacattgaaattgatttttgttaattttttccatagttttatgtgggtttgaagtatttcatttaaaaaattgctcccactaataaattataaagttgaacttcttagctaatgaaattttgccaggaatccaaaacattactcataaaatcaaaataggatggcttcaataagaaattaaaccccctctttcctcttcctaccaatagagattaatgactgtcatgaatacagtcagttccctttacagag

SEQ ID NO: 769304 - DNA, 516 bp, Homo sapiens
atcccagagattctggtatgttgtatctttgttttcattaatttcaaaaaaattattgatttctcccttaattttaattttattgtttattaaaatgccactcaggagtaggttgtttaatttccttgtaattttactgttctgagtgatcttcttagtatcgatttctatttttatagtgctgtagtccaaggatgggtcagtatgatttctctttttttttgttagtttgctgagcattgtttaatggccaattgcgtggcagaytttagagtatgtgccatgtacagatgagaagaatatataatctgttgtttgaagtagagagttctgtagatacctgttagacaaatttgttccaatgtcaagttcaggtctcaaatatctcgttagtcttcatctaatactgtcagtggggtgttgaagtgtcctactattattgtgtgattatccaagtctcttcagaagtctctaagaacttgttttatgaatctgagtgcttttgtgttgtgtaca

SEQ ID NO: 769305 - DNA, 682 bp, Homo sapiens
aaagcgctccaaatgaacacttgcagattctacaaaaagaatgcttctaaactgctgtatcaaagaaagcgttcaactctgtgagttgaatgcacacatcccaaagcastttctgagaatgcttctgtttagtttttatgtgaagatattttgctttccaccataagccttcaaagcgctccaaaggaacacttgcagactatgcacagagaatgcctcaaatctgctctatcaaaagaaaggttggactctgtgagttcaatggacacatcacaaagcagtttctgagaatgcttctgtccggtttttctgtgaagatatttccttttgcaccctaggcttcaaagcgctccaaatgaacacttgcagattctacaaaaagaatgtttcaaaactgctctatcaaagacggagttcaaccctttgacttcaatgaacacaacacagagcagtttctgagaatgcttctgtgtagtttttatccgaagatatttccttttccaccataggcctcaaatcgctccaaatatcctcttgtagatcgtaagaaaacactgtttcaaaactgctttctcaaaaggaaggttcaactctttgagttcaatgcgcacatcacaaggaactgtctgagcaaacttccgtctagtttttatgtgacgatattaccatttccaccgcaggt

SEQ ID NO: 769306 - DNA, 682 bp, Homo sapiens
aaagcgctccaaatgaacacttgcagattctacaaaaagaatgcttctaaactgctgtatcaaagaaagcgttcaactctgtgagttgaatgcacacatcccaaagcactttctgagaatgcttctgtttagtttttatgtgaagatattttgctttccaccataagccttcaaagcgctccaaaggaacacttgcagaytatgcacagagaatgcctcaaatctgctctatcaaaagaaaggttggactctgtgagttcaatggacacatcacaaagcagtttctgagaatgcttctgtccggtttttctgtgaagatatttccttttgcaccctaggcttcaaagcgctccaaatgaacacttgcagattctacaaaaagaatgtttcaaaactgctctatcaaagacggagttcaaccctttgacttcaatgaacacaacacagagcagtttctgagaatgcttctgtgtagtttttatccgaagatatttccttttccaccataggcctcaaatcgctccaaatatcctcttgtagatcgtaagaaaacactgtttcaaaactgctttctcaaaaggaaggttcaactctttgagttcaatgcgcacatcacaaggaactgtctgagcaaacttccgtctagtttttatgtgacgatattaccatttccaccgcaggt

SEQ ID NO: 769307 - DNA, 599 bp, Homo sapiens
gcgcacatcactacgcccggctaattttggtattttattaaagatggggtttcaccatgttttccaggctggtctgaactcctgacctcatgtgatccacccacccacctcggcctctcaaagtactgggattacaggcgtgagccaccacgcctggcctacatacttggataatatggtcttttagtctttaatatgattataaattttaaggatatttctattcctacagaaatggagtttttttktttttttttttggagatggagtcctgctctgttgcccaggctggagtgcagtggcatgatgtcggctctgctcactgcaacctccacctcctgggttcaagcgattctcctgcctcaacctcctaagtagccacacctggctaatttttgtatttttaatagagacggggtttcgccttattggccaggctggtctcgaactgctgacctcaggtgatccgcctgtctcggcctcccaaagtgctgggattacaggcgtgagccatcatgccaggccagaaatagagttctaaaggactcataactgccaaaaaagaatgacaataactatcttttattgagtactggtat

SEQ ID NO: 769308 - DNA, 625 bp, Homo sapiens
tggaaagcaaaatatcttcacataaaaactaaacagaagcattctcagaaactgctttgggatgtgtgcattcaactcacagagttgaacgctttctttgatacagcagtttagaagcattctttttgtagaatctgcaagtgttcgtttggagcgctttgaagcctacggtggaaaaggaaatatcttcacataaaagctagacagaagtattctcagacagttctttgtgatatgtccattcaactcacagagttgaatctttcctttgatagagaagattggaaacrttctttctgcatactctgcaagtgttcatttggagcgcttagaggctcatggtggaaagtgaaatatcttcacatataaactagacagaagcattctcagaaacatttagggatgtgtgaactcaactcacagagttcaactttccttttgatagagctgtcttgaaatcctgcttttgcagaatctgcttgaggatatttggagctctttcaggaattcgttgccaacgggatatctgcacaaaattgacagaagcattctcagaaactttttttgggatgtgtggattcaactcacacagttcaaccttccttttgatagagcagtcttgaaa

SEQ ID NO: 769309 - DNA, 572 bp, Homo sapiens
cacatataaactagacagaagcattctcagaaacatttagggatgtgtgaactcaactcacagagttcaactttccttttgatagagctgtcttgaaatcctgcttttgcagaatctgcttgaggatatttggagctctttcaggaattcgttgccaacgggatatctgcacaaaattgacagaagcrttctcagaaactttttttgggatgtgtggattcaactcacacagttcaaccttccttttgatagagcagtcttgaaatactgcttttgaagaatctgcttcaggatatttggagctctttgaggaattcgttgcaatcgggatatctgcacatacaaattagacagaagcattcccagaaactttttcgtgatgtgtggattcaactcacagaattcaaccttccttttgatagagcattcctgaaaccctgcttgggtagaatctgcttgaggatatttggagctcttggaggaattcgtggcaaacgagatatctccacatacaatctagacagaagcattctcagaaaattttgtgttgtgtgcattcaagtcacagagtt

SEQ ID NO: 769310 - DNA, 622 bp, Homo sapiens
gagacagaaaatcttgcctggaaaggccatataacaatgtcctctgttgggtggaagagccaagatcaaaccttggctatttcattgcaaaatgtaggtgtaccatctttttgcaacccccaccacccggtttcaatagatttgctggttctatagtcttgggggagaaagtgtgaacagaatctgatggaagcattgtcttcatgtttatcctcttatgagatgaattgtgaaaagaatgaaagatactctcgaaacccttgggtcccaagattctgggaagaatagcaacctaattctatgattcttatgcccaaatatcggtttattcagcagcctctgtaggycagcctgggtctcagccaatagagtccggcttattaaaaagggacatgagtctcaaacaccagctcaaataccagcctttttaacaaaaagcttcaaacaccagcttctttaacaaaactaatagcaatggtggtggcagcagcagcaacagcatgagatgcgataagaagctgaaattcttcaggccctggagttgcaggggaaggatatgccgcaaagagtgattgcctttaatctaagaataatacagagaccaatgggaaagcagactgtt

SEQ ID NO: 769311 - DNA, 559 bp, Homo sapiens
aactctgtgacttgaatgcacacaacacaaaattttctgagaatgcttctgtctagattgtatgtggagatatctcgtttgccacgaattcctccaagagctccaaatatcctcaagcagattctacccaagcagggtttcaggaatgctctatcaaaaggaaggttgaattctgtgagttgaatccacacatcacgaaaaagtttctgggaatgcttctgtctaatttgtatgtgcagatatcccgattgcaacgaattcctcaaagagctccaaatatcctgaagcagattcttcaaaagcagtatttcaagactgctctatcaaaaggaaggttgaactgtgtgagttgaatccacacatcccaaaaaaagtttctgagaaygcttctgtcaattttgtgcagatatcccgttggcaacgaattcctgaaagagctccaaatatcctcaagcagattctgcaaaagcaggatttcaagacagctctatcaaaaggaaagttgaactctgtgagttgagttcacacatccctaaatgtttctgagaatgcttgtatc

SEQ ID NO: 769312 - DNA, 644 bp, Homo sapiens
cagccacagtagggtagggcaccagacaaagtcctgagacccccattacaggccctctctccaggatgacatttctaaacataccctgggctggaaggaaacccactgccttgaaaggaagggtccagacctagcagaatttatcaccttctgactaagaactcttgggccctgaaaaatcaacagtggcatccaggcagtacttactgtggcctttgggtgagactcagaattgtgctggctttaggtgtgacccagaatgtttgtagctgtggtggctactcagaaggactccttcttcctgagaaaaggagaggaaacagtaaaaggaaatttttctggaagcttgggtgccagcttggccacagtggagtagagcactaagcgtgttcttagggtccccaatcccaggccttggcttttggatggcatttctgaacctgtcctaggcctgagaggagactacttccctgaagagagagtcccaggagtgacaatattcatcwcaaactgactgaggagaccttgggctcctcagtgaacattaatggtagccaggctgtatttgccatgactctggggcagtggtggtcatggggagagattcttttacttgtagaaagaggagagaagagtgggaagaa

SEQ ID NO: 769313 - DNA, 644 bp, Homo sapiens
cagccacagtagggtagggcaccagacaaagtcctgagacccccattacaggccctctctccaggatgacatttctaaacataccctgggctggaaggaaacccactgccttgaaaggaagggtccagacctagcagaatttatcaccttctgactaagaactcttgggccctgaaaaatcaacagtggcatccaggcagtacttactgtggcctttgggtgagactcagaattgtgctggctttaggtgtgacccagaatgtttgtagctgtggtggctactcagaaggactccttcttcctgagaaaaggagaggaaacagtaaaaggaaatttttctggaagcttgggtgccagcttggccacagtggagtagagcactaagcgtgttcttagggtccccaatcccaggccttggcttttggatggcatttctgaacctgtcctaggcctgagaggagactacttccctgaagagagagtcccaggagtgacaatattcatctyaaactgactgaggagaccttgggctcctcagtgaacattaatggtagccaggctgtatttgccatgactctggggcagtggtggtcatggggagagattcttttacttgtagaaagaggagagaagagtgggaagaa

SEQ ID NO: 769314 - DNA, 635 bp, Homo sapiens
taactttcctgtggcaaatgtggagtaactgtactccacattaatttcacagtggagaaatgtgttaaataccacctcagcctggtggtccgggttaacatgaatagtaaaaattacgttgatagtgttaacgttggatgtgataggatgaaaatgtgatgttatctatttatttcttctcctaaagacccataactccagtctaaacatgaaaaaatatcagacaaattctaatatgccatcatcctacaaaatatctgaccagtacgcttaaatactgtcaagattatcaaagccaggttaagtctaargaactgtcacagccaacagttattaacttgagatatgattaataaatataaggtagtattctagatgagatcctggaacagaataaagatattaagttaaaatttcagaaagtctgaataaagaatagactctagtcaataatacctcaatgttgtttcaataactgaaacaaatataccatactaatataagatgttaataataggagaaactgagtgtggaatagatggaaacactctgtactatatgttaaactgtctgttaatctaaaattatattaaacaattaagttaatttttaaaaagagtttaaagtacacagca

SEQ ID NO: 769315 - DNA, 532 bp, Homo sapiens
tctataatgtcaggcagaaaaaaattaaattaaacttttgccaattttagtggcattaaggtaagataatttacagatctgaggctgtttacttagcttaataaatgtatataataacactgtacttactacatgaggaataaataaataatatatgtaaaacatctggcacagagtagktaagcaagacaaatgccatgcaatattagctttaagattgtctctgtctgtacaataaagctaaatagtatgatcaatttggttcaaatatttaatgaaatagtcccctagatgccacatgtatatatgctttttttaaataagggttttggtttttacgactaacagactaagtattagagatgtatattattatttttgtctacaaataagaagaatcctttaatgataaagaattttgactataggataaacagttaaatgactgatggataaacaagagaataggagcaaaatgtaaaggcattttgagcttattcggacattatactggttcttaaaagaacaaaat

SEQ ID NO: 769316 - DNA, 532 bp, Homo sapiens
tctataatgtcaggcagaaaaaaattaaattaaacttttgccaattttagtggcattaaggtaagataatttacagatctgaggctgtttacttagcttaataaatgtatataataacactgtacttactacatgaggaataaataaataatatatgtaaaacatctggcacagagtaggtaagcaagacaaatgccatgcaatattagctttaagattgtctctgtctgtacaataaagctaaatagtatgatcaatttggttcaaatatttaatgaaatagtcccctagatgccacatgtatatatgctttttttaaataagggttttggtttttaygactaacagactaagtattagagatgtatattattatttttgtctacaaataagaagaatcctttaatgataaagaattttgactataggataaacagttaaatgactgatggataaacaagagaataggagcaaaatgtaaaggcattttgagcttattcggacattatactggttcttaaaagaacaaaat

SEQ ID NO: 769317 - DNA, 593 bp, Homo sapiens
tcttccactacagctaaaatgacttccaggagatttaaagagctggcagccttttccatccccttattttctttcgctctttttcaagccagaaaatacaggctgggccattgaaaagtaggtgatatagaatatacacaaaagaaagtgggaaaggaatttaaacatttcacaaaaaataaactacaaacacaaggaggtagaaatgcaggaaatcagggtcaaaaaagckctaatagaaaacaaatagctatcactttgggaggccaaggcaggccaatcaattgaggtcaggagttcaagaccaacctggccaacatggggaaacctcgtctctactaaaaattaaaagaaaatagtcaggtgtggtgacacacgcctgtaatcccagctactagggaggctgagtcaggagaactgcttgagcccaggaggcggagatcgcagtgagctgagattctcccagggcaacagagcaagactccatctcaaacaaaacagaacaaaacaaacaaacaaaaagtaaatagctagcaaaatgacagatgtaagttcttccttatcagtaattactttaaatgtaaatggattaa

SEQ ID NO: 769318 - DNA, 435 bp, Homo sapiens
aaaaaaaacttttccagagtctgctattctccaccagtaatataactatctcatcaagcaagaaagtacagaatgcctactgtatgctaagtattacgccacatagtaaaagaacacatatttatgcaacttttttaggtcacaagagtaccatttagtaaagtgatctgaagaaaacaataagcaaatacatgatttccttgagcactgaattactttgagtccagactcaaagattaaatatatgacacagtccaagtgatttttagtactgtacagttawagaatttcactatacaccagtcagaaatacttctttttattatctagtgatgatttccctaatgcttcatgaagaattagtctttaataaatagatatagtcagctgaggtgatatgtttttatgacttctggaaagacatgttcttaaaaa

SEQ ID NO: 769319 - DNA, 435 bp, Homo sapiens
aaaaaaaacttttccagagtctgctattctccaccagtaatataactatctcatcaagcaagaaagtacagaatgcctactgtatgctaagtattacgccacatagtaaaagaacacatatttatgcaacttttttaggtcacaagagtaccatttagtaaagtgatctgaagaaaacaataagcaaatacatgatttccttgagcactgaattactttgagtccagactcaaagattaaatatatgacacagtccaagtgatttttagtactgtacagttaaakaatttcactatacaccagtcagaaatacttctttttattatctagtgatgatttccctaatgcttcatgaagaattagtctttaataaatagatatagtcagctgaggtgatatgtttttatgacttctggaaagacatgttcttaaaaa

SEQ ID NO: 769320 - DNA, 638 bp, Homo sapiens
tttcttacacattttgtccatctttgggatagatgtaaagtgtgatgagtggtaattaactgtttattcagaaatcagaaatcatcacagcatcatcaatattattatgaatttcaagtcattatttacttaattgatgccagttggtctgatgaccatttcatttgcatgattgtatttaatcctcacaacattcctatgatatctttatacacatattacagatcaaggcactaatacttagaaaaattaagcagtttcctcaaggtttctgatgatagaaatatcaccagaaatagatgacaaaaacctggcttttgaccccaactctatagtgttaagtcctygtctgtctttcatgtgaataaagtgaaggaaatacaggtgttgaggaataccacggagaatatgatgtaagttgaacaagtcaatatcatccttttgtatctggactatggctcttaaagagatgtgaaaaatatttgcctagtgagataaatttgtgtttgtttctcatgtaaattaaagccaagacttgcatggtgctccatggtcatgagagttcattagaatcacagctttcaactcagacatctcttgttacctcttggccttacaatccaaaatagcttccagca

SEQ ID NO: 769321 - DNA, 568 bp, Homo sapiens
aatccaaacgaagactctgaccgattagactctaataccattgaactgcttacattgtctgaaccttaacttggctaatttggtttggtttgtttcataggaacttttattaaggagtatgccttggcattttgatggtatcctcttgatggtcataataatagtccccttggcacgctgtatcctctcaagtcttaartgttttgtatgcagctatacattgagagtcgaatggagtcactccaactggatcagcaagaacataaagaatcatttagctggtacaaagctgcgacttgtgaattccatataaacaccaaagaagacttgtgagactccataatgaaactaaagatgacttgtgaattccacactgagaccaaataagtccttatgatggtgacagagagcagtgtcaatgcctaaagttttggccaatctctctaaattgaggggctgaccaaaagggggaaattgttaaagcaaactaaatatggtctgagaaggactccgtatttctgtatttgagtccttgtggatgaactgtaacctagcttaataggcagac

SEQ ID NO: 769322 - DNA, 612 bp, Homo sapiens
atttcatataattgtcatgtaatgacgtattattccttttgtctttttcccactaactatttaaaatgtaagaactagctgggcgcagtggctcatgcctgtaatcccagtactttgggaggccgaggtgggcggatgacctgaggtcaggagttcgagaccagcctggacaacatggtaaagccctgtctctactaaaaatacaaaaattagctgggtgtggtggcaggtgcctgtaattccagctactcaggaggctgaggcagtagaatcgcttgaacctggcaggcagatgttgcagtgagctgagatggtgccactgcactccagcctgggcgacagagcgagactccatctcaaaataataataataataataataataataatataaaatgtaagaaccattctttcttagctttcaggccataggaaaacargcagctcggatttggccttcaggctgtattttgcagattcctggtctaaataattaccttaattatcacagtagcagatactagcagatactaagaactagtgtatctccaaagtctagtttggtgcccggtacaaacattctttccccaaggtggagtccacttgaccaga

SEQ ID NO: 769323 - DNA, 644 bp, Homo sapiens
ctgtattttatcaggcaactgggatcccaaagtatctatttcatcagttctatgaggaaaaacagaaccattcacttcataatgaaaaacagtggttagcatgtttttgaatgggattttctgtattttaaagccttttcatgtattttagctcattgaagaggtgggcacagcaaaggcatcattattacttctgttctacagctgaggatgttgaaattgacatgcccaatgcaaggctacacagcttgtctaggaacggaagccagatcttggatttttgtttgtttttgagacagggtctcactctgtcacccagggtggagcgcagtggcgtgatctcggctcaccgcaacctccgcctcctggattcaagcaattctcttgcttcagcctcctcagtggctgggattacrggcgtgcaccaccacgcccagctaatttttgtatttttagtagagatggggtttcgccatattgaccaggctggtctcaaactcctgacctcaagtgatccatccgcctctgcttcccaaagtgctgggattacaggcatgagccactgagccccgccagatctcggatttcttactgctggacagggaaaagtgactggagagtaaattatggtctctgagcccatt

SEQ ID NO: 769324 - DNA, 658 bp, Homo sapiens
aaaccccttccccctcccttgttcaggtgtgctctcaccattgctccacccatgagtcgcacccttctatagaaggaaaattgccttgctgagaaaattaaatttatgttcgagtgctatttcttttgtggtaccgaaaatttataacaatttgcggccaggcgcggtggctcacacccgtaatcccagcactttgggaggacgaggcagatggatcacgaggtcaggagatcgagaccatccatcstggctaacatggtgaaatcccgtctctactaaaaatacaaaaaattatccgggcacggtggcgggcgtctgtagtcccagctactcgggagtctgaggcaggagaatggcctgaacccaggaggcggagcttgcagtaagccgagatagtgccactgcactccaacctgggtgaaagagccagactccgtctcagaaaaacaatttgggggcttgcccaagattcccattctccatctggggcgggtctagacagctctcatcaggagaagtgccccactgccttgttgcagcagcctcgggtaaggaattgagacccacccggtatgatgaataaacccacactctcagcaacgcggaaagaaactgaccggcgaccttggggaaaggatcctcacataccacggtgact

SEQ ID NO: 769325 - DNA, 658 bp, Homo sapiens
aaaccccttccccctcccttgttcaggtgtgctctcaccattgctccacccatgagtcgcacccttctatagaaggaaaattgccttgctgagaaaattaaatttatgttcgagtgctatttcttttgtggtaccgaaaatttataacaatttgcggccaggcgcggtggctcacacccgtaatcccagcactttgggaggacgaggcagatggatcacgaggtcaggagatcgagaccatccatcctggctaacatggtgaaatcccgtctctactaaaaatacaaaaaattatccgggcacggtggcgggcgtctgtagtcccagctactcgggagkctgaggcaggagaatggcctgaacccaggaggcggagcttgcagtaagccgagatagtgccactgcactccaacctgggtgaaagagccagactccgtctcagaaaaacaatttgggggcttgcccaagattcccattctccatctggggcgggtctagacagctctcatcaggagaagtgccccactgccttgttgcagcagcctcgggtaaggaattgagacccacccggtatgatgaataaacccacactctcagcaacgcggaaagaaactgaccggcgaccttggggaaaggatcctcacataccacggtgact

SEQ ID NO: 769326 - DNA, 613 bp, Homo sapiens
acctgcagtctggctctgggctccgtgctgaggcaaggggatgaaaagagaacttttacccacagagaatttacaaacaaacatgtagacagacacatggtaataayagacataagaacagttattgatggtctgctccatcaatacttacaccaaaactcaaggaaattaaatgacttgcctaaggtcaccaggataaacagtggaccaagagcaggctctgctggaggccggtgtcatgttctttccctgaagctcggactaaatggataagtaacaaccagccaggcattgaaaatcctgctcacgagtaccacatacctcattctctcctcaaaacaaggtccattttatacaggagaaaactcaggctggagaaaccatcacagtgactttctcgcagtcaagaatggtgcctgggcagggcatggtggctcatgcctataattccagcaatttgggaggccaaggcgggtggatggcttgagctcaagagtttaaaaccagcctgggaaacatgccaaaaccccatctctacagaaaatacaaaattaggcaggtgtcattgctggtgcctgtgctcccagctacttaggaagctgaggtgggagga

SEQ ID NO: 769327 - DNA, 613 bp, Homo sapiens
acctgcagtctggctctgggctccgtgctgaggcaaggggatgaaaagagaacttttacccacagagaatttacaaacaaacatgtagacagacacatggtaataacagacataagaacagttattgatggtctgctccatcaatacttacaccaaaactcaaggaaattaaatgacttgcctaaggtcaccaggataaacagtrgaccaagagcaggctctgctggaggccggtgtcatgttctttccctgaagctcggactaaatggataagtaacaaccagccaggcattgaaaatcctgctcacgagtaccacatacctcattctctcctcaaaacaaggtccattttatacaggagaaaactcaggctggagaaaccatcacagtgactttctcgcagtcaagaatggtgcctgggcagggcatggtggctcatgcctataattccagcaatttgggaggccaaggcgggtggatggcttgagctcaagagtttaaaaccagcctgggaaacatgccaaaaccccatctctacagaaaatacaaaattaggcaggtgtcattgctggtgcctgtgctcccagctacttaggaagctgaggtgggagga

SEQ ID NO: 769328 - DNA, 617 bp, Homo sapiens
atgtcagctagaactttcattagcaaatggttttagtcagtgaaaagtaatggcaaaataaatgcggcattttgacgtagctgtatctattctggcacagtgcggtttcgaggctaatgtcttttcaaacagctctgttttgcctgcagacttgaataccctcrttacagtgtttgaaaaaaaaagttcccttatgtttttttaaagagcgccattcttcaaaaagatgtcaagaagctctttttttcccccttgctacaaggtgtaatgtagagataagcacaaaatctggttggaaatgtgacctatattggactggcaaagcttaatatcaagcaaacagccagtgtgggagctggttttgtcctaccttgctgctggtatttgcagaaaagtaccacatattatgtgtggacagtgagagcagtttgaaagtcaattacagtttttaaaaattggaatcatttgctcatcgagctcatcagagttttgaacaagtccctggccttcctcacaacagccaaagccaggtcttttggaaaacattttattttcatgctcagcgtaataagaagagaaaagtcgtgttttgcagatgaaatggtgctgataataaa

SEQ ID NO: 769329 - DNA, 592 bp, Homo sapiens
ccaagctctccctagggcatggctggaagaaaacaggttgaggggccagaaaggaggggcccagggtagggcctgggggctcacacctgtaatcccagcgctttgggaggccaaggtgggcggatcacttgaggccaggagtttgagaccagcctggccaatatggtgaaacccctctctactaaaaaagatacaaaaaattaggtgggtatggtggtgcctgcctgtagtcccagctgcttggaaggctgaggcaggagaattgcttgaacccagaaggcagaggttgcagtgagctgagattgcactactgcactccagcctgagcaacctggtaatagccatttctctagagcctgtyacctagtgcatttcctagtaagcctcaatttaggatttagattgtcaccacagctccagagtcatccaagcgtgaactggctccttggagatcttgtcacctgtgtctcacaggactcatttctgaccacccaggtgcagaagcactggaaactgtggtggacacaagcttcatcgaagcctgtgccaaccattcagttatcaccctggtgctttgcaaacatcattacaa

SEQ ID NO: 769330 - DNA, 634 bp, Homo sapiens
gattgctcacaaattatacaaatcacattgattactgacaaatcataatgtttacagagcactatttggctttggctccaaagcatgagtaggtatttaattaacaactgtcagatataatttacaccattacaatgaccagaaaatggctgattgctgattttacatactagaacaaatactctgcaactagccttggtaaaggcaaaataactagggactcaacgatagacaataaaatcaaatttcagtaccgtgtttaaccggaagattcttgaaggccatgatacctctgcctccgattagaaatggacatccttttgctcataggtccgagaaactctgtaactagttttgtttcccttttttgccttgactaccaggaaactccaagccaaatctttagccccagtacataacctttttggatactgtggtgtgcaaatgtstattttattctattacgcctgctttttacttttacatgtgttttactacttcattgtatattaaggatctagcctggatgtcagcaaagtacagtccacaggacaaatccagcccaccagcctgtttatgtacagcccacctgttctggataatctgtaatttgttatgcaaataatgggggtgg

SEQ ID NO: 769331 - DNA, 634 bp, Homo sapiens
gattgctcacaaattatacaaatcacattgattactgacaaatcataatgtttacagagcactatttggctttggctccaaagcatgagtaggtatttaattaacaactgtcagatataatttacaccattacaatgaccagaaaatggctgattgctgattttacatactagaacaaatactctgcaactagccttggtaaaggcaaaataactagggactcaacgatagacaataaaatcaaatttcagtaccgtgtttaaccggaagattcttgaaggccatgatacctctgcctccgattagaaatggacatccttttgctcataggtccgagaaactctgtaactagttttgtttcccttttttgccttgactaccaggaaactccaagccaaatctttagccccagtacataacctttttggatactgtggtgtgcaaatgtgtattttattctattwcgcctgctttttacttttacatgtgttttactacttcattgtatattaaggatctagcctggatgtcagcaaagtacagtccacaggacaaatccagcccaccagcctgtttatgtacagcccacctgttctggataatctgtaatttgttatgcaaataatgggggtgg

SEQ ID NO: 769332 - DNA, 596 bp, Homo sapiens
tggccaacatggggaaaccttgtctttaccaaaaatacaaacattagtcaggtgtggtggcatgtgcctatgggctgaggcaggagaatcgcttgaacccaggaggcagaggttactgtgagccgagatcgcaccactacactccagcctaggtgacacagcgaaagtccatctaaaaaaaaaaaagaaaatttgatgatgggcctctaaagtcacagaagccccagtgtctccttttgcccactcctctcttcccaaccgtagcacagttccttgcccccagttagagctccataagcatttgtgraaaagagccacagcagtgcagagcagcagccccagccacaaagattccagaaagcgccccttcattcatctgcaaagagcaggagaaactttaaggctatagtgcccaaaccgtttgtaacactcaagtgaactggcattcacatcatcttcctgctttcattaaacagttccacatcactcacctagtgaatgggcctttttagcagggaagatgatcatccattaagcctggaagggcaggaggcctgcggacacctctgccccctctgccagctccgtggatccct

SEQ ID NO: 769333 - DNA, 531 bp, Homo sapiens
gccgaaacctcgacttgcaaatttgagcctccaaaactgtgggaaaatacagttctgctgactgaagccacctagtacgtggcacgcctaagaaacgaatgtgctatgccatcatccttggctacagctacctcatttctgtgactgtgcttagcctggggagtaaatgattctaggaaactgtgtgttgcatctcctcccaggggtcatcaaggaaccttggactttggctggagatcggctcttgggaaacttagctgtaggtgggtggagatggccttacaaatcctgaggtccacaggcaaacakcaggcctgcattcaaagcacaaggcaagcaaaagagaaaggccagacagaaagccacatggagactcagtttcctctttcctggggtacactgaggactgactgcatccatgtgcccagtacaggggctgatccaaaaacaagcacatttgtgctttttcctcttccttccctctcccttcccctttttcatttattaaactcaagtgaaaagaaaacaaca

SEQ ID NO: 769334 - DNA, 634 bp, Homo sapiens
actggcgctgggttcttgagctggctctgcagttgtgttgcgcaaacctacttttgatttccacgtccggaatatttctagctctgcctgtctctccacttcacagccatttggttcctagaaggtggaatattccgctgttacatctgggactttcctggaatctgtcaacacccatcctgcaagtttggttgctggcatttgggacatttatacatgcataggcaataacaaagtcggacaccgcccctgccaggcataagggaactttgagatgtgttcagatttcagagaccctgacatgaaagaatttagagatgcacctgaaggtcaaggatcagactggcactttcaagaagtcattcaatagaagcaasgcttgtttccacctttcaatgtataagttaaaaacatcagttaataacgataatgaaagagtccttcatgcatgctgagcactgtgctagccgcttacctacacacatcaaagtcatctaatttttactattacacctattgtatatactaagaaattgagtcttaactacatcgattaactcctctaacagctcccagatcataggtggtagagccaagatttgaacacagaatgacttcaggtgtggccaatccc

SEQ ID NO: 769335 - DNA, 634 bp, Homo sapiens
actggcgctgggttcttgagctggctctgcagttgtgttgcgcaaacctacttttgatttccacgtccggaatatttctagctctgcctgtctctccacttcacagccatttggttcctagaaggtggaatattccgctgttacatctgggactttcctggaatctgtcaacacccatcctgcaagtttggttgctggcatttgggacatttatacatgcataggcaataacaaagtcggacaccgcccctgccaggcataagggaactttgagatgtgttcagatttcagagaccctgacatgaaagaatttagagatgcacctgaaggtcaaggatcagactggcactttcaagaagtcattcaatagaagcaacgcttgtttccacmtttcaatgtataagttaaaaacatcagttaataacgataatgaaagagtccttcatgcatgctgagcactgtgctagccgcttacctacacacatcaaagtcatctaatttttactattacacctattgtatatactaagaaattgagtcttaactacatcgattaactcctctaacagctcccagatcataggtggtagagccaagatttgaacacagaatgacttcaggtgtggccaatccc

SEQ ID NO: 769336 - DNA, 687 bp, Homo sapiens
gagtctagtagtttgttttgctttttctctagagtctcttgtggttttatgtgtacaaaatcatcagtaaaagcaaaacaagatgactttatccctttttccccaatgtttatgcaaattatttaattttcttgttttgtcatatttgctaaagtctctaagcaagtgttcaataataagggtgataatgaacacccttacctaattcctcattttaattgaagcagttttagtcatttattgcaggatcatatctgcctcttgattttggttaacctttttttccatcaatgtccattttgctattagagtttttgttgggaatgtctgctaaattttggcaatgcctyttcagtgtatattaacatgatcacatggttgttcttctttaatctattgatgtaatgattatattgaaacgtaccactgttgaattcctggattaaactctgtctcactgttgttattcttatgctacattgcttatttgttcaaaatcttaataaatgccataattccccctcccacctaattatgtgtatcggtaaaatacacatccagcagttaacactgctttcctttggagtggaaagagaaagatgagacaggatgaatgtggagagattaaactttttcttatgcaacaccacattggtggatttactataaagaatattattttacaaa

SEQ ID NO: 769337 - DNA, 687 bp, Homo sapiens
gagtctagtagtttgttttgctttttctctagagtctcttgtggttttatgtgtacaaaatcatcagtaaaagcaaaacaagatgactttatccctttttccccaatgtttatgcaaattatttaattttcttgttttgtcatatttgctaaagtctctaagcaagtgttcaataataagggtgataatgaacacccttacctaattcctcattttaattgaagcagttttagtcatttattgcaggatcatatctgcctcttgattttggttaacctttttttccatcaatgtccattttgctattagagtttttgttgggaatgtctgctaaattttggcaatgccttttcagtgtatattaacatgatcacatggttgttcttctttaatctattgatgtaatgattatattsaaacgtaccactgttgaattcctggattaaactctgtctcactgttgttattcttatgctacattgcttatttgttcaaaatcttaataaatgccataattccccctcccacctaattatgtgtatcggtaaaatacacatccagcagttaacactgctttcctttggagtggaaagagaaagatgagacaggatgaatgtggagagattaaactttttcttatgcaacaccacattggtggatttactataaagaatattattttacaaa

SEQ ID NO: 769338 - DNA, 687 bp, Homo sapiens
gagtctagtagtttgttttgctttttctctagagtctcttgtggttttatgtgtacaaaatcatcagtaaaagcaaaacaagatgactttatccctttttccccaatgtttatgcaaattatttaattttcttgttttgtcatatttgctaaagtctctaagcaagtgttcaataataagggtgataatgaacacccttacctaattcctcattttaattgaagcagttttagtcatttattgcaggatcatatctgcctcttgattttggttaacctttttttccatcaatgtccattttgctattagagtttttgttgggaatgtctgctaaattttggcaatgccttttcagtgtatattaacatgatcacatggttgttcttctttaatctattgatgtaatgattatattgaaacgtaccactgttgaattcctggattaaactctgtctcactgttgttattcttatgctacattgcttatttgttcaaaatcttaataaatgccataattccccctcccacctaattatrtgtatcggtaaaatacacatccagcagttaacactgctttcctttggagtggaaagagaaagatgagacaggatgaatgtggagagattaaactttttcttatgcaacaccacattggtggatttactataaagaatattattttacaaa

SEQ ID NO: 769339 - DNA, 611 bp, Homo sapiens
ccatctgacatggtgtatagtttccttatgtttcttttggtagcctgtttcttatttctagaatgtaagcatcaggaaggtacggactttgggctttatccattagcgtaatcccagcccatagaaaagtaccgagggcattctacagactcagtgatatttgttgaaccaaataaatgcacgaaaggatgagagagaaatytgaccactgtggcacagaccaagaagcatacagataccccccataatctgggggcaaatgcaggaaggatgggccaacttgaggctctagaaataaacagtcagcccatgccttaaaggaatctgccaagtaggatctttaacaaggctcctaaatttccttaagctattaattgtaggtttaaaagatacttggtggaaattagattgagcagtaaatattttgtggctttttaaaaactgattgagaccctctgatatgcttctggaagggaccaggagaggtttcttatgcaaggctgctcccagagctcttgatgaccttgcccagatcatgccaactctaaatacataccatcaggacagccttaccaatgaggagagagctgaagttgaggtgtgacttgttc

SEQ ID NO: 769340 - DNA, 598 bp, Homo sapiens
caggcactgttgtaagcactttatttgaattaactcatttaactttcccaacaattccaccagctgggtattatatttacattttatgtatgaggaaactgtgtctcagagaaggtacaagaaagctttcctaagttcatgcttgcacaaggactgaaacccacctggctatcaccagtctgttgctcagtggaatcctacatgcagctgggaaggggaaagtaagcagggggaagcatctggagaggttgatgagcaggacaaagaccatattctccttgttctctaaagggtggaccctytagatccttccaaagggaaaagggataatttggggatgtgcagggatctagggccagaaaggatggtggcagtggttggacagaaaaggggataagagccacagagctttgtgcctgccaagaagggtgttgtggcgagcacattttcttactggcagaaaaggttgctctcgaagtctccaatgtccaacggggagaattttactttgaacttctgaatcttccccaccggcacgattcccgaagagggctccacagagaagggctgtggggaaccctcggcccagtggtccatg

SEQ ID NO: 769341 - DNA, 650 bp, Homo sapiens
cagctgggaaggggaaagtaagcagggggaagcatctggagaggttgatgagcaggacaaagaccatattctccttgttctctaaagggtggaccctttagatccttccaaagggaaaagggataatttggggatgtgcagggatctagggccagaaaggatggtggcagtggttggacagaaaaggggataagagccacagagctttgtgcctgccaagaagggtgttgtggcgagcacattttcttactggcagaaaaggttgctctcgaagtctccaatgtccaacggggagaattttactttgaacttctgaatcttccccaccggcacgattcccgaagagggctccacagagaagggctgtggggaaccctcggcccagtggtccatggtgctgtccagggtgctgcctgtrtgcatcgtgccctgactaagctgatctttttgagctgaacctggggacagacagggagtgggtgatattctgcatttgcagtgagaggcaggtggaagggagcccacttacaggtccttaggggccctctgcggatatggtggatatggactcaccttttgtagcagctgtacttaaccttgggtattagaggtagggaattgctcatatagcttacaggagactcatgaaa

SEQ ID NO: 769342 - DNA, 628 bp, Homo sapiens
ttgttttttttttttaggtacaggttctttggcaacaaattactcaagttttgcttgtccgaaatgtctttacttcaccttgatgtttcaagggtgtttttttctaggcaggcctctaggttgccagccatttttcttcagcactttgatgatattatttttctatctttgtcttccatgtggctgttgagatgtcggctgtcggcatgattgtgctccttctgtgttagccttgatgcagggcaggtgagccccacagtggggcttagcccrgagggttcttggctttgcccaggaaagtattcaagggcaagctggaggtggaagaaaacagctttattgaagaggcagtgtgaccgttctgtgactgctcctgcccagcactttgactgctcctgcccagcagggctaccctgtaggcagagagtagcagcccaggacagtttacagtagtatttatacgactgtagttgcatgcagatgaaggggcagtatagcagaaatttctagggaagaggtcttttgggtcattgagtcattgccctgaaaggggtggtaactcctgggtgttgccatggcagtgatatattgacatggcacactggtgggcatgtctgattggaaagct

SEQ ID NO: 769343 - DNA, 628 bp, Homo sapiens
ttgttttttttttttaggtacaggttctttggcaacaaattactcaagttttgcttgtccgaaatgtctttacttcaccttgatgtttcaagggtgtttttttctaggcaggcctctaggttgccagccatttttcttcagcactttgatgatattatttttctatctttgtcttccatgtggctgttgagatgtcggctgtcggcatgattgtgctccttctgtgttagccttgatgcagggcaggtgagccccacagtggggcttagcccagagggttcttggctttgcccaggaaagtattcaagggcaagctggaggtrgaagaaaacagctttattgaagaggcagtgtgaccgttctgtgactgctcctgcccagcactttgactgctcctgcccagcagggctaccctgtaggcagagagtagcagcccaggacagtttacagtagtatttatacgactgtagttgcatgcagatgaaggggcagtatagcagaaatttctagggaagaggtcttttgggtcattgagtcattgccctgaaaggggtggtaactcctgggtgttgccatggcagtgatatattgacatggcacactggtgggcatgtctgattggaaagct

SEQ ID NO: 769344 - DNA, 572 bp, Homo sapiens
ggtattatgcctagtattcactttttttgaatttcttacgagagataaataataaatattagacctggagaggacataagaacattcagtcagatcagcccttgttatctgagtgaggaactggaggtccaaggagtatgcagaactttccagatcacgtaggtagtgtcaaaatgtggttgccaacacctctgtcattaacagaggcagttataaaatatacgctaggccaataaaatgcaaatgaatacttgtaattctataagggcctgcattgatgtcaattcctaaaaaccagtatctcctaggtgctatgcattagtttagttgcctgatagtgtcatgttgagcatcctaccacrataagagaaaaaacaaggtgggcatttgacctacttggagaaagtggtggtttctggcccattataaggaagataagactaaagccatacatctgatttcggatatgagacatcagcaggcattgttagaagacagtaatgctggcaccatcatgaaaaagattgaataatacaaaatatgaggcatggagaaggcagaaatagtgatat

SEQ ID NO: 769345 - DNA, 552 bp, Homo sapiens
atataatgtttatttttccctttaactaatgaactcttcttcctactctttcttgtcccacagattttagtcctagatccagccaacaggattgtgaagttgggagctgtcctaccagggcaggttgtgaaaagaacagtttccatcatgaacaacagcctggcccagctcacatttaatcagtccattctgttcacaattccagaactccaggaacccaaggttggtgctcagaggggctcctagcggccccttcatgctccctgatgatgaggatggccatgctggcaacactagcagctcacatttcttgtgcatctgtaatgtgccagaccattctaagagccttccctgtrctccctctgttcattttcacaaaaacagtatagggctttacagggtgcactagtcccacactgtttttgtgaaaacgaacattattttcattttgcattttcatttaattttccatgtcattcattgtcatttgtttatttacatctccgttgtgtagacagcccagttctctattttcgttcatttcaggtgttt

SEQ ID NO: 769346 - DNA, 496 bp, Homo sapiens
catgtgtgtatgtgtgtggtgtagttctgtgcaattttatcacatgtagatttgtgaacccaccaccgcaattaagatccagaactattccattaccaccaagattcctcgtgcttcttgaggaaataaaattaaaaacaaaatctccctccaacccagaaaatctatccacaaaggtagaagagaaagaaaacaattttattattgaataagyattaaaccagaatgtgatgcccatcacaggcaatctgctgagagattgcaaagacagaaggaagtctgcccctcctatagagccaaccagatccaagccttttcattcctgttctcagagtaaaaaatagctagtctcaagtaagaggacttgacaccatcatttgtcacacatagtttatcctaaatcgacatggtaattgaggtgaccaactgtgttagctaattggctttatccaaaggaaaaacaaacttgtctttctagcagggccccatggaagct

SEQ ID NO: 769347 - DNA, 610 bp, Homo sapiens
tgtatgtgtgtggtgtagttctgtgcaattttatcacatgtagatttgtgaacccaccaccgcaattaagatccagaactattccattaccaccaagattcctcgtgcttcttgaggaaataaaattaaaaacaaaatctccctccaacccagaaaatctatccacaaaggtagaagagaaagaaaacaattttattattgaataagtattaaaccagaatgtgatgcccatcacaggcaatctgctgagagattgcaaagrcagaaggaagtctgcccctcctatagagccaaccagatccaagccttttcattcctgttctcagagtaaaaaatagctagtctcaagtaagaggacttgacaccatcatttgtcacacatagtttatcctaaatcgacatggtaattgaggtgaccaactgtgttagctaattggctttatccaaaggaaaaacaaacttgtctttctagcagggccccatggaagctaggctcccatcctctcacagaaactgggagtagggacttcacctttcttgttgattacgtgtcaaagagatggttcccaggtccttgagaaagacacttctggctcctaaagctggcaag

SEQ ID NO: 769348 - DNA, 610 bp, Homo sapiens
tgtatgtgtgtggtgtagttctgtgcaattttatcacatgtagatttgtgaacccaccaccgcaattaagatccagaactattccattaccaccaagattcctcgtgcttcttgaggaaataaaattaaaaacaaaatctccctccaacccagaaaatctatccacaaaggtagaagagaaagaaaacaattttattattgaataagtattaaaccagaatgtgatgcccatcacaggcaatctgctgagagattgcaaagacagaaggaagtctgcccctcctatagagccaaccagatccaagccttttcattcctgttctcagagtaaaaartagctagtctcaagtaagaggacttgacaccatcatttgtcacacatagtttatcctaaatcgacatggtaattgaggtgaccaactgtgttagctaattggctttatccaaaggaaaaacaaacttgtctttctagcagggccccatggaagctaggctcccatcctctcacagaaactgggagtagggacttcacctttcttgttgattacgtgtcaaagagatggttcccaggtccttgagaaagacacttctggctcctaaagctggcaag

SEQ ID NO: 769349 - DNA, 496 bp, Homo sapiens
catgtgtgtatgtgtgtggtgtagttctgtgcaattttatcacatgtagatttgtgaacccaccaccgcaattaagatccagaactattccattaccaccaagattcctcgtgcttcttgaggaaataaaattaaaaacaaaatctccctccaacccagaaaatctatccacaaaggtagaagagaaagaaaacaattttattattgaataagtattaaaccagaatgtgatgcccatcacaggcaatctgctgagagattgcaaagacagaaggaagtctgcccctcctatagagccaaccagatccaagccttttcattcctgttctcagagtaaaaaatagctagtctcaagtaagaggacttgacaccatcatttgycacacatagtttatcctaaatcgacatggtaattgaggtgaccaactgtgttagctaattggctttatccaaaggaaaaacaaacttgtctttctagcagggccccatggaagct

SEQ ID NO: 769350 - DNA, 546 bp, Homo sapiens
acatttcaaagaacttaaaattacaaatgttctaaactaaatactctaaggggaggaagagaagtctcttcccttattttcaacaaggagaactaagcctcattttccatttgtgtttggccttacatgtgcccaggttataaccacatccacccctctctccctgtcccttacctctggcagccactcatctgttctccatcttgagccttttgttatttcaagaatgttatataaatggaatcatacagcacatcgccttttgagattggcttttttcattccacataatgcccttgtaatccattcaagttatgcacctcaataattcattcccttttactgctgagtattccatggtgtggatataccgatttgcttacccttyccacgcccttcccaggaaaaatgtaatgctttaaacataccatgtatctgtttatgttctgtggctctttgggggccgcaaaccattgtaatatttaagatattttccaccaccctccaagaactaatttttgcctctttaggggtggtattgtccct

SEQ ID NO: 769351 - DNA, 584 bp, Homo sapiens
agctatagttctgtcatttattatttgaacagttcactttacctcttgaaacttcaatttctgtatctgtaagacaaggttatagtaataccatccttacagggttataaagaaagggcttagaacattgcctaaaatatagtacatgctcaataaattattttgtcttgttttataaccttcaatgtgcatggtcctggggattttaaaaggttgcaaacagtaatctgcatatccatttgtttgttaagttccaaatgacctagagggttctaagaatgttggccctgcatgaattcaaagtacaggtggaagytgctatggattatagatgtgaaaacatccctttcgtagaggcaggaaatcagaggcagcagcaagccatcattccagctgcaattctagaaaaatttaaagattttcctatgtggactgagattgttagctgttatcttccctggagacacaggctaattctggtacgagcagaggactggcttggcataagtagtggtacactgctagggacaagagaaaccagcatagcttttgatagctacacgggctgacgtgggaggtgaaat

SEQ ID NO: 769352 - DNA, 606 bp, Homo sapiens
tcaaatggtagaatcatggattatgatttttaatccaataaatttttcataacacaattgagacattcaataaatcaatttgtactccctaaaatatatcctattcaaatttaaattataaaatgcatgttaatcctatgttataacctaattatcatttgagtaagcaaaattcttcccttccaagtatccagtccctttttattttctcaccaattgttatctcaatatatattcttacagcgacaatttccctayattacgctccatttttcatttgttacttgttcagataatgaaatgaatataaaaagagtgccatgttttaatgcttcatagcttacaaagttatttcagagatctcatctcacttgttcctcagaatagcttggtgagaatgaacaaattaaactactttgtagctcgccaacgtctcttattttatgagatacatatgctcttacattgttctatgccttttgtacacctagctctcaaaatgaaatgtcttaacccctctgccatatgaaatgctccttagcaaccttaaagactcagctaaaaagttatgttttatacaaaagccttttactgcctaatttacta

SEQ ID NO: 769353 - DNA, 540 bp, Homo sapiens
atgttttattttgtttttgcttttttgattgttttatgttgtcttggtgccaaggattagcctgaggtgtaaaattaaggttttctcagatttttattgagcctgcacctcaccctgaacatctgtggtgactttttaatttccctcatgtatgctgttgctttggaatgttatagttatcctgatctggcccccaaaagagaaaaaaacagaaaatcgactacagaatgaaaagagaaaggatgctggttcttccactcttccggaagtcactttatgcagaaaggaggagcttgccacaagtaagggaagtgcaacaacagtggccatgtttctttgtctgtgcctgtgatcagaagcwgcttttagtaattagagcacagatcttggctatttggagcagagttctttttgcctactttggctcctgcaaactgtgtgtatgttgctccaggaacacatgcatagctgcctgccatgggactgagggaataggagataggtagctagctactactgtgctaagaggtgaaggtgacc

SEQ ID NO: 769354 - DNA, 677 bp, Homo sapiens
ggctcaaggggcagaatctggcccttccctacacatacacataaacacattctggtcttataaagtccatttttagccatttggtatttggattttcttttatacctacacaatataacagaattttcctcgttctatagrgtctttcagtgaaatttcaagtttggccaattctctttaattcaaaatatttctcatatttttaaaaattttaaatctgttctagcaaagtgtttgcttaggcaatgattgttactactgaatatttttactactagggccaaagtcgttaagcattactactatgtgaagctatcctggaattctttctacacttttacaaattttttatttattgtggagatatttcaactaattaataggtaaggggaactcacatgtggatttgtggtagttagatggtgtctttcctcttaaaagctggtgataatctctttacctcctgatccgatgactaaatacaacagaaagggggctgtccagcccagtttctaggaaatctaagaactaaatagactaaattcttttcccagagttgcacagtcttggcactaaaaagacagaatccaaatcaggatgttcacaagttgtactgcttggaaaaagccagtagtttgctctatgctcttcttttctactctactattttccccttt

SEQ ID NO: 769355 - DNA, 677 bp, Homo sapiens
ggctcaaggggcagaatctggcccttccctacacatacacataaacacattctggtcttataaagtccatttttagccatttggtatttggattttcttttatacctacacaatataacagaattttcctcgttctatagggtctttcagtgaaatttcaagtttggccaattctctttaattcaaaatatttctcatatttttaaaaattttaaatctgttctagcaaagtgtttgcttaggcaatgattgttactactgaatatttttactactagggccaaagtcgttaagcattactactatgtgaagctatcctggaattctttctacacttttacaaattttttatttattgtggagatatttcaactaattaataggtaaggggaactcacatgtggatttgtggtagttagatggtgtctttcctcttaaaagctggtgataatctctttacctcctgatccgatgactaaatacaacagaaaggkggctgtccagcccagtttctaggaaatctaagaactaaatagactaaattcttttcccagagttgcacagtcttggcactaaaaagacagaatccaaatcaggatgttcacaagttgtactgcttggaaaaagccagtagtttgctctatgctcttcttttctactctactattttccccttt

SEQ ID NO: 769356 - DNA, 620 bp, Homo sapiens
agctcgtatgtatattgtattgtcccccactcacaccgtgcattgaagtaccaaacttacccattccttgactttaggaccataacgctccctggttcatcctagttaactccatcattaaaggaaaaacctctgtctcatcctcactaggctgaaaaggatcatgaagaagggggttagaggagtatagagatattgggggctcagggtttaacaaatgaaagatgattaaaatgagaattggaaaagtaaggtgaaggaggggaagtaaaaaggcaaaaacaaaaccaagctctctttaccctatccaatgactcagtgaaaaaatattctctttatatgtcagcccccactcctaccttcacccagatgaatccaggagttagaagcccaaatccagctttaagggtgagagttgttttcccccaggctraaagagatttaatgtctttaatagctaaattgaggctctgaatatttcctgtgggtaccagctgtggccaggcttaaaccactgcactatcctctaggaacctcctgtggtaatttgcggggagatgttgctccctattattaagggtgctggtggagtcttcgcctgtccacactcatgtatagtt

SEQ ID NO: 769357 - DNA, 526 bp, Homo sapiens
cgtgtatattaggaacaatatcacgggggggtgtacaccaactgcgatatttggagtaatatcatcctctttcctcctgggtattacaaacaatatcacagggctgtgtatacaccctctgtgatattgagggtaatatktcctctccccttctggatattaggaacaatatcacagaagaggtgtacacttgttgcgatattgggagtagtatcattctctcccttcctggatattaggaacaatatcacagtggtgtgtacaccccctgcgatattaagagtactattctctctcccctgggtattacgaataatatcacaggggagtgtatgccccagtgatatttggagtgtacaccccccacgatattaggagtaatattactctctctccttctggatattaccacagaaaggtgtacacctcctcctatattggatattatgaaccagatcacaggaaggtgtacacccccgggatacgggtagtaatgtcaccctctcccccactggatattacaaac

SEQ ID NO: 769358 - DNA, 604 bp, Homo sapiens
ctagtgggtagaggtgagggatgctgctcgatcgtgagccccgtaatcaagaattatcaacccaaaatgtgacgattgccaagtctgagaagccctgctctgcagacaatatgtctcagagttctggtgctgatcagacagcacgtttctggggctcaatataggcgagccagagataatgcccacagaaaagggaattgtaattaggagaggaygatctttggcagtatgcatttgtgagcagacactcctgaaaggacagggctgagggtaccttatggttctgtttctcccttaggatggcagcatctgataaccagatacaaaacctgagaggaaatttttaagctgtgactagtctgattcccagctggccagctgagccaccctacttctgtgttttctggtgcaaagaacaaggttctaccgagtgaccttagacttggcttctggataaaattgtcagagagctcctagcattttgcctgagccatcacagggaacctgggtttggaatctcaaccactcatggcaaagttattttcattccccttgctctcacctgcccccatgggaatcttccataggagaaatgttctaattg

SEQ ID NO: 769359 - DNA, 575 bp, Homo sapiens
ttgcaagattttccagacacagcagcaaataaaacagacaagattctggctcccagggagttgatagtaggtaagaccagggatcatcacacatttctataaagagccagagcataaatatttaaggctttgcaggccacwtgcagtctctgaagcatattttctttgtattttttgtatgcttgtttttaacaacactaaaaaatataaaaaaccattctcatatcaagggtctttcaaaaatagaccacaggccaaatttggcccattagccctagttcgtcaacacttgtttaagacagacattaaacaaatgccctgaggatgacatcagtacaggtgagataagcacgtaggagagtgagagaggaaaaaaaggctgcgtacatacggccaagattttggaggggtcagggaaggccaccaggaaggagaagcattcaaaatatgatgtgatggaggagcagggctaactcagcaaagaatgaggagcgtgagggaggagggcgagggggctgaatgaagggagaggggctacaggtaaaggctttgagcagcacagctgagcgggatcc

SEQ ID NO: 769360 - DNA, 596 bp, Homo sapiens
gatgttgctgcggtaccgctggcagtcatgcagcacctgcagcgcagggaatacgggagtgggggagtgtccaggaccgtgtggcagggccctgagacacgcactccccacccgaggcgggaggaacagcccggagctacggggacaggaacagggccagagcccgcatgtccgcgggacagtgccccagctccggggagcagaggcagcagctgctactcacattggggtgcccgtctcgaaggaccttgtggaggacgtggcagaacttccagctgagaatggagctgctgggcagcggcagcccaatggcrtaggaccagaaggtgaaagcccccttctcgtggtgtgtgcccagaatgatgcctgcaatgtcaaggccaagtgtggaagcagagactggagcacgggggctcagcaaacccggctgagagaggccagggccgccggaagagggccggcccccaatcacgtgcccatcaaccccgggtcaccagagctccagtgtccagccaaggggacaggagttagggcaagacaaggaaatcattgggcccaatgggggcgtttttgtgatgagactgagatgggaagga

SEQ ID NO: 769361 - DNA, 593 bp, Homo sapiens
ccagagcagctgccagtcctgcaagctcagatcatggtaagtgccctgcacaggtgtaactttttttatcctttgttttttgaaacagagtctctgtcgcccaggccggagtgcagtggcgcaatctcggctccctgcaaactctgcctcctgggttcaagcgattctcctgcttcagcctcctgagtagctgagactacaagcgtgtgccatcatgcccagctaatttttgtatttttagtagagatggggtttcactgtgttgsccaggctggtctcgaactcctgacctcaagtaatccgcccgcctcagcctcccaaagtgctgggattacaggcatgagccaccatgcccagccacattttttgtctttaatatcttttttttactgtaccgttttaatatttatatatgtttagatccaccaatacttcccattgtgttataattgcctgtagcattcagtagagtaacacgctaaacaggtttgtagcccaggagcaataggctacaccacacagcctggggggatagtaggctacgtcatctaggtttgtgtcagtacgctctatgatgttttgcacagcaatga

SEQ ID NO: 769362 - DNA, 593 bp, Homo sapiens
ccagagcagctgccagtcctgcaagctcagatcatggtaagtgccctgcacaggtgtaactttttttatcctttgttttttgaaacagagtctctgtcgcccaggccggagtgcagtggcgcaatctcggctccctgcaaactctgcctcctgggttcaagcgattctcctgcttcagcctcctgagtagctgagactacaagcgtgtgccatcatgcccagctaatttttgtatttttagtagagatggggtttcactgtgttgcccaggctggtctcgaactcctgacctcaagtaatccgcccgcctcagcctcccaaagtgctgggattacaggcatgagccaccatgcccagccacattttttgtctttaatatcttttttttactgtacckttttaatatttatatatgtttagatccaccaatacttcccattgtgttataattgcctgtagcattcagtagagtaacacgctaaacaggtttgtagcccaggagcaataggctacaccacacagcctggggggatagtaggctacgtcatctaggtttgtgtcagtacgctctatgatgttttgcacagcaatga

SEQ ID NO: 769363 - DNA, 595 bp, Homo sapiens
gaattgatgaaggacagagaggatgggaggatgggaacacagataaaaggaagggaggatgggggaggaagatgaaagaattaaaggataaatggatggaataaaagtgagaatgggaagacagaagaacggataaaggaatggagaagaatgggagaatggaaggatggacagatggaaagaggaaggaaggatggaaaagggaagaatggtgggatgaaaagatggagagaaagaagggcagaagagagaatgggagtaaaagaaaacgagagaatacatggctatttgattagagtaggrtggaaagaaatcccatattgcttcctacccatcaaggaagccttcatggacaagatgtgggattcacctttccatccaccctcattaccaaggcatggtcagggggaaaaaacagacacaaatgactgtttctaatgactgtgactgtgtacttaagatttagtgaatattttgcaatatatctcacagatgcaattaaaaagaacattctttcccgtgatctttgtaggatattagatatctgtcacacagatgtctcatctggaaataaggccaattcagagaaaatcaa

SEQ ID NO: 769364 - DNA, 570 bp, Homo sapiens
ttacagccaggtctcctgccggaatgaccctttagtactgttgcacattgaaacaatcagtattagatgtgggcggctcctggaaggaaattgaccttgggcaaggcagttgttttcagcctcagtcaattgttggagagactgacagcagagagatattctcyggcaatactatcatcagctgggggtgtgaatccttcattcttccagggggtcctgggtggcacattacagtatccactacactaggtattagctactatgcgattagtaagtgatgaggcatggtgattagaatcactggctttgggtctagtctgggctagattcaggttctggtgctactactcattaaccgaggcaggtcccttcatctctagtgggggaaatctcagccactacctcctggttctcagaaggttcccatgagataaggcacagagagcctgacactagaaccactggactccactggaccctggagtcctcaagttccggatctgacttaacagtttcagttatcactatctgacttaacagccaaaagcagaatcacaatggtttaattaa

SEQ ID NO: 769365 - DNA, 598 bp, Homo sapiens
agtgatatgcccggcactaattgtactcatgcactgcataatgacgttttgggcaaggatgacctgcttatctcaacggtggtctctacgattataatggagctggaaattgcctctcacctagtgatgttgtagctgtcataacattgtagtgcaattactttattttttaattttattcaattatatttttgaggcggagtctcgctctgtcrcccaggctggagtgcagtggcgcgctctcggctctctgcaagctccgcctcccaggttcacgccattctcctgcctcagcctcccgagtagctgggactgcaggcgcccgctaccacgcccggctaattttttgtatttttagtagagacggggtttcaccgtgttagccaggatagtctcagtctcctgacctcgtgatccgcccaacttggcctccaaaagtgctgggattacaggcgtgagccgctgcgcccggccaattaccttatttttaaaataaatttaatgtagcctaagtgtgcagtgtttataaagtctacaatagtgtacagtaacatcatgggccttcatattcattcaccactcactcgctcactcaccc

SEQ ID NO: 769366 - DNA, 598 bp, Homo sapiens
agtgatatgcccggcactaattgtactcatgcactgcataatgacgttttgggcaaggatgacctgcttatctcaacggtggtctctacgattataatggagctggaaattgcctctcacctagtgatgttgtagctgtcataacattgtagtgcaattactttattttttaattttattcaattatatttttgaggcggagtctcgctctgtcacccaggctggagtgcagtggcgcgctctcggctcwctgcaagctccgcctcccaggttcacgccattctcctgcctcagcctcccgagtagctgggactgcaggcgcccgctaccacgcccggctaattttttgtatttttagtagagacggggtttcaccgtgttagccaggatagtctcagtctcctgacctcgtgatccgcccaacttggcctccaaaagtgctgggattacaggcgtgagccgctgcgcccggccaattaccttatttttaaaataaatttaatgtagcctaagtgtgcagtgtttataaagtctacaatagtgtacagtaacatcatgggccttcatattcattcaccactcactcgctcactcaccc

SEQ ID NO: 769367 - DNA, 598 bp, Homo sapiens
agtgatatgcccggcactaattgtactcatgcactgcataatgacgttttgggcaaggatgacctgcttatctcaacggtggtctctacgattataatggagctggaaattgcctctcacctagtgatgttgtagctgtcataacattgtagtgcaattactttattttttaattttattcaattatatttttgaggcggagtctcgctctgtcacccaggctggagtgcagtggcgcgctctcggctctctgcaagctccgcctcccaggttcacgccattctcctgcctcagcctcccgagtagctgggactgcaggcgcccgctaccacgcccggctaattttttgtatttttagtagagacggggtttcaccgtgwtagccaggatagtctcagtctcctgacctcgtgatccgcccaacttggcctccaaaagtgctgggattacaggcgtgagccgctgcgcccggccaattaccttatttttaaaataaatttaatgtagcctaagtgtgcagtgtttataaagtctacaatagtgtacagtaacatcatgggccttcatattcattcaccactcactcgctcactcaccc

SEQ ID NO: 769368 - DNA, 599 bp, Homo sapiens
ccaatctgggagtaatgggatttttcaggcaggcttcattactgtgcctcggtgccatttgactgataattgcattctgaagctggaattgataaattgcccatgcattgtcattactggatgtttacctgatctatttgatgaatattaattcacaaaaaaatatttccattcctgaagcgattctgggcaaaataatgcctttctctctcctaccagggattgccgaaacaatgtacagagttaagtaataacaagcccttgtcagagtgatttattgggcatgaaaacaaagagagaggaggacttcagcctctcctttattaagcaacacctgggggaaggaacacagcgttccattccagagctgggagcggacggcagagaggtggcatttgaaggccacagagaaaagagtttatacratatattcaccttttgccaaggtatcttccaaggagcaccaagatgtttcctatgtacccccgaccccatgctggggagcttatagagagagttgaaattggccaggcgcagtggctcacgcctgtaatcccagcactttgggaggccgaggcgggcggatcacgaggtcagga

SEQ ID NO: 769369 - DNA, 598 bp, Homo sapiens
agtgatatgcccggcactaattgtactcatgcactgcataatgacgttttgggcaaggatgacctgcttatctcaacggtggtctctacgattataatggagctggaaattgcctctcacctagtgatgttgtagctgtcataacattgtagtgcaattactttattttttaattttattcaattatatttttgaggcggagtctcgctctgtcacccaggctggagtgcagtggcgcgctctcggctctctgcaagctccgcctcccaggttcacgccattctcctgcctcagcctcccgagtagctgggactgcaggcgcccgctaccacgcccggctaattttttgtatttttagtagagacggggtttcaccgtgttagccaggatagtctcagtctcctgacctcgtgatccgcccamcttggcctccaaaagtgctgggattacaggcgtgagccgctgcgcccggccaattaccttatttttaaaataaatttaatgtagcctaagtgtgcagtgtttataaagtctacaatagtgtacagtaacatcatgggccttcatattcattcaccactcactcgctcactcaccc

SEQ ID NO: 769370 - DNA, 585 bp, Homo sapiens
ctgttggcagcttcttcaatcccccctcacacgcaaggaacttgaactgagatatcatccatgctgtttaattcctggatgtttttgagtaggagatcaggcctttcacacacgtgattctacttgctttggttcaagattctattaataatagaatgggcaggaaaccacattgcaaggtcagctcttcagrttaaaaatagtgagtttgccaatattcagccttccaagaaaaggggagaatagaagtgaggaacccattaaacacacatgaaattataactattattatgttttaatatttttgtaatgcctccctcccgttttctaaaatataagcttcccaggcacagaggacaaatctgtttcactcactactgcttccccagagcatagaacctggcctggcactcagtagggctcatggaatatatctattgatcagttcatgataaagaggaggaagcaaagttctttggcccttcaaagaagaatgtttgctggatccgggtggcagcccacagacgccaggagtgccctgcacatatatggggctgggaggacagcacgggtctccatcaccct

SEQ ID NO: 769371 - DNA, 591 bp, Homo sapiens
aaaataaactgatactattaaaaatctgagtagatactatggtctgcctatgtctatgagtttgtctttattaactaatgaagaacagcaagggtcagagaactgttgaagacattccagcactgaacagagamtttctcctaatatcatggaaaggattgagctcataacttttccttctgtttttaaatgctatgttcctgctacctataattttttcattgaaaattatttgttttacccattgaaatattcaccttgcactttgggaaacccaaattgctcttactatgctggcgaaaattttcctatcacttagagctgcagctctaaggaaggaagaaagaagccatgattggcaacaggaaagacacatttcagatgttttagcagtaatacaagtaaatggttctcgaagtgtgcaacagacaagcctcgccctgggaaaaccaccttcatgatcatggtatcttcccttccaggtaagtgtaattctcagaccttacagggaggcagaacagcatattgtaaagaagttgggtttcaaaagtgaaatggagctggatcccaatatgctaattcacaattatc

SEQ ID NO: 769372 - DNA, 591 bp, Homo sapiens
aaaataaactgatactattaaaaatctgagtagatactatggtctgcctatgtctatgagtttgtctttattaactaatgaagaacagcaagggtcagagaactgttgaagacattccagcactgaacagagactttctcctaatatcatggaaaggattgagctcataacttttccttctgtttttaaatgctatgttcctgctacctataattttttcattgaaaattatttgttttacccattgaaatattcaccttgcactttgggaaacccaaattgctcttactatgctggcgaaaattttcctatcacttagagctgcagctctaaggaaggaagaaagaagccatgattggcaacaggaaagacacatttcagatgttttagcagtaatacaagtaaatggttctcgaagtgtgcaayagacaagcctcgccctgggaaaaccaccttcatgatcatggtatcttcccttccaggtaagtgtaattctcagaccttacagggaggcagaacagcatattgtaaagaagttgggtttcaaaagtgaaatggagctggatcccaatatgctaattcacaattatc

SEQ ID NO: 769373 - DNA, 555 bp, Homo sapiens
tccttgcatttaaatgggaatgatgacaatgtcaactccaaaaagtttttgtaatgagacaaaaataaagtacagaaagtgcctagaagagggattggtacattttaggttctcaggaaattatagctaatatttttattgctctaaaaactaaatgctgtatataatccagagacgatacacgcagtctcagccttcttctctctgtgagtgtcctttggagctgctccgactccagcaggatcacagccacctcttccctctggagctgatgaatccgatgcgactcttcagttctggaagaaaagtcctttaacttcaggaagagcacattctctattggctgaagtaaattattttaaatcytttttccccccataaagacttctgtagaatggcttccgtagaattgccttagatgttttgtttgtttatttgtttttgagtcattcttgtagcatttatgtttcttggtgtgactggacttttcttgccagacatctctctacaatcacttctgtatgggttgaaaagaatacttgatttccctcttaa

SEQ ID NO: 769374 - DNA, 562 bp, Homo sapiens
tctattattttgccaataccacactatcttgattactgtagctttatattaacccttgaggtcaagtattgtcagttctccaactttattcttttccttcaatattgagttaactattttgggtcttttgcctctccatrtaaactttagcatcaatttgtggatatcctcaaaataacttgctggcattttgattgggattacattaaatctacaaatcaagttgagaagaactgacatcctgacaatactgaatctttctgtacatgaacatgaaatatctctccattgatgtagttctttttttcatcaaaattttgcagttttcctcataaagatctcatacatatcttgttagatttgtacccaagtattacattttttggggtgctaatgcaaatagtattatgtttttaatttcacattccacctgttcactgctggtttgtaggaaacttactgaaacttgtatattaaccttatatcctgcaacgttattataattgcctattagttccagtattcttttttgttcacttttggttgattctttcagattttc

SEQ ID NO: 769375 - DNA, 648 bp, Homo sapiens
acagagtcttgctctgtcacccaggctggagagcagtggcatgatctgggctccctgcaacctctgcctctgggttcaagtgattctcctgcttcagcctctcgagtagctggaactacaggtgcatgccaccctgcccagctcatttttgtatttttagtagagacggggtttcactatgttggccaggctggtcttgaactcctgacttcaagtaatcccccacctaggcctcataagtgctaggattacaggcatgagccacttaatccattctctctgacaacaaagcttctggtttttgcacgcagtgccactctggtaacaaactacagatcttatcgaccaagcatgtgggtacatgtgtattggcaagaaggccacagacttccgctgcttttacctgaagctctatcaatttttcaggaaaaaatatttcccaatgtgtgttttttttttaatctttggtgaatttccagagccctgatgtaatgttyttgacaatacattccagttttatacttgctttttgcagaaagatctgcctacctcttcaaaccaacagagccaggagtctctccatctatgattatctgaactcatctttaatataaatacctgtattactagtcccatattacagataag

SEQ ID NO: 769376 - DNA, 615 bp, Homo sapiens
ccctatggcccctctcaactcatgtgaactctgctcactcctagcagatggtattctctctccctgacttcctctcgggatgtttcaggcaaccactaaggtggcctccagggatccctgccttctggtacttactgcctgtrtgatcccatccccgttgagtgtgggctggatttagtgactagcttctagcaaatagaaataggcagaagcaaaatcacttccaagattagataattaaaaaaagatcatggcttctgtcttagtctctctctctctctgtctctctctctctccctccacccccgccaccacccctcattctgcagaagataagctgccatattgtaatactctatagagaggcccataaatcaagggaccaatgttcccagccagtgaggacctgagcctaccaacagccatgtgagtgagcttgggagtagatccaatcccggttgaacattgagatgactccagccctggccaataccttaactgtaggtttgtgaagaacaggaagttatagccagaacatatagattcctaacccactgaagctgtgagataatgtttgttttaaactgctatgtttgggggtaatttgtaacacag

SEQ ID NO: 769377 - DNA, 642 bp, Homo sapiens
tcttccatcttcagagccagcagaatagcatcttcaaacctctgacctctatatccaccctcacatatcattctttcattcttctaactccttctttcccttataaggatgcttgagattacattgggtccaaataatccacaatcatctccccatctcaagacatgattaatctaatgacatctgcaagatccttttgccatgtaaggttcatattaagatgtggaggtctttagggggctgttattctgcgaccacactgagtatccagattgaggagggaacagtgaagatcaggccagagcctaggcacctgcccccacagtagtagggtagtgtttagtcaggccttcacagcaccagcagagtggggcaggaagtctgtaggtgtgagttctaatcctagcaaaatgacttacacaatggccaaagctaccctgtgttttacctggttacaggcagatttgcattcagcattccctaaaaccwtaaagctgttactgacaatccatgataccaaattagcttgtaagtctgggtaggactgaggacagcaggaaggtgccaccaagaacctgaacaatgagttgcccctgttaattttaaattcttaaaatcaacacaaacattgattttataaag

SEQ ID NO: 769378 - DNA, 597 bp, Homo sapiens
acatataatgcagaatcatagagtacagacctgaaggaatgaagcgttgactaggaatactgtgccccaaatcaaatgacatctcatcatctggaaagacccccagagttttcttcaggtgaacttccccccggcctggcacctccagccaggtacatgtgctcagatggagcccagcacctccactccagtctagactcgggactcagccaggcccgatcagagcgccagagacacttggcctcagtgactgaaggaggcatggcacgtgacccagtcagagcacygaggtgaggtgcaacccaaggtggacaggactattaagagagagacatgcgctcttttttacccctctactctccctgaacctggaagaaaatgggtttgggattgcagcttgccatttgccatcacaggaacctgggagagtaaagccacacgaaggacagtgaagctgagaactggcaagatattgtgtccttatgacactttttggaggcccaggatccagctgtgtgtctgaattttcaggttatgttagccaatagatcccatttttcttagatttaagttttctttcacttgtaatcaatagtc

SEQ ID NO: 769379 - DNA, 632 bp, Homo sapiens
tctgtaagaatgtgggggagggagggtttgggtaaggaggaaagaatggagtcattgccttaagattatgggacttgtctcatcccattgtttcactcctttcatcccatcatctcttgcgaggcgcgaggcaggactatatcactcataggtcaagatgatgacacaagcctggctaacatggtgaaaccctgtctctagtaaaaatacaaaaattagccgagcatggtggtaatcccagctacttgggaggctgaagcaggagaatcacttgaacccaggagatggaggttgcagtgagccaagatcatgccattgcactccagcctgggtgagagagggactcagtctcaaaaaaaaaaaaaaagattatgggacttgtcctgaccctgactcytattaaagagactttggacatattgtttcataacatttctgggcttcagtttccccatttctaattataattattgtaataacaacaacaacaattattatttatgaggaagttaagaataaaagctcctgatatatacaaattgatcaataagtattattttatattttcctcatttgttgtctataatgtctctaaaataaaaattaatattaagcttccttatgaaaaagat

SEQ ID NO: 769380 - DNA, 632 bp, Homo sapiens
tatagaactcccagtgcaggtctaataaatgacatttgattttgttattagttgttttaatcacattcaacagaatgtgattcagagcttcttttttccagcgaaacacaggtaatattatgggttcttctccaaagtactcttactctgttttcacattgtagtttgtgttctyttttttcaccatccgtgtcagcaggccccttcccacctttactatgcctgattccctctttttttttttttttgcaagcctcttgcattcagcttgtgtttcacaggactgaatccatcagacactgactaccagctaagagaactattattacatttcttctccagtgaaatttgacccccttacagtcttacagtcaaatcactcaagtaatatcatgtaaatgtacctaagttgttcagaattccagtgcctgagttttttttttttagaatcaaaaggaaattgcaaaaaaaaggctgccatcttgaatttcattttacgcgagtgacctccagaagtcagaagtttatgaagacttacacaatacacgtaaatgctaaagtgttcaaaatgaatgttgctgaacaaataatacaattatatgcatttctggtcttttcaaattttacaaata

SEQ ID NO: 769381 - DNA, 562 bp, Homo sapiens
taataaatgacatttgattttgttattagttgttttaatcacattcaacagaatgtgattcagagcttcttttttccagcgaaacacaggtaatattatgggttcttctccaaagtactcttactctgttttcacattgtagtttgtgttctcttttttcaccatccgtgtcagcaggccccttcccacctttactatgcctgattccctctttttttttttttttgcaagcctcttgcattcagcttgtgtttcacaggactgaatccatcagacactgactaccagctaagagaactattattacatttcttctccagtgaaatttgacccccttacagtsttacagtcaaatcactcaagtaatatcatgtaaatgtacctaagttgttcagaattccagtgcctgagttttttttttttagaatcaaaaggaaattgcaaaaaaaaggctgccatcttgaatttcattttacgcgagtgacctccagaagtcagaagtttatgaagacttacacaatacacgtaaatgctaaagtgttcaaaatgaatgttgctgaac

SEQ ID NO: 769382 - DNA, 586 bp, Homo sapiens
tttctgttgtataaaacacagcagaatgtaagtgagttagctcagatggtggggttctgattgtttaattccctgacctcttcatggaatatattttcagtttctactatattacttttcagcctcaggaaatattattgaataaataaacaagaatcaaagtttacamttctttggtggtccctacccttctccagacctcagtttccctgggcctaagaggagatgctgggccactcttgttctgccctggcttgagtcctgggctaggaggaatgatcctctgagccagtgctggcaatgtgcctgtgatcaccatgtcctgggtctaatgggccacctaattttagtgcatgctggggcagctgcctaagtgtggccccagctgccaggcagacggtcagggcagtgttggcagcatcggcaacctctctgccaggctggtgaggtcagagcacagcttgggacccggctgggtaagtcacagagccgtggaggaattctccagtgtacatgacacagaacatcacagcctgcatttggaaagaaatccactagcctggatccttggattgagcagacggga

SEQ ID NO: 769383 - DNA, 590 bp, Homo sapiens
cagacaaactcctattcaaccctcaagacccaaatgtcttttggtctgacatgccctcatcagcatgacctcctaggtcatcccatctctactgatgatgatgttttatatctcgtattcttggagtgttttgtctgcttttcccactgggccttggtaactttcctctgggctcctggcgcaaggcataattttctctaaatagctgttgggtgtcrtcatacggagaagagtcattagtgaatgccgacaaagcaagtgaaaggatctattccctggagttgtaaggacatgggataatgatagtaaatagtgtcagtttacacttaccaagcacgtaccatgtgccaggcactgtaccaggtgctttccatgcattaacacatctagtcctcctcgacccaagagatcggtgtggttaccccctcatgttacagacaaggaaactgaggcacaggcaagttaagacacttgttcaggcttatgtagccagtaagcagatgagctgggatttgaacctatgcagccaggctctcaaacttgcacaatatttcttctttcctactaggcacagcagagatatttggccc

SEQ ID NO: 769384 - DNA, 649 bp, Homo sapiens
tggccagggtcagaggctccaccccagaatcaccatgctcctccaagaatcctggcatctatctggaacaacttctctgagctggtggaaggaaagggttggttttaccaaagaagcccctgccctgtgaagtttctcaggggcctgttgatggtgtgggtagcaagtccactccaacgtgatggggagggattggctctgttggaagagtctgaagtctgttagaattgttcctgcactcatctgtggggagaggtgaagcactgccagaaagtcagaggggaagctcagagtcttgactacctgtaggaatggatccgcagagcaagggagggaatgtatttgtactccccttttcacctgtgagagggaggaagtttgaggctttaaaagtagagaggaccccctaggatcaagtaagatgttaatgtatttgagcattattstattgcactgtgcaattattggtagtcaaagcaaaatgagaagctatttgggcatttgggcatctcaagtatttttttaattgcagtcctgtcagcatctgcatggaatactggacagaaccgtggcctgagacccttctagaatggcctctcaggttggaaaaaatgtagagagcacctattttgtgcctgtgattgcagag

SEQ ID NO: 769385 - DNA, 600 bp, Homo sapiens
tattcaatccttttcctcctgttctgtgatcttgtgggaatgggagagcccatgcctttttctacctggcgtcagttgaacaagactctccatgtattcacaggtaaagcaacagaatcacctggaggtaagctaaaagccccaacagcctgcttccccaggacctgcaagggtcactggcacttggccccaccccagatactgtgagacataaatcatttgaagccaatgggaaatcccatcttggaagcctagggctgagtgcccacaacaaagccatttctctcctgggggaactggatcgcacctgtgggggcttcctgtggctccttcctggctaatcagccccccccagcgcccagggccatggcctcctctgctatttggcttctagtgccctctcaggcccctgggyactcctgaggctggtgaaggcaggaacctggttttaccagttttaggagctcagaaggaaaggaaaggagaggcttccctgtcacagagaagtctggaaacttggcttattcaggtctgacccgtctctaatggtctgatgagattgttgcctgcactgagtgagtttatagagtcatgataaat

SEQ ID NO: 769386 - DNA, 689 bp, Homo sapiens
gggttggtgcaaaagtaatggtggtctttgccatacttgcctgatattcatcattcttttctctcatatagatctaattgtttcctctcagcttggacaatgtcacatcagcattttaaatgtgctcaggtctctctcttaaatacaataaagctaaaaacgtcgacctctgcactgtattagtcactttcctgtctacctctgactcacggccagctgctttcagaagctgtctacactgggtatcttcatttccccatctttgccatccgccagcacattccatctgactgtgcttgtcaactccgccaaaacttctctccctaaggtaaccagtgatagtcatgtcatcacatccaatgcctacttttgagtctcggttttattacactcacattctcagtaatgtttgactcaggacttggtttatttgagacattgtactcccttgccttccatgaaatcatccttgtatgattttcattcatccttcttggctattcctcctgcyatagactgaatacttgtgacccctaaagttcatatactgaaatcttaaccctcaaggtgatggtactaggaggtggggatttggggaggtgattaagtcatgagggtggagtcttcatgaatgggattagcgtcctcataaatgaagtcgcagagagcttccgtacatcctctaccat

SEQ ID NO: 769387 - DNA, 653 bp, Homo sapiens
ctttccatttctgaaaatcagatccagggtaagaagcaacgaagacaaaacagattccttcccagtttggccaagaggcaacacacactcttgttttcgaaatcaagacttcaggacctccattctgactgaggaagtgcaattgaggagaatgccctctgagactcaagctccccgatccatcccctaaaccgttacccataggtcacctttcacagtcaaacaacaaaacatatggggagcaggcccgacagccaagactacagggaggggagaaaaaaggaaacaccacccagcaagatttcctgttgtatttctagtctggccaattttcrtttattgctggaatgaggtcagttggaagctgaggcagagaattgggcaggaatcaggtagggaggtgtgattctggggcttgtatctgagaagctggggttagcctaattttctttctgtaatcttttgattaactgtgggccagtttggatgacatttttcaaaccatctgtgcttggcaggctgggccgagcccaggcttactgctcggtgtctgcaaaactcagcttggagccggctatcacccggagcctgggatgtctctaagccatgaagcatattggattgcagaatgatccacaacatccctgtgctga

SEQ ID NO: 769388 - DNA, 560 bp, Homo sapiens
taaaagaaacttttgaagatccttttccaagattcaccagttatttacatttcacttcatttgcttattctccccactccttccctttccttctctctgtcaacctctctctttccctctccttccgattttttccgtctgcttccccatatgtgctttttaaaaaacgatctgaaggtaatttgcttttaaatacttcaatgtgtatttcctaagaacagtaatgttctcttacataagcatagtacaataataaaatctcaggacacttaaaattgctgtaattctattatctgatccacagtccattttcagattttgtcagttgccccagtaatatccttcacagctttttttttttttttttttttwaaagagtacttgttgaagcattaatggtgctacctatggtcttgtggtctggctccttataaagacagtgggaaaatgtgagagtgagaaggatggtcacccatgtgtaatattaatctccagactatagctgtgctgtgtgatcatttccaaagtgtgccccattaaatgattgtttcaagaaatgc

SEQ ID NO: 769389 - DNA, 642 bp, Homo sapiens
ggactgatattatagcaaaaacaaagacatggaacctggaagtttaaccataatactgtaatgaaacctgggccatgtgctgtgtggtacattctatgctcatcactggggcttatcaacatggaaagtttgatgcttagaaatagaggtattggccgggtgtggtagttcacacctgtaatcccagcactttgggaggccgaggcaggcagatcacttgaggtcaggagatcgagaccagcctggccaacatggtgaaaccctgtctctactaaaaatacaaaaattacccgggcgtgcagcatgtgcatgttagtcccagctactccagaggctgagacaggagaatcactckaacccagtaggcggaggttacagtgggccaagatcgcgccactgcattccagcctgggtgacagggtgaggctccatctcttaaaaaagaaaaagaaagaaagaaaaaaaaataggacatttactaggaatataggagtcctggggctgctctgcttctggtcactgtggagcctgggtgagtcactgtttctcttagcagccttgttttcttgcttataaaagggaatttgactggaaactaaagtgaagtctatccagtgcccataatggagaacatacatgggc

SEQ ID NO: 769390 - DNA, 642 bp, Homo sapiens
ggactgatattatagcaaaaacaaagacatggaacctggaagtttaaccataatactgtaatgaaacctgggccatgtgctgtgtggtacattctatgctcatcactggggcttatcaacatggaaagtttgatgcttagaaatagaggtattggccgggtgtggtagttcacacctgtaatcccagcactttgggaggccgaggcaggcagatcacttgaggtcaggagatcgagaccagcctggccaacatggtgaaaccctgtctctactaaaaatacaaaaattacccgggcgtgcagcatgtgcatgttagtcccagctactccagaggctgagacaggagaatcactcgaacccagkaggcggaggttacagtgggccaagatcgcgccactgcattccagcctgggtgacagggtgaggctccatctcttaaaaaagaaaaagaaagaaagaaaaaaaaataggacatttactaggaatataggagtcctggggctgctctgcttctggtcactgtggagcctgggtgagtcactgtttctcttagcagccttgttttcttgcttataaaagggaatttgactggaaactaaagtgaagtctatccagtgcccataatggagaacatacatgggc

SEQ ID NO: 769391 - DNA, 629 bp, Homo sapiens
ttagctataggatttctcaaggtgcaaatttaggcaaatccaggatttttgaatccattatagcagcaatattctctataacctgtttttcaaatttcagctacattctgagcagcaggtccaccaaaccagaagcctgcctttaggagtccaaaagatcagaggacctaagagaaaatagttctgtctgtgaggatatccagtgtggctttactggccagcttccttgatgaccatgacctttccagggstcttgtacttggggcttcccgaaagtgtgtctgagtgcagtagtctttttatatctgctggaggcagatgctttagttcccttagttaagacaacgaagacaagagaaagatgaaaatggcttgcaaagcagattaatgacccaattaatgctgaattgtccatttcccttgttaatgtgccctgccttctccctacactgtgtggacttcacacataacattctctacacgttcattgtttatctttcttccttactggactgtacatcctagagaagaagggattatgtctgtcatatctaacgtcgtatttctggggcctggaacatagcagaatataagaaatatttgttcctgtcactatatattgacaatca

SEQ ID NO: 769392 - DNA, 644 bp, Homo sapiens
ttcggtgcatatatatttaggactgtgataccttcctgttggacaaattttttaatcattatataatgtccctcattgtctttttttttttttttttactgttcttgctttaaagtctgttttgtctgatctaaaaatagctactccagctcacttttggtttccgtttgcctagaatatctttttctacccctttaccttatatttatgtgagtccttatgtcttaagtgagtatcttgaagacagcagatatttggttggtgaatttttatccattctgccattctgtgtcttttaagtagaacatttaggccatttacatttgacattagtattaagatrtgaggtccctttatattcataatgttagttgttgcctaaatagtttggtttttttttttttaattgtgttttgttttagagaccatgtgagatgtatgctttaaggaagttctattttggtgtatattgaggttttgattcaagatttagaactccttttagcatttcttgtagtgctgatctggtagtggcaaattctctcagcatttgtttgtctgaaaaagaatttatttctccttcatttataaagcctagtttcactggatacacaattcttggcttacaattgttttgtttaagg

SEQ ID NO: 769393 - DNA, 635 bp, Homo sapiens
gggccactccaagcttgccgacagctctctttagtgagattggagatgctccagctggtcacagaaagaggcagccagctgggtttgaaaggaaaacagatttaattttggtccccattgaagcagaaaccaatctagagatgtgcctgctctaatttggaattcttaaaaggataattggggaaacaggtagaaaaagaaccacataacccaggatataaggaaggatggatgcccagtgagtgccagagttagtttggcctattttgccatgatattaggatgggattaacttgatatacgtgcattggatctcagtggttcagcacttcctagytcttggaccttggaaattaaataaactgctataagccttggtcttcagactacagaatggcaataataatgatgctaattccatagggttgttgtaaagactaaatgagctaatgcatgtagagaaagattttaatgtagtgactggcatataataagcattaagtaaataatagctattagccattattcttctgcaccattaacctgcaaaatatgccaggctccaccagcctctgactattcaataagtccccttctacccttttataccaacagtatgttggcacaaactatcc

SEQ ID NO: 769394 - DNA, 627 bp, Homo sapiens
tggtgtctgtgtttaagcagtttgggggaaacaacaggccctccattcaccttctacatctggctgaatcattctccagttgacttttttttgtttttgagacagagtctcgctgtgtctcccaggctggagtgcaatggtgcaatctcagctcactgcaacctccgcctcatggtttcaagcaattctcctgcctcagcctcctgagtggctgggattacaggtgtgagccgctacgcctagctaatttttgtatttttagtagagacggggttttgccatgttggccaggttggtctsgaactcccaacctcagatgatccactcaccttggcctcccaaagtgctgggattatagggctgagccactgtgcccagctcagttgccatttttagaagccaaaccctactacctcttagtcctttctggtaattcagccagctcctctgattgtctttcacctgagagccaaatcggcccactctcatgttttatttgatcttgtcagtgttgggaggggatatatgtatacatacaaaaatttaacattaagacacttttagattaaaaaatataattcaagattctttatttatttttatttttttcctgagacagtctggcta

SEQ ID NO: 769395 - DNA, 590 bp, Homo sapiens
ataatcattgaatcaatgaatgaaataactataacttcgtttttttctccttgaagaaagggtcatatgtttcttctgccatttttttaaatctcaaaaatagggacagtaatggttgctaactaggctttgatagataagaagctctatgttctctttagaaaaatgatcctctttaaagtcaaagtatcataattccattgtaaatgagtaagatgataaatgccttttaagcctacttgtatgatytgaagaagtatcaagagctaaaaagaaaaataacatttataaaacacttttcaagacacttatgtgaacattatcaatttctatcctccctacaagataatgagttagagcaggtagtattatccttttggtcagtttttttttttttttttttttttttaagtaagctgagactagccatatttgaattgtttagggtggggtttctcaaccatgggacttttgacattttggactggagaattctttgttgcacaggacagtcctgtgtatcatagtatattcagcagcaacctcagcctctagccaccagatgctgtttgttcccccactcccccttg

SEQ ID NO: 769396 - DNA, 599 bp, Homo sapiens
actgcttctctttagttaaggctaaacataattgcataaattggtgacacacctgaaagactgggagtatgtctgatgccatcttttggaaggccaatttggacattataacttgaggagagggccaaattaataggtaagacagcgctagtgccrggtgtacgcatactagctttcatatttctgaacttatccctggaaacctttctcacaagtatcaaaacggcactgggccctttgaagctgtaacttgaaatctcataaaagacactgtcatgtacaactgacaacttttccaaatgaaaatagaagacaggagaggtggctcccttggggtacataccccatgaaggaatctattctgggagggattttcacagtgtgtatttttaatatcactcaggccagcatcttaatcggactttactggtgggaagcactcacccagcagcagggattgtgatggtaggaatttaatctgaacacttggcataggcctaatcatatttcacttattttcttttatgtggcttcttaagataaatgagtctcctcctttatcaacaatagctcaggatttataagctcacatttttcat

SEQ ID NO: 769397 - DNA, 620 bp, Homo sapiens
atttatatcttgttttcccaacctggcaatttggttagttgtcattgacctatttctagttgaactttagactaatagtcttacctgtattaaacttgtttaactcactagtttagtttagtcatttccttctatggatgttggcataccttttctgtaaagggccagaaagtaaatattttagttttattttaaactttttttttcttttttacagctctcaaaacttraatagcattcttagtttgggagtcatacaaaaataggccacaggctgtcattcaccaacccttctaatctatattaggaataattccataaatatataaatgctcttatgagactggaagtggtaaaaggtagattttaagaacataagaagaacagttgatatgtgttgagtaaaacatcctgaaataagtttccttggtatagaattagtcatgtcaggatattaggaaatgtgttttagaagacttgaaaacagggtactgggtgcatctgttgggtctgtatgcaggaattggatgtctagcaaatgtgttagcaagcctctctggaaattgacagacagctgatcctaactgagagatatacctgcttgtaagcttaaaaagtaa

SEQ ID NO: 769398 - DNA, 630 bp, Homo sapiens
aacatatgcattaccttatatgcttatcatttatttgtggtgggaacacttgaaatctcttagaaattttcaaatacataatgcattgttattaatgatttgtacaatagatcttttgaacttattccttctgtttaactgaaattttgtactctttgaaaaacatcttcccaaccccaccccagccactagtaaccaccattctactctctgcttctatgactttgacttttttagatgctgtgtataagtgagatctgcagtatttatctttctgtgtctggcttatttcacttaacatcaggtcctccagtttctatcctaaccatttttaagtgtacacttcattgatattaagtacatttaaattattatgaaagcatyactaccacttgtctcctcaactcctttcatcttgcaaaactcaaaccctatacccgttaaacaataatttcacctgcccctcaggccctggcaaccatcattctactttttatcgctataattttgactaagtaccacgaacaagtgggatcttacgtatttgcttttttgtgactggcatatatttagcataacgtcctcaaggtttattcaagttgtagcatatatcagaatttccttcctttg

SEQ ID NO: 769399 - DNA, 562 bp, Homo sapiens
ggtgccaggggtggaaagatatggtttggctgtgtcaccacccgtatctcatcttgaattcccatgtattgcgagagacacctggtgggaggtaactgaatcatgggggcaggtctttcccatgctgttctcatgrtagtgaatgagtctcatgagatctgatggttccataagggggggtttccctgcacaagctctctctttgcttgttgccatccatgtatgatgtgacttgttcctccttgccttctgctgtgattgtggggcttccccagccatgtggaactgtaagtccattaaacctttttcttttgtaaatttcccagttttgggtatgtctttatcagcagcatgaaaagggactaatatagtagtgctgttttctatacaaagtctcaccatcactgtattctgtctcccccaagcacacagatttttcctccatgccatatggccattcctaggaagatggtagaggggtggtgtcaactattcaagactatcttttataccttcttcagtgcctcctttcttgctattatgttaaaaccaggtactgtga

SEQ ID NO: 769400 - DNA, 562 bp, Homo sapiens
ggtgccaggggtggaaagatatggtttggctgtgtcaccacccgtatctcatcttgaattcccatgtattgcgagagacacctggtgggaggtaactgaatcatgggggcaggtctttcccatgctgttctcatgatagtgaatgagtctcatgagatctgatggttccataagggggggtttccctgcacaagctctctctttgcttgttgccatccatgtatgatgtgacttgttcctccttgccttctgctgtgattgtggggcttccccagccatgtggaactgtaagtccattaaacctttttcttttgtaaatttcccagtttkgggtatgtctttatcagcagcatgaaaagggactaatatagtagtgctgttttctatacaaagtctcaccatcactgtattctgtctcccccaagcacacagatttttcctccatgccatatggccattcctaggaagatggtagaggggtggtgtcaactattcaagactatcttttataccttcttcagtgcctcctttcttgctattatgttaaaaccaggtactgtga

SEQ ID NO: 769401 - DNA, 666 bp, Homo sapiens
gactttctatatcctcccatacatgcagttgcttttgaatttgaatatcctagtctttaatgcttgactcccaatagtacgaaaataaaaagaaatataaagttggtggcgaggcactggtcttttacatcccttggaagtcacttttgtcagaggaggaagagcttgcaacactggagggwtgtgcaacagttgctgctgtctttttgtctgcatctctgtgatgatagtcagaacacagacttcttgatatttggaagacaggctcctttttgccggtcctggctcctgaaagctatgtgcaagctactccatgaacatcccgccagtgtgctgagtagtcaggggatgggtagctgctactgtgttaagagctgaaattgaccaaaattaaccacagtttactgttcaaccctcccctggaaatagcaagcctttagtagactccaaaataattacatcaggcagattctttcagtgaaattattgtctagttgaggagaaagatttctggtgcttcttaccttaccatcttcccataatcatctttctctatttatttttgtgtgaatgaatgaacagattatttgagtgcttgatatgtttcagacacttactatgcaatccagtgttcaaaaataaaagagagagagagagacaatattc

SEQ ID NO: 769402 - DNA, 666 bp, Homo sapiens
gactttctatatcctcccatacatgcagttgcttttgaatttgaatatcctagtctttaatgcttgactcccaatagtacgaaaataaaaagaaatataaagttggtggcgaggcactggtcttttacatcccttggaagtcacttttgtcagaggaggaagagcttgcaacactggagggttgtgcaacagttgctgctgtctttttgtctgcatctctgtgatgatagtcagaacacagacttcttgatatttggaagacaggctcctttttgccggtcctggctcctgaaagctrtgtgcaagctactccatgaacatcccgccagtgtgctgagtagtcaggggatgggtagctgctactgtgttaagagctgaaattgaccaaaattaaccacagtttactgttcaaccctcccctggaaatagcaagcctttagtagactccaaaataattacatcaggcagattctttcagtgaaattattgtctagttgaggagaaagatttctggtgcttcttaccttaccatcttcccataatcatctttctctatttatttttgtgtgaatgaatgaacagattatttgagtgcttgatatgtttcagacacttactatgcaatccagtgttcaaaaataaaagagagagagagagacaatattc

SEQ ID NO: 769403 - DNA, 697 bp, Homo sapiens
acaaacatgacaataaagtgaatcacataaatgtttgggtttcacagtgcagataaagtttatgtttatactgtagtattctattgtgcaatagcattatatctaaaagtacataccataacttaaaaataccttactgctaaaaacaattgggataagaaaaaactaaaaatattaggaatacaaacaagttaacaacatgaatatatacttagaatgagaaaggaaattaaattattaatttttaaaagatgacatcacaaaatcaggaaggataatattgctaataattaactgcctcacatacattttctgtactttctggttgtatagcctttaattgtctcttcatatgacagctatatgccattatcactttctgtatrgacaatggaaagataattatttttatggcaattttgacaaaactttttaaatattgatggttgtaatgtagaatgcacacaactttacacaaagttacacatggtatacataacctacaaacccaagtattctggttaattatattttccacaattctcatacaaaataaaacacatatggaacatttatgattatatatgccaaattcaatgtacaatgtattattgacagtagagcatttgttttgatgaggcatcaatgacagttgaattctacatttgacattttacatatctcatgattatcaaat

SEQ ID NO: 769404 - DNA, 585 bp, Homo sapiens
tcactttctgtatggacaatggaaagataattatttttatggcaattttgacaaaactttttaaatattgatggttgtaatgtagaatgcacacaactttacacaaagttacacatggtatacataacctacaaacccaagtattctggttaattatattttccacaattctcatacaaaataaaacacatatggaacatttatgattatatatgccaaattcaatgtacaatgtattattgacagtagagcatttgttttgatgaggcatcaatgacagttgaattctacatttgacattttacatatctcatgattatcaaataaacttttgactagcttctgtcttttctactacccatgtatttctggtgctgaccattgtaggtcgtgtttatatygcatcgtgtcctttggtcctcttccttcatgtcaccatgcttggtgaattggagctatgggtggaaggagtattcctagaagacattcctataccaggagagctagcagtaatgtacctctactgggaagtgctgcaaaccatataaatatattctgcattcaaactataggaaccactaagcc

SEQ ID NO: 769405 - DNA, 616 bp, Homo sapiens
aattctaagcaaaaagatcaaatctgaaggcatcacattaccggacttcaaattatactacaaggctatagtaaccaaaacagcataatactgctataaaagtagacacattgaccaatggaaccgaagagagaaccgagaaataaaacctaatatttaaaatcagctgatcttttacaaagtatacaaaaacataaattgragaaaggacactctaataagtgatgctgggaaaattggatagctacacgaagaataatgaaactggatccttgtctctcactgtattgaaaaagttaactcaagatggatgaaagacttaaagacctgaaaacttctagaacataaaaattctagaaagaaaaacctaggaaaagcacttctggatgttggcctaggcaaataatttatgactaagaccacaaaaacaaatggaacaaaaacaaaaataaataaatggaacctaattaaactaaaaagcttccgcacagtaaaagaaatagtaatcagaattaacaacctatgaagtgggagaaaaaatttgcaattatgcatctgacaaaacgactaatattcagaatcgataaggaactctaaacaagaaaaaaaaacaggt

SEQ ID NO: 769406 - DNA, 616 bp, Homo sapiens
aattctaagcaaaaagatcaaatctgaaggcatcacattaccggacttcaaattatactacaaggctatagtaaccaaaacagcataatactgctataaaagtagacacattgaccaatggaaccgaagagagaaccgagaaataaaacctaatatttaaaatcagctgatcttttacaaagtatacaaaaacataaattggagaaaggacactctaataagtgatgctgggaaaattggatagctacacgaagaataatgaaactggatccttgtctctcactgtattgaaaaagttaactcaagatggatgaaagacttaaagacctgaaaacttctagaacataaaaattctagaaagaaaaacctaggaaaagcacttctggatgttggcctaggcaaataatttatgactaagaccacaaaaacaaatggaacaaaaacaaaaataaataaatggaacytaattaaactaaaaagcttccgcacagtaaaagaaatagtaatcagaattaacaacctatgaagtgggagaaaaaatttgcaattatgcatctgacaaaacgactaatattcagaatcgataaggaactctaaacaagaaaaaaaaacaggt

SEQ ID NO: 769407 - DNA, 611 bp, Homo sapiens
catacaacgacctatggacactatacctctggaacttggccatgaccttgagtgaaagggaaggcaccccagtgaaatgcagtctcaaaatagaaatgaagttgttgggaagacaagctcattaaatgcatgcctgagtttatgggttgagactcacacctggttgcacacaggtgtctgcctcagtctggaaggttcccacccacaccccaagaacacacacacacacacacacactcacactcacacagcctggatcatgcctccttacctgctcaccatccaaaccttggtttccatatgacctcctmcagaaagcctcccccgacagacctcacccctgcccccacatcaccgggctggattaatctgtaagcattttcttctctgtctccttcagtacctatcagctcctcaagaacagggacaagatctagttcactgtggcatccctattgctcagaacagtgcctggcacgtagtgggcaccccacaaatatttcttcacttaaacaaatgaccacatggcagatgaggaagacaggacttggggaaggtatcctaagaggaagttttctgacggctacagacatcggcgtcaggccatgcct

SEQ ID NO: 769408 - DNA, 528 bp, Homo sapiens
tttctggtataaagacaagtgtctttctggattgaacactctaggtttctatagagtttacattttgtctatgagtcttgtcttttatgatttgcatgcctagtttaatattttgtttgattcacatgcctaggttacagttttttgtgaacactcttatcttagcttctcttgatttggtttgactcttttcccttgcttgttattgmaaatcttacaagagcaaaaatagccattctggatgatgggtgcagaatgactaatcaaaacctattagggaagttgctactatctaacactggtctaaactcctgacatcccctgacaggatttataggattttcttttcccttgagagattaatgagaaatgaaatggaattctcaaacattaaggcatgccaggttttctggaagtccagccagctacatattatggcccactcttgtgcacatttttaaacaaattatatcaagaaaaccttagagcccaaatggtcattatttgaaaaacgtcaaactatagagg

SEQ ID NO: 769409 - DNA, 623 bp, Homo sapiens
tatattttgatttttttcttagaattttgcatttcttatgcatccaatgatacatagaaaaaacttttattgataattttcatctgtaataaatgatcacagcacagctgctgcctcatactgtgggtaatatcatggctactcasggacaaaagggtccttattccccatactttcattctttttctttccaaaccacatgtttcaatgagtcagggttattctcgcaaattctatttcctgttgtttttgacactaactacccaaaaccccaaatggtcccacaccaactggttgtactgcaaaacaattctgacattgaccacccagagttagtgtcagatcccacaggccaagggttcattcttctacaaggttgtccccacttcagacaccagctgcaggaagggccctcaggccacccatacttccgaataactggctataaactcaggggttcccacaaccccagcatgttcatgcccaattcactagaacaactaaaggaactctggaaaatgctatacttgtgtgcagttttattttataaagggtacaaatagagcaaggtcttagaggaaacagagcttctgcatcttctccccatggagccaggacaggtc

SEQ ID NO: 769410 - DNA, 549 bp, Homo sapiens
ctgactaccactcatttgttctctgtttctattatttgtcattttcaggatgttacataaaataaatcacattgtacctaacccttcgatagtgatgttttacactcagcatgcctttgagatccattgaactagttcagtgttaagcagttcgttcttttttttttactgcatagtatgcgatggtatggatatactacaatttatttgaccatcacccatcaaaggacatctggggtgttttcagttttttgtcattataaataaaattcctaagaaccgctcatgtgcaggtttttgtgtgaacataagtataatttctctgagataattgcktacgagtgcctgcaggctttccccaccccttttaggccattccttttctttcaccccttttttttttttttttttccagaaggagacaagctgattccatttttttaaatggaaattaaggagtgtaaaatagccagtcttgaaaaaagagaacaaagttagaggacttatactgcctcaaggtttactataaagctatactaattaagacta

SEQ ID NO: 769411 - DNA, 549 bp, Homo sapiens
ctgactaccactcatttgttctctgtttctattatttgtcattttcaggatgttacataaaataaatcacattgtacctaacccttcgatagtgatgttttacactcagcatgcctttgagatccattgaactagttcagtgttaagcagttcgttcttttttttttactgcatagtatgcgatggtatggatatactacaatttatttgaccatcacccatcaaaggacatctggggtgttttcagttttttgtcattataaataaaattcctaagaaccgctcatgtgcaggtttttgtgtgaacataagtataatttctctgagataattgcgtacgagtgcctgcaggcyttccccaccccttttaggccattccttttctttcaccccttttttttttttttttttccagaaggagacaagctgattccatttttttaaatggaaattaaggagtgtaaaatagccagtcttgaaaaaagagaacaaagttagaggacttatactgcctcaaggtttactataaagctatactaattaagacta

SEQ ID NO: 769412 - DNA, 620 bp, Homo sapiens
gctttatttgcaaatggctttccattgacaacagttacattttgttcaaagcaacaaatgattggcgctgacaatccacaggaacatggtgcagtcattaatgaatgtgctcattattcctccctgccgggaggcatcgactcccgttctccagcctgttttaagcagacagacctacatctgcacctgtcagcttggaaccctagtaggggagggggatgctgatgtgatggagaatgaagaatgggccctgcaggctgacattttgggagagtaggttctgaaatttatcccaaaggacatggaatcctggaagcagggttcaagatcctcccaaaattgatctcccaggatgcttggaatgattgttcygagggttttgtaaaatgccaggggaaaaccaggaagcttctctccagttgtcttgcctccttcctctccagtctccatggagctgactttgagaattaactcctgagggacagagaccctgggatggagagccagccctgctggattccacaaggtgctgcttaaagcacaacacctcttcccaatgacaggttctgaaagaaggccttgtagctagatgcacagagggttttgttttgttttttttt

SEQ ID NO: 769413 - DNA, 620 bp, Homo sapiens
gctttatttgcaaatggctttccattgacaacagttacattttgttcaaagcaacaaatgattggcgctgacaatccacaggaacatggtgcagtcattaatgaatgtgctcattattcctccctgccgggaggcatcgactcccgttctccagcctgttttaagcagacagacctacatctgcacctgtcagcttggaaccctagtaggggagggggatgctgatgtgatggagaatgaagaatgggccctgcaggctgacattttgggagagtaggttctgaaatttatcccaaaggacatggaatcctggaagcagggttcaagatcctcccaaaattgatctcccaggatgcttggaatgattgttccgagggttttgtaaaatgccaggggaaaaccaggaagcttctctccagttgtcttgcctccttcstctccagtctccatggagctgactttgagaattaactcctgagggacagagaccctgggatggagagccagccctgctggattccacaaggtgctgcttaaagcacaacacctcttcccaatgacaggttctgaaagaaggccttgtagctagatgcacagagggttttgttttgttttttttt

SEQ ID NO: 769414 - DNA, 605 bp, Homo sapiens
aattttggctatccacctattttcagaaatcaatcttattgagacttggactaaattttaaatgaaagactgaggggatatcagtctattaccagatagtcttttaccttttagccttaggcagttgattttgtaataattgaattgtgtgcaagaccaagagttaaatttcattgttgcagatcctcctggctcacttgaggatctaattttaacgggagttgatgttgacgrgattcagatgaaaaagacaaaagatcaaagaggatagtatattcggaatacttttaattaatgtgctgtagagatacctttagagaagcttttttcttttcttttcttttgtggtaaccatgtcttttggaaacctctgtatactactcaaaaatgtatctcattgtttctagggcattccgtatcccctctttttttttcccaatgtgcccaaagataaatggtttcatctagaataaaacatccttattgtcatcactgtaaatctaagtaatcatcctgaggtgcacctatttctctagaaaaacaaaggttctgcatccataacttctgaaaacaaaactagctggagttctagatgaagaagtccc

SEQ ID NO: 769415 - DNA, 633 bp, Homo sapiens
ctttcatagtgttataacactgctaaattgtttttcaaatggatgtacaaatgcacacttcctacagcactatgtgattgtcctctttacttgacatcctagccaacctttgttattgtgctaggagttgtaaatcatcaagggacctaattcttatagtgtaatttagcagagaaatttaatttaactttgaaataagttaatataataaataaaatcaaactggtaaatataaataaaactaattactaaaataccaaggggtgatttgttttaagggacttcagagagtgcctaatctacttggtctaccacagatatcctcttctataactcctttcgctccaagagtataatacagatggaagtggatcatttacttttcaaccaaataacaaaatcctgcatattcataagttaaaagttatatcaatctgaaactaattgcaaaaagttattamgaatctaaagtccattaaacaccagctgtttgcagctattaatcactaatacctctgtcttattaatcaccatcaacatatactgaagtattttggagactattaggatgtcgtattccacttgaagtaaaatccaaaatctgcattatggcttacactgcacatatatatc

SEQ ID NO: 769416 - DNA, 578 bp, Homo sapiens
ggagaggagcagagcaagatcacagagtaaaactttggggtggaaaattctctgcagaaaccttacagggtcaggacataattgggtgatatatccaaaatgctgaaagaaagtaaaaccaacaacaacctttcaatcaagaaggcagtacccagcaaagctatgtttcagaaagaagaataaataaagacgttctcagacaacaaaagctgaaggagtttattaacatcagaactgtcttacaagaaataataaaaggagttcttcaagctgaaagaacactgtacaaatgagtaacatgaaaacatgaaaatatgaaactagaaaagtaagcatacagtcaaactcagaatactctaataytataatagtgatctgtaaatctattatatttttagtatgaaggctaaaatacaaaacaactaaaactaataatagccacagtaattttttacagactaggaaatttataaaaatgtataaatggtgacatcaaaaattcaaaatgttctgtggagtagaatagagctgtacagtttttttttctttttgcaattaaagttaaattgttttcagct

SEQ ID NO: 769417 - DNA, 590 bp, Homo sapiens
gagacccacttgcccttcagatgtcactcaagcctcaattcttgggcagcctcctcaggtcctccattccaggtcggcttccaggctgggccccattcacaggctctggcggctgtctctgtagtagagggatgctctgaatagtctccttcccccagactgtgagcaccaagacgcaagttctgctttggttgtgttttgttkttgtttttgtttttgttttttgagacggagtttcactcttgtcacccaggctggagtgcaatggcatgatcttggctcactacaacctccgcctcccaggttcaagcgattcttctgcgtcagcctcccaagtagctgggattacaggcatgcaccaccatgcctgggagacgaggtttctccacgttggtcaggctggtctcgaactcacaacctcaggtgatctgccctcctcggcctcccaaagtgttgggattacaggcgtgagccaccgcacctggcttggttgtgttttttaaatcagtagctctgaagatgtagcagatgtcagagttatctagtgggcttgtatgctggacaccctaccccccagacattgtgtattt

SEQ ID NO: 769418 - DNA, 602 bp, Homo sapiens
ataaggtcacagcataatttcatggcctcaaatctatcatataagttgctaaaaatgtgccataaatttcattcaagagagaggcaaaagctgttcagttattgccagtgcagaaaccagagggaaatttgttttccaaggttctcaaggagtaatgtaaggagatcccatggtataaattagtgaacactttcctcaatatatttatagtaacctcagaaaactatcgtgcacatctttcttakaatgccttttaacatatactagcatgtcttacactagatgtacttacactacaatataatccagtaaaattcatttcagagaagcaaaataatcctgtgtgtttaaaattatttaatagtttatattaactgaagggtaaattttaatgccatctaagacagcctttcccaaaatacagtctgtgaaacaacctataaaaacaatcagcatctttccgtggcttctctgatatcttccttttttatttgtatgtttcttttctctttctccctttgtttgtatctctttgtacttatgcatctccttgcctcttatgtttctcctagatcttctcatcttcacactaacatctttcc

SEQ ID NO: 769419 - DNA, 639 bp, Homo sapiens
atgattgcaattgtatatttttatgccacttaacatgctgaaaatgtaacacagtggagtactgaaaaggattcagacactgctttcttagtccctagttttgaaaaactcatattttagtgaagaaaatgatagttaattaaacaaataaatacaatgggatgactgccttgatagctgctatggaagcacataacagaaacaaamgcccaggaatggaggtcactgtctttatatctggaataaatgtaaaactaagagttagctacacaaagacagggagtgttgctggagcggagtccagcatatgtgaagcatgggaggcctataagatgacatatttttgcagaactgaaaaagagttaggatggacagtagtggtagaagtttgtgaagtgtatagtaaagaatactctcagagaaataacattatattgggtttactgagtactcttgaatgaattttaaataggttggtgagatcatcaaacttatttatataaaagtaacctaggttgtaagtcagaaactagtttagacgaggcaaaattaggaaaaagctacagaaaaagcatttgaaagtcattataataaggagagagatgaaagtggactgaatgaagttattgacaatgggaa

SEQ ID NO: 769420 - DNA, 494 bp, Homo sapiens
tgtatcctttatgacagggcttactcctctcatcaaacaaaagccactattttttctttgatagtttggaatttatttgtctttgatattaagcaggtttattctaataaagaaaaaatagtggttactgacaaaagaatacctaattatagcagaactatcaataataaaaaatgtcagaagacaataacattctgttttccatttcttaagatggaattggctgggcatggtggctcacacctgtaatcccagcactttgggaggctgaggagggcagatcayggaggtcaggggttcgagaccagcttaaccaacatggagaaaccccatcttacttaaaaaatgcaaaaattagcctggtgtggtggcacatgcctgtatttccagctattcatgtgactgaggcacaagaattgcttgaacccaggagtcagagactgcagtgagccaagatcacgccactgcaccccagcctgggcaacagagtgaga

SEQ ID NO: 769421 - DNA, 557 bp, Homo sapiens
tgtgtgcatttggttttataagaacttatagaaacaggaattttatcaaactatcataagcagaaagcacaaagttattaaaaaaagagaattctcacaggaaatcaaatgattctcatggagaaactatgcatttccttagtaaggatagtaaatgrcatatttgcagctccctatgtgaccactcagccacataaattatttaaggaccaccattgtgacttttacagctaaataaactctgtggacgtttgctctcttatgtgagtgccccgaatttatgatctctccatatttattttcctgaataaaggagctttttaattatcctgtgaattgaaggatctctggttatattatttatgagaaataaattcagcaagattgaagaatctttgagaatttccttctagattctcttttgacagatttaaattaaaatttaagtttaatatttttaatttgagaatttaaaattattttctcttttctcaatgtttagagattttaacagcgtctgccagcttaaagtgaaaggaacgtggttagttgggatc

SEQ ID NO: 769422 - DNA, 601 bp, Homo sapiens
cagtggtctcaggtaggtcctgcaggtctagataccagatagacttctgataaaagggcaactgatatccattgttggcttttttgtttgtctttgtactgatctaccttggtcatttcaccaatccttaatgaaaatgcctgtttccttgtaatttgacaatgagcctcccctaaagtttacttttctgctttttttcaaatgtcagtgtcatttataacatatctgtgstacattggagtccactaaggatgaagaaagtcagcaccgggccctttagctgaaaggtgtagagatcagaaaagccttcatcttcacctctgcccctcatgctgcctccagtgagtgctgccctcaccaggtcctcccaagtgtgccattcattcatgtgtgtgttcattcactcacccctttgttctgcaaccattttcagagcaccttctctgttataggcactgctctagaggctgaaagatatgacagagaacaagacgcaattcctgctctcatgcaatacacattctcattgaggaagacataaaataaacaaaaataaatacacaatggtcttagattcttatatgtgctatgaataaaaaaa

SEQ ID NO: 769423 - DNA, 601 bp, Homo sapiens
cagtggtctcaggtaggtcctgcaggtctagataccagatagacttctgataaaagggcaactgatatccattgttggcttttttgtttgtctttgtactgatctaccttggtcatttcaccaatccttaatgaaaatgcctgtttccttgtaatttgacaatgagcctcccctaaagtttacttttctgctttttttcaaatgtcagtgtcatttataacatatctgtgctacattggagtccactaaggatgaagaaagtcagcaccgggccctttagctgaaaggtgtagagatcagaaaagccttcatcttcacctctgyccctcatgctgcctccagtgagtgctgccctcaccaggtcctcccaagtgtgccattcattcatgtgtgtgttcattcactcacccctttgttctgcaaccattttcagagcaccttctctgttataggcactgctctagaggctgaaagatatgacagagaacaagacgcaattcctgctctcatgcaatacacattctcattgaggaagacataaaataaacaaaaataaatacacaatggtcttagattcttatatgtgctatgaataaaaaaa

SEQ ID NO: 769424 - DNA, 610 bp, Homo sapiens
agggtgagagggaagaggaacttgattaaatattaacagtgtaagaagacgagcttgactggatatcaaagatgggggaattcttcattttccccttcgtgggattctttgccaaaactaggctcagcaggcaaaggaagaggcctcatagagaaaagggctcaaaagaacctgactaaagtttgaccaagaaagttactgtcagtaatgtacactatgatgtttcctttcttgttygttttatctctgtttgaggaggacaaaatgtaagatattaatactgacttaaaaagagaagggacatcacaatggggtttcatatactaggcatctggacttgaagttctaaaacatatgtattgtgactaaagtcttgaaactatctgagttgcattttcttccaaagagacacccatatggaatataacttcttccctccctcctcttctgttccttccttgaagttttaaatacaatgtcaaagagagaaagaatcccaaagattatctgttccaatcttgttttatagatgacaagaaagctttcaaaaaatggaataattaatttaaaaaaagctaataaagaggtgctttgatttgctcatgtttgt

SEQ ID NO: 769425 - DNA, 644 bp, Homo sapiens
tgccctatgatctataattcatttacaggagaaatgtcagctagtatatctttaaatggttttaaaagacaccaattgctctgatgttggattgtctttgtccttcatttcctcttgattgattttattcattgttgcctatttcctccattctctacttttattgtaattatcatttttccagagaaatgataaaaaattagctctatttttaagatactctttataatcaatatacagttttgtaacaatgccattttagttcttaatttttcccctatttcaataatatttctttaatgtcactctgttattataaataatctcatttttgagtagtttttcctaaaatttatgtgttctttgaattcttctgtaacataaagacatctttgagtttttcttatagtgtttggatgattttttttttcagactragatcttcatctatcttttgcttaatattttttctccttttatatttttattgtaaaatatgtgtgtgtttgcagtgacatttctttatatcttgctcacccagacattctatatgctttatttactttgagtaatctctctttgacttacttaccctttttaagatctttaacatgcaatttgaggaataaatgttgccttctaaa

SEQ ID NO: 769426 - DNA, 612 bp, Homo sapiens
tttatgtttaacctttatacagggccaccacattgcatcattctaggagctgccattgacattgtcttctttgcatgccccaaggagtgttcatccccataatagaaaatgataaggcaagttacttaacctctcttttartttgctgttatttgtatctttcagggttgcttgagaagtaaattaaagaagataaaaaataacatagtgcgcaatgcacagaatgcgtcccaaaacactagtttttttcctctctaatcattcttacagaatgcctgatgaaatcttgttacttctgccaccagatgtaactgaaatagcttggaatatttggtttgtttaagccactggaactcactggactatttttaactaatattagtaagaaggaaattctgttcacttacaattaaggaagcctacaaaagttgtcttttcattaaaaagataatatgcatttaggtagtcatctaactcctacttaaagcagcatgtctgttcaaacatcctttattttcttaatttgtctcaaaagaggtttgctttatcttaagggtggttataccagataatgggataacccattgtctagaatgcagagtctttgttatt

SEQ ID NO: 769427 - DNA, 600 bp, Homo sapiens
gcaggccccgaacaggactctgctctagaggtccacaaaggaatcccagggtaccatgttcccctcaaggaacgtgcaggaaaccaccccttggccatttctgcccagccagagctagagaggcgcgtgggaagcccctcctgtgagccctgggtatgcaaagaccagaatggcagggagaacgtccaaccccagagcagctgcggaggggaggctcaccttgtacagccccaaytccgtctcatcccacatgtcctcatcggctggcctgctgtcagtctcggcggccgcctcaccgtgggtggaggacttgtctgactcactctggcccaggcagcagccggagtcggtgtcggagagctcggagtcccgctccttggtgctgtgggggagcacgaggctctggcggaccaggagctggatggtgtcattcaggcggacctcgtagtcgaagagggtatggccgtcctccatctgcagggacaccagaggcagacgctgtttagccaccaaatgccaagtgggcatctgtgggcaccagtgatgaaccaaacactgtgtcccagcccttgtggggggggggcaatctgcatcagagta

SEQ ID NO: 769428 - DNA, 585 bp, Homo sapiens
acaggccaagccacagaggcaggaaggggatttgagggtgccaggggctgcgggaggagatgcagaaaaaggaagcagtagctgggacagggttcagggtttcctttcaaggtgacaaaatgttctaaaatagactgcagtgatgattacacaactatgaatatacctcaactgtgtactttaactgggtgaactgcagggatataataaagccrttatttaaaacatgaagcaggccaggcacagtggctcacgcccgtcatctcaacactctgggaggccaaggcaggtggatcacttgaagtcaggagttcgagaccagcctggccaacatggtgaaacctcgtctctactaaaaatacaaaaattagccaggcgtggtggcacgcgcctgtagtcccagctactcaggaggctgaagcaggagaatcgcttgaacctgggaggcagaggttacagtgagccgagatcacgccactacattccagcctgggcgacaagtgagacactgtctcaaaaaaaaaaaaaaaaaaacttaacaccaagggcaagccttggtgtatgtagactgtggactcagagatg

SEQ ID NO: 769429 - DNA, 608 bp, Homo sapiens
ggggacatagaaagaagtggagaaggccaggtgtgacggctcacgcctgtaatcctagcactttgggaggtcgagatgcgaggatcacttgaacccaggggttcgaaaagagcctaggcaacatggcgaaaccgtttcttacaaaaaatatgaaacttagctgggcatggtgacacatacctgtggttccagctactcrggagactgaggtgggaggatcgcttgagcccaggagttagaggctgcagtgagctatgatctcaccactgcacttcagcctgggtgacacaggaagatcctgtctcaaaaaaaaaaaaaaaaaagtggaagaactagaaaaaggtcaactgtagttctaatctgcaaagttctttacccttttaggtgaacaggaactagtgcataaaaatttatttcagctttaacattgcaactaaaaacactccagttttggagatttagaaaataagcctcacaggtaggaagacagaattacttcctcacatggtaaaatgccagctctacaatgaagaaactctggagctgccatctctttaatgggcaccattaaaccagcctcagagaaatgccaagttcatttaaaataa

SEQ ID NO: 769430 - DNA, 529 bp, Homo sapiens
tgtcatgggggtgggtcaaagaaatagtggtatctcagaagtcttaaattaaatttgtgaatgaccataagtggcagaagataagattggagataaaggtagaggttcagttcttgcagggccttaaaagacataataaagagttcaaatcctgttctaaggcagcgaaaccaytggtggattttgaaaagccaggctactgtgagataaaacataaagggtttgagaatgactatcagaaaaccagttaaaaggcgactacagtagctgaagtgagagatcatagtgggttggattagggcagtaggaatggtgatagtgataagtggctggaattgggatacattttgttaatggactgtaatcatagtgtgaataaaagaaggaaagaaaaaggatgaatcctagtgtcaggcctgataggtgggtgagtaaaggtaccatttactgagatggacagaagtgaaggaaacagtagggagtaggttcggagcaggcaatgtctggagttcgggaaattagttgagag

SEQ ID NO: 769431 - DNA, 703 bp, Homo sapiens
cacgcaacactggagggtggccagaaggatccggagccaggtgcacggcacaggtaagtgggaaccctcaagagccctcagaggatggagattttagggcagtgttgctcaccctgtggccctccatccaagaatgaacaagggacccttattaacatgcaggttcctctggcctacccatacctcagcaaagtaatttccataaacattccaacagtatacctgagctatcatgatktgggtatttgtaatgtgtcatttataaagcgaggtctagaaatttagataacctttataaagtgcaaaagtagatttgaggcatggagtttaacaactttgtttcaaatgacttaaaaaaaaaactcttaacagatgggatctcactgtgttgccaggctgcagtgcatggctattcaaaggtgtgatcaagtgcactacagccttgaactcctgggctcatgtgatcctcctgcctcagccttccgagcagctgggactacaggtgtacaccaccacacccaggcccaaatgacctttaaaattagaattgatatgaccactcaaataaaatgcatctacatattctcagattaaagcctatacattttaatagttgttagaaactgaaacagatatttggaaatttcatctcctccttgagaactagaaaatatgtatctttcccaacatattcaattaagaa

SEQ ID NO: 769432 - DNA, 597 bp, Homo sapiens
ttggtggatatttgagctgtttccagtttttggctcttatgtataatcttctattaacacttgcttataagtatttgtatggacatgttttcattttttggggtagacatctggaagtagacttgctgggttttgtactgtcttttacccaacagaataacaaaataccatatgatataatgttttatttaataaataaggaaatgaaaagtccaaagacattaactaatttcctcatactcacagttcattggtgacagagaaagaattcaaacccagtacggcccattcttytttttttcttcttttctaatcagtttcattcctgctcctcccagaaacactcctcctggagccctcctccttcagctctattctagatgggctcttctccttgggccagagctgcaatagggaacttcccttctcaagtccttctggggctcccctttacctcctgcagactttcccacccctactcccatcctaaagcctctgcttcacctatgcctctggggaactggggaactctcatttctgagccttcctggcattctgtgagcaaatcaatcgcttccggtcctctcccggtgagcc

SEQ ID NO: 769433 - DNA, 642 bp, Homo sapiens
gggctgttttcctatagaaactaaacaacattaatttgacctttgattggtaggaagccagaagggttttaagcacaggagatatgtcaggtgtggttctagaaagtttaatctggaaacatagaagatcccagaaccaagaaacttgcttaggaaatattgaaatatgtcggtgagatacttcagtaggcagaatgagtagagttacagaaagaggtccacttcttaatccctggaacctgtaaatatgttatcttacatggcaaaagaatttttgcaggtgttaccttctcattcggtcatggraaaaaaaagaataaagaaattttgcaggtgtgattaagattgatgccattgagatgggggattatcctggattatttcagtgagcccaatctaatcacatgaatcccctaaaatggaagaagagtgggtcaaagagattcaaagtgtgagagggactcaacctgaaccacgaaccaaggactgtggataacctccaggagctgggaaaggaccttagctgacagccaacaaaaaattcactttctttatctggtctagacttgtttttcttccacagtcctacaacagcagaaactgaattctgccaataacctaaatgagcaaggaaatggatcc

SEQ ID NO: 769434 - DNA, 508 bp, Homo sapiens
tgacagattacaactggtttctctcccccgccctacctacccacaaccctcgtgttcacctttataacaattttttttttcccaaaagtaatgtggtttaaaaatcattttaagttgcccaacataaatgataaaatcaaatattggattcacaaacaatagcctttattggtttgtgacaagtgatccatctttttacattactgcagctttytgaaccagattatttttcataattgataatttgtgagtcatatatttgttatctgttcttttatggcttgaaaatagtgaacaatgccaaagatcacgaaacttttataaagaaaattattttagtgtggtttattgcctggcattttctgaaagtatgttaccaataagttttgcagagaatgtaacaaagataaagtaacatccctgctagaaagagacctgataggtctagaattcatactgataataggaatttagttttaggaattgttcatatttagcatgagaacaa

SEQ ID NO: 769435 - DNA, 453 bp, Homo sapiens
tgacacaattatggtaacttgcactttcctagaccacatattatcaaacctacatcaatcaaaagtggttgccctctacacatgatgggcaacagtcatcctgggatccttgtttctatcatcctggaatctctttgaatcctttcctgtgtttcatcctctgtttgttaatcccatgttttcttcttccttagtagtttatttggtttattcccttgttttgatggaraacaccctccagtcacagcctgagaaagcttatgtaaagataaatgttttaggtcttgtatgttaggcattatcacaatattatccttccacttaactaaaggtttaattgagtatagaattgtaggtaaaaataattttctttcagaattttgagagcctcagtccattgttttcaaactcctagtgttgctactaaaaaatctaaaattgttttgattctaa

SEQ ID NO: 769436 - DNA, 639 bp, Homo sapiens
tcctgtgaggctcaacaacaaaggtcggacctgggtctggaggctttaaatccacgagcatatcaacggagtagacacagacagacatgcttactaaatcctgccatatatgaacggtaacttcaaagcaacttaaagtgaaaactgtgaatcaattatccatgtagtcacatgtaaaacagaaaacaataacagaaaaatgttttcttcctgattatttaaaacgtcttactaaaatgtatattcaacccacagtgttgttttattagcrtttgtaaaggctttatttgtggctaaataccctggcaaagtcaacgtctaccaaccaaatattccatcttaatttttgtttcaccaagtcccatgattaaacacattccccacaactggacttcctcagcttgcatatttactttgtgtatgacattaccctaggcactgtgatgagtaaatgaaaatttacaccctcacccatctacctcagggaactaggtaattaacaattattactaagtgtttaggaagcagaagactctgtaaggcactgtgggaaaaacagtgatctctaaaaccaccctaagtttattaatttgcactctttctggggtgaaagttaatcaaccgaaaagcagaatatgc

SEQ ID NO: 769437 - DNA, 641 bp, Homo sapiens
cctgtgaggctcaacaacaaaggtcggacctgggtctggaggctttaaatccacgagcatatcaacggagtagacacagacagacatgcttactaaatcctgccatatatgaacggtaacttcaaagcaacttaaagtgaaaactgtgaatcaattatccatgtagtcacatgtaaaacagaaaacaataacagaaaaatgttttcttcctgattatttaaaacgtcttactaaaatgtatattcaacccacagtgttgttttattagcrtttgtaaaggctttatttgtggctaaataccctggcaaagtcaacgtctaccaaccaaatattccatcttaatttttgtttcaccaagtcccatgattaaacacattccccacaactggacttcctcagcttgcatatttactttgtgtatgacattaccctaggcactgtgatgagtaaatgaaaatttacaccctcacccaatctacctcagggaactaggtaattaacaattattactaagtgtttaggaagcagaagactctgtaaggcactgtgggaaaaacagtgatctctaaaaccaccctaagtttattaatttgcactctttctggggtgaaagttaatcaaccgaaaagcagaatatgcca

SEQ ID NO: 769438 - DNA, 625 bp, Homo sapiens
ggaacacttttaaagtggtatgtggtgttcctctccaatttgagtcaacctcccttttgcctgagttactgcaattgcctttttttttttttttttttttttgagacagagtcttgctctgtcacccaggctggagtgcagtagcacgatcttggctcactgcaagctcggcctctcgggttcatggcattctcctgcctcagcctcccgagtagctgggactacaggtgcctgccaccatgcstggctaatttttttttttctgcttttgtttcagtagagacggggtttcaccgtgttagccaggatggtctagatctcctgacctcatgatccgcccgcctcggcctcccaaagtgctgggattacaggcatgagccaccgcatctgcctgcaattgcctcttaactgatctctctgctgctgccctaaccttcctattaaattcttttaaaaggtaaatgatgacctcctctgctcagaaccctccagttgtttgccgtcttgctcagagtgaaagcccaagtccctgcagtggctaacaaagtcctatcccatttggctctctgtgggctcatctcccatggctgtacaagagtaacctgagtgcaagtgataacccagt

SEQ ID NO: 769439 - DNA, 625 bp, Homo sapiens
ggaacacttttaaagtggtatgtggtgttcctctccaatttgagtcaacctcccttttgcctgagttactgcaattgcctttttttttttttttttttttttgagacagagtcttgctctgtcacccaggctggagtgcagtagcacgatcttggctcactgcaagctcggcctctcgggttcatggcattctcctgcctcagcctcccgagtagctgggactacaggtgcctgccaccatgcctggctaatttttttttttctgcttttgtttcagtagagacggggtttcaccgtgttagccaggatggtctagatctcctgacctcatgatccgcccgcctcggcctcccaaagtgctgggattacaggcatgagccaccgcatctgcctgcaattgcctcttaactgatctctctgctgctgccctaaccttcctattaaattcttttaaaaggtaaatgatgacctcctctgctcaraaccctccagttgtttgccgtcttgctcagagtgaaagcccaagtccctgcagtggctaacaaagtcctatcccatttggctctctgtgggctcatctcccatggctgtacaagagtaacctgagtgcaagtgataacccagt

SEQ ID NO: 769440 - DNA, 509 bp, Homo sapiens
gtgcagtggcacgatctaggctcactgcaaactccgcctcccatgttcaccccattctcctgcctcagcctcccgagtagctgagactacaggcacccaccaccacgcctagctaattttttgtatttttagtagagacggggtttcaccatgttagccatgatggtctcgatctcctgatctcatgatccgcccgcctcagtctctcaaagtgctgggattacaggcgtgagccacygtgcccatcaggttttacattaaataatctgtttgagaatcactaagaacttcaaatggagaaacatttactgaaggatagaaatctggtgaaatactgcttcaacattcctttgttcacactaggccactcattcattacctagtgcaattcaaaatacagacgtaatctatagaacatgatatatcttggcctttgactactgtacaaaatgccaacctcactagagataagactcattgaaattagacctatgctaaagtcttaggat

SEQ ID NO: 769441 - DNA, 509 bp, Homo sapiens
gtgcagtggcacgatctaggctcactgcaaactccgcctcccatgttcaccccattctcctgcctcagcctcccgagtagctgagactacaggcacccaccaccacgcctagctaattttttgtatttttagtagagacggggtttcaccatgttagccatgatggtctcgatctcctgatctcatgatccgcccgcctcagtctctcaaagtgctgggattacaggcgtgagccactrtgcccatcaggttttacattaaataatctgtttgagaatcactaagaacttcaaatggagaaacatttactgaaggatagaaatctggtgaaatactgcttcaacattcctttgttcacactaggccactcattcattacctagtgcaattcaaaatacagacgtaatctatagaacatgatatatcttggcctttgactactgtacaaaatgccaacctcactagagataagactcattgaaattagacctatgctaaagtcttaggat

SEQ ID NO: 769442 - DNA, 442 bp, Homo sapiens
agatctggtggtcatcaccttaagatatcaaacttagagtcaccagtaatgggacagtctgaaaatatgtacctcctaacacaatgcaataagtggtacacataattatttttgtaggcttcataacaaaatttaacttaaatttaatcatgaggaagcaccacataaatccagaatatggctcattctataagacaattggcctgaactcttcaaaaatgtctatctcrtgaaaaacaatcaatcaaaaaagtcagggatactttttagattaaaagagacaaaagtggcataacaaaatacaatgcaagaaatgtggttggattctggataaaaacacatagctataaaagatgttttggggacaaatggaaagatttcagtattaatactaattttcttacatgtaaatggtatgatagttatatgaaacatatcccta

SEQ ID NO: 769443 - DNA, 515 bp, Homo sapiens
ggttcaacttgccccggaaggaaacggaaaacctcgcgtttggcaaaaccaaaagtcaaacgcactctcaacctctctctggtggtggtaccttaaattctcctactgtgtcctttacaaactggcttcttttcaacaagtccatttcttctatcttagaaacgtagcataaatactttgttttccatctgcaatcacacatcgcgactgcaggaaaagaaaccacccctaggttacaatacgcggcctcccaaaggccaacgttgccggagttttttttttaaaaaaaaaaaaaaaaaaaaaaaaagagagagagagagagtggcatgctgggatttgtagtttatacaaaarccgcgttgcatgcagggagatgcccgtaccccctcaccgccctcagttcacgccctggctggtttgcgattcgagaggaaaaatcattaaaggatctggagttttcaccccaaaactttaatcgttttgtcccttctttttttttcttgtctttcctccag

SEQ ID NO: 769444 - DNA, 566 bp, Homo sapiens
atggcctacatgctttcttcttcctaacagaggaacaattaaatatcaattttccattaagaaaacaggctgtagttattagataactattcctgatcaaaagaggtagataaaattagcatcctttacaattcaaataacaaattataccaggcacaagtcaaagaggtattaaattttaatgttcatatttacctagttataatttacttattgaaaaattattatagaactaaacaataactgtatatatggtgacatagtattrggggtttctgtttgttttaggtttgttttaaacaaattactgttttcttttctctttttctctttatcggaacctaattcattttctaccagtcaaccatgtatgatactttatcagagtccccagttaatcaagagtcaagtcagtaactatttactgaaactctatgatgtataagaatattattaaaataatatctaaagatactgaggatcctggctgggcgcagtggcccacgtctctaatcccagcagcactttgggaggccagggtgggtggatcacttgaggtcaggagt

SEQ ID NO: 769445 - DNA, 605 bp, Homo sapiens
ggttgtaagtgtatggatgtatttctgtgttctctattctgtttcgttggtctacatgtctatttttatgctggtcccatgctgttttggttactatagctttgtaaggtagtttgatgtctccagctttgttctttttgctcagtgccttggctatttggggtcttttgtgctttcatgtgaattttagaattctttttctattcctgtaaaggatgtcattgatattttgacaggggttgcattgaatctgtaggttgctttggctggagtatggatgttttaataatattcttccatccataaacaagcaattatcttttcattttttgtgtcctgatgaacttatttcattaattttttttttttttttttagtatttattgatcattcttgggtgtttcttggagagggggatgtggcagggtcataggataataatggagagaaggtcagcrgataaacacgtggacaaaggtctctggttttcctaggcagaggtccctgcggccttccacagtgtttgtgtccctgggtacttgagattagggagtggtgatgactcttaatgagcatgctgccttcaagcatctgtttaacaaagc

SEQ ID NO: 769446 - DNA, 597 bp, Homo sapiens; identical to SEQ ID NO: 757806

SEQ ID NO: 769447 - DNA, 469 bp, Homo sapiens
tttaatctctctaagcccaaatttcctctggtgatagggtttatgagaacaaaggacatcataattggaaagcaccaatttcagtgcctgtagaaagtgtatgataacagtaaagtattgttattgtttatctttttttttttttttttttttgagacggggtctcactctgtcgcccaggctggagtgcagtggcgtgatctcggctcattgcaaactccaccctygggttcaagcaatcctcctgcctcagcctctctagtagctgggattacaggcgtgcaccatcacacccagctaattttttgtaattaaaatcccaaagtgctgggattataggtgtgagccaccgatcccagcctgttattgtttatctgtgtgaccttagataagttactcaatcactctgtgcctcagttttcttgtctgtaaaatgggataattatattatctgctccatagagctatt

SEQ ID NO: 769448 - DNA, 618 bp, Homo sapiens
aaaggatttaatctctctaagcccaaatttcctctggtgatagggtttatgagaacaaaggacatcataattggaaagcaccaatttcagtgcctgtagaaagtgtatgataacagtaaagtattgttattgtttatctttttttttttttttttttttgagacggggtctcactctgtcgcccaggctggagtgcagtggcgtgatctcggctcattgcaaactccaccctcgggttcaagcaatcctcctgcctcagcctctctagtagctgggattacaggcgtgcaccatcacacccagctaattttttgtaattaaaatcccaaagtgctgggattataggtgtgagccaccgatcccagcctsttattgtttatctgtgtgaccttagataagttactcaatcactctgtgcctcagttttcttgtctgtaaaatgggataattatattatctgctccatagagctattgtgacaaaaaaataaagactatatctaaagcactcagaacagtgtttgacatgtcctaagtgttctgtaaatgtaagtcaccattattgttgttataccattattgtcagcagtatcatttattaatgtaataataataaaat

SEQ ID NO: 769449 - DNA, 453 bp, Homo sapiens
tttagaatcaaaacaattttagattttttagtagcaacactaggagtttgaaaacaatggactgaggctctcaaaattctgaaagaaaattatttttacctacaattctatactcaattaaacctttagttaagtggaaggataatattgtgataatgcctaacatacaagacctaaaacatttatctttacataagctttctcaggctgtgactggagggtgttytccatcaaaacaagggaataaaccaaataaactactaaggaagaagaaaacatgggattaacaaacagaggatgaaacacaggaaaggattcaaagagattccaggatgatagaaacaaggatcccaggatgactgttgcccatcatgtgtagagggcaaccacttttgattgatgtaggtttgataatatgtggtctaggaaagtgcaagttaccataattgtgtc

SEQ ID NO: 769450 - DNA, 644 bp, Homo sapiens
tgcatggcatattctgcttttcggttgattaactttcaccccagaaagagtgcaaattaataaacttagggtggttttagagatcactgtttttcccacagtgccttacagagtcttctgcttcctaaacacttagtaataattgttaattacctagttccctgaggtagattgggtgagggtgtaaattttcatttactcatcacagtgcctagggtaatgtcatacacaaagtaaatatgcaagctgaggaagtccagttgtggggaatgtgtttaatcatgggacttggtgaaacaaaaattaagatggaatatttggttggtagacgttgactttgccaggtatttagccacaaataaagcctttacaaaygctaataaaacaacactgtgggttgaatatacattttagtaagacgttttaaataatcaggaagaaaacatttttctgttattgttttctgttttacatgtgactacatggataattgattcacagttttcactttaagttgctttgaagttaccgttcatatatggcaggatttagtaagcatgtctgtctgtgtctactccgttgatatgctcgtggatttaaagcctccagacccaggtccgacctttgttgttgagcctcacagg

SEQ ID NO: 769451 - DNA, 605 bp, Homo sapiens
gtaagaaaaggaatggaaaagagatgcaccagaatcacaatagtcattagggtacagtgctgcctttgacagtatctgaagtgtttcatttcttaaaaacaaaaccaaaacccaaagtgtgattggcaagcttttagacgtcaatagggctagacggtagataaacaggctctggttcaaatatatatatatatatatatatattttttttttttttttttgagacggagtcttgctctgtcgcccaggctggagtgcagtggcacgatctcagctcactgcaagctccacctcccaggttcaggccattctcctgcttcagcctcccaaataactgggactacaggtgtccgccaccacgcstggctaattttttgttgttgttattgtatttttagtagagatggggtttcaccatgttagccaggatggtcttgatctcctgaattcgtgatctgtccgcctcaagctcccaaagtgctgggattccaggcgtgagccaccgcgcccggcctcaaatttaactttaccctggggtccatactgctttgctgttcaattttcacccaccacacccttgccaatttaatttcaaattgctttaa

SEQ ID NO: 769452 - DNA, 571 bp, Homo sapiens
ctcttggaggctattcagccagatactgtgcaatacatccacctgggaggctgcagcagaggagagatccacattgataaaacacacagaaaggggattttgatctcaatataagggaacttggagagttgtaaaccatggcagactgtactgtttagcttctgaggcataagagccattacttcaagttgcttgttcaatacgctgagctacagggtcacgccagacttcaggaagagccagaacactcagaacctagacttactctaaaactaggaactcyagctgctgctgtgtgagagctgcttgagaactgtgtgtcatgttctgggcttttctcttgcagggattgcaaggccaggaccctgaaatttgcccaactcggagaccctgaggatgccccagggacctgggtccttcttcctcaaaacagaagggagtttcaaatgagattggaccatgacaacagtgactatcattatctagatgacagtaggtttaaggaaaatattcatttactggttttcaaacttcatgaaagagaaagcatgaattgcagactcagtgttta

SEQ ID NO: 769453 - DNA, 608 bp, Homo sapiens
gggccccgggtttcaagcacggaactgggcggctgtttgggcaggcaccaagctagtttgttcataccccagtggcacgtagaaccccagagagagaggataaccatccattcccctggaaagggggctgaagccagggagccaagtgatctcgctcagtgagtyccactcccagggagcccggcaagctaagaactactggcttgaaatcctcactgccagcctagcagtctggagtccacctggaaagattgagcttggtgtggggagaggcatccgccattactgaggctttaataggcggttttcagctgacagtgctaaggagaatgggaggtttggtctgcggggaattcaccacagcgccgcaaagcaaagagataacagctctacagctacggaaccagcccccacaattttgtaagccacttttctgtaacaaatcccttcatacatctcctactggttctgttactttggaggaacttcaaccaatacaaaactagcacacaacccaaatatccatcataaaaatagtggagaaatgcattgttgtacattcacatataggcacctgctcatcaaataggaaggaacacattattgat

SEQ ID NO: 769454 - DNA, 576 bp, Homo sapiens
tatcttgttcgttagaccttatatgcaagaagtggtaaatgtaagccctggtaagacacctgtgctcctgagggaaatagataagttctaaaagagttcaagggccagtcacattagtgacctttttatgtgttccagtgttataaggcatgctggaatatcttcattcaatgtgaagaacagattgttgtgccttatacttcctaacactaagaaagaagcacattccttggtaggcctctttgggttataaaggcaacatattctgtacttgggaatacttctgtgacccatttattacaaagtgaaacactgctagttmtgagtggatcttagagcaagaaaggactctgaagcaattctgggctgtggagcaaccagtgctgcctcttgggcagatcctatggtagtacaggtatatctagtagaaaagtaatgcctgttcaacctgagaaagctgactgaaaataaaaataaaaatatagaaagataaaacactgcgtggagcctctggagagccacaataagagaattgtagcataggattctggagcaagtttatgccatctgccacag

SEQ ID NO: 769455 - DNA, 349 bp, Homo sapiens
aggcgtggtggtgtgtgcctgtagtttcggctgcctgggaggatgaggcaggaggactgcttgagccaaggtctttgaggctgcagtgagctatgactgtgccactgcattctggcctgggtgacagagcaagacctagccttttaagttttttctggccaggggttttgggaggctaaagtggccttcttgagctcagkagttcgagaccagcctgggcaacgtgacaaaaccacgtctctaccagaaatacaaaagttagccaggcatagtggcacgcacctataatccagctactcggggggctaaggtgggagaattgctggatcccaggaagttgaggctatag

SEQ ID NO: 769456 - DNA, 618 bp, Homo sapiens
atatagttttgctttaaggggaattactgctacatttactcacaaaacgagccacgtagcatacaccagaattcagcaagtacacaagccacctaaccgacccaagtttctgaattgcattatccatgacaggcatctggggctctgccttcttcgtgtccaccttggttccttggtcactgggcttaggagaccactgtgcactcactgtccatcaccygggagggaccctgaagatcactgagttctactttctcattgcgttcgtgtggaaacagaggcccacaggaacatgaggaagctttccaacatcacagggcacattagtggaagtactgaggttacaacgtaaatcttcctgattcaaactctaagatggtgccaaggggacaaggtgtggatctttgtaggcaggggctcagtaatggctgtccagcgggtcacaaagcccagcctagggacacacctaagattctcccagaagctaaaacagaaaggtaacaaagagggcaatcccagaaatccccagcaggagtcgatcatacagcaaaagccaagggacaccccaggtataaacccaagaaccgaaagcagacacacgaatggatattcacaccc

SEQ ID NO: 769457 - DNA, 554 bp, Homo sapiens
ataagcttacaagtggattctccactgcttcgaggaaggaacacagctctgtagacatcttgatttcagacttctgagaccaggagcacaaacatcagccaagctacctagatttctgctctataaaattaggaaacaataaatttgttgttttaagcctccaagtgtgtggtaatctgccatggcagcaatagtaaaacagttataatacctacatttacttcattcttcttttgttacagagcaattggaatatctaagcagtacagttcaccttcyactaagcaaccttatattttggcttaaaatgcagcagcaagaaggggtatgcttgggagtagtaaatttgcctcagagacaatggttttctgagtataggcaagattcttctgaactaatcttctgaagtcttcaaagtcagttacttttttcagaacaaagagccaatatcaagttgtgcaaaacaatatgggaccagtgaaaacaaaactaaaatagttgtgcttaatttaagcaatataataaatactcttatttttaattatatttaaata

SEQ ID NO: 769458 - DNA, 554 bp, Homo sapiens
ataagcttacaagtggattctccactgcttcgaggaaggaacacagctctgtagacatcttgatttcagacttctgagaccaggagcacaaacatcagccaagctacctagatttctgctctataaaattaggaaacaataaatttgttgttttaagcctccaagtgtgtggtaatctgccatggcagcaatagtaaaacagttataatacctacatttacttcattcttcttttgttacagagcaattggaatatctaagcagtacagttcaccttctactaagcaaccttatattttggcttaaaatgcagcagcaagaaggggtatgcttgggagtagtaaatttgccwcagagacaatggttttctgagtataggcaagattcttctgaactaatcttctgaagtcttcaaagtcagttacttttttcagaacaaagagccaatatcaagttgtgcaaaacaatatgggaccagtgaaaacaaaactaaaatagttgtgcttaatttaagcaatataataaatactcttatttttaattatatttaaata

SEQ ID NO: 769459 - DNA, 404 bp, Homo sapiens
tggtaaagaggaaatcaaactgcctctgtttgccaatgatataatcatatacctagaaaaccctaaatattcatcaaaaaatctcctagatctgataagtgaattaagtaaagtttcaggatacaaaatcaatttacacaaatcagtagcactgctatacaccaaaaacgactaagctgagaaaaayatcaagaacaaatcccctttacaacagctgcaaaataaaaataaaatacttataaatatacctaacaaaggaggtgaaaggtctctacaagggaaactagaaaacacaatcatcagcgacacaaacaaatggaaacataacccatgctcatggataggtagaatcaatattgtcaaagtgaccatactgccaaaagcaatctatggattcaatgcaa

SEQ ID NO: 769460 - DNA, 405 bp, Homo sapiens
tacttttatggggtatatttccgaatttagataattgtgtaaagttgtgtaaccatcaccaaactttgtactggcttaatcctcaaaagtaaaccccagataaagggcatataagacattttattaaagaattatcttcttctcaatataaatacattycttatgatttatccagaagaaaaggaaacaaatatgattactgatgattcatgaaaggagatatgataggaaaacacacaatgctggcatgctggcaactgcaaatccttacagcattttcagtgactgcacttgctttcatatggaatgtgcagagaagcctgtctcagtatgagcctcatatctcccaaattcccaacagccttgccctccagccacagaacttaaaaattatgtaaggaggct

SEQ ID NO: 769461 - DNA, 516 bp, Homo sapiens
agatgatgggttgataggttcagcaaaccaccgtggcacatgtatacctatgaaacgaacctgcgcattctgcacatgtatcccagaacttaaagtaaaattttaaaaaaattttaaaaattactgtagccttgtagtatagtttgaagtcaggtagtatgatgcctccagctttgttctttttgcttaggattgtcctggctatccggggtcttttttggttccatatgaaatttaaagtagttttttctaattctgtaaagaaygtcagtggtaccttgatggggatagcattgaatctataaattactttgggcagtatggccattttcatgatattgattcttcctatccatgagcatggaatgtttttccatttgtttgtgttctctcttatttccttgagtagtggtttgtagttctccttgaagaggtccttcacatccttgtaagttgtattcctaagtattttattctctttgtagcagttgtgaatggaagttcactcatgatttg

SEQ ID NO: 769462 - DNA, 639 bp, Homo sapiens
cccaccaagctctacttcctctcaaaggagaaagcagcagggacttttctgagctgttgggagtatgagctgaacatctccaaggtcctcatttcccccttatccttatggtgcctgaattagctaatctctaatttctcagttacaaagaactgccaagctcccagttaacttctatctcgggagtggacatgagagcctaatatttgagaccaagctctgtttgctgcctcagtaaaaaccattttctgtagggtttggtgtggactagctttcaaccaaatcatgtcccctaaaacatgcaaaagtgagacccagtgtggtggctcacacctgtaatcccagcactttgggaggctgagtcaggcgaatcacgaggtcaggagatcgagaccatcctgtcyaacatggtgaaagcccatctctactaaaaatacaaaaaaaaaaaaaaaataggctgggtttggtggcacgtgcctatagtcccagctacacaggaggctaaggcaggagaatcgcttgaacccaggaggcagaggttgcagtgagccgagatcacaccattgcactccagcctgggtgacagagcacgactccatctcaaaaacaaaacaaaacataaaagaaacatgcaaaagt

SEQ ID NO: 769463 - DNA, 575 bp, Homo sapiens
cctgaagacgctactcccaactgtggcaatttagcacaggaggggggacacactaagaaggtgggaaatttggatgtctgcttttttagcaggggaaggaaaagcaattgccagtagaagcatttaattgcatacagattggcctttcattttgcttcaatcttttccattcaagtgccagggaaggggaagtattacctccactgcttacaycggaggtctgcttccacttagctgctgaagcaagcctctccttctttccagagatgccccccgtgaaaacccactgtgagaggagttgggcttgagtggctccaaatacacagcagtaatattctgaagcctgtcctgttcctaatcctgcacggcagctcttggcactgctggacagttccccaggcttctttccaattcttcctgtggagcagggaaagaaaaccaggtggggtggccaggccatctctcatgatcggtagagcatagctgagtatagagtatgcaggataatgcagctacatgaagatgaatggtcagaagtcaggaaggattatggggccacagcccccagtgtctta

SEQ ID NO: 769464 - DNA, 561 bp, Homo sapiens
ttaaacatgttttaataaacattcatatatatttatctttatgtatgtatgcaagtatttttgtaagataaattacctacattacaaattcccaagactaaaagtatgaacccattacattataaaccatactgcaacattgccttccataacatcttaccaatttatactcccatggcactgccgcaggcattgtcagtaaaccctaaccaaatgacagggatagagatcattcatcccacctcaattttactgatcaaaacactgagcctgagaggggtaggggtttgctcatccttacacctgtagaaagtactggggtcaagcccagctgaattataatattaactatgtaaagtataataatagcaagccaacacttcagagttccaggcactgttctaattttmaactcatttaattctcatatcaactctgtgagttgggtacaattactatccccagattgcagataaggaagctgaggaacacagagagagcctaaatgacgtttcccatcagcacatctcctgagaggctgagccaccattagaattaggc

SEQ ID NO: 769465 - DNA, 600 bp, Homo sapiens
aacccctgtgggtgcgctctatgaggaagcctgtgggtggtggttgcgggggaagaatctgggtctgtgaacaaaagaaaagaaaaagatgtaatgtgtgcctcacaaataagattcagtcactcaaaggcaaaatagagaaataaggaattaaatgagggtagaggaaacagcagcagttcaccaacttttggctgcactttaacatgttctaaattattgatgattcaaaaaagctttggttcgtgtgggttttatttttttatgtttacctaagaagaacatgactgaaaaattgtaaaatatttattaatttattcatttaaaaatcatgtcaataaactgttatatattaacataaataagagtttaaagaaaaataactgttttccaaataaaagayagtgagaaaagtggcattgttttatctatttgcaaatttctttaatgcctgaccgagaagaacacagctggattttcatatctgctctgcatttgagctgatatgaatgaaatcagttcatctgagtaatcgcacacctttcagactctgggaaatgccacagtaggttcaaaagagcatgagagtacagaaggcaa

SEQ ID NO: 769466 - DNA, 600 bp, Homo sapiens
aacccctgtgggtgcgctctatgaggaagcctgtgggtggtggttgcgggggaagaatctgggtctgtgaacaaaagaaaagaaaaagatgtaatgtgtgcctcacaaataagattcagtcactcaaaggcaaaatagagaaataaggaattaaatgagggtagaggaaacagcagcagttcaccaacttttggctgcactttaacatgttctaaattattgatgattcaaaaaagctttggttcgtgtgggttttatttttttatgtttacctaagaagaacatgactgaaaaattgtaaaatatttattaatttattcatttaaaaatcatgtcaataaactgttatatattaacataaataagagtttaaagaaaaataactgttttccaaataaaagacagtgagaaaagtggcattgttttatctatttgcaaatttctttaatgcctgacygagaagaacacagctggattttcatatctgctctgcatttgagctgatatgaatgaaatcagttcatctgagtaatcgcacacctttcagactctgggaaatgccacagtaggttcaaaagagcatgagagtacagaaggcaa

SEQ ID NO: 769467 - DNA, 632 bp, Homo sapiens
ttagtttaagttaatagaaagaatgaaagagaaagagaggaagaaagagagaaggaaggagagaaaagagatgatgagtagtaaggaagtacagaaaaaaagagggaaaagaaaggaggaaattgtaagacaaatttcaaatcaaaatatactagtacgatcagaaatttaagtcttaccttaagcctatatacagaataaagacaaagaagaacatatttgcatgtatctttatgcaaattttataaatcatttataatttcaagctctagggtcaatgagractacttaggaaaatatgttattatgtattaagttatatgccaaccaaaaatacaagtaaaataaatagaaatctgttaaatcagtgttttagtgaacctcaaataacaatatttgtatttttataggatttttatgtaaattgctttgtcattccccttatagattatcatgctgaaatatcaaaaacagtgtcaaagttaaagttacatcctaaattattgtccagctcttcatcaataagtttatttagcttcttcaggcataatcattctatatagaatcagaaataagataaaattattaattattacaatacctatcgccaaattagttttgcaatatgctga

SEQ ID NO: 769468 - DNA, 632 bp, Homo sapiens
ttagtttaagttaatagaaagaatgaaagagaaagagaggaagaaagagagaaggaaggagagaaaagagatgatgagtagtaaggaagtacagaaaaaaagagggaaaagaaaggaggaaattgtaagacaaatttcaaatcaaaatatactagtacgatcagaaatttaagtcttaccttaagcctatatacagaataaagacaaagaagaacatatttgcatgtatctttatgcaaattttataaatcatttataatttcaagctctagggtcaatgagaactacttaggaaaatatgttattatgtattaagttatatgccaaccaaaaatacaagtaaaataaatagaaatctgttaaatcagtgttttagtgaacctcaaataacaatatttgtatttttataggatttttatgtaaattgctttgtcattycccttatagattatcatgctgaaatatcaaaaacagtgtcaaagttaaagttacatcctaaattattgtccagctcttcatcaataagtttatttagcttcttcaggcataatcattctatatagaatcagaaataagataaaattattaattattacaatacctatcgccaaattagttttgcaatatgctga

SEQ ID NO: 769469 - DNA, 618 bp, Homo sapiens
gttgaaaatcagttggttgtaagtgtatggatgtatttctgtgttctctattctgtttcgttggtctacatgtctatttttatgctggtcccatgctgttttggttactatagctttgtaaggtagtttgatgtctccagctttgttctttttgctcagtgccttggctatttggggtcttttgtgctttcatgtgaattttagaattctttttctattcctgtaaaggatgtcattgatattttgacaggggttgcattgaatctgtaggttgctttggctggagtatggatgttttaataatattcttccatccataaacaagcaattatcttttcattttttgtgtcctgatgaacttatttcattaattttttttttttttttttagtatttattgatcattcttgggtgtttcttggagagggggatgtggcagggtcataggataataatggagagaaggtcagcrgataaacacgtggacaaaggtctctggttttcctaggcagaggtccctgcggccttccacagtgtttgtgtccctgggtacttgagattagggagtggtgatgactcttaatgagcatgctgccttcaagcatctgtttaacaaag

SEQ ID NO: 769470 - DNA, 576 bp, Homo sapiens
tcctagacagggtggcagccgggcagaggctgtaatcttagcactttgggaggccaagcaggtggctgggaggtggaggttgtagtgagccgagatcacgccactgcactccagcctgggcaacattgagcattgagtgagtgagactccatctgcaatcccagcacttcgggaggccgaggtgggcagatcactcgaggtcaggagctggagaccagcccggccaacacggtgaaaccccgtctccaccaaaaatacaaaaaccagtcaagcgtggcggcgcgtgcctgtgatcccaggcactcggcaggctgaggcaggagaatcacgggagcccgaggcagggaggttgcggcgagccgagatcaaggcagtacrgtccaacctcggcaacagagggaaaccgtggaaagagagagaagagagaatagagggacaattttttattttttattgtagaaatctttcacctccttggtttaatttattcctatgtattttatttttcatagctgttgtaaataggatttgttttttcatttatttttcagatagttcattattggtgtacagaaa

SEQ ID NO: 769471 - DNA, 549 bp, Homo sapiens
atactcttccttacctccgttgtggagtagaagactgatttcgccttgatagttcgggtcaatcaccccagcccacattgtaagtccctccttagtctctttttttttttttttttttttgagacggagtcttgctctgtcacccaggctggagtgcagtggtgmgatctcggctcactgcaagctccgcctcctgggttcacgccattctcctgcctcagcctcccaagtagctgggactacaggcgcccgccactacgcccggctaatttttgtatttttagtagagacggggtttcaccgttttagccgggatggtctcgatctcctgacctcgtgatccgcccgcctcagcctcccaaagtgctgggattcttagtctcttgacttaaaggtaggaggagcccaaaggtaccaactggcaattttaacttccagtttaatggaatcgttgttatgtctcctggtggcagcgttcctccctctggaactaagacctctagcccagcagaatgtaatgccatgggaataggaagcaaaaatttcact

SEQ ID NO: 769472 - DNA, 602 bp, Homo sapiens
gtgttttatggtgttttaacttcccctaccaacatctcctcttttcagctctgtagtcatttttgaaaccaaagtaaacatccacaatcactgtgaaattcagcaatctagtcccaggccactggaagaggaagagctggtgtgaggcttttcaagaagccttgcttggatgtggagtgcaatattcttcatcaaatttgggaaggtgttggctattcttcagaaattttttcttcatctttctttcagctcctcctgggactctgataacttaggtccccctgctatgtttggtaatacacaacatgtctctgagtctctgttcactttttaccattattttttatttctgtttctcagactggatgttctcacataaactatcttcaaattttctcattgtttttttttctgccaaatraaccttactattaatacattccagtgaattttccacatcagtgtgcattatgtggaagatcaagatttgaaaaagaagataagccaagtaaagatcaatgtcccttatgaatgtaagtgtaaattcattagaaaaattctagaaaactgagttgtttttaaacggattatacaccataacc

SEQ ID NO: 769473 - DNA, 615 bp, Homo sapiens
tgatattttccataaaagaaacttaactaaattaaattaataaatcaagagacaaaagaatgacatattctgatggttaatacagtgtcaacttgattggactgaaggatgcaaagtattgatcctgggcgtgtctgtgagggtgttgccaaaggagattaacatttgactcagtgggctgggaaaggtcgacctacccttaatctgggtggacaccatctaatcagctgccagtatggctagaacataaagcaggcagtaaaatatgaaaagactacacgggcctagcctcccagcctacatctttctctcatgcmagatgcttcctgccctcgaacattggactccaagttcttcagttttgggactcagaatggctctccttgctcctcaacttgcagagggcctgttgtgggaccttgtgatcatgtgggttaatacttaataaactcccctttatatgtgtgtgggtgtatatatatatatataaaggaaacaggggatagccatgttacaaatgcactgaagacccctgctgatatatatatacacacacatatatatcctattatatatacacatatatatcctattatatatacacatatatatcct

SEQ ID NO: 769474 - DNA, 615 bp, Homo sapiens
tgatattttccataaaagaaacttaactaaattaaattaataaatcaagagacaaaagaatgacatattctgatggttaatacagtgtcaacttgattggactgaaggatgcaaagtattgatcctgggcgtgtctgtgagggtgttgccaaaggagattaacatttgactcagtgggctgggaaaggtcgacctacccttaatctgggtggacaccatctaatcagctgccagtatggctagaacataaagcaggcagtaaaatatgaaaagactacacgggcctagcctcccagcctacatctttctctcatgccagatgcttcctgccctcraacattggactccaagttcttcagttttgggactcagaatggctctccttgctcctcaacttgcagagggcctgttgtgggaccttgtgatcatgtgggttaatacttaataaactcccctttatatgtgtgtgggtgtatatatatatatataaaggaaacaggggatagccatgttacaaatgcactgaagacccctgctgatatatatatacacacacatatatatcctattatatatacacatatatatcctattatatatacacatatatatcct

SEQ ID NO: 769475 - DNA, 657 bp, Homo sapiens
ccatccatgttcctgcaaaggacatgacctcattctttgttatggcttcatagtattccttggtgtatatgtacattttctttatgcaatctgtcatagatgggcatcttaggttgattctatgtctttgctattgtgaatagtgctgcaatgaacatttgcatgcatgygtctttatggtagaattatttatattcctctggatatgtacccagtaatgggattgctgggttgaatggtagttctgtttttagctctctgaggaatcaccatactgctttccacaatggttgaactaatttacactcccaccaatagtgtatgtgttcctttttcttcacaacctagccaacatgttatttttttgactttttaataatagccattctgattggtgtgagatgttgtctgattgtggttttgatttgcagttcactaatgatcagtgacgttgagcttctcatatggctgttggctgcatctatatctcttttgaaaagtgtttgttcatgtcctttgcccactttttaatggggttgtttttctcttgtagatttgtttaagttccttatagatgctgaatattagacctttgtcagatacatagtttgcatatattttctcccattctgtaggttgtctatttactctgttgat

SEQ ID NO: 769476 - DNA, 657 bp, Homo sapiens
ccatccatgttcctgcaaaggacatgacctcattctttgttatggcttcatagtattccttggtgtatatgtacattttctttatgcaatctgtcatagatgggcatcttaggttgattctatgtctttgctattgtgaatagtgctgcaatgaacatttgcatgcatgcgtctttatggtagaattatttatattcctctggatatrtacccagtaatgggattgctgggttgaatggtagttctgtttttagctctctgaggaatcaccatactgctttccacaatggttgaactaatttacactcccaccaatagtgtatgtgttcctttttcttcacaacctagccaacatgttatttttttgactttttaataatagccattctgattggtgtgagatgttgtctgattgtggttttgatttgcagttcactaatgatcagtgacgttgagcttctcatatggctgttggctgcatctatatctcttttgaaaagtgtttgttcatgtcctttgcccactttttaatggggttgtttttctcttgtagatttgtttaagttccttatagatgctgaatattagacctttgtcagatacatagtttgcatatattttctcccattctgtaggttgtctatttactctgttgat

SEQ ID NO: 769477 - DNA, 539 bp, Homo sapiens
gtgtctgaacgatgaaaggaaccccaagccatattgggcacaaactttgagtgaaacccaacagggagcgcagaagcctgagtggcccatgttggcgtcggaggggcagcgagcagggagggctggtctgcatactccaagtcctggtttcctggaggaagtcgcccagcctgtgtggctgcctccagccctttccctgaggattckgggcccctccgcaggccctggccctgaggctgcctgtctttggtcttgcccctcatggcaccctcaggccacatgcatgctcttctgcagtgcctctgccttcagtctcgggagtccttgattcgaacccagctcttctatagcccttggcaagtcagttaatggaagcccagtttcctactcgttgcaaaggttgcccaggtcaacatttaatgagatgagatgtgaaaacagccaggcagcagtcgcacatcagagtcgagctgagcacggagcagtcaccgtggcacttgcggacggtgtggggactcagcagtctcccgggttgcact

SEQ ID NO: 769478 - DNA, 539 bp, Homo sapiens
gtgtctgaacgatgaaaggaaccccaagccatattgggcacaaactttgagtgaaacccaacagggagcgcagaagcctgagtggcccatgttggcgtcggaggggcagcgagcagggagggctggtctgcatactccaagtcctggtttcctggaggaagtcgcccagcctgtgtggctgcctccagccctttccctgaggattcggggcccctccgcaggccctggccctgaggctgcctgtctttggtcttgcccctcatggcaccctcaggccacatgcatgctcttctgcrgtgcctctgccttcagtctcgggagtccttgattcgaacccagctcttctatagcccttggcaagtcagttaatggaagcccagtttcctactcgttgcaaaggttgcccaggtcaacatttaatgagatgagatgtgaaaacagccaggcagcagtcgcacatcagagtcgagctgagcacggagcagtcaccgtggcacttgcggacggtgtggggactcagcagtctcccgggttgcact

SEQ ID NO: 769479 - DNA, 635 bp, Homo sapiens
gtaaatgttatgagttggaaagtggtaggttccataaaatactataatcacttgttgatgacttcttctgtgccagaaaaacacaaattaccaataaagtgttattgcacctttttccagaaaagaaaactaacgttcagaaagattaagaaccttgctgaaattcacacaaatgggaaagctaatgcagggattccatgtcacatcagagggagtttttctagtcatttcacaattagacccttaagcaatccaaaaatagaccccattagttatctgaatggaggaaaccaggctctatgcatgctgcactctgagcaagaagttaacacattgatcctggacaccagacaacccaacatccatttacctccctgagacccaagctcctcattatcatctccctaatgtttgcaacatgcarttctatttactttccatttttacataaatctttatttagaagaaaatagcataccatggaatattagcctgtgctaaaaagaaatgagctagcaagcaatgaaaagaaatagaggaacctttaatgcatattactacgtgaaagaagccaatctaaaaaggctacatactatgtgattccaaatatatgacattctagaaagggtcagacc

SEQ ID NO: 769480 - DNA, 672 bp, Homo sapiens
ggaagcttgtagaccatcacagcctcctttgagtggaaaacagaataaaatggaagaaagtgccacaaaagcccacaaaggattgctcgctgtgtggtcatcgttctctggaataagatccttagtcctaaagcactcaggtctcttttggagcagatgccagtggcaagtctcacagcggtctgcagscaccatgaagggaggtctgagttttctgtccagcacgatggtctgcaagcgtgtgcggacctgtggctcgtgtttcctagtaatccccaaaaatgcttccttgaaatgcttctttaaggagccccaactacagtcacctggaacgagctgtaaaactgtgtaacatgaggtcatttcattctggattctggatcctggatccccaacagaatcaataagaaaatgtcaaaatgctgggccccaggcccgctcctgacttgctgaatcaggacctctgggtatgggaacacagtctcattgttaacatgttaccagatgatccctgtgaaactttctgcttatctgtgggtcagtattcaagagtttccgtaattttcaagttgaaataagaatcttatgtaaaatatagtgactttcccaagggctgaaacttgcagattttcccaaaagagactccatgtctcaatcttgaaatggttggga

SEQ ID NO: 769481 - DNA, 614 bp, Homo sapiens
gcaggccttggagacctgggatcagtcagatccccaatgagagcacaaaatggaaatcacatctccaaaccacttttgtttcactaaaatcaaactgatgtttcagtcaacaaaacataaagagtttcagtgcctcatgaaatttcactgacccaaaaattacttttgtcaacccaaacatagctttcttttctcatttaatgtgatcgcagttgtgctcaccaagtccagttgagtacagagtgggatgcccgtgaatatgccaggagctgagagctgaacagtacctgacatttcacccatttaaattatagacttttcctactccagaagattcaggacatctatagcatgtgtccaaatgtggcacaaaggaaaaatatcttattaactcagcacaattatggggtctgagatcagaggaactggaggcctygtaatgtagagcagcagcttacaggaatggaactcagagcaaataaattttgattgagacaggaagaaaaaggaaaaacacaagacattacctagagtgagcatacctaaaggccaagattctgggtgagtggaaggtgggaggaaaaacagcccctctcaggcatacaataacaggt

SEQ ID NO: 769482 - DNA, 642 bp, Homo sapiens
ctcacaaggtaggaggaacagctccagcacagagcacccctggcacaggaagtggaactgaaaagaagctgggcaggggcctggtgcccacttcttttgacaggcgatttgtgtgtatggggcttctgtcttgacacagctggactttcctgatcatttagtctcagaaactgaatggagattgtttcctttgtcactcccaattctgctctgtgaaattcttaggaatttaaaaattcatgatgagcacatagtaacttaaattcaaacatcaaaggactgctcagttttttctcctgttgtgaccttattgtggtaaatattgcattaaattgccatgycaataattgagattcagaagcactttagttttgaagaaatttgctgttcatggcatttagtgacaaagattttcaccttctcattccctatctctcttcattctccttctaccactccctctctctcattttctctcccataatgttctgtctttggggctgtctccaaccctttcccatttatctttccaagtatctctatatatctctttctcaacttctttccccttaccccctctccctcactcttctctcaacttctcagtaagggaaagatttctcgtcctatctgcataatgtg

SEQ ID NO: 769483 - DNA, 609 bp, Homo sapiens
tctaaggtcttagaggtgacttcccaggaacttggcaaaggcaagtcctttgcttggcaagggccatgttcatccttcactgcaattctcctcatacctggagttctctggtggcggctttttaccccagcttctccccttcttgtcttgtgcatcctctgcagagctgccatattcaccctcccaaagtttgctcatcctgacatcccactgaaccttcagtgactctgccttcctttggatgaagtctcrtctctttctcatgttaacattccctacaatctgtgtgtcatctacttttcccatctgttagctgtctggagtgcctcttttgagctctccatgctcttgcatgtgagtgatcttgcaggtagtcatcgtggcacatgctgctgctagccgatgctggctgcctccacacactcctgatgccaccctccctgctccttggcctgccacctggaatccaccctcctgtttacttccttgtcttcctccagggacttgagcatgaggccagatttctgtctgtgattcttatggcattgcagtccagatttttacctttgtggaattgctttttttcacctatctcattcagtttgcact

SEQ ID NO: 769484 - DNA, 577 bp, Homo sapiens
cacatccctgcattaggagggtcatcttattcctctctatctacaacctctatagttcactgtagaatttcagagcaatggctatgacgattttgatcttagaatcaatttgattatttaacgccatccctgatacataacccatttatcttcatacaggcttttaaggacktcccaattggattctgtttctactggcatccatataaattggaacctgctccttcccttcaattctttccccagaagtgagagctgatagccccaggtaagtccccagcccccactgaagacgcatttcttctctgagggttaccttgagagacagaggctctgttggttatgattagatggtttactaacataattgtgaacataatttgttctgatctgcttctgccttccagtcaacccacgttccgtatattagaagaagaaagggttggtgtgtgtgcatgtgcgtgcacacacacaagtgaagagtgtttagttctgcctgtctgtgcctcagggaatggaatgtaacagatgttacagtaacacacattttttgctttaagaaaaggatgaaggaggt

SEQ ID NO: 769485 - DNA, 584 bp, Homo sapiens
gtaatcatattgctttagaaatagcctgagtttgttaggatacaatgccacatatttttgggcatcacgtccaagcattatgtgagaactttacaatgtgaaagataattctgaataatgtgttatgtaacatttaataagacctaggtgtgtgtatgtgtgtgtacatgtttcagcaaattacttgaaatccaagattatctttaatgaaaacccaccatagactgtgacttagttcattttgcattactgtaaaggaatatctgagagtgggtaatttataragacaagaggtttatttgactaacagttctgcaggctgtacaagcatggcaccaacatctacttgacttctggtgaggcctcagaaagcttttactcatggcagaaggagaagggggtatgggcatatcacatgccaagagcgggagcaagagagacagggcagatgtcccagactcttttttaacaaccagatgttacatgaactcatttcggcaaagagggccccaaatcattcatgagggatcttcccccattctccaagcacagcccactaggccccaccctcaacattggggacc

SEQ ID NO: 769486 - DNA, 624 bp, Homo sapiens
  misc_feature 499: n = A,T,C or G
caaacaccttaagttagctacaagaatgagccaagaagcaaagcactgtgatcaggatttaatcatggttaatataatgggttaagttctataaaattttttaaaaatgaaatatagttgttaaaatatagtcataggttrtataaaatcttaaaatagaaagttcccttctccctaacgaagaatgaataaaagaatgagaaaatttaagttgtctggttctaaactaggtctctatttgtagaaaggagaagtgtgtttctgggattttctcccacttgtacaaatattgttattgtccgaacatccacaataaattaaaattggggattgatttttttcagtgaggacaaagaaaggcagaataaaacattgagaaggttttaaaaagcaaaactatattttaaatatctgttcctgaattaaacagttaaatatttttaatacaatcagaagaaagtaaagaatttttgttcatttttttactattcccatttantagatgaaaatgttttgttttattcctaagcactgattaaaatcattatcaagaaaaaatctgacatcactaaaataaacttatttaaatttaaaaggataaagcaaacaagcaaatgaaatagc

SEQ ID NO: 769487 - DNA, 624 bp, Homo sapiens
  misc_feature 499: n = A,T,C or G
caaacaccttaagttagctacaagaatgagccaagaagcaaagcactgtgatcaggatttaatcatggttaatataatgggttaagttctataaaattttttaaaaatgaaatatagttgttaaaatatagtcataggttatataaaatcttaaaatagaaagttcccttctccctaacgaagaatgaataaaagaatgagaaaatttaagttgtctggttctaaactaggtctctatttgtagaaaggagaagtgtgtttctgggattttctcccacttgtacaaatattgttattgtccgaacatccacaataaattaaaattggggattgatttttttcagtgaggacaaagaaaggcagaataaaacattgagaaggttttaaaaagcaaaactrtattttaaatatctgttcctgaattaaacagttaaatatttttaatacaatcagaagaaagtaaagaatttttgttcatttttttactattcccatttantagatgaaaatgttttgttttattcctaagcactgattaaaatcattatcaagaaaaaatctgacatcactaaaataaacttatttaaatttaaaaggataaagcaaacaagcaaatgaaatagc

SEQ ID NO: 769488 - DNA, 620 bp, Homo sapiens
attatgtaaactcccttctctttttaagtcattgatttatcatgcctgccattttcactgttgaatctgcagagttctgataagcatccttggggttgcctcattgtaaatttgtccctagttgtagatccactttttcttcatcctatgtttttaagcatttactctrtaataggtactgagaatacagtgacggagaagacagacatggctgtgaaacctgtcagaacttccttcgtgccaaagaagatgggtagttgcaacatgactacagtgaagtggcaggagggctgtggaagggaaaatagagaaggatctggagcacagagcaggacggtggtaagcaggggacttcaaggaagaccttacaaaggaggaccattctctggacacccgcagaagggagaaggcctaggtagacagaggggaaggctattccaggcagagggagctgcatgttgaaaggagtgtgatttaagaaagtttgcagcagccaaaggactgaaaatgctggatctggctaatgtccattccacagtcactggtatgcattgatgggaattttacaaactatcccttctgcaacgtggagaatggattgcagcaaggagcgatcagac

SEQ ID NO: 769489 - DNA, 583 bp, Homo sapiens
tctggctctgtgtggttggcccattgacaataacttatctccaaaaagttgcatagccatttcttcttaattgcatatgttgcgctgtagggtgatatagaagatattaaaatatgagtaacagatggatactggctaatggagcttcagatctcatatattttcttattgttttctatttatttatgaacctattgctgtaaaataaaaccttttttttttcagggcagmaccagcttcagacttttttccccaagccttcttatttcggtttcttcttgctatattactctatgatggaagcacttctgtgctctgtgctccatgtgatgtttggtttttgttattagtggatgaaagttaatgatacacaaccagactgggacactttgaaggtaacagcaatatctgtgtatagatggggttgtggttttgttatttatctgctattgctgtagtatcctttgtcttgagcgataaaagagaagtaaaatactaaagaactgaactgtccatttctggaccatgagtaaagatgctgcctgtcaaacttcctgttcatacattagtttatttatagagt

SEQ ID NO: 769490 - DNA, 567 bp, Homo sapiens
atacttgtgcatacattttgcagcaagatgaacaatggtgatgcttttcctgagaaaccagtgatgctgactatatagaggctggttactcttgggagctcatcattgatcatcagctgattatctccttagctttgtggcttcactagctcccaagtgtttctgagagaaataccatgtccctataagtatctaatgtgctcaactaaaggggagagaaaaatgctaccatgtgatactctctttaataaggcattgcatttgtaagactgtaccagattaactagtttaaaagacaaatattgaattcatatgcaaggctatttcaaggcctgttctctctatgcatattaaaacacaaatgaatggtgattatctcaaatgctccactcggagctttgtcactcctggtagctggtagcaggttgygtgtgtggttttatgggctttaaaaagatcctcatagacttatctgtaaattgtggaaatgtatatctaaaaattctgtagaagtgaaaaatcgaggcagtccctttggagacccagccttcctcaggtaattgaata

SEQ ID NO: 769491 - DNA, 616 bp, Homo sapiens
ccaataaacctctttcttttgtaaattgaccaatgtacaacatattgggtatgtatttatcaacagtgtgaaaacggactaatatacctaccaaagcctggagcaacattaggccaggagcttcccaatctgcaagcagaataaatgtgttttctcacaaaagcaaatattctttctaaatgaagtgatgacatcatgacccaataatccgtttatgaatgctgttgatagatttatttctgagatttatgaccatttctttctgaacttaatttatttcttggggttataattaaatttattattgagaatactattaatgcatttgattttattttcttttttgctacagcctaaacacatttcttaggtcttctttgattgtttttttaacttaagttttagactgtcaggcagcaactctgctgctttmtctgtgcccacttctgtggacttctctctacttccatctgtgtgacaatctgaaagatagacgactaagctgatagagaaagtatcaagggaacagccagatacagcacgatgtgaggacatcatctaaatccttgctaccaggtatgggtcagcaatatccctgttgctcacctgctcccta

SEQ ID NO: 769492 - DNA, 601 bp, Homo sapiens
gtgagtgagagctcagttgcctgcaagaattcccctctgcaatctgtggggatcgtcagtgataaccaagacttcttacctaacatgaatgcccaactgggcttgctttgtgaaaggagacatcgcaaaaaacacagcaaaggctctcttgtaaaagagagagatgataaaaggttcttgggcatggatgagtgccgcgatcttaattaggtctgagagaggggctaaattttttttgagctcctgtttaacatttttaagccaggttgtstacacccagaaccttccagaaggtccatgatcaaccttaatctttgctggccaactcagattgtgcagctccatcgtgagaactcatccctacttgccacggggaagtctctgagcaacctggacaaaaagatggaagagcagagggtgggttcctgaactcacctatgcctgaaataaagtggacgtgggcctacgtgagccttggggaagtctgcagtggggggagtttacgtccaggaattggaaggtaggatggtggtgcatttgtgatctctgcataaaaggtcgctgattgcgtgaaacatttcagctcctatgcaaccctctc

SEQ ID NO: 769493 - DNA, 592 bp, Homo sapiens
aataaatgaaatcttcccatgcaatggaccctctggagtgtggtttttcagattataaccctgtactagcaaatggttccttgtatgtagattcaagatgagagaactagctttccctataatgcagcttaaagtaactaacacacatatagttcactctctacacccaagcactgtggagtaaatactgaggyggtaggtggatgctctgttctatgggagcattatggaggcattaattaaaactcttgattgagctgctgagtgcaaaatttaaaagtggcattgagttatttgctacctttctgtgtgtgcagtttttacaagaaagttgaagttcacctagcagcactggcacgctgcctagatctcggtcttgactatttcgtccagagctttgaactggttgggagactaatattatttgtttttgtaagcctctcttgacctccagagaaatagcatggcaatgatgatgacgacagattactacctactgtgcactttaaaatctctggttaaaatctgtctcctttatgtttattttcattttctctgaatttattttttcaagcaaagggctctgttcata

SEQ ID NO: 769494 - DNA, 597 bp, Homo sapiens
gcttgccaatcacactttgggttttggttttgtttttaagaaatgaaacacttcagatactgtcaaaggcagcactgtaccctaatgactattgtgattctggtgcatctcttttccattccttttcttacgatattaaattatatgtgtattcgtgtataatacatagctttgttttacagattttcaaaatttacgtaaatggtattatattgtataactgtgttgttgattatkgctacaacaatgctatctagcaaactaccccaaaactaggtgattcacaataagcattttttcccaaactcatgaggttgcaagtcagctaaagtttggttaatcagatgggctcagacaggtagctgtgcagagtaggctgtgggtcttctgggtgtggctgtgttcatgtctgttccatatgtgtttgttctgggtttgggatgaagaggtagaggctacctgggccttgctcatctcacagaagatcacctgaatataagaggataggaagaaagacgccatgtctctgaggtctcccttgaaactgacacatggtcacttctgcccacttttcacgaaccaaagccaatgatacag

SEQ ID NO: 769495 - DNA, 611 bp, Homo sapiens
tactcggattagttcacacgttggtgttgtatatctacaatatatgggtgtgtatatgggaaaaattttgcatgtacttactctgaaagaactggagtattaaagagctgagacaggactctttcccataggtcatccaccctcttatattcatcttcaccatcactactatcctggggcacactatcatcatctttggtttatttgttatactgcagtaacctccaaattggtcttccactttccacttttgccctgctattgtccattcctcattcagctactagaatcagatcactttttttctgtctgaacttcttcaatagttttgctttttatatgtaattaaattcaaacacctttctatggcctacaggccctacatggtttgatctctgcctatttygtgaccttatcttctactctcttctttgcctatcatgctccagacatgctggcttcctctcagctccttgcacaggccatgcttattcgtgatccagggctgggctcactggcccctttgctttcaatggtctttccacaggttttcacagggctgagtctggctgagctcaagggttaccttatcatcatttccctgacatctc

SEQ ID NO: 769496 - DNA, 584 bp, Homo sapiens
aaatagctactccatttatgaaaaaaagtataagcattttaattatgattgacttgaatttatagattaattttgggaagaattgaaatctttataatattgagtcttccaactaattgatgtgatatgcttctcatttatttgcttttctttaatttttctccataatatttgatagtgtttaatatagagatcttagatatcttcttagatttactactgagtattagtttttgatgctattgtaaattatgtttttaaaatatctatttctgattcttgctaatattagacaattgatattgtttattaataattttctattggctggtcatggtggctcatgcttgtaatcccagcactttgggaggctgaggcagttggaccacttgagcccaggagtttgacatcagcctgggcattatggcaaaaccccatctctactaaaaatacaaaaattggccaggtgtggtggtgcgtgcctgtagtcygagctgcctgggaggttgaagtggaaggatcacttaagcctgggagttggaggtttcagtgagccgatcacaccactgcactccagcctgggc

SEQ ID NO: 769497 - DNA, 584 bp, Homo sapiens
aaatagctactccatttatgaaaaaaagtataagcattttaattatgattgacttgaatttatagattaattttgggaagaattgaaatctttataatattgagtcttccaactaattgatgtgatatgcttctcatttatttgcttttctttaatttttctccataatatttgatagtgtttaatatagagatcttagatatcttcttagatttactactgagtattagtttttgatgctattgtaaattatgtttttaaaatatctatttctgattcttgctaatattagacaattgatattgtttattaataattttctattggctggtcatggtggctcatgcttgtaatcccagcactttgggaggctgaggcagttggaccacttgagcccaggagtttgacatcagcctgggcattatggcaaaaccccatctctactaaaaatacaaaaattggccaggtgtggtggtgcgtgcctgtagtccgagctgcctgggaggttgaagtggraggatcacttaagcctgggagttggaggtttcagtgagccgatcacaccactgcactccagcctgggc

SEQ ID NO: 769498 - DNA, 620 bp, Homo sapiens
aaaaaaaaaaaaagaaaagaaattatattttgctattgttgagtggatggtttgcaaatgtcaacttggtcttactgtggtttgttttttgtgtttattgtattgttcacatcttctatattactgattttctgcccacttaatgagacaaaggtattagaattttttttactataattgtagtatcgtctctttctccttacagttctaacaatttttgctttatatgatttgaagtttattagrtgcataaacttttaagattgctatctgtttgatgaattaacttatttatcacgaaatggcctcctttatcctatgtaatatttatctgttctgagacctactttgaattttgtcaacttgggagtgtgtattcatgtttacggcataaagggagtgtggagttatgtaattaggccagaaagataagcagtgttttaattttttttgttttttgaattccgtttttagtccttcattggtttattagctataactctttgttatttttagtgggtgctttaggatttatagtgtacatttttaacctatcacagtttaacacagtttaacattcaagggatattatagcccttcataatactataagaatttta

SEQ ID NO: 769499 - DNA, 620 bp, Homo sapiens
aaaaaaaaaaaaagaaaagaaattatattttgctattgttgagtggatggtttgcaaatgtcaacttggtcttactgtggtttgttttttgtgtttattgtattgttcacatcttctatattactgattttctgcccacttaatgagacaaaggtattagaattttttttactataattgtagtatcgtctctttctccttacagttctaacaatttttgctttatatgatttgaagtttattaggtgcataaacttttaagattgytatctgtttgatgaattaacttatttatcacgaaatggcctcctttatcctatgtaatatttatctgttctgagacctactttgaattttgtcaacttgggagtgtgtattcatgtttacggcataaagggagtgtggagttatgtaattaggccagaaagataagcagtgttttaattttttttgttttttgaattccgtttttagtccttcattggtttattagctataactctttgttatttttagtgggtgctttaggatttatagtgtacatttttaacctatcacagtttaacacagtttaacattcaagggatattatagcccttcataatactataagaatttta

SEQ ID NO: 769500 - DNA, 627 bp, Homo sapiens
aaatccagggtttaaaagatggcttaagttgttaagtctctcagggaggatgttgtttacattttggacaagagtttttacttttatttatttattttttatttttacttttttttttgagttgagtctcactctgttgcccaggctrgagtgcagtggcgcgatgtgggctcactgcaagctccgcctcctgggttcacgccattctcctgcctcagcctcccgagtagctgggactacaggcgcccgccaccacgcctggctaattttttgtgtttttagtagagacggggtttcaccgtgttaaccaggatggtctcgatctcctgaccttgtgatccatccacctcggcctcccaaagtgctgggattacaggcgtgagccactgcgcccggcctggacaagagtttttaatgtgaaaatgtccttctggttgtaagatttttgatatccctgcttgccccaagtgcctgtaaaaccccgtattcatgtaacaatgaaaaaatgttcccaatgtacttccaactgcactggagatggcaataccatccctagtggaaaaccattttggctcctctaaccacatcctctcgtaactcatctctacctgcttccctttgggttac

SEQ ID NO: 769501 - DNA, 627 bp, Homo sapiens
aaatccagggtttaaaagatggcttaagttgttaagtctctcagggaggatgttgtttacattttggacaagagtttttacttttatttatttattttttatttttacttttttttttgagttgagtctcactctgttgcccaggctagagtgcagtggcgcgatgtgggctcactgcaagctccgcctcctgggttcacgccattctcctgcctcagcctcccgagtagctgggactacaggcgcccgccaccacgcctggctaattttttgtgtttttagtagagacggggtttcaccgtgttaaccaggatggtctcgatctcctgaccttgtgatccatccacctcggcctcccaaagtgctgggattacaggcgtgagccactgcgcccggcctggacaagagtttttaatgtgaaaatgtccttctggttgtaagatttttgatatccctgcttgccccaagtgcctgtaaaaccccrtattcatgtaacaatgaaaaaatgttcccaatgtacttccaactgcactggagatggcaataccatccctagtggaaaaccattttggctcctctaaccacatcctctcgtaactcatctctacctgcttccctttgggttac

SEQ ID NO: 769502 - DNA, 629 bp, Homo sapiens
caaatgcatctcttatctagactgacaaataaacaaaaaaatgctactgatttcagaacatttgaatgataaagcctactcttgttccaacttaatttatcttaaacatgaaaatgtacatgacctcattattgacatggatcataaggtaaataaaaagtacattcatgaaattgatgatacaggttaaaaatgctttaaatagtttttcttttctaacttttctattctagaaggtgttgataccaaagaattcttacactgcatagagataaaaaggctgcaatgagtaagtccatctgtctctctgcctctgtctctgtctgtttctctatctgtccttctccctytctctatctctccttctcaccctcttacctccccatgctcatatgtgtcttagtcctataagtacttctacggaatatcttatttgttattttccattatatacttaaatatgggcgattatttttgtctgactcccttttccttctctgaccagtactaatcaatggaatagtcataagtcaaatacataattaagcagaaaaagtgtccacacatgtatgatcaattaagtggaaataaagaaggaataagttattttttcctacattagcttagcc

SEQ ID NO: 769503 - DNA, 599 bp, Homo sapiens
aaaaaaaataaggaagggaatggcaaatgctatcagtgagtaggaggatccgtcattttatagagggtgatcagtggtaacctctctgacacaaatattgtattagtccattttcacactgctataaagaactgcctgagactaggtaatttataaaggaaagaggtttaattgactcacagctcagcatggctgcagaggcctcaggaaacttacaatcaytggggaaggaaaaggggaagcaaggcaccttcttcacaaggcggcaggaaggagaatgaatgcaggaagaactaccaaacacttacaaaaccgtcagacctcatgagaactcagtccctatcatgagaacagcatgggggaaaccgcacccatgatccaattatctccacctggtctctcccttgacacgtggggatcatggggattagggggatgataattcaagatgagatttgtgcagggccagtaggcctaatcatatcagatatgtttaggcagatgcctgaaggaagccatgcaaatatctggtgggagaatattccaggttgggaggtatatttgatgacatattgaactaagactttgaattttactcc

SEQ ID NO: 769504 - DNA, 599 bp, Homo sapiens
aaaaaaaataaggaagggaatggcaaatgctatcagtgagtaggaggatccgtcattttatagagggtgatcagtggtaacctctctgacacaaatattgtattagtccattttcacactgctataaagaactgcctgagactaggtaatttataaaggaaagaggtttaattgactcacagctcagcatggctgcagaggcctcaggaaacttacaatcactggggaaggaaaaggggaagcaaggcaccttcttcacaaggcggcaggaaggagaatgaatgcaggaagaactaccaaacacttacaaaaccgtcagacctcatgagaactcagtccctatcatgagaacagcatgggggaaaccgcmcccatgatccaattatctccacctggtctctcccttgacacgtggggatcatggggattagggggatgataattcaagatgagatttgtgcagggccagtaggcctaatcatatcagatatgtttaggcagatgcctgaaggaagccatgcaaatatctggtgggagaatattccaggttgggaggtatatttgatgacatattgaactaagactttgaattttactcc

SEQ ID NO: 769505 - DNA, 582 bp, Homo sapiens
gaagcaaggcaccttcttcacaaggcggcaggaaggagaatgaatgcaggaagaactaccaaacacttacaaaaccgtcagacctcatgagaactcagtccctatcatgagaacagcatgggggaaaccgcacccatgatccaattatctccacctggtytctcccttgacacgtggggatcatggggattagggggatgataattcaagatgagatttgtgcagggccagtaggcctaatcatatcagatatgtttaggcagatgcctgaaggaagccatgcaaatatctggtgggagaatattccaggttgggaggtatatttgatgacatattgaactaagactttgaattttactccaagagaaataggaaaacactgggaggggccgttagaaaggatggttcagacgttgtatatagaacatgacattggtaagaggtaagtgtaatgcccaaccttgtttttactaaccctgtttttagactctcccttttcctttaatcacctagccttgtttccacctgaattgactctcccttagctaagacagccagacagactccatcttggctctgtca

SEQ ID NO: 769506 - DNA, 676 bp, Homo sapiens
tagtataaagaacgaggctgggcatggtggctcacacctgtaatcccagcactttgggaggccgaggcaggcggatcacgaggttgggagttcgagaccagcctggccaatatggtgaaaccctatctctactaaaaatacaaaaagtagctgggcatgatgacatgcacctgtagtcccagctactcaggggtttgaggcaggagaatcccttgaacccgggaggcagaggttgcggtgagccgaggttgggcctctgcactccaacctgggcgacagagcgagactccatctacacacacacacamaaaaaaaaaaaaaaaaaaaaagacgataagggcaaagggtttaagggtatatgtaagattcttacggatgacattcttatggatgacagattcacagtttggaagaaagggaaaacagaacacggggtttggaggtgacagactctttgcttgaccacactaattaggctcctgatccttctcctaggtccatttgtgcactcttctgtaaaatccaatgttagcaaggacactgctaagtcaggttagcaagaatcccctatccttgacatctgaaccccctcaatatctgatcctcattctcaactattccccaagtgatttttgattacctaggtctatcttcgctaggatcctgttagttcagt

SEQ ID NO: 769507 - DNA, 430 bp, Homo sapiens
ccaatgctcacatcacttttatggtcttttgtggacatgcttagagcagtgaaaactttgaattgtctgatgtgcatctttccaggtgaggctgagcaaggtgacaatttactttcttgttttaacttttgcactgcaaagaagtgtcgctwttgaggcctgttgagtgtcacatttttcacatttatatgctctttgatgttgatttcactgtttaaaatggtcccgaagtgcagcgctgatgtgccgtctagtgttcctaagctcaagtgttgtatttttttttctaataatttggtcttgaggtctttcaggacagtggcaacaaactctcaccctgtccttatgcggctccagggaatgtgggcatggtttacagtgtgcctttcataggattcttaattattatggcaaatgcctgatacccaaa

SEQ ID NO: 769508 - DNA, 557 bp, Homo sapiens
gcacgaacgctcttcatggtccgtgactcgctcggcgctaccgccaacgtccacggagcccgcccgggaccctcgacgtgcgcctctgcggacggggcgcgcagagggagccccgttagcggtcccccgctccctcgtccatcctccccaggcgcactccgagtcacacgtcgtgtctctgcaccgccctggcctccacggtggctccctgcgaagctgagggtgcggtccccatcctccgtgggtgccaactccggggcaagcaggctgcagagccgcgcgctccgccttaggcgctgccaagggcggccgggtagggtttcctaggacccgcccaccccgctcrtcccggccggagctgccaccccctggatcagtggtaggcggggctccacgcggggaggtcacgtgtgggtggcccatccctccctccccttcgccccatccgagttctggaatgttagcgctcgggagatccaacccgttctattttacggatggggaaactgaggcccaggtaaaaagcgggccaggctcccgcggagtttttgcctgtg

SEQ ID NO: 769509 - DNA, 572 bp, Homo sapiens
atgcccaccttgcgtcccgtacttttcctctgcgacactcaccaccaccgtaattagtatgcactcgctcagtgaatgaccatctttcgcactagaatttaagctccatgagggtaaagatggtgatctagggccaggcgtgacagctcatgcctgtwatcccagcactttgggaggctgaagcaggaggatcacttgaggccaggagttcaagaacaacctgggcaacatagtgagacccccatctctacaaaaaataaaaaccagccaggtgtggtggcacatgcttgtagtcccagctacttgggaggctgaggcagaaggactgcttgagtctagaggtttgaggctgcagtgagccgtgttcatgtcactgtactctagcccaggctgggggacaaagcaagaccttatctcaaaaaaaaaaaaaaaagagtgatgtgtgtttctgtttcttggtgaatcctcaccatcaagcaaagtatcttgtatacagcagcttttaataattgctgtgaaatgaagagatgacagtgaatgtctttggtgaattttatgagatttttatttgg

SEQ ID NO: 769510 - DNA, 588 bp, Homo sapiens
cttgctgaagtggatttatggaaataaatagttttatatattgctattgggaatatgaatttttacagaatttggggaaaaaaatctggccttacctgtttaaactaaatatactctttgacttaacaattttcaattttaagaacctattctatgtgcttaaggacaagtatatcaaaaagcgtattttttagatatgcaaaataaattgaaattcatcatgggggacaaaatatagtatgttcatattatggaatattaygtagttataaaataatttttagacattttcaataaatctgcttttaaaaaagaaacttggagtttgcttaaaattaaactcatatgtatatacatgtataagtgtgcaacattgtcttaaaatatatatcaaataatcactttttaaaaatctgaggtgtctaggcttgtgagtaggttattttattgatctttttattacttgacttatggaaacaaccatgttatatgcttgtaattaaattaaatataaatatgttcatttttaaagagataaagcatagcttttttaagaaaaagggacaaaagtacattgatagagttgtt

SEQ ID NO: 769511 - DNA, 656 bp, Homo sapiens
ttgcgtagtaagttgaattttcaaaaactcaacaacctttcccattgcttcattgaccccctgaagcccatctatgaacccagaataggaatggttatcagcataaaaagcaaagctgaaatggagaggtcattcagaagggaaataagataggaccgatccaagctccaagatggaatcactcaagagcaggagtgagatctggcaacaccatgtagtgaagtctcaaactggttggcaggcagtggaagtctaataggatgataaggatgaggctcaggaaggtgcaggctgcaaggtgagtcagactgmgggttgccccatagcagaggccaggaaccttgagtctcttgagtcagaggactgccacaggaagaggtccagcatgagtttcctggaaaacaggttgactgtgaagtcttctttgcagaagcaaaggcatcagtgggccatgcatgaagctcttttgtttcatgaggaacacttgctaagaagaattaggttctctcctactcatgtagacactgatgctgtggaaatctgctttgtgagttaaggtcaaagagggagatggtaagtcaggaactgaacatttcctgggtacttaccatgtgccaaattctttcacctatttctttggtgaattttttgctcta

SEQ ID NO: 769512 - DNA, 635 bp, Homo sapiens
atcaaagaagtattcagatttctgcaaattgtgtctatgagagttgttgtaaggtccttgctgtctttgtagaaatgtatatcgtgacaaaaacacgtattctgaggatagcggaaaatgaatctctgcacccgcttccctgccaggaccagctagtgttgcctgtgcaaacaytgcaattctacctctcctctaaataattctacttcaatggcccagagttctagctctgagaagtccaaaatgatttagttcagcatttggctctgcaccacatgataacattattttctgatggtaacaagaaagaggactactcaggaaagcaaataaagcccaacatcatggtgccaacattctgaatgtatttattcatgtttgtatttgtggatggaaaattttttccatgctacaaagtttggttaaaaacaagttgttacaaatcaataaataattgctataactattacctattgtaacaataataaatagaaaataaacagatgcaactactttgctatacacaagactttatcctgttataaaactaatataagtgctgccacttttctttctttgagtattttcccttgagatacgatttttgtattgcacgttgctttgtgcttgtctta

SEQ ID NO: 769513 - DNA, 611 bp, Homo sapiens
tctgttgcagtcctcaggaacagcctttttggggggctttttcaaaaattcttttgttttttcagaactagaaatcaaaagatcagtagtgcattattctttggcagataaaggccccatctttcagccgcatgaagtgttaccattaattctactgtatgcaaaaatgagtgatatgtgttccttttctaattttttaaacagatttttctcttaatggggaaaaaacaattagcagatgagtaaattcatttttttttttttttgagacaagagtctccctttgtcaccccggctggagcgcagtggcgcgatctcagctcactgcaagctccacctcccaggttcacgccattctctcccaagtagctgggactacaggcgcccaccaccacgcccagctaattttttgcatttttagtagagatggggtttcactgygttagccaggacggtctggatctcctgacctcgtgatccgcctgccttggcctcccaaagtgctgggattacaggcgtgagccaccgcggagtaaatatttttagtaagataatatgctttagacctgggctgttcagttgtgtagcataagctacgtgtgtgtccatca

SEQ ID NO: 769514 - DNA, 458 bp, Homo sapiens
ctatcacacgggaagaaaccttggacaatacccggctttccagggcagaggtccctgcagctttccgcagtgcattgtgcccctggtttatggagaatggcgatgacttttaccaaacatactgcctgtaaacattttgttaacaaggcacatcctgcacagccctagatcccttaaaccttgattccatacaacacatatttttgtgagctcaaggttggggcaaagttacagattaacagcatctcagggcaaagcaattgttcagrgtacaggtcaaaatggagtttcttatgtcttccttttctacataggcacaataactgtctgatctctctttcttttccctacaactcccttcagccttactctaaaatatgccatgactaacatctagccagtagatcataatgaaatgccatttaacatccctcactgcctgcatcaaagggaaaaat

SEQ ID NO: 769515 - DNA, 610 bp, Homo sapiens
tgtgcctgtattgagcgggaggatgaaagaaaaccatatttaatgtgtgctttctaatgactctctgctttaactgacttagttaaaaattatcttacctgactacaagtgatccccttgagaaagagagcttcatgcagtcaggcaagccgcagtcagggctgtcactgcttgagtttactgtcatgtgctcctgctggaaatcaatcagattccttattctttaaattacacacaggtggaaacctagagaagggctgggttgactggccatcttgaaggctgaaattggtggcatcagttgctctctgctaccctgacagatccataagccgtggwgttcatggttagagacagagcccttcaggccccaaggaagggtatgccatgggtcacctagggagggctgctggagaattcctctcttcacaggcagagaaccgaggctgtttgtccaagactcacagatgtttgaccacacactgaaaaactcagactccagtattgagaactcagtaggtgtttccttaccacctgttttctgaaaggatgcagggtcatctcagtttggaaatacaggttagtctgacaaacacacagttttttgcaa

SEQ ID NO: 769516 - DNA, 620 bp, Homo sapiens
tgcctggcaccgcacaagcagtggccagtggggattgaggaagcaattcctttggaatagatttctctccctctattcaaaaactagtagcctctactagatggaacctgtaactttccatctctatagacccacttacaatctcctgtgcaaaccagctctgttgactaaaaaaaaggtcaactgtctgtgccagatatgaatgatctgaagatatgccgggcatggtagctcacacctgtaatcccagcactttgggaaggccaggtgggaggagtgcttgagcccaggagtttgagacctgcctggacaacacagcaagaccccatctctacaaaaaataaaaaattagctgggcatggtgggatgcrcctatagttccagctcctggggaggctgagacaggttgagcccaggatgcaaaggctgcagtaagttacgatcaggccactgcactccagcctgggcaacacagcaagacctcaccccatcttgaaaaaaaaaaaaaagttaaaacgaagacattcagaacagcagctcctcagctctcagcaatcccaaatgagctacagacctttttaaggcttagactggcagaaacagtactaaatacgtttcta

SEQ ID NO: 769517 - DNA, 643 bp, Homo sapiens
cagtcttctaaaatcatgagcactcttaccagggctttatccaatatacgcttttgtaaagagtcacatttttcaaatgtacacgttttttatttcgtaaatctctaccctgtgaccattatgtctgcctttatgctgtcttcggatttatttatttatttatttttctcatctctttggcatgtatactttgatcattcctttttcaggctttggtatttttgttgttgttgttgttgaaatggagtcttggtctttcactagtctggagtgcagtggtgcgatcttggctcactgcaacctagtctcccgggttctagagattatcctgcctcagcctccggagtagctgggattgcaggcgcctgccaccatgcccggctaatttttgtatttttagtagagacggggtttcaccaagttgggcaggatggtctcaatctcttgacctcgtgatcctcccgcctcrgcctcctaaagtgctagggattacaggcgtgagccaccacacacagcctggtattttccaacaaatgaaattaaagtacaaattttcccttaacatgacgttacctagatatcacacatatgatatctggaaataaatgagcgcctggaaataaatataccattatttgggtat

SEQ ID NO: 769518 - DNA, 425 bp, Homo sapiens
catggaaactgatcaacctgctcctgaatgcctagtgggtaaataacaaaatgaaggcagaaataaagatgttctttgaaaccaatgagaacaaagacaaaacataccagaatctctgggacacatttaaagcagtgtgtagagggaaatttatagcactgaatacccacaagasaaagcaggaaacttttaaaattgacaccctaacaattaaaagaactagagaagcaagagcaaacaaattcaaaagctagcagaaggtaagaaataactaagatcagagcagaactgaaggagatagagacacaaaaaacccttcaaaaaatcaatgaatctaggagctggtgttttgaaaagatcaaccaaattgatagactgctaacaagactaataaagaagaaaagagagaagaatcaaatagacac

SEQ ID NO: 769519 - DNA, 425 bp, Homo sapiens
catggaaactgatcaacctgctcctgaatgcctagtgggtaaataacaaaatgaaggcagaaataaagatgttctttgaaaccaatgagaacaaagacaaaacataccagaatctctgggacacatttaaagcagtgtgtagagggaaatttatagcactgaatacccacaagagaaagsaggaaacttttaaaattgacaccctaacaattaaaagaactagagaagcaagagcaaacaaattcaaaagctagcagaaggtaagaaataactaagatcagagcagaactgaaggagatagagacacaaaaaacccttcaaaaaatcaatgaatctaggagctggtgttttgaaaagatcaaccaaattgatagactgctaacaagactaataaagaagaaaagagagaagaatcaaatagacac

SEQ ID NO: 769520 - DNA, 612 bp, Homo sapiens
taaaaaaatagcctacaaaccaaaagaagccaagaaccaaatggatccacatacaaactctaccatatttacaaagaagagctggaaccattcatactgaaactatttcaaaaaagtgaggagaagggactcctctccatctcattctttgaggccggtatcatcctaacagaaacatgtaagagacacaacaatgaaaaaataaaatttaggggaaaatatccctgattaacattgatgcaaaatkcctcaacaaaatacaagcaaacaaaattcagcatcccattaaaatgctaatccagcatgatcaagtaggctttgtccttaggatgcaagattgtctcaacatatgcaaatcaataaatgtgattcattacataataagaactttaaataaagttctttaaataaagttcttaaaggctttatttaaaggctttaaataaaattcaacatcacttcatgtaaaaaattctcaacaaactaaatattaaaggaacatacctcaaaataataagagccatctataacaaacccacagccaacatcgtagtgaaagggcaaaacctggaatcatttcccttgaaaaccagcacaagaaaaggatgccct

SEQ ID NO: 769521 - DNA, 612 bp, Homo sapiens
taaaaaaatagcctacaaaccaaaagaagccaagaaccaaatggatccacatacaaactctaccatatttacaaagaagagctggaaccattcatactgaaactatttcaaaaaagtgaggagaagggactcctctccatctcattctttgaggccggtatcatcctaacagaaacatgtaagagacacaacaatgaaaaaataaaatttaggggaaaatatccctgattaacattgatgcaaaattcctcaacaaaatacaagcaaacaaaattcagcatcccattaaaatgctaatccagcatgatcaagtaggctttgtccttaggatgcaagattgtctcaacatatgcaaatcaataaatgtgattcattacataataagaactttaaataaagttctttaaataaagttcttaaagsctttatttaaaggctttaaataaaattcaacatcacttcatgtaaaaaattctcaacaaactaaatattaaaggaacatacctcaaaataataagagccatctataacaaacccacagccaacatcgtagtgaaagggcaaaacctggaatcatttcccttgaaaaccagcacaagaaaaggatgccct

SEQ ID NO: 769522 - DNA, 582 bp, Homo sapiens
ttttttaaaacttatgttaagagaaaaaattctctgaataatttaatttggcatactgtaaagaagtagaaaatttgtatggacatttagctatagaggaatttaatcccttggccaggcgcggtggctcacgcctgtaatcccagcactttgggaggccgaggtgggcrgatcacgaggtcaggagatcgagaccatcctggctaacatgatgaaaccccgtctctactaaaaaaataaaataaaatacaaaacattagccgggcatggtggcgggcgcctgtagttccgcacgtctgtagtcccagctaatcgggaggctgaggcaggagaatggcgttaacccgggaggcggagctggcagtgagccgagatcgtgccactgcactccatcctgggcgacagagcaagactccgtctcaaaaaataaataaaaaaataaaaaaaataaaaaaattaaaaaaaagaaaaaaaagaaatttaatcagtaacttctgaattcttttttttgcataatatataactgtctcagattaccttaaaatagatttttcactagacattcatggaaagataagtcca

SEQ ID NO: 769523 - DNA, 589 bp, Homo sapiens
atcattatgtgaaaaaaaaaatgcatagctgggcgtggtggctcatgcctgtaatcccaacactttgggaggcctaggcgggtggatcacctgaggtcaggagttcaagaccagcctggccaacatggtgaaaccccgtctctactaaaaatacaaatattagccaggcatggtggtgcacgtctgtaatctcagctacttgggaggctgaggcaggagaatctcttgaaccaggaaggcagaggttgcagtcagatgagattgcaccactgcactccagcctgagggacagagagactctgtctcaaaaaaaaaaaaaaaaaagaaagaaagaaagaaaamtacataactctctcacactataaacaatacttggtcttagatgtatgtacattgacataactgtgaaaggcaaatctacattttttataagatgatataagatgatgaatttatagccttggataggaaataattttttaaagaagaatcacaagttatgaaaaggaagaaaataatagattaattcagtaaatttaagaacttctgttcatctacaggcagcattaatgataagacgaagtagatg

SEQ ID NO: 769524 - DNA, 559 bp, Homo sapiens
cattttctgcaatacgcatgcaaggagctgcagcaccactagaactgaaccgccacaaaaacatttaagatactatgttgtattttagccacaaatacattattattttagtttttctatcaaaagttaattagtttagataaaagcagaaatcagaatcatgtatcaaaacattgatgaatcattaacaatctgcctaaataaccgagaaataatgcctcaccatataacatgtacatttttatatgtgttgaatcatatttcagtgataaaaagcataaaatatgatggcattaaaaactcaaaaaaattagtggaagactttgaacgaaatgggtaaagatgaattattgctgtctcaaatttatcakatttggatctgagcctttgagtatataacaagatacagagattttgagttagatatctcagtaagttaaaaatcctaaaactcaattcaatttgaaaatgataaaaataataaacgttttatatagttttatatctagtgaagaaattgaatatgttaaataactttccacaggaaaacctaatgcat

SEQ ID NO: 769525 - DNA, 645 bp, Homo sapiens
tagcagcattatttatatttgctttaaaactggaaacaagccaaaggcccatcaattatataatgaaaaaatcaattgtgatatatttataaacaaggaactacaaatcaatgtaaacgagtgaactgttgctacaagcaacaacctcaatgactcccatcaatataaggttcggctgagctatagaagacatgctcatgcacactcacacatatgcacacatacactcacacacaactacataaacacgcattctcacttctccatcatatattaactacaaccaaagcgcgcacgcrcacacgtgcgcgcgcgcgcgcgcacacacacacacacacacacacacacacactatgctgttaacataaggataagtcaggagaaggataggcattttgaagtactgttttatgacctttgtagcagttgtttaagtgtctaagtttcactatgtaaaaattaattgaactctacacttataatgtgtgcattttatacatatgccacatttttagttaaaaatatgttcaaataatggcatatggaagaattatacattcttaatgtgtacttctttcaatttagaatgattttataaattccaaatagataaagatatagattaccaagaatatctgcacactt

SEQ ID NO: 769526 - DNA, 536 bp, Homo sapiens
attcagtgtcatatccagttacttgccatgccattcactatgataaccatttgctaagcccctttcttagtatcttatttcattcctataaaaatcctgtgaaataagctgtcagtatctgttttatgggcgaaagcactgaagcccagagtttaagtagttcaaagtcagctagtaaggtagcagagtaaatttgagttttsatctgcccgatttctaagtccacaggtgaggcaggtctcaaagataagaggaggctattactttatctgagctcctagagccaaaagcatctccccaggctcatctgggccagtctcaataaaaggattcacctaaactattccaggcagatagatcagagatctgagtttaagactcttgggttcccctggcttctggttgttgttttcagtctccactagagcaagagggtctttcatttgaccaattcagcaatctcatgatgccattgaagccatctcctgctgtgtgcatcattcttccaatctgcttctttctccagatcatagatg

SEQ ID NO: 769527 - DNA, 492 bp, Homo sapiens
tgctgagaaaatcctgtgtgcccagctctgagctagccctgctgtatatgatttcattttatttaccgtaagttaaatttggcaattttatccccactttacagatgggaacactgaagtttggagaagttaacacattgtttagggttatggttttcagtctatttttctcttttctccccctgtatcttctttctccttatctgtctctattgttattggagtatgaggtgagcctagtctcaatcttttgtccacctgctcctccaataaatgacttcagagagagctgtaacctcattcatgtccccagttttctccttttyccttgacctggatcaccgggggtgcaaatgaggagatacaagggtgatggaagtcttaatgccaatttcacattattccaggagatgactacacactctaatcccttctctctggccttcatcttttttgcaggtggtgaaggcatttgtggtcctggcctcgcag

SEQ ID NO: 769528 - DNA, 659 bp, Homo sapiens
ccggagactgcatgtattagtttgttttcatgctgctgataaagacatacccaagactgggcaatttacaaaagaaagaggtttaattggacttacagttccatgtggccggggaagcctcacaatcgtgacagaaggcaaggaggagcaagtcccatcttacatagatggcagcaggcaaagagagaatgaggacgatgcaaaagcagaaacccctgatgaagccgtcagatctcgtgaggtttattcactaccatgagaacagtatgggggaaccrcatgcatgattcaatcatctcccactgggtccctcccacaacacatgggaattatgggagtacaattcaagatgagatttgagtgggaacacagccaaaccatatcactgcataatgtataagaaaagaggtttaattggctcatggttctgcaggctgtacaggaagcatagcaccagcatctgcttctggagaggtcttaggtttttactcatggttgaatgcaaagagggagcaggcttcccacatggtgagaaaaggaacaagagaaggcagtgggggaggtaccccactttgcaataaccagacctagtgagaactcactcaccataatgacagcaccaagccataagggatcctccctcagggcccagatacctt

SEQ ID NO: 769529 - DNA, 537 bp, Homo sapiens
caaagagtaggataccaggggctgaaggagatgaggaaatggggagtgactaatgaattgtcataaaatatcagttaaacaagatgaatgctttctaaagatatgctgtataacactgcacctgtagtcaataaaatgctgtactctataattaaaaatgtgttaagaaggtagatctcaggttgagtgttctaatcacaatgaaataaaatttagaaagaaaaggaaaaataatgatctgcaaagaaataacagtcagtctcagttgtcatgtccatcctccccttgggctcctggccatatttgctgccgwtggtccaggtgcacatttgtagccttatcagctacatccagagaggcaaaataaccaggctttagttaaagcccagtaatctctctatgagaaataatctagtgccgagtccctcggcaggggctgccaatggacactatatacacaaacacatacactatatatgtaaactatatatataaactatatatatatataaactgtaaatatacataacaacatag

SEQ ID NO: 769530 - DNA, 605 bp, Homo sapiens
ccgaagcttccgcagcagatgctggtgccatgcttcgtatacagcctgcacaaccatgagccaattaaatctcttttctttataaattacccagtctcaggtatttctttacagcaatggaagaatggcttaataaaatatcaagcatattttacttttataagaaaaaactaaagtaataacatgttcttaatgcacctgtcaccaaagagtaaaagaaagcagcctagaggtattttgtgtttggaaaagaagacctaatattgtaattctaaaaacaagatattgtataaagtgaaatgctagttgtaatgttttggccaagtcaaaaagtgggctaatttttcaatataaagttayatagtatatacacttgggattccacattttaaaaaattgctccttatactttttcttagccaattcttacatatgaaagagaaaacagacaatttaactatgtataaaaattttaacttgctgctgaaaaagtctagaaagaaaattatagtggtggtggtagtgaaataaaaaatgaatggagaatttgataggaaaatcatggattctgtacagaccttaaatcttatatgtaaaataaaagt

SEQ ID NO: 769531 - DNA, 676 bp, Homo sapiens
ttactaacatggatggcagcaggcaaagagaagagggaagctcctgtttttaaaaccatcagatttcatgaagcttattcactatcacgagaatgcacgagaaaaacccgcccccatgattcaattacctcccactgggtccctcccatgacacatgggaattgtgggagttataattgaaaatgagatttgggtggggacacagccaaaccatatcataagtcattgaatactgcagcattactggcttatcatgtctaataaagtttcaaagacccctctgagcatstgatggctactatgtaccctgtccccaacaagctgcatggtcaaacaacattatatataaaggatatgaatatgcttttccatgtatcacccaccacaaatggatattgaatattaaagaatattggttccttctttacatatacaatgatacaagctgagtatccctaatctgaaaatcaaaactctgaaatgctaaaaaacctgaaactttttgagcacaaatatgatgccacaagtggaaaattacacacctgacctcatgcaatgggtcgcagttgaaatgtagtcaaaatttggttttatgcacaaaattattagaagtagtatataaaattaccttcaggctatgtgtatatgtgtattatgaaacataaatgaattttgg

SEQ ID NO: 769532 - DNA, 676 bp, Homo sapiens
ttactaacatggatggcagcaggcaaagagaagagggaagctcctgtttttaaaaccatcagatttcatgaagcttattcactatcacgagaatgcacgagaaaaacccgcccccatgattcaattacctcccactgggtccctcccatgacacatgggaattgtgggagttataattgaaaatgagatttgggtggggacacagccaaaccatatcataagtcattgaatactgcagcattactggcttatcatgtctaataaagtttcaaagacccctctgagcatctgatggstactatgtaccctgtccccaacaagctgcatggtcaaacaacattatatataaaggatatgaatatgcttttccatgtatcacccaccacaaatggatattgaatattaaagaatattggttccttctttacatatacaatgatacaagctgagtatccctaatctgaaaatcaaaactctgaaatgctaaaaaacctgaaactttttgagcacaaatatgatgccacaagtggaaaattacacacctgacctcatgcaatgggtcgcagttgaaatgtagtcaaaatttggttttatgcacaaaattattagaagtagtatataaaattaccttcaggctatgtgtatatgtgtattatgaaacataaatgaattttgg

SEQ ID NO: 769533 - DNA, 638 bp, Homo sapiens
ctgggcatatcaataagccttacctggtgattgaatacctcagaatatatacttactagactctacagttttgtgccacgtgctaagtcggtatcctcctaattggggagttttgtctgtaggtcttggaactaattgagctaaattttgtactcccaatgaagaggagagatggtaaataaacaataccgtgtgtgagcctaattggttaggcaatcaatcacaagaagtttcctctctttaacagaagttgagtttcctgtttgatagaccagggctcagtgcyacaccctggctttcattaaggcatgaaacattgtcttgttgtcaggtgattcttgctctcacccagggaaacattctttcctggtatttcataaaccataagtcagttacacacaccatgacttgaatagtttcctagactcagaaatggggagtttgagtctttatttcttctagtttatatttgacttattctttcatacacttgtaacaaaattgagactataaagattatcctataaaaccccttttattacctgttttattatccttagttggatgagaaaactgcggcttggtgtctactgtgtagtaggtgctcagtgaatatttattgaaccattcaatagacc

SEQ ID NO: 769534 - DNA, 638 bp, Homo sapiens
ctgggcatatcaataagccttacctggtgattgaatacctcagaatatatacttactagactctacagttttgtgccacgtgctaagtcggtatcctcctaattggggagttttgtctgtaggtcttggaactaattgagctaaattttgtactcccaatgaagaggagagatggtaaataaacaataccgtgtgtgagcctaattggttaggcaatcaatcacaagaagtttcctctctttaacagaagttgagtttcctgtttgatagaccagggctcagtgccacaccctggctttcattaaggcatgaaacattgtcttgttgtcaggtgattcttgctctcacccagggaaacattctttcctggtatttcataaaccataagtcagttacacacaccatgacttgaatagtttcctagactcagaaatggggagtttgagtctttatttcttctagtttatatttgacttattytttcatacacttgtaacaaaattgagactataaagattatcctataaaaccccttttattacctgttttattatccttagttggatgagaaaactgcggcttggtgtctactgtgtagtaggtgctcagtgaatatttattgaaccattcaatagacc

SEQ ID NO: 769535 - DNA, 550 bp, Homo sapiens
ccattccctagtcccctgctcaccaaactatccttgaaaaaccctaacctccaagccttcagggagactgatttgagtaatagttccatcttctgtgtggctagtctagcatcagttaaactctttctttgctgcaataccatgatctcagtgaactggttttgtctgtgcagcaggcaggaagaacccatggggcaactacactctgcttaygcttgaagaccatatggggtcactctaggacagctggaggactcagacactccatactacctagatttcctcccaatttcccagcacattaagtctacactgggaagcatacttctttcatttcaaatacttttctcttgataaatatttgaggaaagtttctggtgagtaaacttttattttttaaactttattacaaactgtcatacacattatcatttctgtccattcggtctccaaagacctctactaagtacacagtgttggcctacaattttctcttcttaggataaaaatatttaaaacttcatgaaaaaaatacacgtgcaaatgtaat

SEQ ID NO: 769536 - DNA, 644 bp, Homo sapiens
catacatgccaaagaaatctttcttctggcaagactggtagcatgtaggtgactgatgccaatttagctatttctttccatggttcaggatgtattttcatactccatgccaagaactagtctgtatttttggagtggccccaagaaattagtgagaacaaagataaagaataaacatttttatatttagagcctcttgtgtagttgcagtcagatatcagctagggttagaatcatctgaaggctcaactgggctagatgttgaggatgactcaatgacattactggcaagttgstactggctgttggaagttcagccaggactgcccactggggacctcaatcaatctccctatgagcctctccatggggccacttgggcatcctcaaagcatggtggctgacttccactgggaaatatcctgagagggcatgtccagagagcaagtttttccagaatcccaagcagaagctacaatacttttgtatgactcaggctcagaaattccagaacataacttccactggattctattcatcactaagtctagcctaatccactaaagattttaaagtcactaagtctagcctaatccaaaaaaggaaaattagacttcaccccttgatggaaggagtagaaaaga

SEQ ID NO: 769537 - DNA, 650 bp, Homo sapiens
ttgtcaatgaggaaaaaaaaaaaacaaggctcaggagcccattcaaagcacgtgccaggaagggcagagaggaatttgtatccaggtcttctgactctagatcctgactcttttttttttttccaagacagagtttcactctgtcacccaggctggagtgcaatggtgcaatctcagctcacsgcaacctctgtcttccaggttcaagtgattctcctgcctcagcctcctgagtagctgggattacaggcaagcaccatcatgcctggctaattttcatatttttagcagagacagggttttgccatgttggccaggctggtctcaaacttctgatccacccgcctcggcctcccgaagtgctgggaatacaggtgtgagccaccgcacccagctgatcctgactcttaaccactacacggaaaggcagaaagggaatgcctgcaaaatcacggggcaggggacagctggctgggtccactgccaggaaaaggggaacggggagaggccccaggggaccagactgcccacaggctgccaggtctgagaacagcacatttcctaccttcccagcagggcttcgcgaggtcatgagccagggccaccagggcctcaccctcccaagggccagctagaaaagggtcagccaa

SEQ ID NO: 769538 - DNA, 612 bp, Homo sapiens
aggagtgcacatcgaacggaaaaaattactccaactctctccgtaggagaacatctgccagctggccgaccaaagtagctggttgctaagaaatcacaccgggtgacatcacctgatcacttactacaggcaagacatggccagggtcagagttcaaaacagtttctggaaatctttccagcgaagccccttttccgtgcagggatgggaggatgggaaagtatcttgatgggtacccacctgtgaccccctgccctatgacagaggtactattacagatagggaaactgaggccccgagggggaaggtcactgctagagggtggtagaagaggggttccagcttcttctgagcatcgaggtgcttcccgggataccaggttctgagccccgctgtgtgcacccctctcatgcakaaagaggtcaacagagaagtccagcgcatggtaaagaccagcgtgaccacaggctgcagcttttccacatggacaatgcggtttctatggagtccaggggctacggtcccatctccacggcattaaataaagagacgaggaaggtggcgaaacagcataggagagtaacctcctctcaagccaaggcaccactccac

SEQ ID NO: 769539 - DNA, 516 bp, Homo sapiens
tctcacctcaacatctcaaagtgctgggattacaggcgtgagctactgtgtccaaccccaatgagcatttgagtgtcatgtctgtgctttaaaagtttttaattttgggccgggtgtggtgtctcacgcctgtaatcgcagcactttgggaggctgaagtgggcagccttgagtgaactcctgaacttgagatcaggarttcaagactagcctagtcaacatggcaaaaccctgtttctactaaaaatagaaaaattagctgggcatggtggtgcacacctgtggtcccagctactcgggaggctgaggcaggagaatcacttgaacccaggaggcagaggttgcagtgagccaagattgtgccactgcactccagcctgggtgacaaagcgagaccctgtctcaaaacaacaacaacaacaacaatcacaacaaacaaataaaaaataaaagttttgaattttcgagcattttggattttggattttcagattagagatacttagcctgtatttg

SEQ ID NO: 769540 - DNA, 653 bp, Homo sapiens
cccaacaatttgatagtccaaggagggaggatcccttaaggccaggagttcaagaccatcctgggctacatagtgagaccctgtctctgccaacagtttttttaaaatattagccaggcacagtggcatgagtctgtagtaccagctactcagcaggctgaggcaggaggatttcttgagcccaggagttggawgctacagtgagctatgatctcacccctgcaccccagcctgggtgacagggtaagacactgtctcaaacaaacaaacaaacaaacaaacaaacagttctgacagcatttaagtgttatacgtagaatgcaaggaataaaattaatgctgttgagagaaaaggctactgagtttcaatgagggggtcaggaatggcttcctggagcaggtgaggttttgattaaagcttgaaagaagacaaagcttaaaaacatataaaagggatgatagagtagaggttaccctaagcaggaaggatgtctgaagttaagaaagaaattttgccctgagcacaaagttcctgtagggagaactaggcaacacagctggagcagattgggatcagactgctgaggactttagatagtatcccaggacttcagcattgtgactgcagccaccacaggaagaggaatcagggt

SEQ ID NO: 769541 - DNA, 646 bp, Homo sapiens
ggtagtgcttttttattgctgtatattttgccatatgactatactacaatttttttatcctttaatattttaacggacatttgagtgatccgtttttggttattatcaataaaactgctaccaatattcttgtacaagtctttttgtgattttatgttttcatttctctttaatgaatacctataagtagaattactggatcatggagtagacgtatatttaactttataataaactaccaaacagttctctacaacaactggaccattttattyttttaattatttttatttttatttcatttttactattttattttattttatttttttgagacggattctcgatccattgccaggctggactgcaatggcgtggtctcggctcactgcaacctccgcctcccaaattcaagcaattctcctgcctcagtctcccgagtacctgggattacaggcgcgggccaccacgcccagccaatttttgtgtttttagtagagacggggtttcgccatgtcggccaggatggtctctatctctagacctcgcggtccgcccacttcagcttcccaaagtgctgggatgacaggcgtgagccaccgcacctggccacgactcgaccattttaaactcctacaagcaatgt

SEQ ID NO: 769542 - DNA, 583 bp, Homo sapiens
catttgtttcactgtttctgaggaaagacattctacattgggcttgcctcctgcagtgttctaaggaaatttttcataaatcatgctttgccactgattccttacccaaacctttttggagttacctttgcttcaagggaagaacaagaatggcactttcaatatttgyagtcatttgaataaaatccactcaaatgttaaagtgacagtgcttatctttgtcaatttccacacattatttgcctcttgctctgattttattctggctacagagcctgcttcaacactctggaaatctcattgctcttgaattttaccatgttcttgctaccaagaagtaaaatgacctgataaattgatccatattataatttaatttgggtattattatttctgaaactagaatttttacattttgtaaactctcattttaagggagatcctttggcgaagagacttctacattcagagtctcatggtgagcttttagtcgctgggagttctctaagcaagacgtgtggattgaggtggagtgggagggagatttttttctagcagcctccaaatcatacctatataatgc

SEQ ID NO: 769543 - DNA, 610 bp, Homo sapiens
aacacaattagaatctaattttattattattacattaataaatgatactgctgacaataatggtataacaacaataatggtgacttacatttacagaacacttaggacatgtcaaacactgttctgagtgctttagatatagtctttatttttttgtcacaatagctctatggagcagataatataattatcccattttacagacawgaaaactgaggcacagagtgattgagtaacttatctaaggtcacacagataaacaataagaggctgggatcggtggctcacacctataatcccagcactttgggattttaattacaaaaaattagctgggtgtgatggtgcacgcctgtaatcccagctactagagaggctgaggcaggaggattgcttgaacccgagggtggagtttgcaatgagccgagatcacgccactgcactccagcctgggcgacagagtgagaccccgtctcaaaaaaaaaaaaaaaaaaaaaaagataaacaataacaatactttactgttatcatacgctttctacaggcactgaaattggtgctttccaattatgatgtcctttgttctcataaaccctatcaccagaggaaa

SEQ ID NO: 769544 - DNA, 610 bp, Homo sapiens
aacacaattagaatctaattttattattattacattaataaatgatactgctgacaataatggtataacaacaataatggtgacttacatttacagaacacttaggacatgtcaaacactgttctgagtgctttagatatagtctttatttttttgtcacaatagctctatggagcagataatataattatcccattttacagacatgaaaactgaggcacagagtgattgagtaacttatctaaggtcacacagataaacaataasaggctgggatcggtggctcacacctataatcccagcactttgggattttaattacaaaaaattagctgggtgtgatggtgcacgcctgtaatcccagctactagagaggctgaggcaggaggattgcttgaacccgagggtggagtttgcaatgagccgagatcacgccactgcactccagcctgggcgacagagtgagaccccgtctcaaaaaaaaaaaaaaaaaaaaaaagataaacaataacaatactttactgttatcatacgctttctacaggcactgaaattggtgctttccaattatgatgtcctttgttctcataaaccctatcaccagaggaaa

SEQ ID NO: 769545 - DNA, 628 bp, Homo sapiens
ttttcattcagcagtttggaaacactgttttttttgaatttgtgaagggatacttgagagcgcattgagacctatggtaacaaacaaaataactttagataaaatgtagaaagaagctttctgagaaagtgctttgtgatgtgtacattcatctcacagagttaaaactttcttttgattcaagagtttggaaacactgtttttttttattgttattctgcaaatagtccttttggaattcattgatgccagtggtgaaaaagggaatatcccaggataaaaactggaaggaatcaatctgaaaaaattgctttgtgatgtgtggattcatctcacagagttaaaactttgttttcwttcggtagtttgaaactctgtttttgtagaatctgcaaagggatatttgggagcgtattgaggtccatggtgaaaaagaaaataacttcagataaaaactagaaagaagctttctgtgaaactgctttgtgatgtgtgcattcatctcacagagttgaacctttcatttgattcagcagtttggaaacgttgtttttttccattctgcaaatggacatttgggagctgattgaggcaaatggtgaaaagggaatattgcagtgtaaaaaat

SEQ ID NO: 769546 - DNA, 587 bp, Homo sapiens
aatgcccaggataaaaagtagaaggaagctatctgataaaccgctttgttatgtgtgcaatcatctcacagagttaaacctttcttttgattcagcagtttggaaacaccgcttttgtccattctgcaaaaggacatttgggagctccttgtggccaaaggtgaaaaagcaaataccccaggattaaaactagaaggaagatatctaagaaaattctttgtgatgtgtgcattcatctcacagagttaaaccttccttttcattcagcagtttggaaacactgttcttgtagaatctgcaaaaggatatttggcagcgctttggggcctatggtggaaaataaaatatcttcagataaaaactagaaaaaagctttctgagaaactggtttatgatgcttgcattcatctcacagagttaatcccttcttttgattcagcagtttggaaacactgttwttgtcctttctacagatggacaatttagagctcattgaggccaatggcgaaaaagtgaatatcccaggataaaaaccagaaggaagctatctgataaaccactgtgttatgtgtgcaatcatctcgcac

SEQ ID NO: 769547 - DNA, 609 bp, Homo sapiens
tcttagattagttacgcaatgtccttggggagaattgtaagtgagagtctgtcccccctgaggcttgatttaagacagtgggagaaaatgaaagaatcagtcacacattgtgcggcagtgagccttaccaattttgttttctctttggagcaaaatcacttacttgccaaccaacacggacttgagaggaaacatcctccgagaaaaatttgtgtctttaatatgagtcgatttgctctgttcttcttttgggttcctttcaacactggtttccgtcttgttttctaatgtcactaagtgaacaaagttttgtgcacacaggacacagcatggtctgatgctcatagcaatttattttctgtcattacagaaatcctcaggagttatacaaargggtatgtattggggaacccctctcatactgatgagtaatccagatgatgagcaatgtgccactgtctctctggccttcctgtagacaggcagcctgagtggagcttcccctcatgaatgagggcataggctgtgatgggagaaattgttgttccagataaagcatgatggtcacattctgcagtccctgggaacaactgtggtctctgaagttag

SEQ ID NO: 769548 - DNA, 571 bp, Homo sapiens
tgtactgcaagcttctccaagcatgtgcaagcaatttgagaggagcctaatgtttgcaaggaatttgagaggagccttttaaggatgttttattgggtgggtcagatgagggagataacatgggggcaagaaggaaagttattaattcacgtgaaactaccagccgttcatcacctaacttatgatttcagacactgagcacattgcaggttgagaaggtgcttggtcctttttgtagccttatgctgtgctcttcagagtcatgagtgtgctgctttttctcaccattttgtttcttgtagattgttgtccttgatgctggaaaacattttgaagacaagactctaaacagtgacctatgccgcactagtttattggaaaatgagaaatttacattactgacaagcttggaagattcttctgtcctgcagtracctgtgtttccctggtctttatcttgccactctgctttattccccttttttgtggcagtagttatgatgccaacttttggggattctttgtcctcctcttttcttcctacatgccaacattcaaatggccacttcta

SEQ ID NO: 769549 - DNA, 597 bp, Homo sapiens
catcaaaaacacacttcttttggcataatttaaattctaacacatcattcacatttatctatgttacatatataagaacttacccaccatattcctccttgaggaattacagcatgtaattctgtaaaccatgtaattctataaccatttttacaatcgtctaacaatgttataatggattggttgcttactatcaattttttaaaagtcatggyttctccaggcatttcttgctcatcaaaattatttcatgagatgggtctgtccttgtatatttgaaaatgatgtttgcttccttctacttaaaaaacaacttgaacatacctgtttggatcacatggtcttgtcctgattacttggtagaggtttcttcagcattgttattattgttggggtggtaattattaatgtatttcatattctgttttaaaaattaaaattttaaagaccaatgtcttcttttcaattccagtacatttttcagaagtaactaatgctattggcttgcgcattataattccagaccattttatatgtatttagttatatatacagtgtgcatatacatgtgtcaaattattccatttcttctagcat

SEQ ID NO: 769550 - DNA, 562 bp, Homo sapiens
ctacaatttatttagccctattattgtcaacgtgcatttgaattgtctgtgctgttgcaatattattaacaaagcttctataaacatttgagtacatgatttttggtgaatatagtatctaattcggttcaggttggcccagttaaggaagtacttgatcatggagtaaacatacgtttagatttagtagatattattcaaaagctttccaaagtagctgtgctagcttaaagtttcaccagtaccatatgagcgttccattctgyatgcctgccagcactatatcaccagtctatttaattttagctattccagtggtactagagtgatagctcaccatgggagcaagtgccctaatgagtaatgatacactaattattaatttaggtagctcctattgtagactgactactcaagttttttgactgttttcaaaagcaagttatctgtccttttttttaatttgaaggagttcttttttttttttacatattctgaaataaggcctttgccagataacagcatcatacacatattctagagtatagcttgccattttact

SEQ ID NO: 769551 - DNA, 562 bp, Homo sapiens
ctacaatttatttagccctattattgtcaacgtgcatttgaattgtctgtgctgttgcaatattattaacaaagcttctataaacatttgagtacatgatttttggtgaatatagtatctaattcggttcaggttggcccagttaaggaagtacttgatcatggagtaaacatacgtttagatttagtagatattattcaaaagctttccaaagtagctgtgctagcttaaagtttcaccagtaccatatgagcgttccattctgcrtgcctgccagcactatatcaccagtctatttaattttagctattccagtggtactagagtgatagctcaccatgggagcaagtgccctaatgagtaatgatacactaattattaatttaggtagctcctattgtagactgactactcaagttttttgactgttttcaaaagcaagttatctgtccttttttttaatttgaaggagttcttttttttttttacatattctgaaataaggcctttgccagataacagcatcatacacatattctagagtatagcttgccattttact

SEQ ID NO: 769552 - DNA, 592 bp, Homo sapiens
attcaacaataagaaaaagatcaatcagacacttcagcaaagaagatatacagttggcaaataagcctgtgaaaaccatattaacacatgaacacgtgcttaccatattagccattaagagattcaaactaaaatcataatgaggtacactactcacttgttagaaggacaacagttaaaagaacaccaaaaatcaaatctggcacttgcaagcagaggcaggyctgaccttccctaataagacaggatcataaaaaatgactgtgcaagttggaactaagccaagcagtcttactcatcggagaaaattaagattgtttagtgacctgtaaatattttttctcaaaatcttaaaaacttagtgttgtattggtgttggtactaaatgcatcaaaacatgaaaaaaacgaagctaatatttatgcagaacactacaatttaaaacaggacattgacaactacaatgtttggcttcttggtaaaaagggtgttaaaagtactttgaacaggacttgccccttctttttgtaaaattacgaaacagagctggcttctcttccatgctgagatgaattgccaagctccgctctag

SEQ ID NO: 769553 - DNA, 615 bp, Homo sapiens
aggaaaatgaacactttaacactgtggaattttccaagttacagtatgtacctccatttgtttcactgatatttaatttctttcagcaatgttttgcagtttttagtatagaggtatttgacttcttttgttaaatagtttgtagataactgacttatttttaatgttatttaaaagtatttttgaaatttccatttctgggatataatgttttgtttccattatataaaatttcaactattttacataaaaattatatccagttaactctttaatttaaattattaagtacaatatgtaatttgtatattttctgtttacaaaattatgcctgaaattratagatttttttctgtctcttccaatattatgccttctatccttttttcatgcctattgtacagaataggtcctcttatacaagattgcacaggttgatggcagacatttttgtcttgttcccaaactcaaggaaaaaattattaagcacattcttagctgtaggcaatatttttaataagatttttaaagtttccttctacactctagttttctgagaatttaccatgaatcagtattgagttttatgaaatatttttctcataattctgagat

SEQ ID NO: 769554 - DNA, 610 bp, Homo sapiens
gtctgcatggacgtggatggcccctcctcaaacgccccactctggcgtcccctggcatcacccgcatcctgggaagcccgactgtcctccaatacggccctggccaggtgtggacgtgctgttgctcctgacggctaattacttctcctgtcagcgccatcttggtgtgctacctaatgtggttatttccaagatgatacatcaaatcttttgctgcagtaatggtagcttcttggagaactatgtgaaacaaaaaccttaatgaggactcctgccttccatctggaatgtcaaaaggcaggaagcacctcgttcttgccacacaacaacagcgatggtgggacatatgcggagtcacaacttttattctgaatccataagagagctgagggcagaggcaatagatcaactcgaaatccgaggagcaataggtgcctacagggaaagacagacacatttctcttgctggccrggcggatggcagcagacaaccgccaggagggttcagctatgttgtttactgaacagctgaaggccacgtgtcggctggcgaggggacacaggagcccgggtgctctggaacagggggactgctcccatccatgggctc

SEQ ID NO: 769555 - DNA, 610 bp, Homo sapiens
gtctgcatggacgtggatggcccctcctcaaacgccccactctggcgtcccctggcatcacccgcatcctgggaagcccgactgtcctccaatacggccctggccaggtgtggacgtgctgttgctcctgacggctaattacttctcctgtcagcgccatcttggtgtgctacctaatgtggttatttccaagatgatacatcaaatcttttgctgcagtaatggtagcttcttggagaactatgtgaaacaaaaaccttaatgaggactcctgccttccatctggaatgtcaaaaggcaggaagcacctcgttcttgccacacaacaacagcgatggtgggacatatgcggagtcacaacttttattctgaatccataagagagctgagggcagaggcaatagatcaactcgaaatccgaggagcaataggtgcctacagggaaagacagacacatttctcttgctggccgggyggatggcagcagacaaccgccaggagggttcagctatgttgtttactgaacagctgaaggccacgtgtcggctggcgaggggacacaggagcccgggtgctctggaacagggggactgctcccatccatgggctc

SEQ ID NO: 769556 - DNA, 629 bp, Homo sapiens
gacaggcaataaaagttatatacaaaaacagacagaaggatagtaaagagtcagcatataatattacacaaagagattatataattgtgtttacgtaatacatattgtatatacagtattacatagggaaaaacacgcacaagtaaaaaccaccagaaacatattttatatggaaaaatgaacacaattttaaagtatgtaaaataaatattgaatcaataaaatgaataccttatttttggctaggaaggcttaatgtgaaaaggacctcagtttttaattattcctatatgaattaatatccttaacatcctaccaaagaaaattccaactcattcacaatgaattaacttagaaactttataaaactgcttctgaaattttcctggaagaaacrtgtttgaagaaccgggagatgcaatgtctctgacccctggaagagctggctgtgcactggcccgccactgtgcctttcactttccaggtcaatccgtcttcagggaaatgcggccctgtggggtagccacagttattatgtccactgtagggactaagaagtggaagttataagggttaagtaacttgtcaaggtcatgcaactagtaagagtccaatcaggaagttgaagc

SEQ ID NO: 769557 - DNA, 558 bp, Homo sapiens
aacgtgactgccataatcacacactctgttaatttaattttcttaatcttagtacaactatcaccatttgggtaaagtgtccatgatttgataaattatggatttttcaaaatttgaaatagtttctttgactttgaacacatctaatacaaatggtagtaaaacaagagttgaatttaattaatgttttggtggcctaacrttaccaacagaacagttcttcatttgaagaacttagaagtattatctttgacttcaggtgtgtatgagtccgttttcacgctgctgataaagtcatatcagaggctgggtaatttacaaagaaggaggtttaattggactgacagttccatgtggctggggaagcctcacgataatggtggaaggtatggagaagcaagtcacatcttacatggatggcagcaaagagcttgtgcagggaaactcccctttttataaccatcagatctcatgagccttattcactatcatgagaacagcatgggaaagacctgcccccatgaatcaattacctcccaccaggtccctcccacaaca

SEQ ID NO: 769558 - DNA, 607 bp, Homo sapiens
agtaacctccaggtatttcatttctaaatatttcagagtgcatctctgaaaaataacattttctttttgttttttcgagatggagtctcactctgtcgcccaggctggagtgcagtggcacgatctcagctcactgcaacctctaactacctgggttaaaagcaattctcctgcctcagccyctgcaatagctgggattacaggtgcacaccaccacgcctggctaatttttgttttttttagtagaaatggggtttcaccatgttggccaggctggtctcaaactcctgaccacatgatccacccacctcagtctcccaaagtgttaggattacaggtgtgagccactgcacccagccaatattttcttgaatgactccaatattgtgatcacacctgattaattatcacctgttagaaatttacatgtaaaatatattcatacacaaccaccatagcaatatattattgctatggtttcaatgtctccctccaaattcagaagttgaaacttaatcatcaatatgattatattaagagatggactctttaagaggtgattaagtcaggagggcagagcattcatggatgggattggggtacttat

SEQ ID NO: 769559 - DNA, 607 bp, Homo sapiens
agtaacctccaggtatttcatttctaaatatttcagagtgcatctctgaaaaataacattttctttttgttttttcgagatggagtctcactctgtcgcccaggctggagtgcagtggcacgatctcagctcactgcaacctctaactacctgggttaaaagcaattctcctgcctcagcccctgcaatagctgggattacaggtgcacaccaccacgcctggctaatttttgttttttttagtagaaatggggtttcaccatgttggccaggctggtctcaaactcctgaccacrtgatccacccacctcagtctcccaaagtgttaggattacaggtgtgagccactgcacccagccaatattttcttgaatgactccaatattgtgatcacacctgattaattatcacctgttagaaatttacatgtaaaatatattcatacacaaccaccatagcaatatattattgctatggtttcaatgtctccctccaaattcagaagttgaaacttaatcatcaatatgattatattaagagatggactctttaagaggtgattaagtcaggagggcagagcattcatggatgggattggggtacttat

SEQ ID NO: 769560 - DNA, 507 bp, Homo sapiens
gcaatccctaagtaaaccctatgaaacacaaagaagtagacacagttgaagttgaaagccaattgagcagataaagtataaaaaaattcacacctatgtttattgcaggactattcacaaaaggaaagaaatggaatcaatctaaatgtccatyagtgatagactgggtaaagaaaatgtggtacatatacaccatggaatgctatgcagtcatgaaaaaaaaaacatgtcctttgcagggacatggatgaagctgaaggccattattcttagcatactaacacaggaacagaaatcaaaataccacatgttttcatttctgggagctaaatgatgacaacacatggacacatagaggggaacaacagatgctggggccttttggaggttagagagtttgagaaggaaaaggatcaagtaaaaggactaacgggtgtcatgagtatccatatagaagaccacctaaacaggcttcgtgtgagcaacaaggctgtttattcacttggg

SEQ ID NO: 769561 - DNA, 507 bp, Homo sapiens
gcaatccctaagtaaaccctatgaaacacaaagaagtagacacagttgaagttgaaagccaattgagcagataaagtataaaaaaattcacacctatgtttattgcaggactattcacaaaaggaaagaaatggaatcaatctaaatgtccattagtgatagactgggtaaagaaaatgtggtacatatacaccatggaatgctatgcagtcatgaaaaaaaamacatgtcctttgcagggacatggatgaagctgaaggccattattcttagcatactaacacaggaacagaaatcaaaataccacatgttttcatttctgggagctaaatgatgacaacacatggacacatagaggggaacaacagatgctggggccttttggaggttagagagtttgagaaggaaaaggatcaagtaaaaggactaacgggtgtcatgagtatccatatagaagaccacctaaacaggcttcgtgtgagcaacaaggctgtttattcacttggg

SEQ ID NO: 769562 - DNA, 507 bp, Homo sapiens
gcaatccctaagtaaaccctatgaaacacaaagaagtagacacagttgaagttgaaagccaattgagcagataaagtataaaaaaattcacacctatgtttattgcaggactattcacaaaaggaaagaaatggaatcaatctaaatgtccattagtgatagactgggtaaagaaaatgtggtacatatacaccatggaatgctatgcagtcatgaaaaaaaaamcatgtcctttgcagggacatggatgaagctgaaggccattattcttagcatactaacacaggaacagaaatcaaaataccacatgttttcatttctgggagctaaatgatgacaacacatggacacatagaggggaacaacagatgctggggccttttggaggttagagagtttgagaaggaaaaggatcaagtaaaaggactaacgggtgtcatgagtatccatatagaagaccacctaaacaggcttcgtgtgagcaacaaggctgtttattcacttggg

SEQ ID NO: 769563 - DNA, 496 bp, Homo sapiens
acaaataaaactgtgcagcacataccattttggtttggcttcttttgtaaatattaggtttgtgagagtcatccatgttgtagagaaagaagtaatacattcttttttattgttgagttatagtaaccatattaaaattgcctacccattttcctgtttatagatatttggattattttaagattaggctattatgaacaaaagtgctatgagtattcttgtataagtcttttgtgaacatgtattttcatttctcctaggtaaatacctaatagtagaatgycggagtcataagaaagatacatgttttgattttgatttttttcttgtaaaatgttgccacaattttgtaacagatttattgtattatagtcaaattccaccagtaatgtagaagattttcatgttttccataccctcatcaaaacttggtaataatcactttaatgtatccattctagctcatataggtatctcattgttgttttaactgcac

SEQ ID NO: 769564 - DNA, 578 bp, Homo sapiens
aaacaaaaaagtggcaggtcacataacctgagattaaacatatcactttaagaactacagaggaagcaaattcacaaaaccacatccagacatgttggaatgaaactaaaaataccaaaaataaaataaaaatcctaagtgacaccaaagaaaaaaaggatgagtatcaaacaacacagatatatcattagcaaaatgttgatgtcaaagacccagttattttccacctaacaaaaaatgagatggttaactattayaaataatacttgaaaaaatactaaaggcttgctatggctttaatgtgttccctccaaaatttaggtgttaagacttgatggccaatgtgatgacattaagacatggggtttttatgaagtgattaggtcattaggattcctttcctcatggatagaattaagaccctcgtgaaagaggcttcatgcagtgttggactgcctagaccttccgccttctgtcatgtgaagacacagctttcctttccacggcagcaaggtgcctcttggaagctgagagcagcccttgccagataaccaaacttgatcttggacttctcaacc

SEQ ID NO: 769565 - DNA, 525 bp, Homo sapiens
ttttgtggagcttctgttacatgtttataatatgtaattatacttgagttcacagtaagcaaatattatttttattaaattaaaaaaatctcctctagtcaagtttgcttaatgcctgacattaaagcctattggacagtaaggagaatccatgtttaatccyaagtgagctcctgcttaacaatacccacaatctctagtactccaaggtgaatatttttttttaaaaaaaattggtattatctacttgatgccagaacaactagtttaaatttaggtaggataaataaaaataacattttaaaaccagtaacccaagagtgggacccacttatgatattaaaagaaactgagttaatagttgagtatttgtgagaaatttttactcccattgaaagtatttctactcttatggtgggttaataaactcagggataacatgttccaagttaccatagaacatcggtcacctggcaaaaaataaagtttaaatataaaataatcttagccatatttttaacttaa

SEQ ID NO: 769566 - DNA, 604 bp, Homo sapiens
tataagatcataaacaagagacatacaccttaatgcacacaataaagtctagggagagcattacaatgatcaatttagtctctgaggtcacgatgggagattgtatgaaagctcagatgaaagggtatggaatggggaaggaagaaagcagaaaaggctttccaaaggaggtaagccatgagctgatccatgaacaatgaatacaaatttggaagggaagaatattaaggaggataaaagtggtacaggataattttgtcagatgccacatttttgatcctgagattaccaccaagctgagaatatccttaggttttcccagcaccacatgtgtcaacaaatcttacgggattgcattcttctcatacatcatttgtgcattaacagraaaaaagtctcacttgtgatgctgggtccagcttataaccacacaatggaaacccctgcctccttcctccttgtgggtatcccaggactgcaatcttcacatctttggctggctatctcactgagtgccatgtacatcatagccctgttaggaaacaccatcatcgtgactgcaatctggatggattccactcggcatgagcccatgtattgcttt

SEQ ID NO: 769567 - DNA, 583 bp, Homo sapiens
ggcaaggacttcatgtccaaaacaccaaaagcaatggcaacaaaagccaaaattgacaaatgggatctaattaaactaaagagcttctgcacagcaaaagaaactaccatcagagtggacaggcaacctacaacatgggagaaaattttcrcaacctactcatctgacaaagggctaatatccagaatctacaatgaattataccctttcttatcagctaagcacagccactagggctgtaagtcaaagtttaaagtcctgaaatagtcgcagcgcattgtgggctgcaataaaatgcagcaggaaaaccctaaagaacacactggaagccttaacccaactaccaataggtgacgttcgggaagattgtaacctcacagtattcagccagtgaggaactggggagggaaataaattgcttgttgtaaccatcccaggtgtgcctgcgtgccagacgccgatcttgcaagactgccattaaaagtcttgcttctgctgttctccgggtccctgagtctattctttgggtttggatgggtaagggtatttttcacagattggctacaactttgcttgatacaag

SEQ ID NO: 769568 - DNA, 598 bp, Homo sapiens
caccatgttttatagttaatcccaagagattatatgaattaagtaaggtcatcctcctagcggcagaacatgagatgtagctcagagctccaaattccattccagggctctgtccttccctcaatataggacccagggcaggctattcttgtgttttacccctgcccccaggttctctctggacctgctccttgggaacgtagtatggagcacaagggaaggcatctctttaaaagcaacccaacatagggcctgtgattaacactactgtattgtacacttaaaaatgtgttmagagtttagctcttacgttaagtgctcttaccacagaacgaaaaacaatagcaacaacaacaacaataaaggaggtgagaggaaacttttggaggtgatggataagtttaccacattagttacggtgattgttttaagggtatatcacttatgttcaaatatatcaagttgtatacattaaaaatctataactttttgtatgtcaatcagacttcaatgaagtggcttaaaaaaaaaaaaagaaaaagaaaatctcacatcactctcgtgggtagaacctgtgggaactgggacagattggctt

SEQ ID NO: 769569 - DNA, 456 bp, Homo sapiens
ggggctgcctgagtaataaacttatccttcataattagttgttccttgactggatgaggagatagagaggtgtgctttaccaagggcccttttagcctttccaagaaggcagttgagacttctattaaatccctggtctatcatggatagctttctataattgaggcttggtcctagttctacataagcccctyattatatgcacctgaaagtgtctcctcttccagactcccatctcgtcattggaatcccatcgagggtcttttgctgatactgcctttcttccagttggatagagttttcctccctccctgatgctatatgtgatacaaagcttatccccaaatttttctgccacatgcagagcagcttgcttctcagtgttcatcagggtttgatttcaaagtaacatttttttcagaagagcctaaatacttgggttaaattctaaaaagc

SEQ ID NO: 769570 - DNA, 529 bp, Homo sapiens
gattcaatattaattagttctgatatttaatttcatgctttccctaaggttgcactcttgctccttctgcctgaaatgtagctcacatttcaatatacttgcccaccagcattcaatttcatgctgactcagccttagaagagtcacctgaaatttccatgactgacaaataacacwtgtgtccagaatttatccaggcagcccactgggaacagtgtgaaatggcccagtttcttgtatttgttggagtattgctataggtttgtatggaaacagatgagcatgcttgggtaacatctgtggtctgattagaaatcctaccaaagagtcacactaacttatataaaaaattagggtgtttttttctcaagtgttttttccttgtttgttgatttccagaaacattatgggttgagatcaagttcctattttaagagtcacccatttgttcaccataagttcctggagaaggtagagtaacacactactaaccttccagcatctgattctgttggttgccatattcagg

SEQ ID NO: 769571 - DNA, 591 bp, Homo sapiens
tttgaaacactctttttggagaatctgaaagtgaatatttggacggctttgaggccttcattggaaacgggaatatcttcacataaaaactagacagaagaattctcagaaacttctttgttatgtgtgccttcaacacacggtgttgaaccttccttttgatagggcagttttgaaacactctttttgtagaatctgcaagtggatatttggagcgctttgaggcctacggttgaaacgggaatatcttcacataaaaactagatagaaacattcacagaaactaatttgtgatgtgtgyattcaattcacagagttgaaattttcttttgatagagcagttttgaaacactctttttgtagaatatgccagtggacatttatagcgctttgagggttatggtggaaaaggaagtatcttcacgtaaaagctagacagaagcatactcagaaacttctttgtgatgtgtgcattcaactcacagagttgaacgttccctttgatagagcagttttgaaacactctttttgtagaatctgcaagtggatattgggaccgttttgaggcattcgttggaaacaggaatatct

SEQ ID NO: 769572 - DNA, 591 bp, Homo sapiens
tttgaaacactctttttggagaatctgaaagtgaatatttggacggctttgaggccttcattggaaacgggaatatcttcacataaaaactagacagaagaattctcagaaacttctttgttatgtgtgccttcaacacacggtgttgaaccttccttttgatagggcagttttgaaacactctttttgtagaatctgcaagtggatatttggagcgctttgaggcctacggttgaaacgggaatatcttcacataaaaactagatagaaacattcacagaaactaatttgtgatgtgtgcattcaattcacagagttgaaattttcttttgatagagcagttttgaaacactctttttgtagaatatgccagtggacatttatagcrctttgagggttatggtggaaaaggaagtatcttcacgtaaaagctagacagaagcatactcagaaacttctttgtgatgtgtgcattcaactcacagagttgaacgttccctttgatagagcagttttgaaacactctttttgtagaatctgcaagtggatattgggaccgttttgaggcattcgttggaaacaggaatatct

SEQ ID NO: 769573 - DNA, 633 bp, Homo sapiens
aaacttctttgtgatgtgtgcattcaactcacagggctgaaccttccttttgatcgatcaggtttgaaacacactttttgtagaatctgccagtggatatttggagcactttgagtcctacggttgaaaagggaatatcttcacataaaaaatagactgaatcattctcagaaactcctttgttatgtgtgcattcaactgacggatttgaacccttcttttgatagagcagttttgaaacactgtttttgtacaatctgcaagtggatatttggatgctttgaggcattcattagaaacgggaatatcttcacataaaaactatacagaagcattctcagaaacttctttgttatttgygcattcaattcacaaaattaaagtgtccttttgaaagagcagtttggaaacacactttttgtagaatcctcaagtgggtatttgcactgcttggagcccctctttggaaacgggaatatcttcacataaaaactagacagaagcattctcaggaacttctttgttatgtgtgcattcaattcacagagttgaacattccttttgatagaacagttatgaaacactctttttgtagaatgtgcaagtggatatttggactgcttttaggccttc

SEQ ID NO: 769574 - DNA, 637 bp, Homo sapiens
tcaaagctctccaaatacccacttgcagattctttaaaaaaagtgtttcaaaactgctctaccaaatggaagtttcaactcagtgagttgaattcacaaatcacaaagaagtttctgtgaatgcttctgtctagtttttacgtgaagatatttccgtttcaaacgtaggcctcatggtgttccaaatatccaattgcagattctaaaaagagagtgtttcaaaactgctctatcaaaagaaaagttcaactctgttagttgaatgcacacatcacaaagaagtttctgagaatgcttctgtctagttttacatgaagatatttgcttttctaccatagtcctcaaagcgctccaaatatccacttgyagattctaaaaaagagtgttccaaaagtcctctatcaaaaggaagattcaactctgtgagttgaatgcacgcatcacaaagaagtttctgagaatgtttctgtctagttttaatgtgaagatattcccgtttccaatgaagggctaaaagcagtccaaatatccacttgcagattctacaaaaggagtgtttcaaactgctctatcaaagggaaggtttaactctgtgagttgaacacatacatcacagagaaatttctcagaatacttc

SEQ ID NO: 769575 - DNA, 627 bp, Homo sapiens
gtttctgagactgcttcagtctaatttttctgtgaagatatttccttttctaccataaccctcaaagcgctccaaatgtcctcttgcagattctacagaaagaatgtttcaaaactgctctatcaaaagacaggttccactgtgcgaggtgaaagcacacatcaaaaagaagtttctgagagtgcttctgtctagtttttatgtgaagatattcccgtttccaatgaaggcctcaaagccrtccaaatatccacttgcagattctacaaaaagagtgtttctaaagtgttctatgaaaaggtatgttcaactctgtgacttgattgcaaatatcacaaagaagtttctgagaatgcttctgtctagtttttaggtgaggatattcccatttcctacatagccctgaaagtgcaccaaatgtgcacaagcagattatacaaaaagggttcttcaatatgaactttaaagtagttttttccaattctgtgaagaaagtcattggtagcttgatggggatggcattgaatctgtaaattaccttgggcagtatggccattttcacgatattgattcttcctatccatgagcatggaatgttcttccatttgtttgtatcctcttttattt

SEQ ID NO: 769576 - DNA, 627 bp, Homo sapiens
gtttctgagactgcttcagtctaatttttctgtgaagatatttccttttctaccataaccctcaaagcgctccaaatgtcctcttgcagattctacagaaagaatgtttcaaaactgctctatcaaaagacaggttccactgtgcgaggtgaaagcacacatcaaaaagaagtttctgagagtgcttctgtctagtttttatgtgaagatattcccgtttccaatgaaggcctcaaagccgtccaaatatccacttgcagattctacaaaaagagtgtttctaaastgttctatgaaaaggtatgttcaactctgtgacttgattgcaaatatcacaaagaagtttctgagaatgcttctgtctagtttttaggtgaggatattcccatttcctacatagccctgaaagtgcaccaaatgtgcacaagcagattatacaaaaagggttcttcaatatgaactttaaagtagttttttccaattctgtgaagaaagtcattggtagcttgatggggatggcattgaatctgtaaattaccttgggcagtatggccattttcacgatattgattcttcctatccatgagcatggaatgttcttccatttgtttgtatcctcttttattt

SEQ ID NO: 769577 - DNA, 627 bp, Homo sapiens
gtttctgagactgcttcagtctaatttttctgtgaagatatttccttttctaccataaccctcaaagcgctccaaatgtcctcttgcagattctacagaaagaatgtttcaaaactgctctatcaaaagacaggttccactgtgcgaggtgaaagcacacatcaaaaagaagtttctgagagtgcttctgtctagtttttatgtgaagatattcccgtttccaatgaaggcctcaaagccgtccaaatatccacttgcagattctacaaaaagagtgtttctaaagtgttctatgaaaaggtatgttcaactctgtgacttgattgcaaatatcacaaagaagtttctgagaatgcttctgtctagtttttaggtgaggatattcccatttcctacatagccctgaaagtgcaccaaatgtgcacaagcagattatacaaaaagggttcttcaatatgaactttaaagtagwtttttccaattctgtgaagaaagtcattggtagcttgatggggatggcattgaatctgtaaattaccttgggcagtatggccattttcacgatattgattcttcctatccatgagcatggaatgttcttccatttgtttgtatcctcttttattt

SEQ ID NO: 769578 - DNA, 620 bp, Homo sapiens
tagtagacagaagcattctcaggaaattctttggatgtgtgctttcaactcacagagttgaaccttccttttgatagatccgttttcaaacactctttttgtagaatctgcaagtggatatttggagcactttgaggcctttggtagaaaaggaaatatcttaatataaacactacactgaatcattcttagaaactcctttgttatgtgtgcattcaactcacagagttgaacttctctttgatagagcagttttgaaacatctttttgtataatctgcaagtggatatttggactgctttgaggccttctttggaaaygggaatatcctcacataaaaactagacagaagcattctcagaaacttctttgtgatgtgtgaattcagctcacagagttgaactttccttttgatagagcagtcttgaaacactccttttgtagaatctgtaagtggatatttggaacactttgaggcctacggttgaaactggaatatcttcacataaaagctaggcagaagcattctcaggaacttcttcctgatgtgtgcattcaattcacggagttgaaccttccttttgatagagcagttttgaaacgctctttttgtacaatct

SEQ ID NO: 769579 - DNA, 491 bp, Homo sapiens
ccgttttcaaacactctttttgtagaatctgcaagtggatatttggagcactttgaggcctttggtagaaaaggaaatatcttaatataaacactacactgaatcattcttagaaactcctttgttatgtgtgcattcaactcacagagttgaacttctctttgatagagcagttttgaaacatctttttgtataatctgcaagtggatatttggactgctttgaggccttctttggaaatgggaatatcctcacataaaaactagacagaagcattctcagaaacttctttgtgatgtgtgaattcagctcacagagttgaactttccttttgatagagcagtcttgaaacactccttttgtagaatctgtaagtggatatttggarcactttgaggcctacggttgaaactggaatatcttcacataaaagctaggcagaagcattctcaggaacttcttcctgatgtgtgcattcaattcacggagtt

SEQ ID NO: 769580 - DNA, 505 bp, Homo sapiens
ccattcaactcacagacttgaaccttccttttgatagagcagtttttaaacaatctttttgtagaatatgcaagtggatatttggactcctttgaggccttcattggaaacggaaatatctacacataaaaactagacagagtcattctcagaaacttctttgttatgtgtgcattcagctcacagagttgaaccttccttttgatagagcagttttgaaaaactctttttgtagaatgtgyaagtgtacattgggactgctttgaggccttcgatggaaaggggaatatcttcacatgcaaatgagacagaagcattctcaggaacacctttgttatgtgtgcattcaactcacagatttgaaccttccttttgatagagcatttttgaaacattctttttgtagaaactgcaagtggatatttggagtgctttgaggcctatggtagataaggaaatattttcacataaaaagtagacagaagcattctcagaaacttctttg

SEQ ID NO: 769581 - DNA, 584 bp, Homo sapiens
ccaaatgctaggccaggagaatattagctttgttaataaaactcaatttaagttccctagtacatcctcacttcttgggattaagcctgggagatgagtgacactgagaactagatagccgtgtacatcactccatagtcttaatctcagctccttcwttcctaatgcccactgaggaagaccaccatggttcagttgaggttctgttattaacacagccttgggtggttccttagaggtgtatcaataaacctaccttgttaacccagaaaaacaacaaagaatactagggaaagtaggacagaattctcatgattaagtacttgtgtttttctttgcaggacttggaaaacatactggaatggtgagttacactaatgaactttgattgctgagaaagtcattcccttattgataaagacaatgtacccttgaaagtcaatgtaccattgaaaaaggtggggattaagttcattaaccaccttcatgcaattccacatagttgaaaacccaagtataacttctgacttttccaaaaccaaactacgaatgacctcttattgactggaagcctgttgataccg

SEQ ID NO: 769582 - DNA, 624 bp, Homo sapiens
cctggatgagtatccagcaggctgtctctttctatcacccattcttcctctagctccaactgcgcgattacctctggcttacaaagctgataccctattcacaggagtaacatacatcttaggagtttgtactgggaacaaaattctcagacacactcccaaccttttcaatctttagagcctctggaggggagacttcagaggcagcaaaataaagccactcatctcaaactcaatcaagacattccaytggaggagaaagagcagaaaacaaaggtctttgactccaaaactgattagcattcttctatcccagcccaaactatattcacaaaaactttgcaggcttctactagttcaggaaataaacccacgtgaacggcttccggtttcacagggatgccatcctcacccagtgcaactagattcctgtagttctccagcatcacgtctcgatagaggttcttttgggcagggtacagctggtcccactcctctctggtgaagtccacggccacatcctgaaacgtcagtgattcctgaaacatcaagcacatccctgctcaggcaaaaacggttcttacagggaccctcaagggagggaatgaaagtgtagcaccaggt

SEQ ID NO: 769583 - DNA, 612 bp, Homo sapiens
ctctggtagccagaatactactctctacttctatgagttcaactttctaagattttaaaaaccaccgtaggaattcaaagtgttgctttttcttagcccctttatgtccctatgacaatgactctatgtctattacaggggagactggaattggaaaatcgacactgatagacacattgtttaatactaacttgaaagataacaaatcctcacatttttactcaaatgttggacttcaaattcagacatatgaacttcargaaagcaatgttcagttgaaattgactgttgtggagacagtagggtatggtgatcaaatagacaaagaagccaggtgagtgttttcttatttaaattaaaaaagttttcttatttcaaggaatttgacttcctttgccatagactaatttgtgtaagtaataccttttcttccagattttaatattttcctaagtaatgttcttttcttataagattaatacttttgtatataattgactttcttacaagatttttatttagccagttatagcaaaaaattttaaatatagcttctattagttttagcttatttccttatttctttatttaactttatttgtacaaattttc

SEQ ID NO: 769584 - DNA, 640 bp, Homo sapiens
cctagatatttacgagaggacgccccataagtgtcatacacaaacccagctggtgatggtcacaaatgaaaaaccaagccccaattcccaaaaataaaacacagctgcaatcttaaaagcatgctgtataaaatgagaccataggtgccacactgccaatcccttaccctaacctcccgtcctgaggcagaagcagaaaaaccttgacctgaactttccgctgtgacagaggcagaaaaaaaaaggcagttctctgcagatatcttgacctgaatctcctgtgcaaagacagagattgaagccctcactcttaaggaaaagggaaggtttgaaaaacagcccaaataatgtctacaccttcacccaaataatgggaggtctgaattcaggagaacttacccaaaacacctgatgggattgctgaggatggggagttcatgctgrtgccaagcgccactttcaaagagcaacaccagtggtgagtgagagtcactcaatcctgcctccttaggccaggtatgttgacctaaaaggaagaagttgaggcaaagttaatctaagcggagagcttatttgggccaagcttgaggactgcaacttgggagcatagattcaagttgccatgaaaatacactctgat

SEQ ID NO: 769585 - DNA, 627 bp, Homo sapiens
caaggcgggcagatcacctgaggtcaggagttcgagatcagcctggccaacaatggtgaaaccccatctctactaaaaatacaaaaattagccgggtgtggtggcatgcacctgtagtcccagctactcgggaggctgaggtrggaggatcgcctgagcctgggaggtggaagttgcagtgagctgagatcgtaccactgccctccagcctgggcaacaagagtgacactcaaaaaaaaaacaacaacaacaaaacacacaacaacaaaaacagtgtccaccagctagaggacccagcttcctctttgggacactgtcattatcggtctttcttagcatttcccatgtcctcccagacacagcacacactgctttctctggttaacttgtcatcagggttttgtcaatgcttttgcaggctggggtgaagcaggttaccacatgcagccagggcaaggctctcaccaggggttcctcctggccctcttggtcccaggataatagaaggaccatatcagatgccctctcttcctccctttgggtctttccttaacccccctctaagaccctctaggagctatgagccccacctaaggaaagtgtctgagacagttattcacactaaag

SEQ ID NO: 769586 - DNA, 627 bp, Homo sapiens
caaggcgggcagatcacctgaggtcaggagttcgagatcagcctggccaacaatggtgaaaccccatctctactaaaaatacaaaaattagccgggtgtggtggcatgcacctgtagtcccagctactcgggaggctgaggtgggaggatcgcctgagcctgggaggtggaagttgcagtgagctgagatcgtaccactgccctccagcctgggcaacaagagtgacactcaaaaaaaaaacaacaacaacaaaacacacaacaacaaaaacagtgtccaccagctagaggacccagcttcctctwtgggacactgtcattatcggtctttcttagcatttcccatgtcctcccagacacagcacacactgctttctctggttaacttgtcatcagggttttgtcaatgcttttgcaggctggggtgaagcaggttaccacatgcagccagggcaaggctctcaccaggggttcctcctggccctcttggtcccaggataatagaaggaccatatcagatgccctctcttcctccctttgggtctttccttaacccccctctaagaccctctaggagctatgagccccacctaaggaaagtgtctgagacagttattcacactaaag

SEQ ID NO: 769587 - DNA, 561 bp, Homo sapiens
tcccctttattggtaatggagcttgtgtcaaggggtctgaggaaagcaacagcagatgggatccatcagtttctccatctggtcacctctccagttcagcatggtctaagctagcctcactttcccacgtactacgtatgttctgtgccccctccccaattctccccctttctgtagccactattccacttagcagcatcactgtcccctgtcacatcagcaggaaayaaggagccattcagctctttcatcctcagcccccactttcaaccatcaccaaggccttatttccatccttaaaatgcctctccactctcactgcctttgtcctatttgagtctcatcgttccgtggcctggttatttcagcactttcccaagtggcctcctagccttcatgctctcttcgtaatacatcctttacattgtctacaacagttctaaagacaaattccatcttgtcatgccttccagtacctccaattgcttatctgataaagtctaaattccctaccgtggcttatgaggctatggttgagaatttctagggtacccactcagt

SEQ ID NO: 769588 - DNA, 597 bp, Homo sapiens
ctccccacaccccccaatgcggcaaccaaagatccagtgacagctccattaggatccagcagcaccagatggataacttcccacagggttcccgcagccttcccaggaatgatccccagtgaatcatgcgggtgcctcagttggcttcccagccttggcctgccagccctccagagaggtgttttctgcttgccaatcctggccwcggttttctacacatctctacctcggagtggtgttttcttcttgtccagtggcctggagcaacccagaaaacttctgtgccatctcagcctcagggagggacgttcctcccgggagtatccttgcatgggggaaaagaacctccagaggtctgtagtagaaacagacttctgttacaaaaggcaaattaacaaaagaaaagcaaacaaatttattcacatatatacttcataatacatgggagatacacagagaatgagtagttctcaaagtggtggcttggaattccagcttagctggcatctttaacaaagaacagtacacttttagagaagtgacaggacaaaggaaatggattttgagtttctacaggcagcaacttgaggaaaggca

SEQ ID NO: 769589 - DNA, 597 bp, Homo sapiens
ctccccacaccccccaatgcggcaaccaaagatccagtgacagctccattaggatccagcagcaccagatggataacttcccacagggttcccgcagccttcccaggaatgatccccagtgaatcatgcgggtgcctcagttggcttcccagccttggcctgccagccctccagagaggtgttttctgcttgccaatcctggccacggttttctacacatctctacctcggagtggtgttttcttcttgtccagtggcctggagcaacccagaaaacttmtgtgccatctcagcctcagggagggacgttcctcccgggagtatccttgcatgggggaaaagaacctccagaggtctgtagtagaaacagacttctgttacaaaaggcaaattaacaaaagaaaagcaaacaaatttattcacatatatacttcataatacatgggagatacacagagaatgagtagttctcaaagtggtggcttggaattccagcttagctggcatctttaacaaagaacagtacacttttagagaagtgacaggacaaaggaaatggattttgagtttctacaggcagcaacttgaggaaaggca

SEQ ID NO: 769590 - DNA, 583 bp, Homo sapiens
tgagaatagaagaatatgtatatttccagttatctattgttgctgctatgtaacaaattagccctagatttattggtttaaaatacaaccattggttttcgctgtgttggccgggctggtctccagctcctaaccgcgagtgatccgccagccttggcctcccgaggtgcygggatggcagacggagtcgcgttcactcagtgctcaatggtgcccaggctggagtgcagtggcatgatctcggctcgctacaacctccacctcccagctgcctgccttggccccccaaagtgccgagattgcagcctctgcccggccgccaccccgtctgggaagtgaggagcgtctctgcctggccgcccatcgtctgggatgtgaggagcctctctgcctggctgcccagtctggaaggtgaggagcgtctctgcccggccgccgtcccatctaggaagtgagggggcgtctctgccaggccgcccatcgtctgagatgtggggagcgcctctgccctgccgccccgtctgggatgtgaggagtgtctctgcctggccgccccgtctgagaggtgaggagaccctctgcc

SEQ ID NO: 769591 - DNA, 458 bp, Homo sapiens
gcccaaggcttttattgggaacatatgttcttatggacgaatccttggatgccatgatatggaaggcagggtatgacaggcaattcagcctgccggtgtggagcagccttgagcactgcactcctggggttcaaaccgtatctttgatatttaacagtatgtgaccttgggcaggcttctaacctctcagtgcctcagtgtcctcatgtataaagtggagataataatgcctattttatagagttgtaacaaaggtgaaatgaattaacactcttagaatagtgcctggtaagcgcccgggagtataasaatgctggctatcatcatcattgttgctcagtcaagctagaaaatggttttggataaattcctaatgtgaatttgagactcttttgctctttttaaggaatttggcttaagcttcaaatttcagccatttttatcatgttcattgaggt

SEQ ID NO: 769592 - DNA, 623 bp, Homo sapiens
tacatttttataatgctattatctaatctacagaccttgttcaaattttgccaattgtccccaaaatgaccttttttagcaaaagaaaatcctggattatgcattgcattctcttgtcatgtctgtataacctcatttaacctgggccagttcccaggctttctttgctttgcatgatattaacacttttgaagagtactggtcacttagtttatagaatgtccctcaacttgaatttatctggtattttctcacaattagattcaggttacacattttttggcagaaatacaacaaaagagattttgtattttctcagtgcatcatatcaggaggtaagcaatgtcgattcatcccattacaggtgatattgaacttaaatattaggttatgatggcatctgacagttttataaatttactcagtrtaaagttatgggttttttgtttgtaattaataagtattttacagagtgatgctttgagactgtgtaatgatcctgttgttcatgactctttgagccactagctttagtatccattgatgattcaattgattaaacaatttctaccatgataattgcaaatggtgattttctaatttcatcacttcttctatactta

SEQ ID NO: 769593 - DNA, 623 bp, Homo sapiens
tttgcatgttatgccttaggatgtttctttactggttgtttttgttttgggtttttttgtttgtttgcttgtttgtttcctccaaaagaattttgtggattgtgttcactccatgagaatttttggcaagagatttgctacataatgtgccaaaggtggtccacaataaagcataaagcttaaattaatatacaacgtttgtgtgtttctctatgggagaactgttatattcctttaggagccttcataaaagacagcagagtaagttgtatagagctcttattcactcttaacttttaggctgggcscggtggctcacgcctgtaatcccagcactttgggaggccaaggcgggcggatcacgaggtcaggagatcgagaccacggtgaaaccccgcctctactaaaaaataccaaaaaaaaaaaaattagccgggcgtagtggcgggcgcctgtagttccagctactctggaggctgaggcaggagaatggcgtgaacccgggaggcggagctttcagtgagccgagattgcgccactgcactccagcctgggtgacagagcgagacaccgtctcaaaaaagaaaaaaaaaaattaagaatgtaaccattttggaaaaaag

SEQ ID NO: 769594 - DNA, 623 bp, Homo sapiens
tttgcatgttatgccttaggatgtttctttactggttgtttttgttttgggtttttttgtttgtttgcttgtttgtttcctccaaaagaattttgtggattgtgttcactccatgagaatttttggcaagagatttgctacataatgtgccaaaggtggtccacaataaagcataaagcttaaattaatatacaacgtttgtgtgtttctctatgggagaactgttatattcctttaggagccttcataaaagacagcagagtaagttgtatagagctcttattcactcttaacttttaggctgggcgcggtggctcacgcctgtaatcccagcactttgggaggccraggcgggcggatcacgaggtcaggagatcgagaccacggtgaaaccccgcctctactaaaaaataccaaaaaaaaaaaaattagccgggcgtagtggcgggcgcctgtagttccagctactctggaggctgaggcaggagaatggcgtgaacccgggaggcggagctttcagtgagccgagattgcgccactgcactccagcctgggtgacagagcgagacaccgtctcaaaaaagaaaaaaaaaaattaagaatgtaaccattttggaaaaaag

SEQ ID NO: 769595 - DNA, 557 bp, Homo sapiens
tgctcctttttctttcttttattctcccattcacttacttgcttctaccttgttttgatcaccttcctattttataaggataggaagaaagacaaggtgcgaaatatgagaagggaaatgaaagagaagagaataattaaatgcaagagaataaaacatgtagatacatagaattctggaaacagaatgataaatctttcaaggaagagcgaaatccaaataaaattgttaaaagctccatctgtgaacatacaagctagccaragggtggggttgaagttggaagtatttgggtttttaaagtcttcctatccatgaaataatgtacaaagtaaactaaaatattttattagacattgttaaatgtcattgaaagtcattttctaggaaaatgttgtttcctccaaacaactttgtaggtaataaattttcaatctaaaatctagaaaagacttcacaagttctaaagattttcatagaacctcagccatctttagttctccctattgaggatgttgcacatttttggaattgattcagagaacagttaagcacca

SEQ ID NO: 769596 - DNA, 564 bp, Homo sapiens
cctttccagaatcttcaaagagagacagagagcagaaggcttgattttcagaatcagcttacatgcctgttctatggcacagaagaggttacacaggtgttttgggcctttgaagctttcttttttctcatgttgtttccaaagagaaggtatgggctaaagcattcccgatggttcctaccagaggcgtcaagccaaggcaagcagatgtcagtgtcacattcacagccaatgagtgtaatatctgggttttcataactactcttctaaagaacataaacagaacacagtataaagatcaataaaacwaggggagatatgctcaatgccctctcatcccactgagttctccaaatgactccacatcctcctgcctacatttcctgagctccctgttagacaccaaaagtcactgaaagagctgttactgtgtatgctccaccttaaaggtacatcacatattcttcatcgaggttcaatatatagatcttaatcatctaccagatgtttttatttactagttgttatttaaaatagcttgtagggttccttttttatttcatt

SEQ ID NO: 769597 - DNA, 564 bp, Homo sapiens
cctttccagaatcttcaaagagagacagagagcagaaggcttgattttcagaatcagcttacatgcctgttctatggcacagaagaggttacacaggtgttttgggcctttgaagctttcttttttctcatgttgtttccaaagagaaggtatgggctaaagcattcccgatggttcctaccagaggcgtcaagccaaggcaagcagatgtcagtgtcacattcacagccaatgagtgtaatatctgggttttcataactactcttctaaagaacataaacagaacacagtataaagatcaataaaacawggggagatatgctcaatgccctctcatcccactgagttctccaaatgactccacatcctcctgcctacatttcctgagctccctgttagacaccaaaagtcactgaaagagctgttactgtgtatgctccaccttaaaggtacatcacatattcttcatcgaggttcaatatatagatcttaatcatctaccagatgtttttatttactagttgttatttaaaatagcttgtagggttccttttttatttcatt

SEQ ID NO: 769598 - DNA, 634 bp, Homo sapiens
aatttataaaatcagccactcttatttgtgttagaaagcttatgcatctaacttcaacactatttgttctctctttttggtattttagtcttcaaatgtgattattttgtggatgattttatgagaaattatgtttaataacatataatattttttaaagaaataattggtttatttcagaactgctaaaattgtaccatgtggctgggcatggtggctcatgcctgtaatcccagcactttgggaggccgaggtggttggatcacctgaggtcaggattttgagatcagcctggcaaacatggtgaaaccccatctctgctaaaaataaaaaataaaaaaaaaatagccaggagtggtggcagscacctgtaatcccagctagtcgggaggctgggccagaagaatcacttgaaaccaggatgcggaggttacaccgagctgagatcgtgccacggcactccagcctgggtgacagagtgagactccatctcaaaaaaaaaaaaaaaaaaaaaagtaccatgtactacataaatatattatatatttttattttttagaaaaagaagagaaaacaaaaaatacagtctacttattacaacaggtgtgaaaatttgagattaatacaattctaa

SEQ ID NO: 769599 - DNA, 598 bp, Homo sapiens
tgtgaatagtaacgggcaaagtcacactgcaaacccagtaagtttaatttcaaaattacacccttaaccgctatgtgatatatcacttcccttgttctgcacctttaggcattttaattaattatagcaatgaaaattgtgccataagctgtatctgaagtaatagaagatattctgagcaatgcaattaacattaaagttagctcctttgcatttgttttctataactattataacaaagtctcacaaactcaatggcttaaaacaacacaaatttattctcttacatttctgtagttttgaagtcaaactcagatcccactaggctaaaatcaagttgtgagtaagtccacatttcttcgggakgctctaggggacaatctgatttatttccttttccggcttctagaggctgcccacattccttgggtcatggccccattttacctccaaagccagccatggtgtatttctctctgcttttcttccatatttacattttcccctgacttctgttcccatatgtgattattatattgggctcacccaagtgattcaggataatctcgctacttaatggcagctgattattttcatc

SEQ ID NO: 769600 - DNA, 514 bp, Homo sapiens
atagtgctcatccaggaaaagcaaaaattgtcagggcctgagcaatggtggggcctaatatatatatattagtagatagatctttttattttaacattaaacagttttgtcatttctgtttctaggagcttccacctactttgctaagttgtattcctcttttaccctcccacccatgccatgcaaaatggctttctatattaggctatattaagacagactgctttatcctgacattgtcttcacacaaagtagccctttctcytcccttccctaatatctcactgatagaagttcccacaacctcattccacagtctcaggaaggggcgtgtgcacgtgtggatgtttcactcaaaagcactgtagaagacacataaaggtagtttgatacatcaagtagcttcttctactataaccagcacaaatacctctgctgttgaaataattcccatgggacattataaatcagtaagattgaccaagtatttactgaaattacctcctcatacaca

SEQ ID NO: 769601 - DNA, 615 bp, Homo sapiens
tctctctttttggtattttagtcttcaaatgtgattattttgtggatgattttatgagaaattatgtttaataacatataatattttttaaagaaataattggtttatttcagaactgctaaaattgtaccatgtggctgggcatggtggctcatgcctgtaatcccagcactttgggaggccgaggtggttggatcacctraggtcaggattttgagatcagcctggcaaacatggtgaaaccccatctctgctaaaaataaaaaataaaaaaaaaatagccaggagtggtggcagccacctgtaatcccagctagtcgggaggctgggccagaagaatcacttgaaaccaggatgcggaggttacaccgagctgagatcgtgccacggcactccagcctgggtgacagagtgagactccatctcaaaaaaaaaaaaaaaaaaaaaagtaccatgtactacataaatatattatatatttttattttttagaaaaagaagagaaaacaaaaaatacagtctacttattacaacaggtgtgaaaatttgagattaatacaattctaaaggatgctttaaagtgattttttgatcattttaaggatatcaaaaatt

SEQ ID NO: 769602 - DNA, 506 bp, Homo sapiens
caaatcttagctaaaagatcacatgttcaaagagaacaacatgactaccctatttaatagtgcctaacatctaatgtttcctcttccccttccctttccagctttatttttcttgagggcacttatcttcatgtgwcttactatctaccgtacttattttttctttattatctgtattccctcccttgccatatttagttagtttatgttcattgttgtaaccctaacactggaggagctcctgccctatagctggcccttaatagatctttgtaacattaatgtatgattaagaaaatgtttgtgatcagacatggtggctcacacctattatcctagcactttgggaagccaaggcaggaggattgcttaaggccaggagtttgaaaccagccagggcaacatagtgagacccagtctctacaaaaataataataataataatacaaaaaaaatttgccaagcatagtggcgtgtacctgtagtgctagctacctggaagtctc

SEQ ID NO: 769603 - DNA, 506 bp, Homo sapiens
caaatcttagctaaaagatcacatgttcaaagagaacaacatgactaccctatttaatagtgcctaacatctaatgtttcctcttccccttccctttccagctttatttttcttgagggcacttatcttcatgtgacttactatctacygtacttattttttctttattatctgtattccctcccttgccatatttagttagtttatgttcattgttgtaaccctaacactggaggagctcctgccctatagctggcccttaatagatctttgtaacattaatgtatgattaagaaaatgtttgtgatcagacatggtggctcacacctattatcctagcactttgggaagccaaggcaggaggattgcttaaggccaggagtttgaaaccagccagggcaacatagtgagacccagtctctacaaaaataataataataataatacaaaaaaaatttgccaagcatagtggcgtgtacctgtagtgctagctacctggaagtctc

SEQ ID NO: 769604 - DNA, 617 bp, Homo sapiens
ttgttgaatggatccctttaccattatgtaatggtcttgtctcttttgatctttgttggtttaaagtctgttttatcagagactaggatagcaacccctgcctttttttgttttccatttgcttggtagatcttcctccatccctttattgtgggcttatgtgtgtctctgcacgtgagatgggtttcccgaatacagcacactgatgggtcttgactctttatccaatttgccagtctaggtcttttaattggagcatttacatttaaggttaatattgttatgtgtgaatttgatcctgtcattatgatgttaactcgttatttttcttgttagttgatgcagtttcttcttagcatygatggtctttacaatttggcatgtttttgcagtggctggtaccggttgttcctttccatgtttagtgcttccttcaggagctctttgtagggcgggcctggtggtgacaaaatctctcagcatttgcttgtctgtaaaggactttatttctccttcacttatgaagcttagtttggctggatatgaaattctgggttgaaaattcttttctttaagaatgttgaatattggcccccactctcttctggcttgtagag

SEQ ID NO: 769605 - DNA, 604 bp, Homo sapiens
atgcctaagaaagtgctttgcctcacacatccttcatggccaggtgtactgaagtgcctgaaccaatgctggccctgttgtcctcaaccaaaataattttcttcatggaatatatttatgatggcttaaaaaaacttaaaatgcaatttaaaagtttctgggagaaccagagtatcagaatgaaagttagaagagaggagttggagatccagtattgctgctgactggctctttgacttggggcaagttaatttcagctttyccagccaaatggttgctaaggtgtcttacagctctagttttcattgtaacttgttacccagggaagcacactaccaaacttatccagtgagataagacaggaaagatttaatcacattctctctcaaccaaagttaatcagtcttcattatcagaaacttatttttttattacatatattagtttcttatgttgtgagttaatcctagatctctcagagaaaaatgtgtatttcctttcgcatcacctatttctattattgtggtttatttatgtatttatttttaataattagataagtggatcctgatgttaactaacaacttataccaatctgaaaagg

SEQ ID NO: 769606 - DNA, 549 bp, Homo sapiens
tccttttttattctctccctgtgcctgctacctatacctgctacactcaattaagctcatcttctaaacctgccatttttcagccctgttatctgggcagacacttccttcccaccttctaacaatgagactgcttggctggaaggggttaacttatccccagtgaggtwccttagtaacagcacacatcaaactgaagcgccaagcaatgctgcaggtcgttccttgattggaaaagaatgttgctaattttactcatgactgtcttatgttatttgctaattctaggatgcaatgccagaataagagcaatgactgcctcgccccacagacctgttgttgcacatatctgcatgcttcaatcaacagaacctgatgcaaaaaaaaaacagggaagagggagatgtgggagttcggtcaagctggtgggaaaaattttaagatgaagttataggatatagacacaaaccttcttggaaggctggaaggttttgcaaaagtctcaggatagggttatggctgaaagcagcctaatccttacctagagtt

SEQ ID NO: 769607 - DNA, 573 bp, Homo sapiens
tttccttctgttgtggtatgagaggatactttgtatgatttcaatattcttaaatctgttgacttgttttatggccaaacatgtagtctatgttggagaatgctccatctgcatttaagaatgtgcattctactgttgttgggtaaagtgttctgtatgtatcttttagttccaattggtctacagtgttcaagttttctgtttccttgttgcktttctatctgttttgtctgtaactgaaagtggggtattgaagtatcctaaaaccatgtgttgctatctatttctctcttcagttctgtattttcctcatatatttgacagctttaatgtcagatgcatatgtgttatttttatgatgaattgacccttttagtcatatatatatgttttatatataatatatatattttatatacatatattatatatatgattttatatatatatatataaaatccatctttgcctctgacagttttttcttaaagtctacattttctaagtatggccatccctactctttttgtattcctaattacacgaaatatatgtttctaccatttcactttt

SEQ ID NO: 769608 - DNA, 573 bp, Homo sapiens
tttccttctgttgtggtatgagaggatactttgtatgatttcaatattcttaaatctgttgacttgttttatggccaaacatgtagtctatgttggagaatgctccatctgcatttaagaatgtgcattctactgttgttgggtaaagtgttctgtatgtatcttttagttccaattggtctacagtgttcaagttttctgtttccttgttgcgtttctatctgttttgtctrtaactgaaagtggggtattgaagtatcctaaaaccatgtgttgctatctatttctctcttcagttctgtattttcctcatatatttgacagctttaatgtcagatgcatatgtgttatttttatgatgaattgacccttttagtcatatatatatgttttatatataatatatatattttatatacatatattatatatatgattttatatatatatatataaaatccatctttgcctctgacagttttttcttaaagtctacattttctaagtatggccatccctactctttttgtattcctaattacacgaaatatatgtttctaccatttcactttt

SEQ ID NO: 769609 - DNA, 601 bp, Homo sapiens
ctatttatatttggacagatagctcttaagtttgctaatatgaaaagttttatcttggaaaagcgggaaaaattagccatttcatggatgggacaagtgagtaaaagatcagacgggaggtaggaagaactggcaggttgaatctaataagatgagattaagttgattctaaattcggatacttgatatagggtggggcagatttgaggtttttgttgacagcatgctgaatttcaaccgacaatagcatgcagctttgtagaacaccattgtgctgtttatctgtattgctggagttttcaattttggccaaccacacttttgaaggaagaagagacaggataatgagagaacataaactatgtcatataagaaacagttaagtagcattttcccatgrttctgtagaaacttaatagataggctaaggacaattagggtatcatgctgaaacacttgagttaaagctggaaagttctttttaactgaaacttttcttggccttaaatatgcagatgatcattgtgatccttttaagagggatgcatagtgatttctcaggtgtgtttagacatcgaacacattttggagaccttttaat

SEQ ID NO: 769610 - DNA, 652 bp, Homo sapiens
ctagctccatcataataggtcataaacttccacatgtcagccatggttctttgtgtaatgttgcatacaaaatttgaagtctgtctttagaacggtttccctgaccaatgagatacatcatatggctaagacttatcaatagtttgtgatcatctaaggaaccctcatttggagcaaatgccttatacagcttattctgcaagaactacagcagcaaataattagtagctatgttcacaactcaaaattttattcagtataaacaagattaattgctcatccagaacatgacagaaagggacagtgtttgacatgaatgtgctaatttctatatttccagttaaagagagtagggatgaaaaactacaaagtactatgctcttcatataactrtacccatataataccacccaccacctgaatgtcttccatttgccaggcgttttacctatctatactatgactacagaagtgaaaagtacggctagattaataactgtgtccaggttcaaacagctgttacttaatggagtgggatttgactaacacagcttatatgcttctcatccaatcaccatggatctccaaatacaatgtgtggttggtaagctcaattgtcttgatttttattgaaagtgaaaaagctatgtgg

SEQ ID NO: 769611 - DNA, 668 bp, Homo sapiens
gtatagtagcagaaatgatcccttaggcaactaataatggcagttgcctatgtaaatacagcatttatagaaaactatagaaagtataaccacatagttattcaggactaaaggtttaaaacatcaaactgcttatcaataacaatagcatattttaaaattagatgagcaaagaggtgtctctaatcttgagtaaaaataatagaatttggccaattaaaagtagattcaattcctccaatctgccattctaaaatctaatgataccaatgataacttttttataagtctcaaaatctacaggcatagaaagtctaattttattgtcaaatcccatttcctgactaaatatgctaaattcaggatcaattatgtgacamataactggctgctggaaaaaaagacaaatattgtccttacccctgaggaatgcatccttctaatatgtgtaatgttttccttagaaaaataattttacttagaaatgatggcctatgtctgagtcctggctccagctcttattggctatgtcacctcaagtagtcaaatgggaacactcaaattgttctgaggattaactgagatgtttgatgcacaagtcctctgtattcttctacgtgctgtataaacataaggtattacagtgattattattagtactctatttg

SEQ ID NO: 769612 - DNA, 529 bp, Homo sapiens; identical to SEQ ID NO: 755995

SEQ ID NO: 769613 - DNA, 595 bp, Homo sapiens
gtatagctactcttgctattttgcagtttccatttgcatggaatatcttttccatttccatattatcagtttatttgtgtctttataggtgaagtgtagcttcttgtaggcagtagatcattattttttaaaaatccattcagccactctatgtcttttgattggagagtttagtccatttacattcaatattattgttgataagtaagggcctattactgccattttgttatgtgttttttggttgttttgtggtcttctcttttttctttcctttctgtcttcctttttgtgaaagtgattttctctggtggtatgttttaattttgtatttttttktgtgtgtatatctgttgtaggtttttaaatttgaggtttccatgaggcttgcacaaatatcttataacccattattttaaactgatgaaaactttgcaaaaacaaacaaacaagcaggaaaaactaattaataaggactccatgcattaacttcatcctcctgctttttaactttttctgtttctatttatatcttattatattgtctatgtcttaaaaaattgttgtaataattatttttgataggttcctcttt

SEQ ID NO: 769614 - DNA, 587 bp, Homo sapiens
tgaaatgtatgctggatagtttggcttgggaatctaggctctaacctggaaataaattctgattatgagtgctgtagtggccaaatcaaaggctaaaggtctttctcttatctactactgttcattccaaatgcatattttggccaaaccaaatattctagggatatgcaagtcacagcctgtggcctcaggaaaactagtcatagagatctctgaaaaaaagaaatctgtcacctcatttctgagggtgtacttattttccctgtgtttgaccttaagatttacttttaattatcacattgtacaggcctatgttgaactattccaaataattccattcrtttatagctgctttcctatatttctgctgacattatgtactggataaacccacttaattgactttcagacaataggcttaaagtactagataacattcatatttaaaaatgaattattcaaccatttataatgtatcatatctgattctatcactagaatctaacaatttgaaaccctgatatggttcttagggcccctaaggcactaagacgaattactactccccacctttacataagctcttt

SEQ ID NO: 769615 - DNA, 574 bp, Homo sapiens
  misc_feature 1, 2, 3, 4, 5, 6, 7, 8, 9, 10, 11, 12, 13, 14, 15, 16, 17,18, 19, 20: n = A,T,C or G
nnnnnnnnnnnnnnnnnnnngtttaatttctgagtgaaattttaaaagagatcagctttaattaaaaaaaaaaagaaagcatacaacatatttccgtaaagggggctatcaggatttctttgttctattctagcccactctgcaaccttcatttattttatcatacaattctaagatktctctctccaaaatgggtttaacatcccttctaaaagctgcagtggtatatctgcaaaacctgtcaagaagccctgatgaaaggcaatgccgaattgcaagcattattacaaagacaggtgtggtgttcaattcaaaaccagccacctgtgcgtcctccgttttcagagatgactcgcacatgttcatcacagattccccaagtcacttatcgcctgtgcactccttagagggagaccatctggaattgcagagttttctattcttaagctcttttaatttttcaatcacctgccctgacataagacgggttcattttctgtttatagtatgtctcatgggcagtttatggatctgtttctggcattttccctccaatcatcttgggaatcacagc

SEQ ID NO: 769616 - DNA, 506 bp, Homo sapiens
gtctggcttcactcggcataatgttttcaaggttcatccatgttgtagcatgtatccgaatcacattctttttacaggctgaataatattccattccaatatgtacatagcacatttggtttatctctccatctgtagatgaacatttgagttgtttccacyttttggtacttgtgaataatgctgctacagaacactgaagtacaagtatttgtttgagtccctgctttcatctcttttgggtatatacctagaagtggaactgctagtacctatgctaagtcaatgtttaacttgttgaggagccaccaaattatttctattgccgcaacatcattttacattctgatcagctatgcacaaggtttctaatttctacacatctttactaatacttattttctgtttttttgataagagccattctaatgggtatataaagcagaatctcattaaattagatttgctttgtaaactatttattaaaaataagagacacgaagaga

SEQ ID NO: 769617 - DNA, 506 bp, Homo sapiens
gtctggcttcactcggcataatgttttcaaggttcatccatgttgtagcatgtatccgaatcacattctttttacaggctgaataatattccattccaatatgtacatagcacatttggtttatctctccatctgtagatgaacatttgagttgtttccactttttggtacttgtgaataatgctgctayagaacactgaagtacaagtatttgtttgagtccctgctttcatctcttttgggtatatacctagaagtggaactgctagtacctatgctaagtcaatgtttaacttgttgaggagccaccaaattatttctattgccgcaacatcattttacattctgatcagctatgcacaaggtttctaatttctacacatctttactaatacttattttctgtttttttgataagagccattctaatgggtatataaagcagaatctcattaaattagatttgctttgtaaactatttattaaaaataagagacacgaagaga

SEQ ID NO: 769618 - DNA, 633 bp, Homo sapiens
ataataaattgctgaccagtatcccatgttaacacagacacaacaattgttactttcagaaaattaaattaaggaaaatatttaaaaagataacacatctttaccaaccggctttatctcaagaatgcaaggttgattttacatttgaaaatcaatccatgtatctcattgtttattacaataaaggagaaaagccctgttaaatcaagtttgacttaaagctgcctccttacatattttaagttcggcctaaagacttaactgtacatcttgaattataacaagtggaggtgtaaacagaccctagcctaccsttgtgccagtgactgagttttggccaatcaaatgtagccaactctttgaaccattttcaaataaggcaaactctgagttataaccaatccagctgtttctgtacctcactttcctttttctttccataaaatcttcttctgccacatggttgcactagcgtctctgagcctactctgactcaggaggctgccgattcgtgaatcattcattgctcaattaaactcttttaaatttaatttggctgaagtttttcttttatcaaccataatagatgcaggaaaagtatctgacaaattttattacccatttatgttaaaa

SEQ ID NO: 769619 - DNA, 633 bp, Homo sapiens
ataataaattgctgaccagtatcccatgttaacacagacacaacaattgttactttcagaaaattaaattaaggaaaatatttaaaaagataacacatctttaccaaccggctttatctcaagaatgcaaggttgattttacatttgaaaatcaatccatgtatctcattgtttattacaataaaggagaaaagccctgttaaatcaagtttgacttaaagctgcctccttacatattttaagttcggcctaaagacttaactgtacatcttgaattataacaagtggaggtgtaaacagaccctagcctacccttgtgccagtgactgagttttggccaatcaaatgtagccaactctttgaaccattttcaaataaggyaaactctgagttataaccaatccagctgtttctgtacctcactttcctttttctttccataaaatcttcttctgccacatggttgcactagcgtctctgagcctactctgactcaggaggctgccgattcgtgaatcattcattgctcaattaaactcttttaaatttaatttggctgaagtttttcttttatcaaccataatagatgcaggaaaagtatctgacaaattttattacccatttatgttaaaa

SEQ ID NO: 769620 - DNA, 589 bp, Homo sapiens
ctctgcttgtcagtccactatgttctgctttcttctctcagttcacaagggcagcattttgtgcctagtcaccacccaactgaatttgttttgagaaaaggcgaagggatgatggtcatgcataggagaggtgaactcagtgtctcatttgttcccatctaccaagaactgggtgtatgagagctattgtccaataaccaagagaagatgattttgatagtttaaggtgtttccccaggcccttttcacaaaatagatcttcaggccccaagatttctccctgatattcaacagaatcaaaaaatgattgattagtgaaaaagatattcagcattatccttggcattagacattggaawtgaatacacatagaaaactaagaaatgaaagctctccgataagatgctacatgagaaattcatctcataatgtagacctaactaaattttatttgatggagaattggtatgctttcttctgttaggtaagaaccatgtaatccactgtttctcttcctgtactgccttgtaggaagcctactgataagcccacttatttttgaggaagagaacatctcatctttgtatta

SEQ ID NO: 769621 - DNA, 610 bp, Homo sapiens
tagttgcaaaaagcccatattatttgcacaatccatttgggttgacttgaaattattagaatgggaaaatcttattttttgtaattgtttaaaataaatctcagtagtagctgtgatatattctgtaatttgtctcactcaacatgcattccaaatcatattttctcttgtgtccgctagtagagaagctgaaaagcaaaacacttttttaaagcaccttccaggtagggatggtcatgagacacaggaatagccaatgagctaaagagaaagactgccaggagggactttcttccctaaataaaaaaacaaagactctttgaagagattcaggtgtcttgagtgcagcagtcarcttgtgacatgaggcataaacatgaagacaaatgtctacaagctaagaatgagaggggtggaaggatgaaatgagtcaagtccctaatggcatccctggatgatgcaccaccccagctcaggactgccaactgcagcacttcctgttgtatttaacaaataaattccttgaaatttaaaccacatttctggctttaagtttcctggtattttcagccaagcaaattcttaacagatacatcacctaggtacaaat

SEQ ID NO: 769622 - DNA, 608 bp, Homo sapiens
tacccaaagccctacattgcctccctgtttcattcagagtaaaagcttaggttttataataatctgtaaggctctgcccccttcataaattctatgacctcatctcctactattttttcctttactcagtacacccatccacaccaagctctcagccacttcttcaacacactcttatgttataaggcctttgctccagctgtacccactgtctggaacttttccttcatcttaactgtctaactccattgcttccaagtgttttcttagatattttccccaaaagagccctcctgctaatactgccattttcactccttgccctaccatggcattctcaatctccccttacctgctctaccttttcttttttccatagcaataaccaccttctaaratatatattacttaggctatgagcatcatgagagtaagaaccttagtctgttcctttactgttgtacatcaagagtctaaaatagtgtctgtacacagcagctgttcaattgatatttgttgaataaacagaataatgtatgactagatgtggatttctcttcctttactctccttagtataatgagggcttcctatatctatggatccat

SEQ ID NO: 769623 - DNA, 369 bp, Homo sapiens
aaaattattttgtgatatttggctatctatttttgggaaaaattatttttctactacatacctgtcttagttcgctcaggctactataacaaaataccataaactgggtagcttataaacaacagaaatttatttctcacagttctagaggctgggaagtgaaatgaaagatcagggtgctggcaratttgttgtatggtgagggccctcttctgggtcatagactgctgacttctagctgcacctttacattggtggaagggtgatgccactctctggggccacttttgtaatggcactaaacccattcatgacgccttcactcttatgaccttatcttccaacagccccatttcctaaaaccatcac

SEQ ID NO: 769624 - DNA, 603 bp, Homo sapiens
ttagaaggatgatggaaatcataatctagcgtgagccactagactgttattcttcctagcttaagaacccaccccaactaccctgcccaattagggagactcccacttccatggatctcagcaaagcaaagggctacattggctttatycaggaaggtagacagcaactctgcatagccaaaaagcctgccctataaccctgcatagacagggagattctcgcctctgcagatctcagaaaagttaagtggctctacaccagcctaacccagaaaggcaagcagtggctctgagcagttaaaaaatcgacccaacaatcctgcccaggtagaaagattctcacctctgtattttttggagaaatgtaacagctagtcctgcttgatctgaaatgtcaaacagccacttatctaagccaaaagctcaccctacagctccacccagacagcgggacaatccccaattacacatttctaaggagcatagcctcaggtctcacctgcccagataagtgtctccatctaactttagggcccaacctgcagccatgcccaactgcagattccaaatagtggaaatgcccaagcagggggtatatcttgt

SEQ ID NO: 769625 - DNA, 633 bp, Homo sapiens
cacaaaaaccctagaagaaaacctacgcaataccattcaggacataggcatgggcaaggacttcatgtctaaaacaccaaaagcaatggcaacagaagccaaaattgacaaatgggatctaattaaactaaagagcttctgcacggcaaaataaattaccatcagagtgagcaggcaacctacagaatgggagaaaaattttgcaatctactcatctgacaaagggctaatatccagaatctamaaagaactcaaacaaatttacaagaaaaaaacaaacaaccccatcaatgagtgggtgcagaatatgaacagacactttaactgttttgaaagaatatgtggtaaatcaggatccccaggggacagactctgaggctctgagattgcatgtaaaagctttatgaagaactgcttttaggattgggccaagagaggttggactatgatgcatgcacagcaggggccccagccatcctacaggaagccctggggctgtggtggcccccagagttgtgctgccttgatgcacgcaagacagccatttcgtgtgggaagaccttggggatgggacatgaccttgggcaaggcagcaccgatggccgaggccagttcttggaggagaatcaactg

SEQ ID NO: 769626 - DNA, 623 bp, Homo sapiens
gagccgagattataccactgctctccagcctgggtgacagagtgcgactctgtctcaaaagaaaaaaaataattacaaaacactatttaaagaaaccagagataacacaaacaagtggagaaacattccatgctcatggataggaagaattgatatcattaaaagggccattctgcccaaagtaatttatagatttaatgcaattcctatcartctaccaatgacattcttcacaaaactagaaaaaaactattttaaaattcacatggaaccaaaaaagagcccaaataaccaaggcaatcttaataaaaaagaacaaactggaagtatcaacttcagtgttgaatcatacccaacttcaaactatactacagggctacagtaaccaaaacagcatgataatggtacaaagacagacacatagaccaatgaaacagaatagagagctcagaaattaggctgcacactgacaactatctgatcttttactaagctgacaaaaacaagcaatggagaaaggactccctacaataaatggtgctggggtaactggctagctatatgcagaagacttgagactggaccccttccctacaccatatacaaaaatcaacttaagatgg

SEQ ID NO: 769627 - DNA, 623 bp, Homo sapiens
gagccgagattataccactgctctccagcctgggtgacagagtgcgactctgtctcaaaagaaaaaaaataattacaaaacactatttaaagaaaccagagataacacaaacaagtggagaaacattccatgctcatggataggaagaattgatatcattaaaagggccattctgcccaaagtaatttatagatttaatgcaattcctatcaatctaccaatgacattcttcacaaaactagaaaaaaactattttaaaattcacatggaaccaaaaaagagcccaaataaccaaggcaatcttaataaaaaagaacaawctggaagtatcaacttcagtgttgaatcatacccaacttcaaactatactacagggctacagtaaccaaaacagcatgataatggtacaaagacagacacatagaccaatgaaacagaatagagagctcagaaattaggctgcacactgacaactatctgatcttttactaagctgacaaaaacaagcaatggagaaaggactccctacaataaatggtgctggggtaactggctagctatatgcagaagacttgagactggaccccttccctacaccatatacaaaaatcaacttaagatgg

SEQ ID NO: 769628 - DNA, 490 bp, Homo sapiens
gattttaatagtaaaaccgtgaaactaatctaagtgtctaaaactagagaacgatttaataatgttttaacagcctccaaaattatgttgaggaagaataagatatatcataacataaaaattgtgatacagattatagatgaaaaatttaggttacyaacaagaatgtataaaatattccattaattatatatacatatatacacatattttactattttatatattaaaagatatacagcattatactatgttggttatctctggggatcagattacaggttgtttttacttgcttccttgagatttttttctgtaatatctgaattttattcctttctttccaaatttggggaaaaaaataaggtttctgaaaattaaaaaaaatagataatatatcaagtttggactgcaaaccagagctttcagcagaacatagttgagtctttgccatagacaccaactcatttccttcctttctgtggcattc

SEQ ID NO: 769629 - DNA, 418 bp, Homo sapiens
agtttaaacctgttgttccagaacaattattaatagtggcctatttccttcttaatgctgctcatagtaaaatgatgacaatatttataagaacatcataagaacattgaccagggccaaggcaatgggcatataaaggaaggaaccaatgccagaataccaaaaaggaagaatgtgtaaagttactacatgaggagaggagggaggaatgaagaagggagagtaagaggtaggtccmaatttttctgccagatagattgcaatagtggtggtaacaatgatttttgaaaggggataaggggggaacctggaagtaacagggtttaaagagaacaagaattagtttgctgtgaactgttgagttgtagtagtgaggatctaagttgatttgtcacttgtagagttgtagatgaagctt

SEQ ID NO: 769630 - DNA, 543 bp, Homo sapiens
gactacaaatgaatactcctctaataaagaaaatactcttttctcgaaaagccaagagatatttggaaatttaggacatcagtagttgtttaaaggaaaggtttggaatagtacaatgaataaagctggttagctgccatttataaaactactgagtttttgacccaaaagctgggtgctagtttgttacctgttgcccctcagctccagatccacccttctttgctctattctgtgatgctggggctgggatgtggctatttcccagagtcccttgccagagggctttctattcactggaagaagactggaaggtgaggagaaggaacttcctttctcctttttcatgccccaggagcatcctccagtagtcackgctgtctggagtatgggcctctttctacatttccaaaaccagtccctttgcgtccctcagaggttctagcagcagctggttggcttcctttcttagtggtccaagcaccagctccacaggactacttccttgagttcttaggtcctactaatttcatctcctctttt

SEQ ID NO: 769631 - DNA, 489 bp, Homo sapiens
gggactagcaaggaaactttcccttaatgctagcagcatgctgctttctaataatacactggctctcagcacaatcatccaaggtgctaaaacaaacaggatagagatgtcttcactgaaatgtaagaaatcacctgtgaattcaataaaatccatgttagctttctgaaatactatgtccaaaaatgtccctgtractatgataccaactcaaattcctcacacaattatattttaaatgctgtcctaggtctgaaaactcaccacctggaaaccagatttaaatatataacgggggctgatattctttataggaggtcaaacataggcacagcattgtattatcgaaactagctcaagatagaaatatgaaaaaacatttcacaacatttggaaaagccaagtaattaatatctaaagatggtaagtgatagccctaaccacatgcatgtatacttcgaagatgcaagaaggtacatttttctttgg

SEQ ID NO: 769632 - DNA, 492 bp, Homo sapiens
attaagatctattttatttctttaaaaaattacatgagatcttccagggaccatgtaatgagcaatagttagcatataaagtactccagacccatccaaacatttgtcaacactacagtataaacattattcctttattttccaaatttctggtgtagagtgtgttgcaattgttggaaactagactgagattaaacagtgagtaatactcagtattgcaacctgtcgtttccaatttcctgaaccatcaggagaatacagtgcctctttttagtgttatttatgaaccatagcttttgcatccattttgcaattacacatggycaacgtttaatatataaagtcatgaaaactctttggaatctaattgtttttttcccctctggctggaacgaatagttaagcagaggaaactgtaaagaggttcatgtagatttcacagaatgtgttttatgatctttttgcatcatgagtttggctctgtctccaggg

SEQ ID NO: 769633 - DNA, 658 bp, Homo sapiens
tagcataactgtcacatttctaccacttatatcctataacaaaaatggtttagaatataaaatgagataaaacacatacctaattctacttaagtgaatctgtgataaatgtacttggtttcttataaaggaaaaattcaatgttattctactaattgattgtgtcttctacataagagtctgttagtaacttacctgagtttatttatatcattattacttttaatatacaatgttctctgaatatatttgcacttcaataaggagagacagaatgaaacaaaccattaatgtgttaaaatgttatatatactaagggacaacataatatttatggtaaaaataaagttataaagtattttttgtccttcttaataagccctaaaaaatgaacccataaaattgaattactttttaagcctaaaagcaaaaacaaaccaaacaaaggacagctgaagctgtattttgccratagattactctctctttgtgtatgggtatgtgtatgtgtactgttacaatgaacactctgccagaatacatgaatcattctaattatctaggagggaaactgcaaaacaaaacataaaatcctaaccgtcaaatactattaactaaaactaatttacagaatttctcaatttttatgaaccaaatg

SEQ ID NO: 769634 - DNA, 457 bp, Homo sapiens
caaatacaaacacacttaccactgaaaaaagcatattatttcttgttttgtgctcaaatataaaacatattggttagcatgtcctcctgttacctattgttaataaaacaagagacccaacattcttcatgttcaccagagtttcctttatgccaaatgtatacaggtgagtcatgcgtttatttcttaataaatcaacgcatgttttaaacaagctttaaatgtttgacaaacattcaaagaatgataaaggaatgataaatcctttgctactcaraataattttgttgatataccttataagcttatattttaatatacaggtagatcatacttaataacagaatgtcagaataattttggtagtggtgctatgaaagagggacaagttagagatgccagtaaatcagatagattgacaaagtaacatttaaattaaagtcaaagattaattagt

SEQ ID NO: 769635 - DNA, 571 bp, Homo sapiens
actttaattgtgaaaataggggaaatatctaccacttttattttaaaataatcttagatgaatgggaattcaagtattatatagaggatataatttgaacactaaaattcaggcagaaaattttgacaggtaatttctttagctaccacagcgatagattgccttacataatgagacacatataatcagcacattcattgtaatcaaagatgattctgggaaggtgtcactattcagagaaatagggatatgagggttgcatcaaaccttgagttttagtagagatttcsctcttgggttttaaatgctatttgcctttgtccccattgtttatattccagagatctctctaaatgtttatatgtatataaagctttaaggtaaagctaactgccacacattgaacttttctttcttctatgctttcagcaatgatttgtcaatatggcctgtggatcattatccattattcatcatgagcaatttctgcagcaatatttcccatcatcactgactactcttaagtatgatttatttttctcttttccaaatgttccccttcctctcaaat

SEQ ID NO: 769636 - DNA, 645 bp, Homo sapiens
aatctgtcactcttgtctacaggttctcagaaacatggcttgtaactaattggtcaatactgacgtaaccactattaaatcaaggtgatatcatgtgccttctgatgtgatgtattctaacaaattgcttaattggtgtctaatcatgaggaaatatcagcaaaggcaaataaagaaatattatgcaaaacaaataaacaaacacctggcctgtactcttaaaaaatgtcaacatcaaggaacatacacacaaaaagacagagaaactattctggagtaaagaagaataaagggacatgaaaattaaaggcaatgcataacatggactagggaagaaaagtactacaaagaacattattaggaawactgacaaaaatctgaatatgtactgtgggttaggtagtataattttatcaaggttaactatagaatggctatttggattttgataattatactaattttgttgactagactgtggttatttaaggaaatgttcatattcttaagaaattcacacggaatgatttcaggtaaatgcctctaacttactctgaaatgtttcaggaaaaatatatatgtaaatagattgatagatcaggaggagagagagtagatgataaagcaaatgaggtaaaatataaa

SEQ ID NO: 769637 - DNA, 655 bp, Homo sapiens
ccctttgcaaggcaccaactgtaacaccataaaacatggccctaatcttgcctaacaatgggggtgttatggatctgtttgtgagttcaaatctgaatcacaataaatttatacctttgtcaaaatatcctccaaaacagaaccattcacatcatactttatcttcattgttatcaagcaaatcactcaagccagaccctcccaagccttgaggttttacagcatcagttaacatgacctttattctcccagttccagcaaatgtttgcctatctcttcaaggggattcaaattatcctcatccctagacccttatgacatggtttaaggtgagaaagaaacttattactgatcaaatccttaaggatcaggaagaacagtgacwactctcttcaaagaaattctcacttctagccatttcaacccccttttatactgtgactaaagaactagggttgatgctgaggccatgaaactagaaattacctgaactctattcaaatcaaacttcacccattcttaaggtgttttggaaatacagaggtttctgcctcactcttgaattagaaaatatgttttaaaaacaatcgatatatatttgctaagattctctgagagatgaaaggaatgggacagggttgaccaggacaaagac

SEQ ID NO: 769638 - DNA, 636 bp, Homo sapiens
tttctaaacttttatgctctatttcccttttaagtataagttgcaggttcaggtcatttctttgtttttccagatgagcttagacttttagaagtagccaggctgcatcttgaccactttgctgcttggatatttcttccactagataccctaaatcatctctctcaagttcaaatttccacagatctttagagcaggggcagaatgccacctgtccctttgttaaagcatagcaagactagcctttactctagttctcaatgtttctcatctgtatctgagacttcctcagcctggacttcactgtccatatcactatcagcattttgatcacaacaatttaacaagtatctaggaagttccaagctttccctcatcttcctgtctttttytgagcccttcagattgttccaacctcttcccattatccagttcaaattcgcctccacattttcaggtgtctttataacaatgctccacttttctggtacaaattttctgtattagtttattcacacactgctataaagacatacctgagactgggtaattcataaagaaaacaggttcaattgaaacacagttcctcaggctgtataggttttgcttctggggaggcctcagaaaacttaacat

SEQ ID NO: 769639 - DNA, 634 bp, Homo sapiens
tttcttgaactaagaatttcaagacagcagcaacaaagcacgaatctcttcttaacacaggggcctgtgtaattacatacccacaaagctagccatgaatgggaccatcaacaaaactttctattgactcgcatttgtattgctagtgtgattgaagagacatgagaggtagttactaaagcatctttctgtacaaactaaatcaacggaaagttaccctccaaatgagtccacccatacctrtttatctgccatatccaaatgaacaagctgttgaaaacatggcagcaagggcaaaaagtagaggaattaagatacacatcaagccctgcagcttcctgcctttgatagaaatgtacaatagtgtactgtttgcaacatcctttcattcctctgctagagagttctggctcacacccactggagccttgtgaaaagatgcaacccgtacttaggaaaggggtcagacatgtttgttcattttcaatatcttttctttttatattaaaaaaatagaataaagatctataaacctgaattaaaactcttgagtttcaaactgcctcgttcttaaatcttcaacctcacataatatattcgtataaaatacaaataaagcccttaagaccatgac

SEQ ID NO: 769640 - DNA, 537 bp, Homo sapiens
tgtatttccaaatgcagcgtcatttcctaaagttgctttgaatattttttcaattcagttttctctatgtcttcattcatgttacagggctttcacaatcaaaatacttcattttataaattttctagtgcttgaatgagacactaaacaaggtaagtatagagaaaattatggaaacacatgaaataagcacatggaagcacgtggaagaaaatatttaacataagtagtgaaggggtagtaaacatcttttctgatctctaattcaaaatgaatattaatggtctataaattaaattatgtttctaaaatgcacattttaaaaatgaatattgatagaatrataacaggaaaatataaatggtcaagatggtggtccagttttattattatatctgaggccttatttacttgaattttcatgttgacaaaatggttaataattcctaggcaatagattaacattatattagcgacagtaccattataatattaactcaaaataattttctcattgtaaatttaatatttttgatg

SEQ ID NO: 769641 - DNA, 512 bp, Homo sapiens
tatagcccctacagtgttgttcaaattctgaactttttagcttccttttatttttcttactatttaacaatattagattggttatgttccaggaacaaatttcagtccatgggtaagtattcaatgtgaacttattcactgattataatagttgttgattgttcaataatatgagggatagaygagagctccatccatcatattataagagtatagactgtctttgactaaatgacatattaaaagcctaatatatgtcccataaaaatattaatataaggcattttgcaatttctttatttagttatttcaaattatattgtagaacatgaataaacagagaaatcaaactggtaagaatctatcttcattcttatcagcttgatctctgagtttaccttgggcttcaaaggaccaacatagagctaattgcaagggaaccagtaggtatagataatctagaagatgctgtgaatcctcttagaagagcaacaatagcactgttattaaat

SEQ ID NO: 769642 - DNA, 512 bp, Homo sapiens
tatagcccctacagtgttgttcaaattctgaactttttagcttccttttatttttcttactatttaacaatattagattggttatgttccaggaacaaatttcagtccatgggtaagtattcaatgtgaacttattcactgattataatagttgttgattgttcaataatatgagggatagacgagagctccatccatcatattataagagtatagactgtctttgactaaatgacatattaaaagcctaatatatgtcccataaaaatattaatataaggcattttgcaatttctttatttagttatttcaaattatattgtagaacatgaataaacagagaaatcaaactggtmagaatctatcttcattcttatcagcttgatctctgagtttaccttgggcttcaaaggaccaacatagagctaattgcaagggaaccagtaggtatagataatctagaagatgctgtgaatcctcttagaagagcaacaatagcactgttattaaat

SEQ ID NO: 769643 - DNA, 605 bp, Homo sapiens
ttaaaataagagttaagttttctgtcatagtaagtgcaggggttagcacttattgatattgacctagatgggaactgatgtccccaagaaagcagattcttttagtatttccttagtgctgtgaagtctgcccttatgctttttatttcctggatgcaagaaggctgctgcagatacagatattcttgcacattcaaaaccagaggaaaagtagaaaagggagtagaagttgcagttatccygtagtaaagcaattgctttcctaaaaatatcccataaacttccacttatatcttggccaaaactatatcttatagttgctctaggaaatgttcccaagaagactgggaaagcaatcccagcaaaatcaaggttctgttaataaggaagaaggggaaaatagatttggaaaggcaactcaccatgctcatcacaggcttcctgaagatttgtccttgaaaaaaacaacttgatgaaaaaatgaacaaaggtaaatatagttccttccacagaaaaaacttttaaagaggaattttaaaatcaatgcttaaaaattaacctcttttttttctgccatgtgaagaagtacagtttctaaatgcaaa

SEQ ID NO: 769644 - DNA, 622 bp, Homo sapiens
ttccacacactggaaaggtttattgaacaacagttgttctaaaatgtatacaattgttaccaattaggaatacatttggctaaaagtaacagaaaacctgactaacagattaaaataagagttaagttttctgtcatagtaagtgcaggggttagcacttattgatattgacctagatgggaactgatgtccccaagaaagcagattcttttagtatttccttagtgctgtgaagtctgcccttatgctttttatttcctggatgcaagaaggctgctgcagatacagatattcttgcacattcaaaaccagaggaaaagtagaaaagggagtagaagttgcagttatcccgyagtaaagcaattgctttcctaaaaatatcccataaacttccacttatatcttggccaaaactatatcttatagttgctctaggaaatgttcccaagaagactgggaaagcaatcccagcaaaatcaaggttctgttaataaggaagaaggggaaaatagatttggaaaggcaactcaccatgctcatcacaggcttcctgaagatttgtccttgaaaaaaacaacttgatgaaaaaatgaacaaaggtaaatatagttccttccacaga

SEQ ID NO: 769645 - DNA, 601 bp, Homo sapiens
aataccccaggaagtttaaggagatggttgccaggttgatacatatctacattctgcttcagagggagcagaagccaagttaagagctgcaaaggcaagatgctctagacgtttagcaaagataaatattagtatttttcatattttaaaatgaggttctctagcaaacttaagagtccggttctcttataaggattaaaattaactggttaccaattaacattttttttaaaagacctatgcctraggcagaaactttagaatgtgaaaacagagcctctcccagttttcatagcaattaacctcagtatttgccaatatacccttgatttaacactacctgtttataaggcaaatctaaaatttgccttataaatataaacatatatatttatatctgcctgtatattctaacatacacacacattttgccaaaaaggtatttaatttaatcctgacatatagctaaatatatggatcattttaaaataaaattttaaaaagcaatgcacaaaagttaaacagtccagaagtatacacaaagccaactgctcaacaattcccatttatttttcctctttctgggcatataaacagattt

SEQ ID NO: 769646 - DNA, 614 bp, Homo sapiens
aagcatcacatgtattcattaggcatatcccaattccctgtaatgtataacctgaaaattttaaatagggtaaaatgaattgaattaaagattagagaccaatatatctcactgaacaaaatacgagcactgtaatacatctcacaaatttgtcttaatctgtgttatatcatgtgactctgaaatagtttattcaatcaactratattaattaagcatttaatttgaccagtcatcctgctaggtgttggacatatcttggtaaacatgacaaatttggaactctctccagtgtagtaacttttgtaacaggtcctaatattgtcagtactgatgcatatggattcatagattacacaccacacacttctaggcattaccgtttgcacatacaatattaatggtccccccatgcaagttccctcagaggtcctgaaatccatatgtcatcataattctctgcttcttaaaaatgaatatgtggcccaggaggcatgtaacttatagggtaaacatagttttgagctttgaaaaataacatcacatcttattttttaaaataaaaacataaagttgaaaatccacatacaacttttaagataaaagactttcaa

SEQ ID NO: 769647 - DNA, 614 bp, Homo sapiens
aagcatcacatgtattcattaggcatatcccaattccctgtaatgtataacctgaaaattttaaatagggtaaaatgaattgaattaaagattagagaccaatatatctcactgaacaaaatacgagcactgtaatacatctcacaaatttgtcttaatctgtgttatatcatgtgactctgaaatagtttattcaatcaactgatattaattaagcatttaatttgaccagtcatcctgctaggtgttggacatatcttggtaaacatgacaaatttggaactctctccagtgtagtaacttttgtaacaggwcctaatattgtcagtactgatgcatatggattcatagattacacaccacacacttctaggcattaccgtttgcacatacaatattaatggtccccccatgcaagttccctcagaggtcctgaaatccatatgtcatcataattctctgcttcttaaaaatgaatatgtggcccaggaggcatgtaacttatagggtaaacatagttttgagctttgaaaaataacatcacatcttattttttaaaataaaaacataaagttgaaaatccacatacaacttttaagataaaagactttcaa

SEQ ID NO: 769648 - DNA, 670 bp, Homo sapiens
ctgcaatggggattgtaaaataacttttcagccttgcacttgctcatatatgttttgagaaaaatgtaagttaggtataacttattgtttaaactattataaggcagtgtttacataaattaatcatctctttcttggaaaacattgagacaaatttattttcagttttacttaaacatgaaacctgtattttagttgctttttgttttgtccagaaatttccagattttgtcttcattttttttcctggttaaaatctaaaccatagtgaagatagtatttatgtttacattttatctgtgaatgtggctaagcagagaagctacatggctttggtctacatattttttgaccttgtatttggttctgtagttgcagacttgtgaaggcttacatcatcatggagactttagtaaggaaggaaccaaaaggtttttggtttggggatgcaaactggaggttatgttacaagtcttcaatgcattttctgtgttcctggcagcagtgttgcctttttttttsttttccttttttttttttaaagaccaggtagggtagtgttattgaagggtaattgaagagtggtagagagtaagaggttttgaaggaggcaggtttgctgttatcacaaaataatttgggggaaacctttcgtggctgtgctgcaaga

SEQ ID NO: 769649 - DNA, 571 bp, Homo sapiens
tatatgggtgtatatatgtgtagaacactctggaagaataaataagaacatggggagctgtgtcttctgaagggcctgggggagaggtatgggacaggaatgtatttttcctatacagctttttgtactgtttggatatttttaaaccacatactttacgtgtattctttaaaaagttaaaacagagggggcgcggtggctcacgcctgtaatcccagcactttgagaggccaaggtgggtggatcacctgaggtcaggagttcgagaccagcctggccaacatggtgaaaccccatctctactaaaaatacaaaaaaattagctgggcktgggggcacatgcctgtaattccatctacttgggaggctgaggcaggagaattgcttgaacctgggaggtggagattgcagtgagccgagattgcaccactgcactccagcctgggtgacatagtgagaccccgtctcagaaaaaataaaaaataaataaaaaataaataaataaaaagttgaaatataaaaagtatagacattcagccagattcacccacattcattgcttgtccgcttc

SEQ ID NO: 769650 - DNA, 571 bp, Homo sapiens
tatatgggtgtatatatgtgtagaacactctggaagaataaataagaacatggggagctgtgtcttctgaagggcctgggggagaggtatgggacaggaatgtatttttcctatacagctttttgtactgtttggatatttttaaaccacatactttacgtgtattctttaaaaagttaaaacagagggggcgcggtggctcacgcctgtaatcccagcactttgagaggccaaggtgggtggatcacctgaggtcaggagttcgagaccagcctggccaacatggtgaaaccccatctctactaaaaatacaaaaaaattagctgggcgtgggggcacaygcctgtaattccatctacttgggaggctgaggcaggagaattgcttgaacctgggaggtggagattgcagtgagccgagattgcaccactgcactccagcctgggtgacatagtgagaccccgtctcagaaaaaataaaaaataaataaaaaataaataaataaaaagttgaaatataaaaagtatagacattcagccagattcacccacattcattgcttgtccgcttc

SEQ ID NO: 769651 - DNA, 571 bp, Homo sapiens
tatatgggtgtatatatgtgtagaacactctggaagaataaataagaacatggggagctgtgtcttctgaagggcctgggggagaggtatgggacaggaatgtatttttcctatacagctttttgtactgtttggatatttttaaaccacatactttacgtgtattctttaaaaagttaaaacagagggggcgcggtggctcacgcctgtaatcccagcactttgagaggccaaggtgggtggatcacctgaggtcaggagttcgagaccagcctggccaacatggtgaaaccccatctctactaaaaatacaaaaaaattagctgggcgtgggggcacatgcctgtaattccatctactygggaggctgaggcaggagaattgcttgaacctgggaggtggagattgcagtgagccgagattgcaccactgcactccagcctgggtgacatagtgagaccccgtctcagaaaaaataaaaaataaataaaaaataaataaataaaaagttgaaatataaaaagtatagacattcagccagattcacccacattcattgcttgtccgcttc

SEQ ID NO: 769652 - DNA, 600 bp, Homo sapiens; identical to SEQ ID NO: 764998

SEQ ID NO: 769653 - DNA, 600 bp, Homo sapiens; identical to SEQ ID NO: 764999

SEQ ID NO: 769654 - DNA, 589 bp, Homo sapiens
tctagcaattggagattgctgaatcatatggcagttgatcatatgatccagcaatcttattgctgggatatatcctacttttagttttgtggcccaacatatggtctatggtctatgctgggcaatgttctatttgctgatgagaagaatgtgtaatctgttgcagctggataaaatgttctgtaaatatgtgttaggtccacttggtctaraatatcatttgcctccaattattttgttgatttttgcctagatgatctatccattgttgatttttgcctagatgatgtatccattgtcaaaagtggactatttaagtcccttactattattgtgtattgtagtctatctttccctttagatctgttaaacttgttttagatatttggtgcatacatatttactattgttatatcgtcttgctgaatttacccctttataattatataaagaccttctttgtctctttttatagttttttacttaaagaatattttatctgatgtaagtatagctacttctgcttttttttttggtttgcatttgcaagggatatctttttccattcctttactttcagtttatgtat

SEQ ID NO: 769655 - DNA, 564 bp, Homo sapiens
ccactggtgaggcctcatcttcatgacctaataatcatctcccaagggccctacctcccaataccattacattggttattaggtttcaacacataagttttggtgggccacaaatattcggtccatagcagtttttcatccaataccgttatgtcaatcaacagattaatggataaaaarcgatgtggcatatatactcaatggactactagttagccacaaaagaagaaaactttgttatctgcaataacatggataaacctggaggacattatgttgagtgacataaacctgacacagaaagacaaatattccatgatctcattcatatagaatcttaaaatgttgatctcacagaagtagggagtagaatggtagttaccagaggctggagtggttaaggaggaagggagtttggagagattgtggtcaaaagatagatatttacagttaggaggaataggttcaagagaagtatgtacagtatgatgactacagttagtgacaatatattgtatctttcaaaatgccaagagagtgcatgttaagtattcttactataaa

SEQ ID NO: 769656 - DNA, 450 bp, Homo sapiens
atctagaaaatagcaacattccattcattagaatactagatccagtagtcttaatttgagctcattttttgtatccttaggtatggcctcctgctatttaaaagggtgtggcacagaaagacaaataccatatgttctcacttttaagcaggagctaaataatgcatacacatggaagcagagtgtggaatgatacacaatggagacccagaggggtgaggtggtgggaaggggtgaatgatgggaggttgcttggtggctacaatgcacattgctccagtgatggaggcactgaaggctctcacttcaccacagtgcaatatgtcaatgtagcaaaattgcagttgtaccccatgaatayatacaaataaaaaattaaaaggtatgatagcagatagctaccaccagtcctagtcaagctgccccaagcagagatgcatattcaataac

SEQ ID NO: 769657 - DNA, 612 bp, Homo sapiens
tactctgtacatcccgaatcatgtattcctggcaatctgaataactctgcttcagttcctcacttggaaaatagaggttgtaatgtacccgcatcctagtgttactttatatttctattcaacagtgccctttctttccctgcccgctttgctttgcttgcctgcctgcctgcctgcctgcctgcctkccttccttccttccttccttccttccttccttccttccttcttccttccttccttcctctctttctttctctctctctttctctgtttagctttcttgcttgccaaagtggcatccccttaattgcttccttttttctataataatatcctaatctactttatatgaagttgaaacaaaattgattcaactttttcttggccttcaaatgggtgtttctagccccctcaaagaaaatgtagtaaatttaaatgagcagggaaatataatgtttaaactatgatttggattatcctttgttttctatatggagccctttttcccccaagctgagcagcactatggtagctatcacattgttatcgctactgctttgttttattcattttaagacacatatgtttttcacatttcaacatctctga

SEQ ID NO: 769658 - DNA, 682 bp, Homo sapiens
ctgacacatccacaaacaccaagaccatccaggaaaatatgacttcaccaaataaactaaataaggcaccagagaccaatgctggagaaacagagatatgtgacctttcagacagagaattcaaaacagctgtgttgtggaaactctaagaaattctagataacacagagaagcattctaccagaaaaatttaataaagaaattaaaataattagaaaaaaatcaagcagaaactctggagttgaaaaacgcaactgacatactgaagagtgcaccagagtcttttaaaaacattaatcaaacagaagaaatagttagtgagcttcaagacaagctatttgacagtacacagtcagaggagaccaaagaaaagcaaataaaaaacaatgaagcacayctgcagaatgcagcaaatagcctcaacagggcaaatctatgagttattggccttaaagaggaggtagagaaagagataggggtagaaagtttatttagaaagatagcaagagagaacatctcaaacctagggaaagacatcaatatccaagtacaacaaggttatagaacaccaagtagatttaatccaaagaagaccacctcaaggcatttaataatcaagctcccaaatatcaaggataaagaaaggattctaaaagcagcaagagaaaagaaataagtaaca

SEQ ID NO: 769659 - DNA, 622 bp, Homo sapiens
gtctctgtagctttctcctttccaggtagctgccttaataattccagctatcttggtcttcctgaactgcctccttgactcaagaaaactaccagtctttgtttgggtctctctttcctgcattgcaggccaaaaaccctcttcaggccataaactggggcattcttagatctcaccttatttctttcctttaccttaacactgcctgttgtgctatgtctgaaaactgttgtttcatgtattttgttcactcttatagttatttcagtgaggggggatgcgtatctaattcctgttactgttacttcttttgtttttttttttttttggagacggagtcttgctctgtcgmccaggctggagtgcagtggtgcgatctcagctcactgcaacctctgcctccccggttcaagcgattctcctgcctcagcctcctgagtagctggggctacaggtgcacactgacactcccggctaattttttttggattttagtagagatggggtttcaccatgttgcccaggctggtctcgaactcctgagctcaggcaatctgcccaccttggcctcccaaagtgctaggattacaggtgtgagccactgcacccagtccctgtttct

SEQ ID NO: 769660 - DNA, 598 bp, Homo sapiens
ggcagcttgtttctcattggacaatcttttttaaggtgtccttgaaaaccacactgataacaagccctactgggtgattggcctgctccattttctgtcctctctgaaccaccaaggtttgtttgtctgagggccatgactaaggctgtggcctgtctctgatctcgcttttccttttgggcctgttcctcttggtccctattatagaacaccgaggtttccaggtttaataatgcctccagattttgttcagggcccagggctcccttctggagctttctcctgatatctgcagctgattaggtaataaacttatcttttagaatcaactgaccgtcgagtgagtcrggtgacaggggagtatattttcttaaggcctcctgtagccgcttaagaaaggcaggattttcttcctttccctgagttatggtagacatcattgaataattcatgggctttttcctaattctccttagtccttccagaacacaggtcaacagatgtttacaactccagtccccatgatctgagttgaggtcccagtggggatccatactggggacagcttgctgactggtagggaatttgttcctttctt

SEQ ID NO: 769661 - DNA, 623 bp, Homo sapiens
accttccatgtttagcttgcttaattaatcttcacaacaaccctaaagaaagtctgacactcatttcacagttaaggaaaatgaggcacagacaggttaagtaactgcccaagatcacacagctagtcagttatctgaaaccccrgagtcagcatggctccgtgattcctgcttcagcacagactgtgatgtcaacactgtgctagtctttacgaccgtccacctgtgccagctcaacattaaacagggccaagaaagcagctccagctttacctggagcaatgtgtatgacagtgaataactccttcaaataagaaatatgccaaaaataatctcatattgagagttgtaaattctaatcttgtaaatcaggctaataaagatataacactaagcataaatgttgaaaatgagtaacaaaaaaaggttattcaaagatctgctaagaaaaccagtaacgttaagaataaaatcctgctcgcgtctcagcaactccagagcagacaagctttaatgctgtcaggaaatcctgtgtgctggtggcacaaagaccctccctgtgtgcagcgctaccccacggggaactgagggaaacagtccctgagcctcagccaggcgatagg

SEQ ID NO: 769662 - DNA, 644 bp, Homo sapiens
aaacttgtgttatttaaaggttaactgtacattaatttatataacacaagcctctttgtccagattttatagaactatataggaattcagctctcaaaatccggatatttgtcattatgtagggtcaattgagttatgtctccaagttcaattttaaaagaaaactcaaattgctaacatttatctaaacttagttttaacaactttaagaaagaccaaccactcttattaataccagaggcctttagggaatataataaagcattrtgttacatataaagttatattctagtgataggcaataataattgttttatttcagttatttcattttttagtaatatgcagtattgtcacctgctttcttatgatttcactattgtttacaagaactaagctgaattgcaaaaaaaaaaaaaaaaagaaaccaaaacaaaacaaatctacactgtatttgttttaacatttttttctattatttcaatgtaggcaactctagaaaagttaacatccctctaaaaacccatttcccttttacttctaacttatcattttaaatttgaaaaggaaagcaggaagacacttatgctgttctttttttttctttttaaataaaactgattattttaagggaaggtaaagaa

SEQ ID NO: 769663 - DNA, 644 bp, Homo sapiens
aaacttgtgttatttaaaggttaactgtacattaatttatataacacaagcctctttgtccagattttatagaactatataggaattcagctctcaaaatccggatatttgtcattatgtagggtcaattgagttatgtctccaagttcaattttaaaagaaaactcaaattgctaacatttatctaaacttagttttaacaactttaagaaagaccaaccactcttattaataccagaggcctttagggaatataataaagcattgtgttacatataaagttatattctagtgataggcaataataattgttttatttcagttatttcattttttagtaatatgcagtattgtcacctgctttcttatgatttcactattgtttacaagaactaagctgaattgcaaaaaaaaaaaaaaaaagaaaccraaacaaaacaaatctacactgtatttgttttaacatttttttctattatttcaatgtaggcaactctagaaaagttaacatccctctaaaaacccatttcccttttacttctaacttatcattttaaatttgaaaaggaaagcaggaagacacttatgctgttctttttttttctttttaaataaaactgattattttaagggaaggtaaagaa

SEQ ID NO: 769664 - DNA, 483 bp, Homo sapiens
cacatacattttagaaaaaggcaatatgtctatacatgcccacattcttacatatgtatgattatctatagctaatcacatatatttacataaatgtacctgtgtgtatctacatatgttgatatgtaagcagacatagatatagatatgtaattctttgtacatttattctaaaaatttaaaagattactcaataagtgtattatatttcaaaactccagctctccaaaatcccataatatattttttaacattataaaaacaaaatattttaacttgacaatatascaactgtttcttaatacatgcaataattattaagataggtaagagaaaagcttcagaagatgaatagaaattgggaaatggaagttaataattgaaaaataaatatttttaaaacaccaaaaatgttgtatcttggaaataaaaatatacaagaataagaacatgtcatattagtaatagccctggctatagttt

SEQ ID NO: 769665 - DNA, 613 bp, Homo sapiens
ataaaaatatatctataacaatattggatccataggtgagaagaatatgtttatgtgtatgtgtgtagagagacagaaacttgtaagaggtttaaatattcatgtttcatcattggtagtgaggagaaaatcttacatggaaatatcaaaaaatagaaaaataacctcattaaattctgaaraatgtctatagtttcaaaatccaaaagcttgttgggagctacaatctgtattattaaggttattaaggatgtattatagtactagcagttgttctatttgtctatggaatgtacataagacatggatttcttctcatgagaacatgtatggctacacctactactgagtggttcattttcaatatttgatatcaaacgtgagcccagatatggcatcatttcttaggtggatcagccagatattaggtaacaagttgattacattgggtcaattccgtcatggaaaggggtagcatttttcttcatactaataggcacttattttgaatattgaaatatctttcctattcataaatcttccaacaaaaccatcatatttaatgtcttattcttcatcatggtggtggaaaattttccatagcattacttcc

SEQ ID NO: 769666 - DNA, 589 bp, Homo sapiens
ttatagcagcacctcgctctctgtggaccaatttactgtactagtttgttctcatgctgctaataaagacatacgtgagactgggtactttataaaggaaaaaggtttaattgactcacagttcatcatggctgaggaggcctcaggaaacttaccatcatggtgaaagggaaggcaaccatcctttttcacatggcggcagcaaggagaagaaggagtaaaaagggggaaagccccttataatccctcagatstaatgagagctcactcacatcacaagaacagcataagaatatccacccccacgattcaattaccccctgccaggtccctcccacgacacgtggggattatgggaactacaattcaagatgagatttaggtgggaacacagcgaaaccatatcgataacattatgctgactggacccagtgagcaagaagtagcaaacacagtaaacttatcgctgagacatttgcatgctagaggatgggaaaaaaatcttactaaaattctacctaagtgaaatttctagtggtgtggggtctgttgagacattccttctaaggtgaaggaaaagttactgcat

SEQ ID NO: 769667 - DNA, 491 bp, Homo sapiens
gtccttcaagtccttgatggttgcactaatctctgcaatgcctccagggatgtgatattattttcgattcatgatatttctatgtagaggcagtgctaatggtttctatttggcctttcccgccattatagccatcattctaccagttagggagccaatgtgggggctctgtcagctgctaagtatgtctacgccaattatggattctggcactggggaaatgaccacagaatgagtctggggacacactagacccactgttaagtcagtcctgagctaaaactccattaattacttgacctccatgaackcctactttaagtggatgaccacaatgacattttgtgtcccctggaatcaatgtcagctcagagccagtgtccagtagtccctgaaaggtctgatcatttccctttccccaatgcacagttaccctggtaaaaggccagaggtctctttggggaaggatgggagaaatattaacaataaat

SEQ ID NO: 769668 - DNA, 589 bp, Homo sapiens
atttctctctctgcctggcttgtcattcctgcctagtgagacctgaagacaaaagattgccttcctaagtctttatgcccttctagctcaggatctgtaagaatcttagtacttgttttctatcgtggtggtgtattgaatttgtgccttccatctgaagaactagggattgccccaggctaggttttccctgggacttggagagaacacaaaggtgagctcccagcatcagagcaatggttagcataaactggacacaggtcaggcaagagccccaagggaagctgtcagtgattcttttcacatgggaatcttatttataagatttttaagtaagaaaaaccctttttgttatgggttggacaactaggtattagaccatatgctagtaaaaaattatccyatgaatggcagactggaaacacccatctccagcttcccttcatttcctgttatggcacagttgctagctgttctgatctcagtttatgtgggggttctcaaaataaggagaaagcaggattaggcaatgggaaaagttaggtgtgatgcagtgtcaacataaacctcagctagtttcaaagagact

SEQ ID NO: 769669 - DNA, 531 bp, Homo sapiens
aattctttgttcataaagttgctgctttttgccaaagttattattaggtagtttatggtttgtattatttttgtaaataatacatgcttatttctgattaacatattttttatagtctacatgggaatacaattggttttagtactggctttttctagggaagttttcctgaactcaattataatatctagttattattccacagtttcttayggatttttctatatagttatctaaattaaagatagtgaatatttggtttcatcttcttgatttatgccttttattttttcatttctcagttctgactataccttctgctaaatgttgactacagcaagtgattcatggccacagtgctcctgattcaacagtgatatttttaatattttttaatgttaacaatgctaaagcacactccagccaacaaacaaaatggagtacttgtggctaacggaggttcttaaagttaaaacagagccaggtggtcatgtttcagggagagtagtcacatgttctcaaagatgttgt

SEQ ID NO: 769670 - DNA, 503 bp, Homo sapiens
caggagatcgagaccatcctggctaacacggtgaaaccccatctctactaaaaatacaaaaaattagccgggcgtggtggcgggcgcctgtagtcccagctactcgggaagctgaggcaggagaatggcgtgaacctgggaggcggagcttgcagtgggctgagatcgtgcctctgcactccagcctgggcgacagagcaagactccgtctcaaaaaaaaaamaaacaacaagaaacaaaaaaaaaacttataacttcatcttctaataactatataacatttcaggaactatctttaggattaaggtgttataaagggtgattatatttcatgattatgttgttaacaattattatatttttattaattagtgaggattagagaaaagaaccccagatctaagtaaactaaagggaagtccagggtctctgattcttactctgatgcttattaactgtatgaactaagaaataacaggataatttgataacgaattatggat

SEQ ID NO: 769671 - DNA, 646 bp, Homo sapiens
cttggggagtatttagtgaaatatttccttctgtttttatttataacttctctctgtttaccccaaacgtccccatcttgtattcagacacattgaaccaattacaatattgtactcaaaattgctcctccctttggccagttatttagttttgtgaatctgattctctcttccgttaggatagaatatgggtgatattcagctagtatgaaccattatgatcatgcagttgattaactatagaaacaatcttagtggattgcaaatagctgctgtcctaacaccttgagtggctcctcccacctctccagtcaatctggcccttctttttataaatgtatgcattcccctaacctctgacctcaaaacctttctggtaatgttttactcagctagtcagcttttgctttacaaaattttgtattggcattgctggaaattctcatggaatccytagtcttttctagaaatctgactcactttattttcctctaagataatttattttttctgcctatataactagcatatattgtccttgcccttgttcttcacaatttgtaataaagcacttttccattccatctgaggcccaaagtgttcttccccaagatctatattatatggccatattctaatcttacaa

SEQ ID NO: 769672 - DNA, 596 bp, Homo sapiens
aatatcagaaacagaggccattctagagtctaaagacacattggcattatgaaaacatgatctctggtattgtggaattagttctattccaaaattctatttaaattttattcaagagtggccccatcaaatctcaaatcactttacttttgataattgatcttcaagtaagatctcttaattaattacgtaactgaaagatctctgccacacttctatccttagagattgttcacggttcacatgtgacttcgtagaccaggaaatctcataacccctaggcaaaggcttgctgcagctattcactaagcacatctcagtaactcctctggaaaatattgagtgtcctttctccaggatctgtggaaatagttgtactctccaaaggctctttycatttttctccataaaactctagagggaacagtgagaaactgaaaatctaatgatactttttttccttttatccagaaagacatgtgcattcaagaggaaagcagaaaagtctctgggtaggcaggacccaggtggtctggatggcagaaactgttctgaagggctgtttggagataagaatatagtaatatacaagtatg

SEQ ID NO: 769673 - DNA, 557 bp, Homo sapiens
tggatatgaactcgaattgttcccaaatgcccatttgccaccttgaggagaggcaaaacatttttgggattttctgaggactctgtactactagtggcatatgtgactcctgtgtgaatatgtgaggggggtaaagcaactggacagggaagttgattgggggatgatggagcagatggagagggtgtaggtgaagcaggagcccgctgaggagactgtgacaggtaaaaggaaggatgatttaagacatcggaatcggggagagaggaagttccttggaagcatacackacaatttttatgtaactttgggttttgggataaagcccaaaagaccagaacataaggcatctctgaatacaaatgaaaattatacacttctttttgagagtctgtgggtcagaataagaacattttttaagaatgcaacccaagggtgagtaggaatgaattgaagaatgaattgaacccatgttaggtttaggtaagggactacaagattcgtgaggcgtccctgaggaatttggacttcactttcccctttggcgcactctgttc

SEQ ID NO: 769674 - DNA, 557 bp, Homo sapiens
tggatatgaactcgaattgttcccaaatgcccatttgccaccttgaggagaggcaaaacatttttgggattttctgaggactctgtactactagtggcatatgtgactcctgtgtgaatatgtgaggggggtaaagcaactggacagggaagttgattgggggatgatggagcagatggagagggtgtaggtgaagcaggagcccgctgaggagactgtgacaggtaaaaggaaggatgatttaagacatcggaatcggggagagaggaagttccttggaagcatacacgacaatttttatgtaactttgggttttgrgataaagcccaaaagaccagaacataaggcatctctgaatacaaatgaaaattatacacttctttttgagagtctgtgggtcagaataagaacattttttaagaatgcaacccaagggtgagtaggaatgaattgaagaatgaattgaacccatgttaggtttaggtaagggactacaagattcgtgaggcgtccctgaggaatttggacttcactttcccctttggcgcactctgttc

SEQ ID NO: 769675 - DNA, 557 bp, Homo sapiens
tggatatgaactcgaattgttcccaaatgcccatttgccaccttgaggagaggcaaaacatttttgggattttctgaggactctgtactactagtggcatatgtgactcctgtgtgaatatgtgaggggggtaaagcaactggacagggaagttgattgggggatgatggagcagatggagagggtgtaggtgaagcaggagcccgctgaggagactgtgacaggtaaaaggaaggatgatttaagacatcggaatcggggagagaggaagttccttggaagcatacacgacaatttttatgtaactttgggttttgggataaagcccaaaagaccagaacataaggcayctctgaatacaaatgaaaattatacacttctttttgagagtctgtgggtcagaataagaacattttttaagaatgcaacccaagggtgagtaggaatgaattgaagaatgaattgaacccatgttaggtttaggtaagggactacaagattcgtgaggcgtccctgaggaatttggacttcactttcccctttggcgcactctgttc

SEQ ID NO: 769676 - DNA, 567 bp, Homo sapiens
caaacaaacaaaaaaccagaccactgagggaacaaatcccagtaaagtccccatatgggccaccaagatgccaggcgaggcgtcagagccctggcattggaaagttgtcgacttgtgggttggtaaaaagaatttaccgacaacagtatgggtttgaaaaatgaaagtttattagaaaggaagaatgctgcacaaggatgcagtggagcacctcagtgagacgactgaatgagccctaatgcccttttattaaccaacaacctttgtggaagcttttaattcactctattyctcctttctttttctccttgcttttgtatctacaacccaatggggagatgagaatttaataactaaatgcagtaacttatgatagcttcagccccttcttctatacctttttcagtccttcatctttatgtctactcagatgtatttgagcttccattttgtagttatgtctaggtgagtcttattctctccctagccctagagatctggcttatgtaaacttctgggctttgtcagatattctgcgggagtgcttccagaagtggaataagaatt

SEQ ID NO: 769677 - DNA, 567 bp, Homo sapiens
caaacaaacaaaaaaccagaccactgagggaacaaatcccagtaaagtccccatatgggccaccaagatgccaggcgaggcgtcagagccctggcattggaaagttgtcgacttgtgggttggtaaaaagaatttaccgacaacagtatgggtttgaaaaatgaaagtttattagaaaggaagaatgctgcacaaggatgcagtggagcacctcagtgagacgactgaatgagccctaatgcccttttattaaccaacaacctttgtggaagcttttaattcactctatttctcctttctttttctccttgcttttgtatctacaacccaatggggagatgagaatttaataactaaatgcagtaacttatgatagcttcagccccttcttctatacctttttcagtccttcatctwtatgtctactcagatgtatttgagcttccattttgtagttatgtctaggtgagtcttattctctccctagccctagagatctggcttatgtaaacttctgggctttgtcagatattctgcgggagtgcttccagaagtggaataagaatt

SEQ ID NO: 769678 - DNA, 534 bp, Homo sapiens
tgatttttctacttcatgtccgaatagccttaaaataatataatacttgataggatgaagctattctccatgtttctataagttctgttagagaatgcatctgggtctatccaaccatgttcaatgttttcaaatgccaaatgagggcttcagaagaaccccttgaggaagragagatgacatttgccatgctctgttaatatcaactcaggaagaatgtatctggcaacacatttatcctgataaacatgacgatagggaatttttttgtttagcattggcagcatgtatttactgctacatctgtatatgggctgtcaggtcacatgaagaagccataacagaagacagttgcagggaatagcttatgtaatgagatcaagccagtgaaagtctgggttcaagctgtaatattacagtgtgaagagtccacttatctgcccaagtcaaggatattttcttctctttttggtcactgttcatgaaattacattgttatccccttcagctgttcaatgagccaatagaaaaatg

SEQ ID NO: 769679 - DNA, 534 bp, Homo sapiens
tgatttttctacttcatgtccgaatagccttaaaataatataatacttgataggatgaagctattctccatgtttctataagttctgttagagaatgcatctgggtctatccaaccatgttcaatgttttcaaatgccaaatgagggcttcagaagaaccccttgaggaaggagagatgacatttgccatgctctgttaatatcaactcaggaagaatgtatctggcaacacatttatcctgataaacatgacgatagggaatttttttgtttagcattggcagcrtgtatttactgctacatctgtatatgggctgtcaggtcacatgaagaagccataacagaagacagttgcagggaatagcttatgtaatgagatcaagccagtgaaagtctgggttcaagctgtaatattacagtgtgaagagtccacttatctgcccaagtcaaggatattttcttctctttttggtcactgttcatgaaattacattgttatccccttcagctgttcaatgagccaatagaaaaatg

SEQ ID NO: 769680 - DNA, 534 bp, Homo sapiens
tgatttttctacttcatgtccgaatagccttaaaataatataatacttgataggatgaagctattctccatgtttctataagttctgttagagaatgcatctgggtctatccaaccatgttcaatgttttcaaatgccaaatgagggcttcagaagaaccccttgaggaaggagagatgacatttgccatgctctgttaatatcaactcaggaagaatgtatctggcaacacatttatcctgataaacatgacgatagggaatttttttgtttagcattggcagcatgtatttactgctacatctgtatatgggctgtcaggtcacatgaagaagccatarcagaagacagttgcagggaatagcttatgtaatgagatcaagccagtgaaagtctgggttcaagctgtaatattacagtgtgaagagtccacttatctgcccaagtcaaggatattttcttctctttttggtcactgttcatgaaattacattgttatccccttcagctgttcaatgagccaatagaaaaatg

SEQ ID NO: 769681 - DNA, 545 bp, Homo sapiens
tgcactgccttagcagaggttttccacgaggctccacccctgcagcaaacttcttcctggacattcaggtatgtttatacatcctctgaaatctaggtgaaggttcccaaacctaaattcttgacttttatgcacctgcatgctcaacatcatgtggaagctggcaagctctggggcttgtaccctctaaggccactggttaaaaggggccaagatctgaagtgtaccctggccccttttagccatggctggagcagstgggatgcagggtaccaagtctttaggctgcacatagctgaggaaacttgggctcagccctcaaaaccattttttcatcctaggcctccaggcctccaggaggggctgctgtgaatgtctctgacatgccctggagacatttttcccattgttttagtgataaacaatcagttccttgttactttctgcagcaggcttgaatttctccccagaaaataggtttctcttttctattgcatcattagactgcatatttcccaaacttctattctcttcttcctctggaa

SEQ ID NO: 769682 - DNA, 483 bp, Homo sapiens
aacacatagaatcaacctagatgttcatcaatggtgggctggataaagaaaatgtggtacatatacactttgaaatactacccagacataaaaaagaatgagatcatggcctttgtagaaacatgaatggagctggaggccattatcctgagtgaattaattcagaaactgaaaaccataactgtgtgttctcacttataagtgggagctagacattgagtacacacggacacaaagaatggaacaayagcaccacatcttacctgagggtggaggatgggaggagcatgaagactgaaaaactgcctattgagtattatgctgattacttgggtgacaaaattgtacaccaaacccctgtgacatgcaatttacccatgcaacaaaccagtccatgtacccctttaagataaaataaaatttggaaggagtaaaaaaagaaactgaccctatattttcccttagaacaatgattcagtttcc

SEQ ID NO: 769683 - DNA, 576 bp, Homo sapiens
tttacaatcagcccagatcaaaataaattgatattttgaagctaaaacaacagactacttttttaaaatcaaatttagcatagcttacaaaacaaaatatatatcatttcatgttttttgttttgagacggagtctcgctctgtcgcccaggctggagcgcagtggcgcgatctcggctcactgcaagctccgccgcccgggttcactccattctcctgccccagcctccagagtagctgggaccacaggcgcccgccaccacgcctggctaatttttttgtatttttagtagaaacggggtttcaccgtgttagccaggatggtctccatctcctgatgtcrtgatccgcccgccttggcctcccaaagtgctgggattataggcatgagccaccgcgcccggcccatttcgtgtttctttaagaaaaatacataatgcaggagagtggcaaattctggatgttgcaatgactagaaagcaataaggagaatgaagttcaatactcaattctaagttatgtgttccagtctcttgttgatatactgtgttcctgtgtaaattttcaccgttacct

SEQ ID NO: 769684 - DNA, 585 bp, Homo sapiens
aaagataactagtgggtactaggcttaatacctggatgatgaaataatctatacaacaagcccccgtgacacaagtatacctatgtgacaaacctgcacatgtacccctgaaattgtaagtttaaagaaagatgaaagcacagtagctgaagtcaagaaataaatctccttcctgttggcactgtctcactcatacccgctacttaaaaacagcttaacattgtgccagctggcaaagaaacaatatttaaagggcccagattcattttcacagaacagggaatgaagagttagtttggagctgagaggcaataaagtaaaaaatggcatcctcctgtgtgtgtaaaagttcttgtttgacattctgatgtgagaatggcsttcaggggtacctctaattcccccttgcctacctacattgtgtcatgttatgaaagttccgagccagaggtcacatcgtgatttatatctgtcctatagtacctggtacccaaaatatgtagatggtggaggaaaaatatgactggaaccctgaagacctagaaactagtcaaattcatttttctatttattagttttattaaa

SEQ ID NO: 769685 - DNA, 610 bp, Homo sapiens
ttcagagggtttgagtaactaatccaaaatcacataatatgaatgatgctaaagggcagttagagttaaaattagatcctttggaagccaaggtctgcaatctttttaaatcacctcaccatctcccatttatcttctggttaaatttggasagacattataaaaaggggaaacacatttataagttttctcattgccatcattaacagtggtgtaataatgacaaaataattaaaatttaattagttcttcctttgctgtcactccattgtgagcttatattctaatcttgcatcccctcaagcctaaatgaatctttgaaatgagggttgatttaaatcgatagtggaactttggctataggttactatttctttttttttttttttaattgaaatggagtctcattctgttgcccagggtggagtgcagtggtgcgatctcaggtcactgcaacctccgttcgcaccaccccctgcaggttccaagtgattttcctgcctcagcctcccaagtagctgggattacaggcatgtgccaccatgtctggctaatttttgtatttttagaaagcatggggtttcgctacgttagccaggctggtcctgaa

SEQ ID NO: 769686 - DNA, 645 bp, Homo sapiens
aggagttttgtttttagtattatgttgtccctggcacctagagaagtgtctggtacttatcaattacttgagtaaaaaaaaatccgtgaatagatcagttgagtagggatttgtcaaatactttccatctgaaattttcttttctgttcaaaagtcaccctacccaagaaggtctttctgactgccctaactgaaatacaattatatgtccctttttcaccctgtaacctgctttgttttctatagactatatcaaataaagtgtagcttaggtactaaatcgcttgtttgttgactatgttctccactagaaaatgatctcaatgaggayaggaacttctctacctttttctacatgagtgctttggatagtatctgatcagatacattataggcaattaatgcttttagactgtagagtgaaccaaaatgcttaaaattctttgaagaattgcacaaaacattattgggatttaaaacctgggaaattttcctaatgattattttattgtactttttaagctaactgtttttcatatttacctattccaaatttttggttttctagttattagtgtctgcttttgtcttcatgaatatcttatttatatattctttacatacaaattcacttcttaaataaat

SEQ ID NO: 769687 - DNA, 480 bp, Homo sapiens
ttggcaactgagaagcatcaatcagcaatccttgacggcataaactaggtcataagtgacctgtaagaagcaacaggatcaccatgaggcaggaagtcagttaacaagtgtgctccgtgcttactcttgggcaaagaccataaataatcaggmctacattcagttttctctgcacttgagttcaggtattcctcttaagcaagctaataggtgggctatgcctttgcaaacaagctaggaggctggaagaaattagtcatagaagatgaaagaataggaagattaaaatttcaaagcacaagaagaagatgggttgacgtggcaaaactacgtgaaagtgaccatgctgtagaagttagacagcgtccctcagaaagcaaacatgtcttgattgcttactatgtgcaaggttctcattctcttccttgagtgagggtgaaagaatgatcttcctaaaaaggcagtgacacatgataaagc

SEQ ID NO: 769688 - DNA, 480 bp, Homo sapiens
ttggcaactgagaagcatcaatcagcaatccttgacggcataaactaggtcataagtgacctgtaagaagcaacaggatcaccatgaggcaggaagtcagttaacaagtgtgctccgtgcttactcttgggcaaagaccataaataatcaggcctacattcagttttctctgcacttgagttcaggtattcctcttaagcaagctaataggtgggctatgcctttgcaaacaagctaggaggctggaagaaattagtcatagaagatgaaagaataggaagattaaamtttcaaagcacaagaagaagatgggttgacgtggcaaaactacgtgaaagtgaccatgctgtagaagttagacagcgtccctcagaaagcaaacatgtcttgattgcttactatgtgcaaggttctcattctcttccttgagtgagggtgaaagaatgatcttcctaaaaaggcagtgacacatgataaagc

SEQ ID NO: 769689 - DNA, 480 bp, Homo sapiens
ttggcaactgagaagcatcaatcagcaatccttgacggcataaactaggtcataagtgacctgtaagaagcaacaggatcaccatgaggcaggaagtcagttaacaagtgtgctccgtgcttactcttgggcaaagaccataaataatcaggcctacattcagttttctctgcacttgagttcaggtattcctcttaagcaagctaataggtgggctatgcctttgcaaacaagctaggaggctggaagaaattagtcatagaagatgaaagaataggaagattaaaatttcaaagcacaagaagaagatgggttgaygtggcaaaactacgtgaaagtgaccatgctgtagaagttagacagcgtccctcagaaagcaaacatgtcttgattgcttactatgtgcaaggttctcattctcttccttgagtgagggtgaaagaatgatcttcctaaaaaggcagtgacacatgataaagc

SEQ ID NO: 769690 - DNA, 571 bp, Homo sapiens
gttaagaaccactgtagtaaataattataccttacctattattttttaggggtatggataaattttatcttacctgttatttccttggggatacagacaattatgtctagctaaaagtaacaatgaccatttaatgttggttgtattacatttttaagagacgaagtgccgatgaggctttccatagttcttcattcatcacttttatgtttgtaactattgaagttcttgctcaaccagctaatcaaccagcatttccaatgattctggttacactcttcaagatgtagcttttttcttaaggaactgacagtgtatccaggaagatattgattgtgtaggtagaagtatagtgagyagcaaagggaatatactgaaagggttaaatgaatgaccagataatagttgtcatagacattgagtgtagggtgaaatcttgggctggaatatttagggaaggctttgaaggatagtagcttaaaaccatggagacaattggaaaagtgttatagaatgaaggaaaaaaagagagaataagacatggaaagactacgcatgggaaagagggaca

SEQ ID NO: 769691 - DNA, 581 bp, Homo sapiens
tttagggactttaaaattttctccttttgccagtgtctctgaattttagtatgctatttgtactgaactgactccaaatctaaaatttgattatatacagaaatagcaaataaatgcaactcagactaatgacaaagcatttaatcagagaatattagaacgactacaagacataacctggaaaaaaaatctatgaagaacctatttagaaagtaagctaaaagcaacactttttattatgagaaattttaaacacatacaaaagtaaaaagaataacatgaggaacctytaataacatttggcttaagcaattagcacccctggccaatcttgaagtttcaactatattcctactaaaaagggacgtattgttttaaatgttccttcaaatgaaaaaggactatagatgacaactaggttcaacccagaaaagctattctccccagcaaaccacttctgtagctttgacactagcagctcagatagtgtacagggttcattattgcaaacttctctttctatagagaacagtcatttaaaaatggaagcacccaggattccaaatgaaaggtttttaaaa

SEQ ID NO: 769692 - DNA, 597 bp, Homo sapiens
aaatattaaatttcccattatataatatattacatgggaattgtccttatgatggcacataacatgatataggaagggaaatagacaaaatcaagattatggaaggatttttttcttgaacacgatctatgtctcagaaagctttaatgacgttccataccaaatattcaagagtatatgcaggctctggaactagaaggcttgggtayaaacctcagttccattgtttactagcacatggatcatgggcaagttactgcatctgtctgaggatcagttaccttataaaattgggctaatcatagagtctaactcatgaagttgatgtgatgatgaaatgagatcatatatattaaatttttaggattgttcctgacctccaaacatagaacattagaaagtattgtcattgttgtcatatgtagagcagcatttttccgagtgtcttctgtagaacacaagattctaggggtgttaagaattaccagaaacatgctccacaataaagaacttttaggaaatatctgactacataaagaatttttaaaagtctctttactatataaccttgaaaatgttatgtattttagagaaggg

SEQ ID NO: 769693 - DNA, 642 bp, Homo sapiens
agccaaaacaattttgaaaaagttcaaggttgcaggacagacttataataaatctatagtaatcaaaactgtgtgataattaatggcagagagataggcatagagctttggaatagaatggagcatccagactcccccactcatggtcaattgatttccacaaagttttcaaggcaatttaagggggggaaaattgcaatcctttcaataagtggttctggaacaatggatagctataygcaaaataataaatacaatttaaaaattagctttagcttgccgtattaaaaagttaactccagatggatcacagatctaaatgtaagtggtaaactctaaaacctctaaaaaaaatgttgagaaaaatcacagtggctttgagtttggtaaaaattttttaaaggaaccaaatcaataaattagacttcaataaaagtaaaaaccttactcctcagaaaacattgataaaaatggaaataaaagccagcaataaggataaagtatttgtaaacaatatacctgacaaagcctcttgctaaagcttgagtatttgtcccctccacatctcatgatgaaatgtgatccctaatggttttagatggggcagagtgggaaatgtttggatcatgggggtggatccct

SEQ ID NO: 769694 - DNA, 621 bp, Homo sapiens
tgattctttgtagcataaacacaaaagagaaaaatacatttccaactaatgataaggttatttataaatgagatatattcaaagaatgattttccacatattggacacatgctattcatttctcaattttatttttacctttagacaaaaaaattttaaatactgaattataaacaagatttaaaattttattcatgaaactaaaagtatgttttaatacacagctatacaagacaattacttaagcatacatttaagcaatgtaattaataaaatattttctttgtgagtttgagatgttacttttatgaattttgcaatagcctaatgaaagaataaaaattacgtaatttttgcaatgatcattcattcatcatttttagtagcaacacaattctatgatatgttatggttgtaacagtggctttttcaatgatgctttcttaatgacactttamaaattacactaatagtctctcacggcaaggttggctgtatgtattttttgtaggctttataatatcatctgagtctattattacctctgacatttttctagaggccagttaacttgtttatattcaaacaccgagtgggaaatgccagcatcaatcaccgttt

SEQ ID NO: 769695 - DNA, 633 bp, Homo sapiens
cagtgaagttaatccaggaatgcaaaaaaaaatcaagatatagctgtacagtaagcagaattaataatatctatagatttaagcaggaagttggaagattcttgaaagcagctcttcaagaaaaaagtggattacaggtgataaatatgattaagaygttaataatcttagtgtaatagtgaaagcataagctaaaatgtggcaataaaactccttgggaaataaatgaagagaataagaatctatacaaataaaccatggttcaaatgggtagcaaattaataaatagcatgattttgaaacatttatgaaaatataaaaaaacacataatttatttggattgttatctcaaacttatttggaagaatggttaactaggtttgattatatatccctttctttaggactgttatcactaagtactttgttctgaaatgaacattattcatgcacttttaataagataagttttttccccaattttgagattaacctagagtagaaaactttataagaaagtacttgattgaaccccaaattattattacataatggaatacaaatcaaataatcattgtaatttctattatttaaaaaaatcttttcagtgttatacaatcttaaagtcgtgt

SEQ ID NO: 769696 - DNA, 633 bp, Homo sapiens
cagtgaagttaatccaggaatgcaaaaaaaaatcaagatatagctgtacagtaagcagaattaataatatctatagatttaagcaggaagttggaagattcttgaaagcagctcttcaagaaaaaagtggattacaggtgataaatatgattaagacgttaataatcttagtgtaatagtgaaagcataagctaaaatgtggcaataaaactccttgggaaataaatgaagagaataagaatctatacaaataaaccatggttcaaatgggtagcaaattaataaatagcatgattttgaaacatttatgaaaatataaaaaaacacataatttatttggattgttatctcaaacttatttggaagaatggttaactaggtttgattatatatccctttctttaggactgttatcactaagtactttgttctgaaatgaacattattcwtgcacttttaataagataagttttttccccaattttgagattaacctagagtagaaaactttataagaaagtacttgattgaaccccaaattattattacataatggaatacaaatcaaataatcattgtaatttctattatttaaaaaaatcttttcagtgttatacaatcttaaagtcgtgt

SEQ ID NO: 769697 - DNA, 633 bp, Homo sapiens
cagtgaagttaatccaggaatgcaaaaaaaaatcaagatatagctgtacagtaagcagaattaataatatctatagatttaagcaggaagttggaagattcttgaaagcagctcttcaagaaaaaagtggattacaggtgataaatatgattaagacgttaataatcttagtgtaatagtgaaagcataagctaaaatgtggcaataaaactccttgggaaataaatgaagagaataagaatctatacaaataaaccatggttcaaatgggtagcaaattaataaatagcatgattttgaaacatttatgaaaatataaaaaaacacataatttatttggattgttatctcaaacttatttggaagaatggttaactaggtttgattatatatccctttctttaggactgttatcactaagtactttgttctgaaatgaacattattcatgcacttttaataagataagttttttccccaattttgagattaacctagagtagaaaactttataagaaagtacttgattgaaccccaaattattattacataatggaatacaaatcwaataatcattgtaatttctattatttaaaaaaatcttttcagtgttatacaatcttaaagtcgtgt

SEQ ID NO: 769698 - DNA, 591 bp, Homo sapiens
tccctttctttaggactgttatcactaagtactttgttctgaaatgaacattattcatgcacttttaataagataagttttttccccaattttgagattaacctagagtagaaaactttataagaaagtacttgattgaaccccaaattattattacataatggaatacaaatcaaataatcattgtaatttctattatttaaaaaaatcttttcagtgttatacaatcttaaagtcgtgtaaattaagtgatagacaatcaygaaatgtctgagtcatttccaagtaagttaaaatactgaaacatattctacagaagtttaagtttatatatctgggcttgttagtaaatatgtactgttccacactgaaaaattgttttacataaagtctaaaaattagaattatttgcttcctcagttttactagaaattaaggctactatgagcgaaaattttaactaatctatgtcagcggtccccaacctttttggcaccagggactggttttgtggaagacaatttttccacagaccggggcagtggagatgattcaagtgggttatatttattgtgcactttatttctatta

SEQ ID NO: 769699 - DNA, 666 bp, Homo sapiens
gtaatagttttgcaactgataaagaatttaattttaaaaatgataataaaacaatgaatatttgtatgaaaggtgaatattaacataaacaattcacaaaagaagaaatatgaaattatcattagtgatcaaaaatgaaaatttaaaaagccaaaaatgagttttgctaaacgtattggcagcaacacaattgattrtacttgatcttgataaagatgtgtacaaggatggtttttatcaaccctgtcatatacaaagaagttcctcttatttatttaaataattctaggaatttatccttaggaaataattgggtaattccacaaagatatatgtctagggagtatactatatcatttaaaaataattgttgaagtactaataaatggctgggtacagtggatcacacctgtaatccctgcactttggaaggttgagagtgggcagattggtttagcctcgccgttcaagacaatcctgggcaacatagtaaaatgctgtctctacaaaaaatacagaataaattagccaggtgtggtggcgcatgcctgtagtcccgctactctggagactgtggcgggaggatcacttgagccccagagtttcaggctgcagtgagccataattgcaccactgtacttcagcctgggtgacaggtgacagaat

SEQ ID NO: 769700 - DNA, 529 bp, Homo sapiens
aatacttattcagattattttaatgaatatttagaaatattgtttcacaaatatgtatgtacttatctataatctcttccccacttctcccttgtgtatttcttaattttgcatattttaactttgcatgaatcagaagcatctgtattcttacgtaatttgcagtatttgttgaagatgacttttgtgaactaaatttaatttacttttattgctacataattgttcattgtataactatacaacacaagctagtcctcattttcttataagtaggcatcatgattatgtgtttttatatgytacaaaaatgtttttttgaaacttctattggactttttctattacatagtgcaagaattgctctggagcagtgtatttcaaatcataaatcacaactcttcattggcatgaaatcaacccaatgagttatgaatagaatttttaaacataattgatagaatacaaaatgacagagtgccattcacaaaataaggctacataaattttaattacatttttcttattt

SEQ ID NO: 769701 - DNA, 558 bp, Homo sapiens; identical to SEQ ID NO: 762659

SEQ ID NO: 769702 - DNA, 558 bp, Homo sapiens; identical to SEQ ID NO: 762660

SEQ ID NO: 769703 - DNA, 612 bp, Homo sapiens
agtaatacaattattagcccttcaacaccaatctcttcaacctccccggaaatagcacacatttacagaaaaccatttgccattatttctatgaaatatattcttcatttaaatgtgtttgtgttaaaatttaaacgcaagttacatttctttttcataggcaattgtagaggtcattatggtgttagccctcaaatctagtccacctctccaccactgttrtttccataaatttgggggattgactaggtttgacctcaaagttcatcacaatacctctttctcttcctagtaaataacataggaatcaggctaagcttattgagggacatgggattgcttcaggaatggaaaagtgaccttagtcaaacaaatgaaataccaaaagacgtttcctgagggactcagggaggaattatgtcatgcttaaagaaaacctcagaaagtacaattccttcttcctctggacattacttgagggtatgaggctgtaatcttccccaggaaccagtcctaggacaaaggctggacatagcagagggtggacctgacagaatcactaaggatcggagccagggtaatgggattaagccaactctgaaacatctctaa

SEQ ID NO: 769704 - DNA, 600 bp, Homo sapiens
gattaagggtctcaaaaagaattcagccaataaaataaacccctctccctccacttccaataaaactttttaaagcaccaccaatgctcatagatgtctcctttctcatttttcattccatcctcaacccaacctagtccaggttcattgagcttcacgactctgctgacgtgattcttgctaaaatctcatgtgaccgccattaaagtaaaatattttctgtgttctcctatttaacatcttatcaaaattccagaatgataactggtccctkgttcttataccattttttcattgtcttctctgccacaatctttcttgcttttcttctcccgtttactttcaatgttcattgtctttctccttggcaggtacattctcccctatacagttatttaagctcaaatcttagccccttttctatccctttgctctctcccttggtaatctcatctataactgcaggtgcaattgccacctcacatatttcattttgtgcccaatcatgtcctctgtgattcaattgcctacttgattttcccttttggatttctgaaaggcatctcaaattcaatctgttttgaagtacatttgtttccc

SEQ ID NO: 769705 - DNA, 583 bp, Homo sapiens
atccagtgaaacagacacagaatgtattttcaatctcattaattaattagaatacagaatttctctgtggaagtccccaaatcatgcaaactgtgtttaattacttcagtactgaaagattgagatgaaagatgaaaagaaatggactatagaacaatacgttttacagatttagggttattatccttcattgtcaaaatagatatctgctgaattaataaaaatataaatatttaatagaaaatttgttgtttatcaggatcaaagttagattatacaggatacagataaacaatcttagatacatgacctaccyactaagaacctaaaaatctaaatgggatacaagtttacatgcctgaaacaataaacagacaaaagtgatgatatactcactagtaacaagatgaatatggaatcatataataaagtcctaagtagacttccgatgaggaagctatcaacttcagagtcccacaatcatatgtatgtgtcttggatttgttttttttaactcactgtacggtcttcgacaaatcactttacttgtatgaatgactgtttcttcctctataaaatagag

SEQ ID NO: 769706 - DNA, 583 bp, Homo sapiens
atccagtgaaacagacacagaatgtattttcaatctcattaattaattagaatacagaatttctctgtggaagtccccaaatcatgcaaactgtgtttaattacttcagtactgaaagattgagatgaaagatgaaaagaaatggactatagaacaatacgttttacagatttagggttattatccttcattgtcaaaatagatatctgctgaattaataaaaatataaatatttaatagaaaatttgttgtttatcaggatcaaagttagattatacaggatacagataaacaatcttagatacatgacctacctactaagaacctaaaaatctaaatgggatacaartttacatgcctgaaacaataaacagacaaaagtgatgatatactcactagtaacaagatgaatatggaatcatataataaagtcctaagtagacttccgatgaggaagctatcaacttcagagtcccacaatcatatgtatgtgtcttggatttgttttttttaactcactgtacggtcttcgacaaatcactttacttgtatgaatgactgtttcttcctctataaaatagag

SEQ ID NO: 769707 - DNA, 578 bp, Homo sapiens
cccagcacaccccacggctgctggtggtggtgaagcctcctggtcagcaccagaaactataacaaagttcctcgctttgccgtggtttctttacagtcgcccatccacacctgcacagggaaggcctaggggaaaacacccatggaccccaataaaggcacagcccccaagtcctccctctctcagtcagccgcaccttctgcttgagcctgtgtccctgacagccctgactgctccccgcttcctgctggccccgtaaggtctgctgccctcccgccgcggggtctgtgagtaataaaactgctctgttctggatttcgctgtactgcctccactgtgtctcacctggccgactcacctgaacccakcttctttctccgtcaagactctcctagagatcggccatcctggtaggaataaactgcacacaggtcaggcaagagccacagggtgtctgccagtatcaacaagcttcttgtggaagggaggcctggtcacaggttggacatttaggcagtaggctgtctgccagaatgaagtcgttagtaaaaggcacactgtcaacatccgtgaccaaa

SEQ ID NO: 769708 - DNA, 578 bp, Homo sapiens
cccagcacaccccacggctgctggtggtggtgaagcctcctggtcagcaccagaaactataacaaagttcctcgctttgccgtggtttctttacagtcgcccatccacacctgcacagggaaggcctaggggaaaacacccatggaccccaataaaggcacagcccccaagtcctccctctctcagtcagccgcaccttctgcttgagcctgtgtccctgacagccctgactgctccccgcttcctgctggccccgtaaggtctgctgccctcccgccgcggggtctgtgagtaataaaactgctctgttctggatttcgctgtactgcctccactgtgtctcacctggccgactcacctgaacccagcttctttctccgtcaagactctcctagagatcggccatcctggtargaataaactgcacacaggtcaggcaagagccacagggtgtctgccagtatcaacaagcttcttgtggaagggaggcctggtcacaggttggacatttaggcagtaggctgtctgccagaatgaagtcgttagtaaaaggcacactgtcaacatccgtgaccaaa

SEQ ID NO: 769709 - DNA, 588 bp, Homo sapiens
aaaagtaaatatattgaacttacacttttcacaaaaactgactcaaaacagatcttcaacctaaatataaaccaaaatattataaaacttctggaataaacaagaggagaaaaattaatgtgattttgagtttggcaatggatttttagatataacaycaaaagacataatcagtgaaagaataaaaatgtcagttttattaaaatttaaaacttctccacaaaagacactatcaagagaatgaaaagacaagccacagaataggagaatatatttgcaaaacagatatttgatagaggacttatattcaaaatctacaaagaactctaagaaactcttaaaactcaacagtaagaaaacaacacaattcaaaactgggcaaaagaactggaaaaagaccaggctgtcaaagatacagagacagcaaacgagcatgtgaggagatgctcagtgtcgcgcgtcatcagggaaatttgattgaaaacagcatgctgataccattatacactcattagaatggttaaaatcaaagaaactcacattaccaaattcctatgaggatacagaccaacaggaactctcattttt

SEQ ID NO: 769710 - DNA, 593 bp, Homo sapiens
acaaatccttttccctgtcacttaggccagcttctcagagtctctgtcttagctttgcagcggctgccatgctcaggaatgtgatctctagagtatcaggtgtgaacagatgtgggaaatataccaagaacacataaatcaaagttgcatgatacaaccacagaggtgatagaacagaggagtccccaaatccacccccatgaggtcaagaaaaatttctcagagaaagcatcctttgaaatgggctattgtaagaaaataaggaattgcatgggtgggacagatatgggagggtattccakgcagatgaaataaattatgaagtactgaatcccaaattatatatttgtgtataccccgtttgttccctgctagtgagtgcaaataagggcattttaatgccccatcaccatggctcttactagccaaactgaagggcattagccagccctgtcttcaaacatgctccatccactgttctctatcccagaacctgtaggaaaatatcagagatgttgagagagaagcccactcatgttctggtgctccactttccccatggaaagctgctcactggtaagtggcgtgaccca

SEQ ID NO: 769711 - DNA, 622 bp, Homo sapiens
ttgtttcttctagctttgacctttgctgccttagcatggccactatctagctgtgtgaccttgagccgattgcttcatttttctggccctcattttcctcataagtaacatgaagaacagctatacattagggttattgtgtggattaaatgagatgatgtgtgtacaagcaattatccaagagaaaccttcttattgtctctgacatacgataggcattcaaaaataataataacatgacggcttactctgtgtcaagcacattttaagtgccttactgactcatrtaattttcacatcaaccttaaaaggaaggtatatttaacaaacaaggcccagaaattaaaatacagaaaagttcagaaacttacataagatcctacagctgctacctaaatgcgtccagatgaatatgactttccaatcataacataaaatccagtgtatcttaatatataattatttttgtacccaaattaaattactttcttaaaaatttgtttatgaataatatgaaatctatgaaagaaattaagaaaaagtggcttatttcatgggttttgtggtcatccctgataagatgatttaatgaaatgacataatttgctttccagcagactat

SEQ ID NO: 769712 - DNA, 597 bp, Homo sapiens
ttgacctataaatgtcattaaagctgaggtgagtctcttgtaggcagcatatagtttggtttgtgtgggtgtgtgcatatgtgcacatttgtttatttttatccactctatgtcttctgattgaataatttaatccatttatatttaaagtaagtattgataggcatggacttactattgccttttttcaattgtgtctgtctcttttgtagttcttttgcttctttcttcctctcttgtayacttcctttgttattgattttctgtagtgatatctgatgattccttactctttatcttatctgtatctactataggtttttcctgtgcaattaccaggaggctaacacaaaacacattagatttataacagtctattttatactaataacaagttaaccttaatcacatacaaaaactctgccctttctttcctccactccccctaaatatattttatgtttcttgatctcacagtttacatatttttattatgtatgtttattgaaaaattaactatagttttaaaaaatacttttgtcttttaaccattataccacagttaagagtgatttacctatcactattatagtattt

SEQ ID NO: 769713 - DNA, 616 bp, Homo sapiens
cttttgtctgccacctgccaataccatatacctgcttgcagctctcaccagaaaataatggctttgggtttcttcagttttcctaaccttttgtatctgtaattggcaaagttaagcccacactatgctgacaaaagattctgaaaaatatgtttcccagatttcttctttaaaatctacagggcaatgtaacaagagatttgayaatatacaatcttgcacagcggctaaggagcttctagacttcagggcttaataagccttatagggtttctcagaggtcgatacgatgttcctgagatgatcacctcatcagtggtcttgagcctttagaaaagctaattataggcttatgggggaaatactttcttcttccctacctagtcaggaagtaaagtaagtgctccctcctgccccacatacacgtgaggaggcacttgtaaaggtggacgtcgccgcataaacatctcaaaccctgttccagagcttgctgagcagctgaaattagtcaacccttactgggtgccatttgagttgaaaaagtgaagtgagataatttttttttattgatatgttcggccctcctcctcaaccctgtctttgagggcatgcgcct

SEQ ID NO: 769714 - DNA, 435 bp, Homo sapiens
aaactcaaatgaaagcatttttattcaacttgaagatagtattttttttcatgactgcagtcatgcacaggagatcccatgtcactttttgatttttagaacaatatcttgttttgtctgttgtcaacattggtatgwaaaatgcttgtagtcatattttataaatcacacagggttcatcttcaagttctgtcattacaaatctcccaattctaacaatatcattacaaaatattaaaatgttcacagcaaagggacacaaaagtttgaaagttccagtcaaactgattatacaaaatgataacactaaggttgtcccaacataaaagctgacaagtcaaaagcagggataatgtgcattttcactaacaaataataaaggttctgtgcatcaggacagccatattctcatgatcagagccattactggaagaa

SEQ ID NO: 769715 - DNA, 558 bp, Homo sapiens
agaaggaaaggaaacaaaataaaagattagacagtagaaaacaactagcaaggtggcaaatgtaaatcggatgatacaaattgccttaaacattcatcgggtaaacaccctaattaaaagtaaagattgatagatttgatagaacagcaaaactcatttatgtattgtctataataaatccactttaaatataaagatatagataggttaaaagtaaaagacagaaatcagatatactatgcaaattctaatcaaaataaagttttagtggctatgttgagattagacaaagtaaacattasaacaagtcatattgtcaggaataatgagaaacattatataatgataaaggatcaattcattaaaattatataacaatcataaatgtgtatgcatctaatagtaggcttccaaatttgaactagatatgtactaagaatgatcctgtttgagagattgttcttatacatacttgtttttaaaatattgtttattcttcaagaaatagtcatatcatgtcatacatcaatttgcaaaggtaattttcttagtttataa

SEQ ID NO: 769716 - DNA, 565 bp, Homo sapiens
gatcgcgccattgcactctatcctgggcaatagaacaaaactttgtctcaaaaaaaaaaaaaaaaaaaaaggaaagaaagaaatatggataaccattgagaattccttgtcctccactggtttgatagtttgacaactttgagatcagaagatgttcagggtcctatcttctagaatacttgggtgcagaggcgagtcttgaatttttttttttttttagaatattgaatctgaaaacctaggcagacataaraaaatgaactctggaaaatgtggcaatttagtagatcagtctttttcaataatacacatctctgtttggtaggcattaggtttggcaggatttctttctcctacacattccttctcttattcaaattaatattctaattttaacatgggagattccttatacggagttaatcagattaaaagtataatcaacttggttaattacttttttactaagattcctacaggtctaagtgtttgcagttttatattgtgctattatatgttcaattagattttgttatgtctacaactatattttgctattgtatgt

SEQ ID NO: 769717 - DNA, 640 bp, Homo sapiens
ttgtcatataatatttaaatatattacctttatttacatcttggagtgtttagttaacattttaaatagagtaattagactcaatgtaagaaatgggcctacataagcatcaaataatatgtcatattaaggacactatattgttactatgtttaattaaagtcaattgtcctctaaaggtatttaataataagaaaagtcttayatatttaattatgtttttaccatttctgatattcttccttccattaggtatatctgaatacccagctggtatcattttgcttctgtggcaggcagtcctcaagattgtcccatgatccccaattcttggtatctacaacatacatattttcctcttacatagtactccagctatatgacgaatcctgagccagtgcaatgcagagaacctactcataaattcttcacaatatgaagctttgtgaattaataaatatttactgctttaaattgctaagcactgtatggattgttatgccacagtatatagataataaagattttgataactggaagtaaagtgttgtgatctaggagtggctttgaaatgacagtaggtattagtgagggtctaaaatgacttgaagagagtgacataaatgttattttaaaaatc

SEQ ID NO: 769718 - DNA, 651 bp, Homo sapiens
tcaaagaaacattattttttttgagtggcacaatcttggctcactgaaacttctgccttccaggttcaagtgattctcctgtctcagcctctagtagctggtactagaggtgtgcacgaccatgcctggctaattttttatatttttaggagagatggggtttcaccatgttggccaggcttgtggcaaactcctgacatcaagcgatctgcccrccttgggctcccaaagcgctggagttacaggcatgaaccaccatgcccagctgagaaacaattttctagacttgattttatttcacataaatctttaaatttgtcaagagaaaacaaactatgtgttaattgtttgattcacatttgttttaccttgagattcataattactcttaaattgtggaaattaagaattgtggaatctctgataatgtcagatcttataacttaaaaacacaataccagaaagtagaagtaaaaccgtcttttagtgattaaagaagaaaattgactttttaagcaatgaaaaagtgaattgatagttttgcaaagtcagtattgtgtttaatatacaagtaaaaacaagttaaattgcttatagtatgttaacatgcacttagaagaaatataatagatgttgcatttctaaggtaga

SEQ ID NO: 769719 - DNA, 651 bp, Homo sapiens
tcaaagaaacattattttttttgagtggcacaatcttggctcactgaaacttctgccttccaggttcaagtgattctcctgtctcagcctctagtagctggtactagaggtgtgcacgaccatgcctggctaattttttatatttttaggagagatggggtttcaccatgttggccaggcttgtggcaaactcctgacatcaagcgatctgcccgccttgggctcccaaagcgctggagttacaggcatgaaccaccatgcccagctgagaaacaattttctagacttgattttatttcacakaaatctttaaatttgtcaagagaaaacaaactatgtgttaattgtttgattcacatttgttttaccttgagattcataattactcttaaattgtggaaattaagaattgtggaatctctgataatgtcagatcttataacttaaaaacacaataccagaaagtagaagtaaaaccgtcttttagtgattaaagaagaaaattgactttttaagcaatgaaaaagtgaattgatagttttgcaaagtcagtattgtgtttaatatacaagtaaaaacaagttaaattgcttatagtatgttaacatgcacttagaagaaatataatagatgttgcatttctaaggtaga

SEQ ID NO: 769720 - DNA, 651 bp, Homo sapiens
tcaaagaaacattattttttttgagtggcacaatcttggctcactgaaacttctgccttccaggttcaagtgattctcctgtctcagcctctagtagctggtactagaggtgtgcacgaccatgcctggctaattttttatatttttaggagagatggggtttcaccatgttggccaggcttgtggcaaactcctgacatcaagcgatctgcccgccttgggctcccaaagcgctggagttacaggcatgaaccaccatgcccagctgagaaacaattttctagacttgattttatttcacataaatctttaaatttgtcaagagaaaacaaactatgtgttaattgtttgattcacatttgttttaccttgagattcataattactcttaaattgtkgaaattaagaattgtggaatctctgataatgtcagatcttataacttaaaaacacaataccagaaagtagaagtaaaaccgtcttttagtgattaaagaagaaaattgactttttaagcaatgaaaaagtgaattgatagttttgcaaagtcagtattgtgtttaatatacaagtaaaaacaagttaaattgcttatagtatgttaacatgcacttagaagaaatataatagatgttgcatttctaaggtaga

SEQ ID NO: 769721 - DNA, 520 bp, Homo sapiens
tttaaataaggtgtgaaatactttcctggatgcagacagctcttgtgtgttgataatgataaagtattgtggccagatggtgctttagagagataattcatacatacaaacactctagagagtggattcagatttaccttgactgtctgtgcttgaataggcaagaaggttacaaagtaacttaggttatatgcagtggagttcttgtttagcacagaacagcatttcagagggttttctgtggaattctatatctacaggatgtaaagagagaggttactttaaaamctgttctctggtaaagcatacttgtaaaaagtaggataaacaaagctgaacacttattcactgaaagattgttcagaacccttgttttgtgggttgtgattttccatggatggaatatagtaggctccatttcccaaacttatttagtcctgaccctctttttgcatagaaatctttaagagctaaaaaaaaaatgggcatatgacagagaaaataccaaaaaggatttctc

SEQ ID NO: 769722 - DNA, 702 bp, Homo sapiens
aggcctgaagctcataaaagattacagaatattgttagacatttaaaagctcagctcggcgtggtggctcacacctgtaatcccagcactttggcaggccaaggtgggtggatcacgaggtcaggagatcgagaccatcctggttaacacagtgaaaccctgtctctactaaaaatacaaaaaattagccaggtgcggtggcaggcgcctgtaatcccagctactcagaaggctgaggcaggagaatggtgtgaacctgggaggcggagtttgcagcgagcagagattgcaccattgcactctggcctgggcaacagcgtgaaactctgtctcaaaaaaaaaaacaacaaaccaaaaaccaaaaaaaaaaaaaacacacacamaaaaaaacaaaaaacaagacatttaaaagctcaaggcttagtaagaaaatgcaacagtccctgcaacaccccagttctagaagtacaaaaaccgaatggtcagtggagactagtgcaagatcttagactcatcgatgaggcagtaattcctctatatccagctgtacccaacccctataccctgctctctgaaataccagaggaagcagaatggttcactgttctggacctcaaggatgcttccttctgcattcccctgcactctgactcccagtttctctttgcttttgaggatcccacagaccacatgtcccaactt

SEQ ID NO: 769723 - DNA, 589 bp, Homo sapiens
ggcagtcatacctcttatgggaatactaaccaggtcatccaagttctagtaacatgctgtttttgcttaaggatactgaattttttaacccttactctaccctaaatagcccaattttctttggagtaaaagtacacagaattgctagtcatttggcatgagaagtacataaatgacttgctgtttttatttttccatgaagttggcaagttccctgtagtctaccagaggcttaaggatcacactgaggaaaacattgctctagagctgcagttctgtaactaatttcatatctgacaattgagaaccaagtatggccctggctggatttttggaatgttagatcttgtggaccttcgcctccctgtatggaagagatggaagaaaaggaagaaagtagaattatgcatttttgctgtcccctttaaagtctctccttcctctgcacrtttctttcctccccacagacaagcaaaataaatacagatgggggaaaaaagttgtgattgctgattaattgattgctgtacatatccataatacctatcatgacatgaaagttcttaggaacggctttcatgtttccatg

SEQ ID NO: 769724 - DNA, 618 bp, Homo sapiens
caagaagattgtttccagtctactagaaaacacttccaataagcctgaattacaaccccaatatcattttagttttttagattaacatgtgaaataaagagtttttcttagtcacagttacttttactgccaaaaacccaatgaatatctttccctctggaaccaaatacactgtttaattttaatctcttagctgactgacacaggaacaaaactggttttgcattttcccttttcatttacttttctgcaattgatcactggccttaaaaagttgagaagatatatttcagttgccattttctgtactggttttcattcattagttttccttctcctccttcctttactctgcaatctccttctcttctatcacatcagttatatctcttgccacaagctcacataatttctgtcgtgtgtcttwgtaatatctaatttgttacgatgtattatgcatgcaaatgtaattgcagaggaggagttaagcagaatgacagcttaaagaggcatattttttttgactctgtcactcccagaaaacagcataaagagatctgggacaactagatgtcgtgatgaaaacattagaacgccaggatatcaaattaaacaata

SEQ ID NO: 769725 - DNA, 579 bp, Homo sapiens; identical to SEQ ID NO: 753647

SEQ ID NO: 769726 - DNA, 561 bp, Homo sapiens
tgaccttaggactggataaagccaacgtgaacctcaagatggttaagccaatgaccttgacctctttaaccccaaccaacggagtacttgatcctaaggttaacaatgcgcgagtaacatagtgactgtaggtgtctaagtcagtggccactaatatcaagcaataaacatgtggaaatgataaagaacactgcttattttccttttaggaaaatatttcctaaacttactatgttaaagtgatctggactctgctgaacacctaaattytaaatgtctgaaaaatgaaaatcatcattcaacgttgtgttcttttcatcagcttcctgatgaattcactcacttccaatgacagcagaaggattactcacactgataaaggaaattggcggaagctacccagaagggccacacctccaaaaggtttttttaagtacatgaaacattgatgcacgtgccccgcctggtaagtagcttgtctgttactagggtgacatgttgcatggggtatgagcaaaggtttttgatgctgaactccatctcttccatttgttagcatcg

SEQ ID NO: 769727 - DNA, 438 bp, Homo sapiens
atatcactatacagggtcctatgacaggtattatattttattacattttcacatagttaacacattcacacctatgtaatgtaatggttatacttatgaacttaaatacttttaatatatgaaaaaagttagccttggcggtctccagattccatgaagattagtagtackattcctcccagatccttcttacaacaaaagaactttgggtatatgtagcaaacaaacataggaagcctccaaaatgtagaaggaagatgttctgcctagggatctcagaacttgagggaagacatagcagtgggtccactggatttcttagtgccttccgtatatcctggacagggagatccagaagcctccaaccccaaacctccaatagacatggacacacagctccaaagaaaacctgtccctttagccaagagacatgaaaaa

SEQ ID NO: 769728 - DNA, 618 bp, Homo sapiens
tgggtcaaatgactcgggaactttcagccagcaccaaacgctgaggactgtacacacactttcaaagggcaagaaaccaattttccatgttctggaggtaatctattccaaagtgaatgagctatggaaatggacttgcaggcaggtttcggaagawgatttaagggatttcagcagctggaatagaatcatctcatgcttttccagagggcatctgagctatcaatggatgaacatggcccaactcttaactcgaccttttcactgctgtcagtctgacatgctgacgtgaagcagggattgttatgagtcagggagaagtgccactgggacagactaaactctacacgagccagcctgggaaccagtgtctgacatttggtctcagatccaggtattctagagctggagcagttcttaccgtggccccttgatgcagtcagatgcctggacctaagtgaaggatgggatctgcagtgaccacagtcagtccattgtcgccacattaaataacatcatgggcattggggaacatgacgcagaatcacggaattaggacatctggcgtggaaaacaatgctagattgcccacctcatcagaagattctcttctatgtt

SEQ ID NO: 769729 - DNA, 618 bp, Homo sapiens
tgggtcaaatgactcgggaactttcagccagcaccaaacgctgaggactgtacacacactttcaaagggcaagaaaccaattttccatgttctggaggtaatctattccaaagtgaatgagctatggaaatggacttgcaggcaggtttcggaagaagatttaagggatttcagcagctggaatagaatcatctcatgcttttccagagggcatcygagctatcaatggatgaacatggcccaactcttaactcgaccttttcactgctgtcagtctgacatgctgacgtgaagcagggattgttatgagtcagggagaagtgccactgggacagactaaactctacacgagccagcctgggaaccagtgtctgacatttggtctcagatccaggtattctagagctggagcagttcttaccgtggccccttgatgcagtcagatgcctggacctaagtgaaggatgggatctgcagtgaccacagtcagtccattgtcgccacattaaataacatcatgggcattggggaacatgacgcagaatcacggaattaggacatctggcgtggaaaacaatgctagattgcccacctcatcagaagattctcttctatgtt

SEQ ID NO: 769730 - DNA, 618 bp, Homo sapiens
tgggtcaaatgactcgggaactttcagccagcaccaaacgctgaggactgtacacacactttcaaagggcaagaaaccaattttccatgttctggaggtaatctattccaaagtgaatgagctatggaaatggacttgcaggcaggtttcggaagaagatttaagggatttcagcagctggaatagaatcatctcatgcttttccagagggcatctgagctatcaatggatgaacatggcccaactcttaactcgaccttttcactgctgtcagtctgacatgctgacgtgaagcagggattgttatgagtcagggagaagtgccactgggacagactaaactctacacgagccagcctgggaaccagtgtctgacatttggtctcagatccaggtattctagagcyggagcagttcttaccgtggccccttgatgcagtcagatgcctggacctaagtgaaggatgggatctgcagtgaccacagtcagtccattgtcgccacattaaataacatcatgggcattggggaacatgacgcagaatcacggaattaggacatctggcgtggaaaacaatgctagattgcccacctcatcagaagattctcttctatgtt

SEQ ID NO: 769731 - DNA, 601 bp, Homo sapiens
taaatgcgacccacagaacgaggggacaaacgggggcaagaagggtactgtctgacgcagtcagaagcactggtattgaggatgaggtgcagtgcgggaaacggcaccttgcccatgccagccagtgacaggcatctcaggccctccgggcacatttgagccaccctgccctcctcccccttccctccctaatacctctcctctgcgcccccactccctgctttgwttctcttatatgcaaaatagggatacttatcttgcaacattattttaatagttaaataagataactgttgcagagctccctccaaagtgcctggtattgataggcattcaacaactggcagaacaatagctgcgccattagtcttatcactactgccctgagatctgctggccctccctctgtggcttcattcattccctttcctgccctccccgcttcttcacccactggccttacgctccttgtcttctctacaaggcaataatgacacttccttcaaagttcaagtcaagactcaacttctccaagagaccttccttgacttcatccttgtgccagaaattctcctgtgtattcgtgctttcagcatctcat

SEQ ID NO: 769732 - DNA, 492 bp, Homo sapiens
tcatccacatctttctgtctccttggccactgccctggcctggactctagtgccctgtcccgccctgtggggacagcccccccctctcgtctccttggctctgtcgtgccaccatccagtttgttctctgctggagagacagaggacactttttgaagcatgcatttgataaggccacttttgtctcttgtcctcagataagatcaaaactcttttgcgtggcttataaggtgcctgcctaccccctggcctgttgcagccctctctgccacactgactcactctgacctgagtctccacgtcagccacacctctggtccctcgggcaggcccaycttctcctgcccgggctcagcacaggcatcctcccacttgcacagcagcatcttcttgctagctctcctctctgtgcctggctgaccagagctcagcccagatgggacgctgcttcctccaggttgggcatctttcccgtatgctcccatgtgagct

SEQ ID NO: 769733 - DNA, 491 bp, Homo sapiens
agttattaaaatattgattaaagaaaaccaacaaccatttatcatcatggaagagtggttgttaactgcttttatctcggcagagcttcatggggagcttgaaaaagctcattgtttgtgtgttttgagctgtaagagttgggaagtgtgattagactcaaagggctcactttcatttgtattakagagctggggggaaatccaccctccgaggttgggggctgagcagctgtgcctgcaagtcctgcttccagatgcttctcccctagaaagttcctacagcagggaagaggaatctctgatctacattacttgaactttgttttattgtttgtttgcttttttttttttaccaccaaagttcacttggtgatttttgcaaaatgccatcccaatcatttttgttttagtaatgactccttacaaccaccctgtgcactgtcaagtggaaaaacagaatcataagggcctgaaatgaggatcccaaacag

SEQ ID NO: 769734 - DNA, 618 bp, Homo sapiens
tctgcctggggaagtggcattctacctcgtcagcaacatgtacagagtggaggtaatcggtcttcagattctgccacaacgcaagtgaatttttaaaagcccaccagcatcctttgatctggttccacccttaccaagcaaagtccatcatgtrtatggtatctgggttactgtggcttggaagaggcgcttcctaaatcactagccttgctttgggagccaaagctcacatttcagctcctcactcactctccgcattgacttccttagtctcagcatcgggtcaggacggtggaacgggtgggaagagacgaaacctgtggaatgtgaaatactttcccctattttgatccctggaaaggtctatccctaatagaaattcaacactttgatcctgtgatttctagtacagtttttgtcatttttttctaaccccaaatcagttgcttacgatcagatcatccttgggtgaactgtaaaaactgagtttctgaaactgaagtttccaagcaagcctccagtgaccccagcttccctggccccctgctgctattctttgatgtctttttagctgcaccctaagtcatcgggaacattctttcagaagagagaagtgta

SEQ ID NO: 769735 - DNA, 618 bp, Homo sapiens
tctgcctggggaagtggcattctacctcgtcagcaacatgtacagagtggaggtaatcggtcttcagattctgccacaacgcaagtgaatttttaaaagcccaccagcatcctttgatctggttccacccttaccaagcaaagtccatcatgtatatggtatctgggttactgtggcttggaagaggcgcttcctaaatcactagccttgctttgggagccaaagctcacatttcagctcctcactcactctccgcattgacttccttagtctcagcatcgggtcaggacggtggaacgggtgggaagagacgaaacctgtggaatgtgaaatactttcccctattttgatccctggaaaggtctatccctaatagaaattcaacactttgatcctgtgatttctagtacagtttttgtcatttttttctaaccccaaatcagttgcttacratcagatcatccttgggtgaactgtaaaaactgagtttctgaaactgaagtttccaagcaagcctccagtgaccccagcttccctggccccctgctgctattctttgatgtctttttagctgcaccctaagtcatcgggaacattctttcagaagagagaagtgta

SEQ ID NO: 769736 - DNA, 618 bp, Homo sapiens
tctgcctggggaagtggcattctacctcgtcagcaacatgtacagagtggaggtaatcggtcttcagattctgccacaacgcaagtgaatttttaaaagcccaccagcatcctttgatctggttccacccttaccaagcaaagtccatcatgtatatggtatctgggttactgtggcttggaagaggcgcttcctaaatcactagccttgctttgggagccaaagctcacatttcagctcctcactcactctccgcattgacttccttagtctcagcatcgggtcaggacggtggaacgggtgggaagagacgaaacctgtggaatgtgaaatactttcccctattttgatccctggaaaggtctatccctaatagaaattcaacactttgatcctgtgatttctagtacagtttttgtcatttttttctaaccccaaatcagttgcttacgatcagatcrtccttgggtgaactgtaaaaactgagtttctgaaactgaagtttccaagcaagcctccagtgaccccagcttccctggccccctgctgctattctttgatgtctttttagctgcaccctaagtcatcgggaacattctttcagaagagagaagtgta

SEQ ID NO: 769737 - DNA, 618 bp, Homo sapiens
tctgcctggggaagtggcattctacctcgtcagcaacatgtacagagtggaggtaatcggtcttcagattctgccacaacgcaagtgaatttttaaaagcccaccagcatcctttgatctggttccacccttaccaagcaaagtccatcatgtatatggtatctgggttactgtggcttggaagaggcgcttcctaaatcactagccttgctttgggagccaaagctcacatttcagctcctcactcactctccgcattgacttccttagtctcagcatcgggtcaggacggtggaacgggtgggaagagacgaaacctgtggaatgtgaaatactttcccctattttgatccctggaaaggtctatccctaatagaaattcaacactttgatcctgtgatttctagtacagtttttgtcatttttttctaaccccaaatcagttgcttacgatcagatcatccttgggtgaactgtaaaaamtgagtttctgaaactgaagtttccaagcaagcctccagtgaccccagcttccctggccccctgctgctattctttgatgtctttttagctgcaccctaagtcatcgggaacattctttcagaagagagaagtgta

SEQ ID NO: 769738 - DNA, 592 bp, Homo sapiens
catgcctgtaattccagctacttgggaggctgaggcaggagaattgcttgaacccgggaggtggaggatgcagtgagccaagatcgcgccattgcactacagcctgggtgacagggcgagactccgtctcaaaaaaaaaaaaagaaaacatctttttttcctaaaactgtatagaatcaatatttagctgtgtttcctggtaacatttgttctgtttagaacatcttgaaacaatgttattaaaccagactctatgttcttatgcctttaataagttaaagygtcaaattatagcaagaaataatatattaaatgtaattactaagaaataggatttcaaaaaatatgaagtatttatttaccaaatgaattaataatttattaacaagagggtaatctattaatattaacattttaatattaatccgttaatattaaaaatacgttagagacttgtctaatattttctgaaaatatcaattttttctcattcataaagacaattacaagcatttgtttaattaaatgattatttaaaatattttttgagctctacacccctaagaaataaatgtttactttgggagcattt

SEQ ID NO: 769739 - DNA, 439 bp, Homo sapiens
tatagcctaggtgtgtagcagactctaaggtctagatctgtgtaagtatagtctgttatatttgcacaatggcgaaattgtctaatgatgtatttctccaaacaaatctctgtacttcagtggcacacaaccgtgtcaatattctgtttatttcctgaatatctgaacacaaaatagatttgatttaagtaatttattgcattagtttttcaccatgctattaactcaccacaatatyaaaaaattgggggactttcaatatgtattaaacctgatattgaaatattccagttaattgaattacctaaatatatgtaatatacatatttttatatatctgtgatcataagtatttcttaaatccaaccaataaaaaactgtaaactattggtctatacataattgattcttcaatgcttagggataaacatattttgaa

SEQ ID NO: 769740 - DNA, 617 bp, Homo sapiens
gaccattttggttaaataggactctttcatatttgcttagctttattttttttccctgcagtctttcttcatggtttttctagattcccattattccagctttcataaatggagagtcaaaggatgtttcctgtaatcttcagggaggaaaatcctgaaaaagactggtaaagtccaacttgcatctttgtcccttcttctttaatgggggatgaggtactgtggtgggcaccaatgggtagaaggaacagagttctaaaatggaagaaggaatgctggcaatggatatctactatgataattcaactaaagaggacaatagcaaaattaagttatatttaaaaaatacaggaggccaggtgtggtggctcatgcctgtaatcccagcactttgggaggccgaggtgggtggatcacctggggtcaggagtttgagaccagtctgaccaacatggtgaaaccctgtctctctaaaaatacaaacaattagccgggcaygttggcacatgcctgtaatcctagctagttgggaggctgagaatcgcttgaacccaggaggtggaggttggggtgagctgagatcatgtcattacactgcagcctgggcaacaagagcg

SEQ ID NO: 769741 - DNA, 590 bp, Homo sapiens
ccgtctcaaaaaaaaaaacaaaacaaaaacaacaacaacaacaaataatagatgtctccgggaaagtatcatatatgtttgaatataatgtgtgtgacacctaaaattatttctactgtatgaagaaaatcagtactttgggagaaacaggtaaaaatgaaaatgtaattcagcatcagtttgagtttcactgtgagcctcagtccaggttttagaaagaaaggtacgtagacacaattctggctttaaatagttcacaatgtggcaaaagaaacttcattaatttcttaagattaatgataaatacagtttctttgggcagattgactctaaatattgagttcaagggggttaattacagtataaaagggtttctagctgttgaaaaggttgggagctactgaattaggcctccagatcctgtggcctacctgttayacctcaaagcctcaattttcagccgcttccttagcctttctcaaccagggctgtgagacagttaagctctaaggaaaattgtttgagtaactaatatcagttctcccaaggactgtatttaggtattctttacctaccatggatgtgttagg

SEQ ID NO: 769742 - DNA, 600 bp, Homo sapiens
tagaatagattaaaaaaaaaaaaaaaaaaaaaggctgggggcatgtcaaggagactctggagccaacctgaaagaaccctgaatggccaaagccagaaaaatttaagcaacaaaataaataatgtagtactaatttataacccaaagtattaacagaaaataaacatacatgagtctacacttacatttaaaaagtaaatgatatgaataatttcacttagtacagcaccaggcacatcacaattcattaataaatcccagtttcycttccttgtaagcacaagggtaagaaaacatatggtctgaagcttacagttaagggcattaacaaaaaagatcattacccattcaaaaataaatgttatattatgtaaaaaagacatacctgcctttaatttttaaaatatcatcctgatggcaggcatctagctttagcaaaaatgaatagggcgttccctcactttagactcatagtacttagaatagactactgttagaattctttttattctctcttttaattaattgtgtgcatgtctgtctcttccaccttatgatgggctccaaaatgttgacatctgaatcttatatgtaacgtca

SEQ ID NO: 769743 - DNA, 546 bp, Homo sapiens
ataaatataaaatacctaggaacaaatttaactaaggaggtaaaggaccactagaaggaaaattataaaacattgaagagcatataaataaatggaaagatatactatgcttatggatcagaagaagtaatatttaaacgaccatactacccaaagcattctacaggtttagtataatccctgtcaaaataccaatgacatttttcacagaaataggaaaaatcctgaaattcatwtggaactgcaaaagatgccaaataaccaaaacaatgctgagcaaaaagaacaaatctggaggccctaccaaactcaaaatatactacaaatctatagtaaccaaaaaagcatgatactggcacaaaaacagagacatagaccaatggaacagaatagagatctcagaaataatttgcttatccactaaggcactgattttggggaaaagcgccaagaacactcattggggaaaggaatgtctcttcaataaatggttctaggaaatgtaaatatccatatgcagaagaatgaaactatactcccacctct

SEQ ID NO: 769744 - DNA, 624 bp, Homo sapiens
aagaattcaccaactaactatttgctaccttcaagagactcaactaacccataaagactcacataaacttaaggtaaaggcgtggaaaagacattccatgcaatggacaccaaaagcaagcaggagtagctatctttatatcagacaaaacaaactttaaagcaacagccattaaaaagacaaagaaggacattacataatgataaaaggccttgtccaacaggaaaatatcacagtcttaaatatgtatgcacctaacactggagctcccaaatttataaaacaattactaatagacctaagaaatgasatagatggcaacacaatagtagtgggggacttcagtactccactgacagtactagacaggtcatcaaaacagaaagtcaacaaagaaacaatggatttaaactataccctggaacaaatggacttaacagatatttacagaacattctacccaacaaccacagaatatacattctattcatcagctcatggaactttctctaagttagaccatatgataggccacaaaacaagcctcaaagaatttaagaaaagtgaaattatatcaagcactctctcagcccacagtggaataaaactggaaatcaaatccaa

SEQ ID NO: 769745 - DNA, 683 bp, Homo sapiens
aatcaccaacagttatgtcagctgttttgatgttagccattctaaccgagtttagctcgttatagtttgtagttccttaaagagtaacaatattgagtatttttaatgtactttcttttgcccttagtgtatcttcattgctgaagtttctatccaactatgttgcccatttaaacaaattgggatgtttgtcatcttattactgaattataagaattcactgtaaattctggatacaagtccttcgtcagttatatatattgaaatttttttatcagtccrtagcttttcatcttgcaactcttttgaacagcaaaatttttcaattttgatgaagttcaattatcaatgttttcttttattgattttgcttttggtggtataactaagaaatatttgcttaaccccagttcagaaatatttttctcctaagttttcttatacaaattctatagtttctgttcttacatttaagtctatgattcacttaaagttaatttttgtgcacagcatgatttaagagtcaaatcttaatttttgtatatgaatatccaatttgttgaagactgtccattctccattaaagtaccttggcatctttgtcaaatgaattgatcataaatgtgtgtttatttctagacactctaatctgttccattgatctacatgtttattcctgtgca

SEQ ID NO: 769746 - DNA, 654 bp, Homo sapiens
caaaattctcaaccaagaatactctacctggcaaagctgtctgtcaaaaatggagagacaaagactctgctaaacaaacaaagttaagggagttcatcatcattagaccagccttgcaataaatgctaaagtgagttcttcaagttaaaatgaaaggatgcaatacaacaacacaatggcataagaaaatataaaacacatttgtcaaggtaaatatacagacaaatacagaatgctgtattattgtaataatggtaaatcacttttaattctactataaaagttaaaacacagaagtattaaaagtaactatagcctaaaaatattaaaagagacaatataaagagatacaaattgtggcaccagtragataaaatgtgagggataagtgtaggtatagttttaataagcaattgaacgtaagttgttcacagtttaaattagacagttataagaaattttatgtaagccccatgtcaaccataaagaaaatacctatggaagtaacacaaaagaaaaagagaaagaaagcaaagcttatcagttttaaaaataaatgaaacacaaagacagtaagagagaaaaagatagacaaaataactacaaggcagacagcaatgaacaaaaaggccatagtaaatctttcctgatcaa

SEQ ID NO: 769747 - DNA, 637 bp, Homo sapiens
tgcacaaatctgtacaaggctggttatcacagtgtcatttataatatcacaacattacaaatgactttaatccacatgctacaggctggcacccttgccctcagaggtactgagttgtgtgttagggtgctctaagcaatatggtagacatggtgcacattcaaagggggttggttttacttgatagcgactaatttagaacaaaaactttatattaaaaccaatatagcaggtcacacmactaggatgactaaaatcaaaaagacagatgatgacaagtatagctaaggatgtggagaaattgaagccctcttacattgctagtaagaagtaaaatggtgtggtcactttggaaaaccgtttggcagttcctcaaaaagttaaacattgagctaccatatgacccagtaattcaactccaaggtatatacccaagagaaatgaaaacatatgttcatataaaaacttgcatatgagtgttcatagcagcattattcataagagtcaaaaagtggaagcaacctaaacgtctaacaattgatgagtggataaacaaagtatggtttatatttgtacaatggaatcttgtctgggaagtaaaaagaatgaggcactgatacagtgatacctgctacaa

SEQ ID NO: 769748 - DNA, 639 bp, Homo sapiens
tgaatgtgaggcctgggccaaatggcactctcttctctcctttgcagtaacaggccctgccacacacacaagcatacccccacctctacatgtaaaccccacctgcgtacacaccatatatgacttacccatgtccccacatttatacatgcacattccatgcacatattcacataaccacacacgctcatctgtgcacatatacctaaacacccccccctccccaacacacacaaactgcccacatatacactcacagaagaccctggacatctgtaaggaaagcatctggagacctttgggaatcctcagacctgtgactgtcgtggagccggtgccaggtcctggctgtctcctccatacatttctggcaagtgccagaggctcccttgagctacctacctcagatgtccyaccttttccactcttacccatcttctctctcaacccctagtcacttcctacaaaggaaacggattccttccagagtgttactgttatgggaagcaaatcccacagaccatccactccatgcaggctgggactgtgtctgccctatccacactgcattcccagctcctggccccctgtggctaagtgttgattggaaaaaagtcaccagagcagcacagaggcaca

SEQ ID NO: 769749 - DNA, 637 bp, Homo sapiens
tgcacaaatctgtacaaggctggttatcacagtgtcatttataatatcacaacattacaaatgactttaatccacatgctacaggctggcacccttgccctcagaggtactgagttgtgtgttagggtgctctaagcaatatggtagacatggtgcacattcaaagggggttggttttacttgatagcgactaatttagaacaaaaactttatattaaaaccaatatagcaggtcacaccactaggatgactaaaatcaaaaagacagatgatgacaagtatagctaaggatgtggagaaattgaagccctcttacattgctagtaagaagtaaaatggtgtggtcactttggaaaaccgtttggcagttcctcaaaaagttaaacattgagctaccatatgacccagtamttcaactccaaggtatatacccaagagaaatgaaaacatatgttcatataaaaacttgcatatgagtgttcatagcagcattattcataagagtcaaaaagtggaagcaacctaaacgtctaacaattgatgagtggataaacaaagtatggtttatatttgtacaatggaatcttgtctgggaagtaaaaagaatgaggcactgatacagtgatacctgctacaa

SEQ ID NO: 769750 - DNA, 576 bp, Homo sapiens
tgttacattaattaaatgaagtaaggatataatattcctagcaccgtggcagggacatagtgtgttcaatatatgtcagctgccattatcatcatcatttttttattattacagtattaaataatttagtgacaaccatgtcattggacatttaggctgtttcatgtgaatcattatcacagattatgctgctatggacatatttgtgcatgaaactttttctgtatttgttttcttagaatagatttccagatgaaaattaatgtgttttaataagtataaggatgtttcatatttgggatacaggctgccatattgttttctggcaggagcagttaatacaatgtttgaaaccaggttgctagaattatttctttatttttgctcttgtrtaacagagatggactggagagagttgtatatgtgttagaatttacttagaaggtagtcttttccctattaaaaataccctgctgatggccaggcactgtggctcatgcctgttatcctagtactttgggaggccaaggcgggcagatcacttgaggccgggagttccagaccagcctggccaac

SEQ ID NO: 769751 - DNA, 556 bp, Homo sapiens
gaagttcctgaaaggcagaaaatgtttacgccttctttttttcatagtgatcacatgtaacagagcacatccctaagcaacaattagactctcagttcttctatcaccaaaggtgggacagattcattctattactaaaactagaagctgcttcagggataagaaatagatttcttccatcttctataaccctaaaggcaagaaagaaaattggttccatggacatagtcatttcctctgtgattccactgttcttcttccatcctatatgctatattcatgagtcaagttctcaaatattaatacttattagcttattaaatagttttcacaactcttctctacttctcattgtcccaatgctaattaatgttatagccaaggaytgaaattcgttttcccattgtctgacttcttcctgaaaagctgaattcttgtccaaaaaacgaaaactttcaagagattcacccagattccagactctctcagaactataagtcccagagacctgatcagtgaggaaagacggcttataggagccatcagtggatgtgtt

SEQ ID NO: 769752 - DNA, 537 bp, Homo sapiens
aactgccatgcgtaagatggttagcttgtctggttttcgagccagggcactacaggtgggtaccatatctgacagttctgtgatgtaggctgtcatcttgttccgtcgccgccgttcaatttcactgtgattttccctgcatggaaagaaagagaagccccatccaggtggtcacatctggtcatttggtagcagggagagtgatatggataccaagtgtgctgctgaagaatgtggtattcagatttagtgatgcttaagtctcagcagttaaaataaggtttgccaaccttctcatgcaaagcaagcatgaaacagaactaataaggcagacagagaacaagaagataatgtaattcccttccccctatttcctggaaacttcacatcctttgtaaatwaccactccctcagaacaaaagctgttttaagaaacgacaggtcaggcatggtggctcatgcctgtaatcccagcactttgggagatggaggcaggtggattacttgaggccaggagtttgagaccggcctggccaa

SEQ ID NO: 769753 - DNA, 551 bp, Homo sapiens
atttctgatgatttctataagcacagaaaaacaagaacatgctcctcagtctctctgaggtactgtgccattccttgaccacttaccctgtgggtagacactcttctagtctcttgtactggtagccagagttagggttgatttggcctcctggggtacaggctgtagcctggatagttagttgatggcaggcacacttggacctatatgacagagggaaataaaggaaaggagcggggggatcagagaacaaaaataacacaatacacwtgtacccaaggttgctcagtgtggccatgtcagactccagcctccctacctcatagctttcatggaggccttatagcaggagttccaggtgagggaggaggtaaaggaagatggggaaagcagtacagatacaaggcaaaggaagaggtgaaacagacaccataacaaagttggaagcaggggcagcaattccccccaccaactcacttgtcccgacacccatccttgcagtcacagccaaccagaaattcagggcctgtgttaatgaaaacacccttgcc

SEQ ID NO: 769754 - DNA, 675 bp, Homo sapiens
ccccaggtggatccagaggtgctgtcttggagtcagaaaccttagatgtctacctgctgttctattgtattgcagctgagcgggcattcaaaccataagacatagtccttccccctcttacctactctttggaaaggcagaggagccttatcccatagccattgccatccaggctgcaaagagtactgccagactgccagtcaatgttcccttaaggcccaagggctcttaagtcagcttrcagttaatgctacctggcctaggattcatccttcagggcagtgggctttcctctagcccaggacagatccaggaatgctgtccaagagtcagtgcttggaatcagggaccccaacagcccccttggtgctctgccctcctgtggttgtggggatacctaaggtttaagacaaagtcccctttacttttccctattcttttctcaaacagaaggagttttgccccacagccacctcagctgataatgatgtactgagtctcacttgaagccagcaaggtctcacaggctcacccaaggccctcaatgcagtacctgggtatcactgctaattattctggggccagggacttttcatttagcagacaatgaacgctggcagaactgggttttttccttcaaggcaatgggttcccttctggcccagggtatgtcta

SEQ ID NO: 769755 - DNA, 560 bp, Homo sapiens; identical to SEQ ID NO: 761030

SEQ ID NO: 769756 - DNA, 628 bp, Homo sapiens
tgaaaaagaatggaattttaaaattccagataaaatctggaaataaacccatgtgtctgtgtgcatatagtcaacttattttcaagataattcaataaaggtgtgccttttcaataaatatgaactggaacaactgtaaaaaataaacttcaaactttatttcacataatatacaaaaattaacttgaaatagatcacaattttgaacataaaagtaaaaaatataaaacttctagaagaaaataggygaaaatttttgtaatctgaggaaggcaaagattttttagagaggacacaaaaagcacaaatcgtaaaagaaacttctttgtcccttaaagttaggcaacatggcaatttgacttaccttggccaaagaaataagaatggaagtagcatgtgcccattctgtgtttaattgccagtgctgacatgaccaggaagttctgggtaatgaagtctccattagcctgaatctctgggtaaagcaatggaaaacaaagtgccactaacttgcaaagcgaatgtgacctgtgtgtaaatgaaacccctttgtcatttgcttatttgtcttaagccaatcctattttggggggtgttgtttgctatgaccacataaccaaacgtatct

SEQ ID NO: 769757 - DNA, 549 bp, Homo sapiens
ctctgttttttccccatctttgtggttttatctacatttggtctttgatgatggtgacgtacagatgggtttttggtgtggatgtcctttctgtttgttagttttccttctaacagacaggaccctcagctgcaggtctgttggagtttgctagagaccagaccctgttttcctgggtaccagcagcggtggccacagaacagcagattttcgtgaaccaggaatgctgctgtctgatcgttcctctggaagttttgtctcagaggagtacctggccatgtgaggtrtcagtctgcccctactggggggtgcctcccagttaggctgctcgggggtcaggggtcagggacccacttgaggaggcagtctgcccattctcagatctccagctgtgtgctgggagaaccactgctctcttcaaagctgtcagacagggacatttaagtctgcagaggttactgctgtctttttgtttgtgccctgcccccagaggtggagcctacagaggcaggcaggtctccttgagctgtggtgggctccacccagttc

SEQ ID NO: 769758 - DNA, 628 bp, Homo sapiens
tgaaaaagaatggaattttaaaattccagataaaatctggaaataaacccatgtgtctgtgtgcatatagtcaacttattttcaagataattcaataaaggtgtgccttttcaataaatatgaactggaacaactgtaaaaaataaacttcaaactttatttcacataatatacaaaaattaacttgaaatagatcacaattttgaacataaaagtaaaaaatataaaacttctagaagaaaataggtgaaaatttttgtaatctgaggaaggcaaagattttttagagaggacacaaaaagcacaaatcgtaaaagaaacttctttgtcccttaaagttaggcaacatggcartttgacttaccttggccaaagaaataagaatggaagtagcatgtgcccattctgtgtttaattgccagtgctgacatgaccaggaagttctgggtaatgaagtctccattagcctgaatctctgggtaaagcaatggaaaacaaagtgccactaacttgcaaagcgaatgtgacctgtgtgtaaatgaaacccctttgtcatttgcttatttgtcttaagccaatcctattttggggggtgttgtttgctatgaccacataaccaaacgtatct

SEQ ID NO: 769759 - DNA, 584 bp, Homo sapiens
gcacctcttgcgtatagcaaaatacagccagcctcctgtggctgtccacctctgtattgtttgctgggaatcaatcctgaagacttagtcttctgatcaacaatgattttgtaaacatcaaatttcctgttaaatcacttcctctgtaaaatgctaacatagtttctgttatcttcaacagaaaattaatataaggggccatggcagaagctgtaaataagtgactaggacctcatggctacatattaaatacttaagaatgttttttcacttttataaaataatatggtccctactacttttttgaaatcaagtgtattcttgacctgtcttttgtttctcctctttaatagacatattttagaactatttctcaactatggagataagaaataccatgcaagcctggtactaaatgacatstgacaactggcctcattttgggtcatgtgcggggcatggcatgtgttgtggaaactcataatgggactctgagatacttcgacactagaggatcaagacagcagaagaggaaaaaggcaagctgaccagaaagccatgtcccagactatatcacacccagc

SEQ ID NO: 769760 - DNA, 601 bp, Homo sapiens
tttagaaaactgacaatactgacaatgtaactaaaatgcatgcataatatctcactatccatcttaagtatttcaatacaataaaaagtgttcagtacaaattttggcttatttaaaaattatcataatggaaatgtgaaaaacattgagtaaccctgagtatcaacagaccgtcattgaattgtagcagttaatttaagcagaaagtcatcttcattacatagctatgagacaaaacctggatttgctttgctgtcatttttgaattttagtaagctkcttctttcattctctgtcatttgccagcaagtagttcaaaatgttatagtttattgaggtggatttttctacagattattggcttcttgagttttgtattgaatatttttttttaattttcaacttggcactatcctcctagaatttcttttctactgacattcaacttattggagaaaatgagaaatgtgcaatggtgttgaaaatactttttaatttagctgttcttatactatgcttagttaagtgctatgtgcttcaaaatcatcatttattcctcaatcatctctttaaatcagtatattttccttcctatgatagc

SEQ ID NO: 769761 - DNA, 584 bp, Homo sapiens
aaggagaggtagaataatctggtagttcaaaagatccagacttgatctgccatatgctttcttctgctgtgaatatggacttattttgtccaatataatacatctttctttcacaagagaaagcgttggtcattacatttattgtccactaacaaaagctggccctggagtctgaatggtgtaatcagtcaaacccagaaatgagtcctaattctctctttttttttttttttttttttttgagacggagtctcgctttgtcgcccaggctggagtgcagtggcgcgatctctgctcactgcaagctccgcctcacgggttcacgccattctcctgcctcagcctcccgagtagctgggactacaggtgcccgccaccacgcctgctaagtttttgaatttttagtaragatggggtttcaccatgttagccaggatgatctcgatttcctgacctcgtgatccacccacttcggtctcccaaagtgctgggattacaggcttgagccaccgtgcccggccaatgagtcctaattcttgagcagtcaaaagagctcggaaactcctgcttgtgaagggatccct

SEQ ID NO: 769762 - DNA, 600 bp, Homo sapiens
agctttctctgtaacctctacccattggctttaataagtcgggctatgttggttgagtccaattccctattcacattgctttaagcatatgaagaaactgtgttgtcctttctaagccttctatttcccagggtaatcatgagcaattattttaattccctctgccatcttggttattcatctctgaacacaatctaatttgcttatttcgttcctgaagtgtattgtctattagagtgaggctaacatttctttggttctagacactagaattctcttgatgtgacctataattccaacaggttagatggcttttatcatcatattgctggtccatgaaataaaatccccatgacttatttcttatgtgctacctctcacattctatgtttctatagttggatttttggactaaaatttttctctagyaactactgtatttttaattttagagaacacttctagtatgcttggttttttatcttatcaccgaggttatcaagcattcctccatggattgcaactgttaagatgggagtcaattaaaagtttataaagcggggttagaggccctacttaggatggttagagtctcttcta

SEQ ID NO: 769763 - DNA, 448 bp, Homo sapiens
atcctgctgggctagaaaaacatgtgtgacccctagatctctatcctcacacagaaagcaaggacagctttcagaaggggactcacaactggaaattctaacaggtaaatattagtatcattaagaaatcttgcaaaggtgattattagccatctcttgtctgtcgagttctgtagcttttctttcttctctccttttctcagtttttctctctcccctgtgtctttctcctcctttgccacatctgtctgyctctttccttctcgtctgtttttctattctctggtctcttgttctcgctctttgtctctttctgtctcttggagcatttctctgtctctcttgctttgctacctttctctctctgtctttctctttcttgtatctcttgctgaccttggggtcactcccttggttttctccatttaatggagccccaacttgcctt

SEQ ID NO: 769764 - DNA, 682 bp, Homo sapiens
gaaatacgcatatacagtcttcatgttttaggaaagaagatgataaaagattcttgggagataggattttcagtcttggtgtctctacgtctctgagcagtcacattctgcaggaggagggagggtgttgtttctaaatgttcagactgttcaactgagaagacattgtgtgtctccgtacagcaggtgcatgacatcatttcacccatgaggccgagagttaatgctcttcaaaaacaaacttttaacattacatttttaggtttacatcttaaagtcattttagaaactggacctggactyataactaacccaccattatggccacaattagacttcaggacatcctttccatttcagtgatcacttgcagtttcttgtcttagcacttatcaaattagattccctaaagggagaattgtattggcctacgtcaccttttcttgccaggcaatggttcataagtcactaactactgcttagctcttttgtcaggagactcccgtattccaatccactgtggtctagggaaaattaggatcatttggttaagaccatggctcccaggtgtatctcctcagtgggaactttaatcaaaaaagtccttctcacaaggaacaaagggtagagaaatgccatgaaacatatctgatttagcccatcatcagcaacattctaaacc

SEQ ID NO: 769765 - DNA, 595 bp, Homo sapiens
gagaaaggaatccccgctcaataaatggtgctgggataactggctaaccatgtgcagaagattgaaactgagctccattcttacacaatatacaaaagtaactcaagatggattaaagatttaaatgtaaaacccaaaactataaaaaccctggaagacaacctaagcaatgccattcaagacataatcacaggcaaagatttcatgaggaaggggtttttttaaatagatatagagaagattattctaaaatgtatatggaaagacaaaagaattggcataactaaaacaactttgaaaaaaaaagaaatggagtgggaggaattaatgtgtacaattacaaaacayataacacagttatcaagactgtgcagtaaattggagggacagacacgaagatcaacagaacagaattaagaaactcaaaatagacccgcacgaaaaggtcaaactgatttttgacaaagatgcaaaaataattgcatggaaaaagggtagcctatacaacaaatagtcctagagctattggacatgcatgaaaaaaaaatttctacctaagtctcacatctttgtttttttcatgttgttgttgttg

SEQ ID NO: 769766 - DNA, 595 bp, Homo sapiens
gagaaaggaatccccgctcaataaatggtgctgggataactggctaaccatgtgcagaagattgaaactgagctccattcttacacaatatacaaaagtaactcaagatggattaaagatttaaatgtaaaacccaaaactataaaaaccctggaagacaacctaagcaatgccattcaagacataatcacaggcaaagatttcatgaggaaggggtttttttaaatagatatagagaagattattctaaaatgtatatggaaagacaaaagaattggcataactaaaacaactttgaaaaaaaaagaaatggagtgggaggaattaatgtgtacaattacaaaacacataacacagttatcaagactgtgcagtaaattggagggacagacacgaagatcaacagaacagaattaagaaactcaaaatagacccrcacgaaaaggtcaaactgatttttgacaaagatgcaaaaataattgcatggaaaaagggtagcctatacaacaaatagtcctagagctattggacatgcatgaaaaaaaaatttctacctaagtctcacatctttgtttttttcatgttgttgttgttg

SEQ ID NO: 769767 - DNA, 596 bp, Homo sapiens
tttaaaccactgaaaaggtattatcctgtcggctttggaattgtaaatttccaattctttagtgattaatatcaccataaataaacaaatcctttttgagaaaatgtctaagacacaagaaaacattgtacattttatttaactaggaacagtttgttgaacgtatttatcagctggggataggaaaagtaccctttatcgtcagcacatataatgtcacccgtgtctccaatgctttgcaggtgactgggagattaatcacacaatcttcaagctgtatttgtaacatgacatgtaagaattcattttccgcacagcaaccaggtatctttcaaaagcrtaaatcagagcatgccactcctctgtgtaaagctcttctccaacggtttcctcttgtacttagtcatattcaaaccccttaacctggcccacaaagatggacgtcacctggatcatggccactcctttgctaccatcatgcccacttgcttctttctcttactagaataacgccccgccacccaccttattcccaaggtctttggattaacctccatattgtccatggccagctacataagggaaggtgatgttta

SEQ ID NO: 769768 - DNA, 673 bp, Homo sapiens
catactcatcataatctataattatcttgttatttgtttactactatctgtctctggaactgtaataaaagcttcatgatggcaagggccttgcgtctggttctttattatatctccaaggcctaaaatagtgcctggcacccctgtagttgttgaatgaactgagtatacctgttgaactgaaaccatataattaatcttaaatgttaaatttaatctgttgctttcagaagtttgttttactacatatttaatgggtgtcagttttatttagcacttattatacttttctgcatttcagaaataaagttaattaagattttttggtaagggaaggcctgtgaggatacagacattgatgggatggtmtactttatatggttttagaaataacttgatatatattgatctgctgtggttgattaaatgcttacagtatggaaccgccggacatatttcaaaaaattagtaggttttaaattttttatattttatttaaaggactggcataaagctttggaaagcactttaaacagaattttataaaaatgtcctttatttaccagtaggtggcactcttggtcatggttactttcacaaaataaaatcttaggattttaaagagaactccttttttttttttttttttttttttttttgagactgagtttcg

SEQ ID NO: 769769 - DNA, 609 bp, Homo sapiens
tctgctttccacttcaacatgcttagagagtagttttggcctcataatcacaacagggctgctctacctctggacatcacatacatatttcaaatagggaaaaggcgaagaagagataggcagaggccagtccggtttgtgctcttyggaaaaaaaaaattagtaaaataatagttttcccagaatcctttcattcattttatttctaccagagctgctgccagcagtgacaggaagtctcgagagatacgtgtttttagctgtcccgagaaacatcaaagttctgtcagtacagtggaaggggagaatgaatggtgaggaagatgttacatttagcaatgttaaagccaatgaagtcactgaggggctgcttctcagatatgcaagtccagaaatgttaatagcttgactaacagagattcctctctagggagtggaccagggctgacagtcttaccagaaaaataattataaagtaacacatcaacgaagcattttaccagtgagaattgcaacagcccagtgactgggactcctttcctctactgctcaggacattgttcaccctgcagaaaatccatggtgcttagaagacagattcccagggaa

SEQ ID NO: 769770 - DNA, 609 bp, Homo sapiens
tctgctttccacttcaacatgcttagagagtagttttggcctcataatcacaacagggctgctctacctctggacatcacatacatatttcaaatagggaaaaggcgaagaagagataggcagaggccagtccggtttgtgctcttcggaaaaaaaaaattagtaaaataatagttttcccagaatcctttcattcattttatttctaccagagctgctgccagcagtgacaggaagtctcgagagatacgtgtttttagctgycccgagaaacatcaaagttctgtcagtacagtggaaggggagaatgaatggtgaggaagatgttacatttagcaatgttaaagccaatgaagtcactgaggggctgcttctcagatatgcaagtccagaaatgttaatagcttgactaacagagattcctctctagggagtggaccagggctgacagtcttaccagaaaaataattataaagtaacacatcaacgaagcattttaccagtgagaattgcaacagcccagtgactgggactcctttcctctactgctcaggacattgttcaccctgcagaaaatccatggtgcttagaagacagattcccagggaa

SEQ ID NO: 769771 - DNA, 566 bp, Homo sapiens
cctgggagatgctgattgatggccagtttctacacaaagtaacaatgatgggaatcaagactagctgttgtatccagctctcagctgacttgtgttgactgccagctctcatacccaagccaagcagtggaagccatacccctggaaggatgaaggtttctaaggggaaagggacagtcttgaaaggggctgaaagatgatatcatctcaagaagctgaacaagttatctcttacttgaaaatgggtctggtccctatctgcgagacatccggtccttcargatcagccaggggtgctatggggagaagcaatgtggggcagggagaagaacacctcccactctgccctttgaagggttaaatgatggaaagcagtgtaagaaccccttgtgcttgtgcatgtgagtcagtgtgtgtgtgtaagcatgtgagagtctgagtgtgggggggagcgagcatgtgcgtgcgtgtgtgtgtgcgcgcgcatgtgcgcgtcaaggagcagcaggaggtcaggatgcctcctgcccccccagagggagcagccttctttggctcaggtgccc

SEQ ID NO: 769772 - DNA, 672 bp, Homo sapiens
tgagcatcagtttcttctataaaatggggacaatgatattctttcacagggtgctatgagggtcaaatgaaataacaattgtaagcagttagcacagcacctgcttcatactcatgtacatccttgctttgcctttttctagtttgattctgggcattttagcctctctctgtccggtcttcccatctgtgaaatggggagagtaacagcamcggcctcactggagtgttgaaaggacaaaatgagttagcataagaaaagcacttagaacaaggcctggcatgtggaaaaatgtgaagtaagtgtctgctactcctcttcatttaatcaatatttgttaagttcttgctatgtgccatgcataatgataggagctggaatggtccatgttattaaccagtctgctttccacagactcctagctggtcaggaagttctgccctgcctggccatgccccatccacacacacattgacgaggagcccaccccagccaaggttctgtttggctcccgtctggggctcctcagtctccatcgcctcattcccaagtgcaggaaactgattccaaggatagtgctttctatacattgcagaaatagtgctggaataagggcatctctgagaagatccgttcagctgtcagagagcactcagggatgcctcccactgg

SEQ ID NO: 769773 - DNA, 611 bp, Homo sapiens
aggctgctttgtgggggctcaaggagtctgcacattcttcaaaacatgtagctttctctagtgtgtaccccaactgtgctgacttccttaaaccttggatttgcccaatggcgttaggatgcctggcccatcctccagcctgggccaactattggcattgatcagtgtagcagtggtgcacaaatcctgttgctctctaagttcagaatcytgtttaaagctctcctgtgtggctgcagccagcagcagagtctgcccctggaatgcctgttcctctccttcctggcagccaggctccatttagtttaaggattttgtgccaggaatgttatctgagctgtcaccatcatgctttgtcaccctcaagtgaatgacaggaaatggatcggcgagctctgtcagtttccttgctgctggcatcactcaggttcaaccatgagcatcgcactgtgagtcactgaggaggtggacagaagccactcaaacgtctctgccagacttcaaaagagctttaggagatagaagagtcctatcgatcggtgcctgttcttctgtcttgattgttactttgagccatgcagctgtgttaccatgggtgcctgccactcttc

SEQ ID NO: 769774 - DNA, 573 bp, Homo sapiens
caccaccaagtgacaccagttagagccccatgaagcagaggacttgcctagttgatcatgagccataatagttgctgttttggccgggtgtggtggctcacggctgtaatcccagcactttgggaggccgaggtgagtggatcacctgaggtcaggagttcaagaccagcctagcctacaaggtgaaaccccatgtctacaaaaatacaaacattagctaggcatgatggcaggtgcctgtaatcctagctacttgggaggctgaggcggcagaatcgcttgaacccaggaggcagaggttgcagtgagccgagatcgcgccattgcactccagcctgggcaacagaatgagactccatctcaaaaagaaaaaaaagaaaaaaaagttgctgttttaagccactargttttggggtagtttgttatgcagcaaaagataactggaacagtgcagtgggagtctggaattgctacagccacatgtggagagtctaaagccatccaaaaagtgatcaggacaaagtcctcttaaatttgacctcaaataagacctcttcagtgtctaaattttag

SEQ ID NO: 769775 - DNA, 562 bp, Homo sapiens
ggatacacctctttttgaagtttattggctcagttcacaagtaggatggtgaggcatgttacaaggaacgttcagccaccttggtggtgtggttttaggagcaattcaaagtccctccccccaccaagaaactttagatacagatgtagatgtaaatatatagatatatagatatcactttcttcctttcaatgcaaattscactgtaagtatttcatcattttagtaaaattttgacccctattaccctgggggaaagaaactatagatccttcccagaagttagggagggaataggaggaatgtccgtacttaaggagagtgggcaggtcctatatacagaatcgggatcggaagatgacagtatcaacactgtgtccatacacagctttttctctacttcaaattcttcctgaaatgagttggggtattaacatacaaagaaataaatacacaccttttaaaaatttcttcaacttctgctggggaataaaaaggataaaatgactaagcagaatcctgtgcattggtactcttaaagcaggctgtgaaagaagaaaat

SEQ ID NO: 769776 - DNA, 640 bp, Homo sapiens
cgtgcacatagggatgcctgcaatggttcagaagcctgcaatggttcagaaaaaaagaataaaaagttaccctgcaagctcccctgaaacactgtgggctctaggaatcatttagcccacgactctccatcttcactgaatcagccttcgaaaatgccytgccccattctttggaaggccggggaaactgacatcccagccagagcacaaaacacacgcaggtgtggaatcggggattgctggactcatcccagggaaactgacaccccagtgagagcacaaagcgcacatgggtgtggagctgggaatcactgggctcaccccagggcaactaacaccccagagcacaaagcacacgcaggagtggaatcgggaatcgctgcactcaccccagggaaactgacaccccagtgagagcacgaagcacatgtgggtgtggagccaggaatccctgagcacatcacacagcagcaaagacacgacacaccagacaggctgatgacttcccaattttttgcttgtttctgagaacaaactttttaaattgctcccaagcctccctcatctgtcaagttcctcccactcagtctcctgcccttgctgctgattattttgatggccaccagcaatggtctattcc

SEQ ID NO: 769777 - DNA, 640 bp, Homo sapiens
cgtgcacatagggatgcctgcaatggttcagaagcctgcaatggttcagaaaaaaagaataaaaagttaccctgcaagctcccctgaaacactgtgggctctaggaatcatttagcccacgactctccatcttcactgaatcagccttcgaaaatgccctgccccattctttggaaggccggggaaactgacatcccagccagagcacaaaacacacgcaggtgtggaatcggggattgctggactcatcccagggaaactgacaccccagtgagagcacaaagygcacatgggtgtggagctgggaatcactgggctcaccccagggcaactaacaccccagagcacaaagcacacgcaggagtggaatcgggaatcgctgcactcaccccagggaaactgacaccccagtgagagcacgaagcacatgtgggtgtggagccaggaatccctgagcacatcacacagcagcaaagacacgacacaccagacaggctgatgacttcccaattttttgcttgtttctgagaacaaactttttaaattgctcccaagcctccctcatctgtcaagttcctcccactcagtctcctgcccttgctgctgattattttgatggccaccagcaatggtctattcc

SEQ ID NO: 769778 - DNA, 625 bp, Homo sapiens
agactgaagaaagagagattttccttgctggctggacaagctaggagctatgttaaggaaactcacataaggaatgatgggtgccctgtaggatctgccaacagcctccgacaaatggctacaaaacgccggggtcttcaaaaatatattcamaaggaaatacattctcaaataagttgtgttagtttggaagcaggttcttccttagttgagcctccaaatgagaatgcagtctggccaacaccttgaataaagcttgtgagaccctaagtagaggatccagtaaagccatgctcagcttctttatccactaagtttgttgtaatttgttccacagcatagaaaatataccttgccaccaggcgcggtggctcacgcctgtaatcccagcactttgggaggccgaggcacatggatcacttgaggtcaggagttcaagaccagcctggccaacatggtgaaacttcatctctactaaaaacacaaaaattagctgggcatggtggcacatgcctgtagtcctagctactcaggaggctgaggtgagaggctcgcttgaacctgggaagcagaggttgcagtgaatcaagatggtgccattgcactccatcctgggcaacacagt

SEQ ID NO: 769779 - DNA, 599 bp, Homo sapiens
agaacaaagagaaggttggaagttttataaaaaggagaaatgttacatattgttttgaaagaatgttcatcagcgctagtaaagttttgggaagggggcaaactctgattggtgagtggttgcagtgggtaaaattaatcttacagtcttagcagctgtttcagtagctactagataaaactggtttcaggttttaacgacggtttcagcagtcaagcttgccaagaattgcattcttggagcaatgttttgtgccctgtgtgctttttcttcctgtcctctaaatgcccttttataattaaaaaaaaatttttagagacaagatatcctgtcrcccaggctggagtgcagtggtgcaatcatagcttaacttcagccttgacttcctgggctctagcaattgtctcaagtagctgggactacaagtatgatccaccacactggctaatttttttgtttgttttttgtagagacaagagtctccttacattgcccaagctcctagtctcaagcaatcctcctgcctcagcctcccaaagcgctgagctaccgcacctggtcttgacttttttagttggtcatgacaagaatgacccaat

SEQ ID NO: 769780 - DNA, 562 bp, Homo sapiens
ggaagggggttgctgattggggatgaaattacaggggtatggaaaacagtctttatgcactgagtatgccctttgggtgagggccacaggactagttgactcatggtcacaggtcctggtggggtccagtggttgccagaatgcaaaagtctgaaaaacatctcaaaagaccaatcttaggtgctatagyagtgatgttctctacaggaacaattggggaagtcacaaatctttgacttctagccacatgactcctgagcagtaagggattatagaaactacgcctacatttagcagaattcgggttcttcccataatcctaatctcatagccttccattagttttacaaaggtggctttactccctagcagggcagaggttagtctgagggtggggttattatcatcctttctttaaagttaaactctaaactaaattcctcccacgattagcttggtctgtgcccaggaacgagcaaggacagccagcctgtgaggctagaaggaagatggagtcagccatgctagacttctctcactgtcatcatctttgcaaaggcgg

SEQ ID NO: 769781 - DNA, 521 bp, Homo sapiens
agaactagaaggatagggttgccatttactgagattggaaacactgtgggagaagcaagctggaagtatacagagaatcagaagtttagttttggacatattaagtttgagataccttataaaaatccaagtgcatataccaagtaagaagctggataaatactaacatagatatcagtggagaagtctgtgtggataaacacattagagtggtaaacatataaatgatatttaaagtcacaagactggatgacaaagtgcaactacaaaaaccttacagctaacatcatacttaatggtgaaagactgaatgttttcctctttaagatsagaaggaggcaagaatgtccaatctcatcaattctagtcaacattgacctgaagatcctagtcagtgccataaggcaggaaaaagaaaaggaatacagattagaaaagaagtaaaactgtctttatttacagatgacatgtttgtctatgaggaaaatcctatggaatctacaaaagagctaatagaacta

SEQ ID NO: 769782 - DNA, 627 bp, Homo sapiens
tgtaagcaaaggcatgaaacaagtaaaccatcttctctcatcattaatcattagattacaacctttatagctaagttttttatagcctatagtttatatattatattgtgcatttataacctgtaaatgaccatttattgtaaggtaaatgaaaaaaataagataaaaatgaaatggccctttgttaccatagtaaaaataaatttaatataggaatgtaaaataaaaaaatgcccgttctaagtacttacacagatgctcctcaatttacaatggggttatgtcctgataagcccatcaaaaactgaaaatatcataggttgaaaatgtatttaatatgtttaacctactttaaatgtgcccagaayacttacattatcctacagctaggcaaaatataacagaaatcatattttataataaagtattatctcatgtaatttactgaatactgtactgaaggtgaaaaaacagaatggttgtatgggtattcgaagtatagattctactgaatgtatattgctttcacaccatcgtaaatcaaaaaatcgtgaagttgaaccatcatctgtctgtatagctctggatagttttcaggcctgtttatatggctggcatttaagtacg

SEQ ID NO: 769783 - DNA, 633 bp, Homo sapiens
taacttctcccacttgttctttgcttggttctggccatgttatccttccctgactctatttgttttcaccctctctatttggctaagttcatattttgttaaaagcttacaattttaaaatttagttagaataaatgagacattaagttgaataaaatggaggatatagccaaagggaactttgggtcactcattaaagcaacaaatatttatttgctaactagtgtaagacagagattttctggctagcttccttcctctgtgaatctttaacttgatcattcttaccgactttatctgcatcatgcttcttaaattcactgagaagatctgaagaatgagcaaacagcttctccctcagagctctcagagccgactcctccactctgctaatcctgggacaggagatgaaaagcgacattttaacacactggtatagaaaaaatacttagagattttactatatttccactctctctttcttaacatatcagtctcccaagagctcagttttygagggagagcgcctttactcttccctgttgtacacaaacaggatgagtatggggaatgccgctgtccttcctggtatgggacagtggttagagaagaagttctggagaaggatcacct

SEQ ID NO: 769784 - DNA, 610 bp, Homo sapiens
ttctggctagcttccttcctctgtgaatctttaacttgatcattcttaccgactttatctgcatcatgcttcttaaattcactgagaagatctgaagaatgagcaaacagcttctccctcagagctctcagagccgactcctccactctgctaatcctgggacaggagatgaaaagcgacattttaacacactggtatagaaaaaatacttagagattttactatatttccactctctctttcttaacatatcagtctcccaagagctcagttttcgagggagagcgcctttactcttccctgttgtacacaaacaggatgagtatggggaatgccgctgtccttcctggtatgggacagtggttagagaagaagttctggagaaggatcacctctgtggtaaagttatctaatcatcctttgcttcagttttcccacctrtaaaacagtgattaaaatggtacctgtctccacttcacaggattattgtgaagattacaatgagtaatttcatgtacagcacttagaagaaagcctggcacatagaaagcactcaccaaatagtatctattatcacaactgttgtgcatttcttgtaatttattatcat

SEQ ID NO: 769785 - DNA, 614 bp, Homo sapiens
atgttaactcattttttaagagttggggttttgctctgtcacccaggctgatgtgcagttgcacagtcacagctcactgcagcctcaagctcccaggctcaagagatcctcccatctcagccactggagtagccaaaactgcagtcatgagccactgtgcctggcaactcatttaatccatccaacaaccttctgagactaagtgctattattacacccattttatacatgaggaaactgaagtctagtgagattcagtaactttcatggcaagtgagaacactagaattcaaacctgggcaatgtggttccacatttttaaccactgtgtttttaaattgtgtactcactgtgtgcaattctaaggctttgctagrtgcttcaaatttattgtctcatttaattaccatagcactgtagatttccacaccccaatttacagatgaccaactacagatcaaagagaccaagtaactaaacaaggggcacacagtaggcaagtagcagaacaaagattggaacccaggcctaccaggtctcaaagtttatatgaagttacgtgtcaagtaccctgtgctaggagctaggaattcatagtaaacatgtgacatggt

SEQ ID NO: 769786 - DNA, 614 bp, Homo sapiens
atgttaactcattttttaagagttggggttttgctctgtcacccaggctgatgtgcagttgcacagtcacagctcactgcagcctcaagctcccaggctcaagagatcctcccatctcagccactggagtagccaaaactgcagtcatgagccactgtgcctggcaactcatttaatccatccaacaaccttctgagactaagtgctattattacacccattttatacatgaggaaactgaagtctagtgagattcagtaactttcatggcaagtgagaacactagaattcaaacctgggcaatgtggttccacatttttaaccactgtgtttttaaattgtgtactcactgtgtgcaattctaaggctttgctagatgcttcamatttattgtctcatttaattaccatagcactgtagatttccacaccccaatttacagatgaccaactacagatcaaagagaccaagtaactaaacaaggggcacacagtaggcaagtagcagaacaaagattggaacccaggcctaccaggtctcaaagtttatatgaagttacgtgtcaagtaccctgtgctaggagctaggaattcatagtaaacatgtgacatggt

SEQ ID NO: 769787 - DNA, 650 bp, Homo sapiens
gagaaaatgccccttaatgagaccaacagctcatcagccactgtctccagggaaacccacaaatgtgccccagctcaatcagcattctcattagctgcaatgggaagaaaaagaaccaagagagaagggtcaagagcaattgtctgccactgccatgaaaagacaggttttttaaggcttcgattggtccctattgaaactgtcactctcagattacagccagcagtaccaggagcatccagaaacccagagaaaatcaccaagctggtttctgtctggtttctgggaatgacatgcaacctgtcagcaggcatcttagcccaccgagcccagcagctggggtggtggtggcagctaccctgcttgacagcaccttctccagaggccctgtatcattacagtctgcccttctgctggggtagaattaacttgttgtgactgtgtgacagttctgacgactacayagtttgaggcaaggagctgggtcacacgctgctacatgcatgggctgtcactaactgctccactaaaaccagacaaaaccttgtcaggagagatcaactcctctggagacagaggtaagagactcaactcatggcctgctcatgagggttttgttcagttcaaggacagcatcaactgacaagagg

SEQ ID NO: 769788 - DNA, 629 bp, Homo sapiens
aaatctgcatttcaggttcccccaaatctttttgtattttgatagctcattgaatgtatgtgtcacagtttgtttataccttaacctattaaaggatatcttggatgcttctaggttttggtcattatcaataaagctgctatgcatatttgcatacaaatttttaggtagacataagttttcaaatcaatttggtaagtacctaacagcgtgatttttagatcatatgtcagtctgcgtttagctttttaagccaagaaactgccaaattgtcttccaaagtggctgtttcattttgcagtcccacaaacaaagaataagaattcctgtttctctgaatcctttatagcattgggcattgtcagattttaagtatgtagtgatatcttgttgttttaatttgaaatcccttaataacaaattatattgtatatatttttcatagaaaaatgtgatgatcaattttatatgtcagcttgggtaagccacagtactgagatatttggtcaaacactattytagatgtttttttgaaggtttttttttttttttttataaaatcaacatttaaatcagaacactttgagtaaaacagattgtcctccataatgtggatgcacctcatgcaa

SEQ ID NO: 769789 - DNA, 471 bp, Homo sapiens
aagagccttagtaaagaaacacccgcttccagcggagtctggaagctaagcaacaaataaaacattctctttttccaaagccaagataattaagtccacgtatggtccacagtttatttatctaggtaagtctcattttcttgccaatactgatatgctttgattctagtctctcacttggcttttctctctagtttgcccaaaagtcaaaagcagctgtcaggaagtttgagtttacaaggaccatagcactaagactagactagacatagcgctaagactaaacctgagttagttcatacctggaggttytaagacatcattataaccctgcctctcggtctcttttcctttctgtccaacagaaaatattcaggcatgtcaccatctccactgtgcttcatgtaaggagaaaagcatataatgtctacgcatagagtcagtgtgacatgagacttttaaacatttggt

SEQ ID NO: 769790 - DNA, 617 bp, Homo sapiens
gtatgtatgcatcatttaaaaaattatttttgcttatcaactttttcccactaactattgatttcattccgataagggggcttttattgagtatgaaaaaagcaagattactttgaatatgtaaacattacataccctctccccttttatagcaattatggctgagatgtatatcattatacaaaatccttgtccatatctctgcttttttctgtagatgagatatctatacatagaaacactggatttagtggcatatataktctataaagcagttgtttcatattgtcagcttcctttctagagcaattgtgtcactatatattactagcatggaggcatgcctgtctcaacacactttcgttagagtttagtaatagagcactgttgctatttcagttaattttatggtaaaaacatgaaacatgatagatctcctaaatggatctatttttatgtattagatttctataggcagaacatatttccttgcatttattggccatttgtatttattctgtgaacagatggttttaaggtcttttctaaacttccattctgtggggatcttagtatatttcttattgatttgaaagggtctttggtctaaaaatttt

SEQ ID NO: 769791 - DNA, 670 bp, Homo sapiens
agtattctcttactccattgacaaacatgggttctcatttgttgggaaaaaagagaggaaagtctttgtaccaaagacttacaccaagaggaattgttgtctgatttccaaacaggccagggaatatactgtgttgcaggatccccttgggtattcattaaagcatagtgactgtgtcacaggggtgagagcctagagagctgacatggacctattttgtaatatgtgcacaactttgtttgtatgttcagttccacacacacacacacacacacayatatacatatatatataggattaagtatatttatagcctttccaatcaataccatttgtattacaaatttatttctagaattactttgtactttataatgaaagtgagcttcaaaggctttgaaattttgcatataagttagtaaattgttatctctgtgagagttgcaccagatgatctctaaatgctcttgcagctctaaatccctatgattctgtgaaccacgattattttttcccaaattaagcctccacctatatgatttttggcctttgcttaattctgagtgtatacatctttatcaaaatactgtacaagcagtcaagtcgcattatcaataatcagtagttgagaaaaagaaagcttgctaatttgggcttttttcatattaac

SEQ ID NO: 769792 - DNA, 601 bp, Homo sapiens
  misc_feature 598: n = A,T,C or G
cattcagtttcaaaggggaaagagagcataaaagtttggaaaatttgcagcctgacaatgcaatagaaaaaaaaatccatattttgaggagaaattcaaaccagctgcagaaatttgcataagttaacgaggagccgaatgttaatcaccaagacaatgaggaaaatgtctgcagggcacaccagagacctttgcagcagcccctcccatcacaggcctgaaggcataggtagaaaaagtggtttcctgggccaggcccaggttcctggtgctgtgtgcagcctagggacttgatgccctgcttcccagacactgactaaaagggtccaatgtagagcttaggctgtggctgcagagggtgcaagactcaagccttggcagcttccatgtggtgttaagcctatgactgtacagcaatcaagaattaaggtttgggaagctctacgtagatttcasaggatttatggaaacacctggatgcccaggcagaagtttgctgtaggggcagggtcctcatgtagaacctctgctagggcattgcagaagggaagtgttgggtgggaggccccacacagagtccctactggggcaccacctnagt

SEQ ID NO: 769793 - DNA, 609 bp, Homo sapiens
tggtgaatttctccatttggaatgggtgtatttatccaatgcctgtattcccattgcatctaggaagtaactagcttgcttttgattttacaggctcatatgcagaagggttttgccttgtctcagatgagactttggactgtggacttttgagtcactgctaaaattagttgagactttaggkgactcttggaaaggcatgattggttttgaaatgtgaagatgtaagattttggagggactggggtggaacgatatggtttggctctgtgtccccacacaaatctcatcttgtatctcccatgattcccacatattgtggcagggacccgttgggagatgactgaatcatggaggtgggtctttcctgtgcttttctcacaatagtgaacgggtctcacaagatctgatggttttaaaaatggagtttctctgcacaagctctctctttgcctgctgttatccatgtaagatgtgacctactcctccttgccttctgccacaattgtgaggcctccccagccatgtggaactgtaagtccaataaacctttttcttttgtaaattgcccagtctcaggtatgtctttatcagcagtgtgaaaatgga

SEQ ID NO: 769794 - DNA, 620 bp, Homo sapiens
tggtaccttcttgctgtgtcctcccatagtggagggggtaaccaaactccctggaacttcttttatgaggatgtgaatcccattcatgagggcccaccctcatgaccgaatcacctcccaaaggccccacctcttcataccaacaccttgggggttagggttttaacatacgaattttgaggtggggcacaaacatttagtccgtaggacatgactgtgttcttctgttcattttgcatgtcttgygcatgtaaaagtgctcaccactgtgcttggttcagaaactacaaagaaacaaaactgttattttattttcaggaagtgatatggtttgactctgtgtccccacccacatctcatctggatttataatcctcacatgctgagggagggatgtgattggatcatgggggcagtttccctatgctgttctcatgatagtgagttctcatgagatctgatgcttttataagtgtttggaagttcctccttcactcttctctctcctgctgccatgtgaggaaggtgcctgcttcccctctgccttctgccatgattgtaagtttcttgaggcctccccagccatgtggaactgtgaattaattaaacttctttccttt

SEQ ID NO: 769795 - DNA, 553 bp, Homo sapiens
cggatttcagtcctttgtacatcctaagagttctgataatccaggaggctgggggccatgttttccactcaaattgccctggtgctgaaatgcaccacgtatagcggacactcaattagtgtttgtgggcaccaatgagtgactataactgagtgatttaattctctggaagagctattttaggttatatcttatgacattttttcatagttgttaatttttggccaataaaacagcaatttyacacgatttaacctagtaatttacaggactcacggaataactttttgaaataacacactatgtgagatttttaagaggcatcactaagtaattagctgaaaacttgcaggaactacaacaaaaatactgcaaacttttccccagcccaaactttcatttcatggatgaaaacaaaacaaaataacagccctctacctaaatcaagggattgctcctgttgatttggagagataaggccagatacggagagatgaagtcagatcgtggatccaagtattttgccttaagattcaggtcctttctgccttaa

SEQ ID NO: 769796 - DNA, 580 bp, Homo sapiens
gtgtgttatcacaaaatgtaatttactaataatttattttatactttttaaagtacaaggggcattgagaaaatttttagcgattgctagataacactattttcaacttctatgcttgtcttagtctgtttagtgttgctatcaaggaatacctgaggcagtgtcatttataaagaaaaaaggtttatttggctcacagctctgcagactggaagactgagcacctggtgaaagcctcaggctgcttccactcacagatcaatgtgaagggagagccagtgtgtgcagagaccacatggtgagaggggaagcaagagagatgggggagtggcaggctccgtttaacaaccaactcttgtwagaactaatagtgagagcccactcccacccaagaggaaacattaatctattcatgaagggttcactcccatgactcaatcacctcccactaggcctcaccttcccaaatcgccacactgggaatgaaatttccacaggagttttacagggaacaaatatcctaactataaaagtattccatccagaatggtactggacacaagccacttctcagtgcaca

SEQ ID NO: 769797 - DNA, 606 bp, Homo sapiens
tcaaaagtcatttatgtcttgacatttattatataaagatgaaaagtgaagtctctgattttaggaagttcagagtctagctgtgaaggaagacaagcatgtaaacaagtaactgtaatataaggtgacaagtgcgggaatagaaatatgcatgcagcactctaggaatgcaaaacagattaattttacctgaggtggctagaaaagcttcagggagggtagttgatatttgagctagaaacttgataagaggaagtgggaaatttcaggtacacagcaggaaaagcaaagataagagccgtttacagatacctgccaggacattaggggaccctcagctgctatcccttttctctatctgggaatctgcagctaagggttatgtagcctttgcttttgaactgtcaaaatgcaaagcatctaattataccccccttattytagacagcaactgttgagttcagactctaagaactcctatccacctgcctgtctgaaagaaaccaccttcagattccacagtaatttcccttctgaaggagaggcctaaggtgattccatggtgcttttatggtgcctctctccctaaagaaaagaaaaaaatta

SEQ ID NO: 769798 - DNA, 594 bp, Homo sapiens
tttactagcgtataaaggaaaccctttattcagtgtcccaaaacaaaaagtttagttggatgttatcatacctcatctgagaaagagatgatcaacagtctcataggtagagaagtagtgattggatcacgtccaaagaacragactctagcgaaaatgtttctgtccaatccttttaagagacaggcttcttttctgctcagatatgtacaagtttaaggaaagagatctgtctcccaagggctgaaaaacaaattggaattatatgtgatgtctgtcatatatagttctgagtctttcacctatgctttataaacaataatctattatttaatttttgacttggcaaggagaagaggttatttccctgagtttcagctacaaattcccaaaaaaacttcttttaagacgaatattgcagagtaacaaattttgactttctatgaaaacgacttatcatttccaggatgtgttgcctctagagcagtggctctcaatcttggctgcagttgaagtcacttgagagagttaaaaaattctgatttttgggtcccaccctcagattctaatttggttgatctgggctgtaccttc

SEQ ID NO: 769799 - DNA, 594 bp, Homo sapiens
tttactagcgtataaaggaaaccctttattcagtgtcccaaaacaaaaagtttagttggatgttatcatacctcatctgagaaagagatgatcaacagtctcataggtagagaagtagtgattggatcacgtccaaagaacgagactctagcgaaaatgtttctgtccaatccttttaagagacaggcttcttttctgctcagatatgtacaagtttaaggaaagagatctgtctcccaagggctgaaaaacaaattggaattatatgtgatgtctgtcatatatagttctgagtctttcacctatgctttataaacaatwatctattatttaatttttgacttggcaaggagaagaggttatttccctgagtttcagctacaaattcccaaaaaaacttcttttaagacgaatattgcagagtaacaaattttgactttctatgaaaacgacttatcatttccaggatgtgttgcctctagagcagtggctctcaatcttggctgcagttgaagtcacttgagagagttaaaaaattctgatttttgggtcccaccctcagattctaatttggttgatctgggctgtaccttc

SEQ ID NO: 769800 - DNA, 570 bp, Homo sapiens
ttatgttctgagggaatttctctgtgagtgtgttagattctgaaggaggatctttgggaatgcattaggtcctgagggaggatctttgggaacgcattaggttctgagggatgttctctgggaccacattaggtcytgagggtggttctctggtaatgcactgagattctgagggaggttctctgggaatgcattaggttctgagggaatttctctgggaacgcattaaattctgagggaggatctctgggaacgcattaggttctgagggaagttctctgggaatgaattacgtgcttaggaaggttctctggtaatgcactgaggttctgagggaggttgcctcgaaatgcattactttgtgagggagattctctgggaacgcattgaggtcctaaaggaagttctttgggaatgcattaggttctgagggagtttctctgcgaacgtattagattctgagggaggatctctgggaacgcattaggttctgagggatgttctctgggaccgcattaggtcctgacggaggttttctggtaatgcactgagattctgttgggggttctc

SEQ ID NO: 769801 - DNA, 336 bp, Homo sapiens
actcctgggctcaagggatcctcccacctctgcttcccatgtagccaggactgcaggcacatgctaccgcacctggataatttttaaatgtttttgtagagggtcttgttacgctgcccaggctggtctcgaattcctggtctcaagtgatcctcgtgcctcatctccgaaagcactgggattacaggcatcrcgctcggcctacttataaagttttcaatgggcctttttatatttcttctgtgtatttctagtttgtatcatttgaaaaattcttttggatcatttttttttcttttttcttttttcttttttttttttttgaggcggagtctc

SEQ ID NO: 769802 - DNA, 625 bp, Homo sapiens
ctatgttgtgccttggaaaaatttttaaaaatcttaattcccacttgtgaaatggaaatagtaacacaaggcctttaagaaaagcccatagtctttaaaaagaaaactaggctgggagcggtggctcacgcctgtaatcccagcactttgggaggccaaggcaggcagatcatgaggtcaggagatcgagatccatcatggctaacatggtgaaaccccatctctactaaaaaaaaatacaaaaaaattagccrggcgtggtggcgggtgcctgtagtcctagctactcaggaggctgaggcaagagaatggcatgaactcggaaggtggagcttgcagtgagccgagatcgcaccacgacactccagcgtgggcaacggagcaagactccatctcaaaaaaaagaaaagaaaagaaaactaaaaacaaaacaaaaaaaaaaccacacacacacacacacacacacacacacacacacacgaagtcactatgccagagaaaagggaggcatgttgttaaagagaaccattttaatttcatctgcccggtggaatctgggaaaaaaaatataaagcaggcctcttctaaacaataaagatgggcttcatccacatcttcctgaaac

SEQ ID NO: 769803 - DNA, 588 bp, Homo sapiens
cctaaatctcactgggtttttttcttggtggtgttttgtttgttttgttttgtttttgattccacttttctttcctgtgattcccccatgcgtgtaataaatgtgtacacattttcttcttttgacatgcctgttatccatttattcaatagactcagttatcacaccttcagagggtagagggaaagttctccaactccaacagttccaaaagaaaatagctagtaactgcaaatgcaaaagtcatataaactttgagacaaagttagcttcttatacgatatgttcagaaagaagaggtgtgttgyacaccaagggacatttccctggtcttagctcctaagtttctctgagaagaagcagttactactacagcagttaaacacctgactcccaaattataaaagcctaagttatgattttaaatcattaattgtcacctgtgaatcataaagtctgaactctttaaattgcaaacacacatataaaagggattcttatacaaggatccatgagtggaactgcaaagttttgtcaaaatctgtatatatgttttctttttaagggtcatagatttcaatatatgtt

SEQ ID NO: 769804 - DNA, 640 bp, Homo sapiens
cagaagtttaatatttttttcaagaatttatatataaaatttttacttagaagcagatagctcacaaaaagtatgggggatttttttggattataaataaactattccactcaccaagatgctgagacatcctactttctggtattttgaaatgaaaacaaaacacaagaatgtgacgaagaagcaagtgaaaattaaaaggatacagactttagaagtatcataagctaaaaataaagtgaaacaaatctgtaaaggaaccaaaagcccaggcagatataatacagtaaattatgagaagttaaaaaaatgagggggtgacaataaagtgaaaatctctgataaagccaaaactatttgaatggcagtcaacaaaacagaagraaaaaatgacactcataacaaggcagaactatggaaatgcatccccgggggtaagacaatagagttgtgaattagtggaggcgaatcaccaatactggccaactaaagccctctaacataattcaaaggatggagaaattctgtagctgaagataaaatgtctgaaatatattatggtatagtcaaatgagtgtcatttctaatatacacacttatttttcaagagttgataatatgaagtaaaaatttagtatgc

SEQ ID NO: 769805 - DNA, 640 bp, Homo sapiens
cagaagtttaatatttttttcaagaatttatatataaaatttttacttagaagcagatagctcacaaaaagtatgggggatttttttggattataaataaactattccactcaccaagatgctgagacatcctactttctggtattttgaaatgaaaacaaaacacaagaatgtgacgaagaagcaagtgaaaattaaaaggatacagactttagaagtatcataagctaaaaataaagtgaaacaaatctgtaaaggaaccaaaagcccaggcagatataatacagtaaattatgagaagttaaaaaaatgagggggtgacaataaagtgaaaatctctgataaagccaaaactatttgaatggcagtcaacaaaacagaagaaaaaaatgacactcatwacaaggcagaactatggaaatgcatccccgggggtaagacaatagagttgtgaattagtggaggcgaatcaccaatactggccaactaaagccctctaacataattcaaaggatggagaaattctgtagctgaagataaaatgtctgaaatatattatggtatagtcaaatgagtgtcatttctaatatacacacttatttttcaagagttgataatatgaagtaaaaatttagtatgc

SEQ ID NO: 769806 - DNA, 640 bp, Homo sapiens
cagaagtttaatatttttttcaagaatttatatataaaatttttacttagaagcagatagctcacaaaaagtatgggggatttttttggattataaataaactattccactcaccaagatgctgagacatcctactttctggtattttgaaatgaaaacaaaacacaagaatgtgacgaagaagcaagtgaaaattaaaaggatacagactttagaagtatcataagctaaaaataaagtgaaacaaatctgtaaaggaaccaaaagcccaggcagatataatacagtaaattatgagaagttaaaaaaatgagggggtgacaataaagtgaaaatctctgataaagccaaaactatttgaatggcagtcaacaaaacagaagaaaaaaatgacactcataacaaggcagaactatggaaatgcatccccgggggtaagayaatagagttgtgaattagtggaggcgaatcaccaatactggccaactaaagccctctaacataattcaaaggatggagaaattctgtagctgaagataaaatgtctgaaatatattatggtatagtcaaatgagtgtcatttctaatatacacacttatttttcaagagttgataatatgaagtaaaaatttagtatgc

SEQ ID NO: 769807 - DNA, 609 bp, Homo sapiens
tgtgaattagtggaggcgaatcaccaatactggccaactaaagccctctaacataattcaaaggatggagaaattctgtagctgaagataaaatgtctgaaatatattatggtatagtcaaatgagtgtcatttctaatatacacacttatttttyaagagttgataatatgaagtaaaaatttagtatgcaaagttcaaattttccatttgttgagtaattcatttttattaaatatttcccaacaattaaactaaagtggtaccagaacagagtagacattctgagctttcactttacaaaagctacacataaatctacataatttttaagggtataaacaaagtcagagtctgtgtgatatttcattaaacaattggagaaaatttttctttaagaatagattatatacatagtgacctctttgagatccttatttttttcttttttttgtgtgtgtgtggacatatgttttcattttttttaattattattattatacattaagttttagggtacacgtgcagaacgtgcacgtttgttacatatgtatacatgtgccatgctgtcgtgctgcaaccattaactcgtcatttaacattaggtata

SEQ ID NO: 769808 - DNA, 609 bp, Homo sapiens
tgtgaattagtggaggcgaatcaccaatactggccaactaaagccctctaacataattcaaaggatggagaaattctgtagctgaagataaaatgtctgaaatatattatggtatagtcaaatgagtgtcatttctaatatacacacttatttttcaagagttgataatatgaagtaaaaatttagtatgcaaagttcaaattttccatttgttgagtaattcatttttattaaatatttcccaacaattaaactaaagtggtaccagaacagagtagacattctgagctttcactttacaaaagctacacataaatctacataatttttaagggtataaacaaagtcagagyctgtgtgatatttcattaaacaattggagaaaatttttctttaagaatagattatatacatagtgacctctttgagatccttatttttttcttttttttgtgtgtgtgtggacatatgttttcattttttttaattattattattatacattaagttttagggtacacgtgcagaacgtgcacgtttgttacatatgtatacatgtgccatgctgtcgtgctgcaaccattaactcgtcatttaacattaggtata

SEQ ID NO: 769809 - DNA, 609 bp, Homo sapiens
tgtgaattagtggaggcgaatcaccaatactggccaactaaagccctctaacataattcaaaggatggagaaattctgtagctgaagataaaatgtctgaaatatattatggtatagtcaaatgagtgtcatttctaatatacacacttatttttcaagagttgataatatgaagtaaaaatttagtatgcaaagttcaaattttccatttgttgagtaattcatttttattaaatatttcccaacaattaaactaaagtggtaccagaacagagtagacattctgagctttcactttacaaaagctacacataaatctacataatttttaagggtataaacaaagtcagagtctgtgtgatatttcawtaaacaattggagaaaatttttctttaagaatagattatatacatagtgacctctttgagatccttatttttttcttttttttgtgtgtgtgtggacatatgttttcattttttttaattattattattatacattaagttttagggtacacgtgcagaacgtgcacgtttgttacatatgtatacatgtgccatgctgtcgtgctgcaaccattaactcgtcatttaacattaggtata

SEQ ID NO: 769810 - DNA, 498 bp, Homo sapiens
atgactcagccctgtttgtgttacagctctttcagcctcttccctaggatttgtcataattaattctcatatcgtcttatttttttacatgtgtttcaacttcagaagatgtatggatctaaacacaacatgatgtgttagctagctgccatatragtttctccctgtttcaccactatgcagcctaaagttattccgtcatcgatgactatcctggctaaagcgtctaaagatctttgtttggtagctatggcttcagctagttcattcgctaatttacctagagtggttgacagatttctaattatacgttcatgagaggttactccccaccattgcaagtgacttctgccaaacattggccaaaattcacctccttggtttgcaggtatggtttgtctaatcctgtaaagtaatttcgatgaactacttcagtgttcagaaacattggagttataaatagaaagaggaaaagtcacataaactaatagacaatta

SEQ ID NO: 769811 - DNA, 498 bp, Homo sapiens
atgactcagccctgtttgtgttacagctctttcagcctcttccctaggatttgtcataattaattctcatatcgtcttatttttttacatgtgtttcaacttcagaagatgtatggatctaaacacaacatgatgtgttagctagctgccatataagtttctccstgtttcaccactatgcagcctaaagttattccgtcatcgatgactatcctggctaaagcgtctaaagatctttgtttggtagctatggcttcagctagttcattcgctaatttacctagagtggttgacagatttctaattatacgttcatgagaggttactccccaccattgcaagtgacttctgccaaacattggccaaaattcacctccttggtttgcaggtatggtttgtctaatcctgtaaagtaatttcgatgaactacttcagtgttcagaaacattggagttataaatagaaagaggaaaagtcacataaactaatagacaatta

SEQ ID NO: 769812 - DNA, 598 bp, Homo sapiens
tcacataggattccagaacactgcggctggggtctgaatgtccctgacataggattccagaacattgctatgagagtctgaatggttgtctttcacatagcattccagaacactgctacgagggtctgaatgttggtccctcacacaggattccagaaccctcctgctgaggtctgaatatttgtccctcacataggattccagaacactcctgctgtggtctgaatggttgtccctcacaaaggattccagaacactsctgctgtgatctgaatggttgtccctcacataagattccggaacacttctgctgtggtacgaatgtttgtgtctcacgtaggattccagaacactgctacgagggtctcaatgtttgtccctcacataagattccagaacactgctgctggggtctgaatgcttgtccctcacatacgattacagaacagtgttgctggggtgtgaatgtttgtccctcacatggtattccagaccactgctgctggggtctcaatgtctgtccctcaaaaaaggattccagaacactgttacgagggtctgaatttttgttcctcacttaagactgcagaacactgct

SEQ ID NO: 769813 - DNA, 575 bp, Homo sapiens
agacactagtagcctttaaaaattaaacatttctactgttttaaaaaattatagccatcatagtatgaggaaaaatgtaataatcctttttaattcttgccattttattaaccacaaagtccttatgccctgacttcattggtacccctttgagattaaacagaacacttaatttaaaattctgataaataaattaattacmccatttacttgaggtactctttcacctttcaagaaatattttgagaattcattagctaaatattgctataatgcaggctagtaataaatggaaataatgatttcattgtaaagtttaaactaatgatggtttgatctggaatttttgttaacctagaagacataattagctctagaggtgaaatgaaagacataatcacttcacatattagtaaaaaacaaataatataactttataagctactgctgttcttttgctattaagaaccaatgacatctgtaattacggaagattatggaaaggttaaaggtgagaatacatgcagtctgtcgacaggaaacctaaacagtttaggttaaggaaatgtctgaga

SEQ ID NO: 769814 - DNA, 421 bp, Homo sapiens
caaggatttaaggaatagatggtagtaagagggaatatatggagaatctcaacagagaagtaaaaatgataaagggataataggacaaattttagaactgagagagagaatatcttatataaaatagtcattttatgcacataccagtaaatgaaagatggcagaaaaaactatcagtgcacttaaaaacagatcaagaacaatttcycaatacagttaatacaaaggagaaaaataataaaaatatgaccagtctagcactaatataattggactcctagaaagagtagagaagaaaataagacaaaaaaaggtatttgaaaaagtaaagaccaaaacttttcctaattgtcagcatatatcaacttacaggtttaagaaactctaagaacagaataaaaatatagagaaccaaatgtag

SEQ ID NO: 769815 - DNA, 491 bp, Homo sapiens
attggtaaggtatccggggatcctttaaatacacgatgattggcagggtttacataggggaaatcagtgcctgacaattcgccttccaggatatggattgtcattccctctctttgtgggccccagtctcctatacataaaagtagagattgtaatactcatttgacttgcagatacctcaccccgaacccacctactataacgtaaaagccaagaatgcaaaccctttcctcaccccgtgaaggtaaagtcctcagagccaaggagagaaggctcaaggatggtacctrggtgtttccaacactaaccatgcattgtagtttttagtgttcaagtttaagcttcttatgttaaagttaccccagctttaattatattgtaacaagatttatttttgtaatcccatttttggattcttgatttcttggtaaagaaatacagttatttttgtataccaatcttatatagtgttacattccaaaatttgttca

SEQ ID NO: 769816 - DNA, 447 bp, Homo sapiens
ggggggaaaaaaaaactaatgacaaaccaagcaaaaggaagaaaataacagattagagcagagataagcagaataagaccagaaaaaaaaggaaaaaaaacaatgagtttgtttttttaaagatcaataaaaattttaaaactcacagctatattaagaaaaaagagaaatctcaaatactaaaatcatraataaaataggtgacagtacaacagatgccacagaaatgaaaaagattacaagagactaatgtgagcaaccatatgccacaaaactgggcaacctagaataaatttataaattcctagaaacacaaaccaccatactgcatcacggagaaataaaaaatccaaagagacttgtaactagtaagaagattcaaccagtaatcaaaaaccccaccaaaaagaaaattccaggtccagataacttcactggaaaatttta

SEQ ID NO: 769817 - DNA, 599 bp, Homo sapiens
tacccactgcaggtctcctctgagctgtactgtggctcaataaagcacctcttcaccttgctcaccttctacttgtccacatacctcatttttcctggactcaggacaagaactcgggacctgccaactagcagggctgaaagaggtgtaacataaacagggctgaaacgygctccttgcttgccaaattgcaggcaagaagaagagaagagagaaggagagaagagctgtgtcccttcagggaacacagacctaggagctcccccagccagggctgtgacaccttctttggggctttgcaggtcctgcatctccaagcttctgggtgccactgcattccctgatacccacagtggaagctgtttgcagtcggcctggtccagctgcagcctcacagggagctggcatctgtgcctggagctgcccaccccactgcagctggcatgcttggctgtgtgcagtggccagatcccatgctcgcttgctcacacacccctcactgctctgtacccagctcgcccttggcaggtgtgggatccagaccactagcatgagctgagtggacagaactaacccagtgggcccaagcaaaacacagg

SEQ ID NO: 769818 - DNA, 615 bp, Homo sapiens
tactgttcaaaacattagatctgaattttgatccgagtatccctttagtagcagtttcattcaaggatgtccaagaggtaaaataagacaatatcatttgctattttcagttttcttttctgagaacagcccagcattcttcttcagagaaatgaattgtsctaacttcataggctaaaggctcatgagtcatagttctaagggtattaataaaatatggtggtgtatgcttgtattctgaacttttcaggtttaaactctcatatagtaaacgctaatagatacaaaccaattaaagaaaagccctcttaatctgacattatttttctttttatttcttcatttatcagcaacaggagagtctaactaaatgtggtaaagtggtatgagggaatacaatgaacagtgtaaaatgaattaaaccagggataatcacaccaatgtgggtacagagtggaaaatatatacataacacaccaaagaaagtggcagaaaggtatataaagtgtataaccactcacataccattttaggacacaaaaaattctgcatattatttatgagcatcacaatgtaattaaagatttcaaaagggcattgaaatgaaaaacaacc

SEQ ID NO: 769819 - DNA, 591 bp, Homo sapiens
acaggtggtgaggatttaggggttgaaaggaaacggtgtatcaagtgaatgagaaacatatggccctgcctcagcttctcttccaacactcagcttttctcccaacacattccccttatgaacaggaataaaatagggatggctgttctcaccactcctgtttaacaagtcctagccagagcaatcaggcaagagaaagcgataaaaggcatccaaataagaaatgaagtcaaattatctctcttcactgatgatatgattctacacctagaaatccctaaagactgtgccaaaaggctcctagaactgataaaaaaaartcttcagcaaactttcaggattaaaaaaaacaacatatagaaagaagtatcatttctgtacaccaaaaatgtttaaactgagaggtaaatcaagagtgcaatcctgtttacaacagcaacccccaaaagaaaagaaaagaaaagaagaatatgtctaagcaaggaggtaaatgatatctaaaaggagaactacaaaacactgcagaaaaaaatcatagatgacaaagcaaatggaaaactattccatgctcatggattagaaagatcaata

SEQ ID NO: 769820 - DNA, 591 bp, Homo sapiens
acaggtggtgaggatttaggggttgaaaggaaacggtgtatcaagtgaatgagaaacatatggccctgcctcagcttctcttccaacactcagcttttctcccaacacattccccttatgaacaggaataaaatagggatggctgttctcaccactcctgtttaacaagtcctagccagagcaatcaggcaagagaaagcgataaaaggcatccaaataagaaatgaagtcaaattatctctcttcactgatgatatgattctacacctagaaatccctaaagactgtgccaaaaggctcctagaactgataaaaaaaagwcttcagcaaactttcaggattaaaaaaaacaacatatagaaagaagtatcatttctgtacaccaaaaatgtttaaactgagaggtaaatcaagagtgcaatcctgtttacaacagcaacccccaaaagaaaagaaaagaaaagaagaatatgtctaagcaaggaggtaaatgatatctaaaaggagaactacaaaacactgcagaaaaaaatcatagatgacaaagcaaatggaaaactattccatgctcatggattagaaagatcaata

SEQ ID NO: 769821 - DNA, 598 bp, Homo sapiens
caaaaatgaggatgccggcatctcaatgagaaataagggcaggccaaaaaatgaatctttatttaaaaaataaatacatgtgaatgctttttaaaacaagttttggtagagtgcaagtcaagccaaggttttctatagtcagggactagatttatccagctcaccatctgtcaaaattatattatagacgacacatatgcatagatacaagaccactgattttcatatatattaaaacctgaaactactgcacgatatgaaaacctacaaattgttaagcccaaaggcttacatctagaacttttttcctccacawtgttttatttttgttctcttcctgacctgcatttaggaaaaatggacacatagtcaatgaaaatatacaaaaattaaacttcatttaggaaaaatcaaaacagaaacttttagataacataaaaataagagaagagatgtacacttccctaatttttgggcctgatcttgtgggtgaatatatccagtacatatctcatgatgcaggaaagtgagtttcagatgagggtcaagacaatttttaatataaaacaaacagaagttatgcttgtgaaaatagaga

SEQ ID NO: 769822 - DNA, 670 bp, Homo sapiens
cttacacaaacattgtttttcaaagcaaatgtaatagtttcctttaaatccgtatacaagacaaggatgtcttgtatcatacttctattcagtattgcattagatattctaaactatgaaataagttttaaaatttagaaattaagaaacagaagggaatgttttcagaaaagaaattgtctacctaaaaatccagacacatctatagaaatatwagtagatataataagttattttaaattgaaactatatttttatgtcagtaaaatattaaaaactttataatgtaataaaaagaccatcttagaaaagtaacaaagcctataagatattcaagattaattctaacatcagtagatattataaaatttagacacagaagataagatgcaagtaagtttaaagatatgccatgtttatgaatgggaaaagtcaatatcatgatgaagattcttccactgttaattgcaatttcaaataaaatcacaaaagtttattttacaaatgttctcaagctgatcatactatatattcaagaataggcatagtgaatttgaaaaagaggaacaagattgggagactgttctacaatttagaagactaaatataatgctaatgaaattctggtaattcaccattgataaaaggatgaagaaaccaatgattcaga

SEQ ID NO: 769823 - DNA, 670 bp, Homo sapiens
cttacacaaacattgtttttcaaagcaaatgtaatagtttcctttaaatccgtatacaagacaaggatgtcttgtatcatacttctattcagtattgcattagatattctaaactatgaaataagttttaaaatttagaaattaagaaacagaagggaatgttttcagaaaagaaattgtctacctaaaaatccagacacatctatagaaatattagtagatataataagttattttaaattgaaactatatttttatgtcagtaaaatattaaaaactttataatgtaataaaaagaccatcttagaaaagtaacaaagcctataagatattcaagattaattctaacatcagtagatattataaaatttagacacagaagataagatgcaagtaagtttaaagatatgccatgtttatgaatgggaaaagtcaatatcatgatgaagattcttccmctgttaattgcaatttcaaataaaatcacaaaagtttattttacaaatgttctcaagctgatcatactatatattcaagaataggcatagtgaatttgaaaaagaggaacaagattgggagactgttctacaatttagaagactaaatataatgctaatgaaattctggtaattcaccattgataaaaggatgaagaaaccaatgattcaga

SEQ ID NO: 769824 - DNA, 600 bp, Homo sapiens
gaatacaaagattatgaattttaataggaattatacttattttttatcactgtaggtaatattgactgatataagcaaataataaccagctattgtgccaagtgctagaaaactcatggttaaaaacatgcctgttcaccagaatgtaagctcgactattcataactttaaagaatggtagcatttttaaataaattagaaataaatttcaaatatatccaattaccttcttarcatattttgagaggagttcatgtttttctcctttttgaactattgacgtgaagaattacatgaatacatttctgaatattggattatcctttttcatctgtagaaaatagcacatttgatgacttcatcatttttaatactctaaatggatattttttaatattatatttataacttttgagtgagtaggttgtagaacttcatagtttgagtgtagagttagaaaaatctgaatttgtatcccatttctttcctagtttagccttgtattcataagctacttctccaaacctgctaagtcttagtatctttatggataatgagatgattataaaatatcctacccttttagatggctgaaggtgt

SEQ ID NO: 769825 - DNA, 600 bp, Homo sapiens
gaatacaaagattatgaattttaataggaattatacttattttttatcactgtaggtaatattgactgatataagcaaataataaccagctattgtgccaagtgctagaaaactcatggttaaaaacatgcctgttcaccagaatgtaagctcgactattcataactttaaagaatggtagcatttttaaataaattagaaataaatttcaaatatatccaattaccttcttaacatattttgagaggagttcatgtttttctcctttttgaactattgacgtgaagaattacatgaatacatttctgaatattggattatcctttttcatctgtagaaaatagcacatttgatgacttcatcatttttaatactctaamtggatattttttaatattatatttataacttttgagtgagtaggttgtagaacttcatagtttgagtgtagagttagaaaaatctgaatttgtatcccatttctttcctagtttagccttgtattcataagctacttctccaaacctgctaagtcttagtatctttatggataatgagatgattataaaatatcctacccttttagatggctgaaggtgt

SEQ ID NO: 769826 - DNA, 609 bp, Homo sapiens
caatcatagtagaaagtgtctttatacaacaatagataccttaagattatttcaaaatttcagtagtgaattttttattttcagttcagtttggttctttctttaaatgggtatgtcatcttttaacccttggattgttttactatttttcttgkattgggtttcaaccttctcttgtattgtggtgagtttcttaccatccagattcttaattctatgtctgacattttggccatttaaatatgattagaattaattgcagcagagctagcatgatcagttctaggtaagaagacactctgggtttttgagttgccagagttcttctgttaattatttctcatctgggagagtgaatgttcctttaccctttgaagttgttgtcctttgaacggggctttttgtttctatcatttttattgcctatgagggtttgactgtggcataagtttggtacagttgagtggcttcattcccgagtgcctttagagggcaaggatcagccccacactcctgggctgtatgttctaaccataggaggctggtctaagtccacagctttgtcctctagcttctcaaagtcaagccccatttgtgctggaggggctg

SEQ ID NO: 769827 - DNA, 609 bp, Homo sapiens
caatcatagtagaaagtgtctttatacaacaatagataccttaagattatttcaaaatttcagtagtgaattttttattttcagttcagtttggttctttctttaaatgggtatgtcatcttttaacccttggattgttttactatttttcttgtattgggtttcaaccttctcttgtattgtggtgagtttcttaccatccagattcttaattctatgtctgacattttggccatttaaatatgrttagaattaattgcagcagagctagcatgatcagttctaggtaagaagacactctgggtttttgagttgccagagttcttctgttaattatttctcatctgggagagtgaatgttcctttaccctttgaagttgttgtcctttgaacggggctttttgtttctatcatttttattgcctatgagggtttgactgtggcataagtttggtacagttgagtggcttcattcccgagtgcctttagagggcaaggatcagccccacactcctgggctgtatgttctaaccataggaggctggtctaagtccacagctttgtcctctagcttctcaaagtcaagccccatttgtgctggaggggctg

SEQ ID NO: 769828 - DNA, 611 bp, Homo sapiens
tttttttttttttttttgtcttttttgtctatggatatcaaattgttctaacactatttgttgaaaagacatctttgttgcattgaacccctttgcacatttgtcaataatagttgtctgtatttgtatggggttattatctgggctctctcttctgttcaactgatttatacgwctctctctctaccaataccacacagtatgattactatagctctataataagaaatttgaaatcagaatgaataataaccccttcatctttatcctttttcaaaaattttttgctattctagttcctttaccttgccatgtaagcattaaagtaaacctgtttatatctaaaaaatattttgctggaattttgatagaaattgtattatatcttcctgtgaataaatagataattgacatttttacttgttgagttttccaattcattaacactgtatgtctctccatttatttagatcttctttgatttcttttatgagcattttgtggttttcagtatatagattctgcacaagttttattagatttctagctatgcatttcatgatttttgagtgaatgtaaatattatttaaaaaatatgtccaattaattat

SEQ ID NO: 769829 - DNA, 632 bp, Homo sapiens
ttaaaaaatagatttgtatattcacctacagataaatataggaataaagatacactttttacttatatgctgtactagaaagatgcaaaaagtacatgcctatgttagttctaaagatgaaaaagaaaaagttgatggtgaataagtttgagaattaaaattagggtctggggaatgagagggaaacattttcttgtcattttgcttcattttgtactgtttgacattctaggtagatgattgtgttcattttattgaaaactaattatttagattagctggatggtgagattatgggctattctaattttattctctacttaaaaataacatgaattaaagttttaagaaaaagaacaaataaggcaagagacaagcagaaagggaagaaggaagaagaatggaagggaaagatacaagaaagagggaaagggacaggattgtagaggaaaaygtaggtttcgaaaattctctaaaccactgatacaccaggcctgtcattagaacagaactgtttagttagatgttcttgattcctgtccacaatctcatgtcaacttgtttaatcttttaatgacttctcaccaaaatgtgaaatacctgacaattccttttacataagctactgcagg

SEQ ID NO: 769830 - DNA, 654 bp, Homo sapiens
tgaatttggttggtgatatcctaaaaagtaacacctaaaataaaaagaagaaaaattttacaacaaaattgtagtgcccaacttaaacactacgaagttcacaaaataccttttcttgacaaaaaaattaagaaaagtataaaatataatgcaactcccaggaaaattaaatctaatttaagaagcatttgtagaagtaaaatgaccagaaaaatagtaaygttttgctattttgttttgcccttttcatgttacacctatttttctctaagaagatcttcagtgtaatgtgaaaacacagaatatttaattttgctaaggagactgtaatccagcaaaattgtataagagagaaaccagtacattattctttatagacaactataccttgtatccaagccatccccaaatcctgagcattgcattttttcctctatcctatgcctcacattcttttctatctccacttagagcttcaacctctaatcctccatcatcttttgcctggattgagcaaaagcctctttcttatttgatttgtccgcattcaatcatccactccacttccaatccagtctccagagtgtaacctcaattaccttcaacatttcaagcacatggtatcccccagcccctcgacacaaatcactcagc

SEQ ID NO: 769831 - DNA, 654 bp, Homo sapiens
tgaatttggttggtgatatcctaaaaagtaacacctaaaataaaaagaagaaaaattttacaacaaaattgtagtgcccaacttaaacactacgaagttcacaaaataccttttcttgacaaaaaaattaagaaaagtataaaatataatgcaactcccaggaaaattaaatctaatttaagaagcatttgtagaagtaaaatgaccagaaaaatagtaacgttttgctattttgttttgcccttttcatgttacacctatttttctctaagaagatcttcagtgtaatgtgaaaacacagaatatttaattttgctaaggagactgtaatccagcaaaattgtataagagagaaaccagtacattattctttatagacaactataccttgtatccaagcmatccccaaatcctgagcattgcattttttcctctatcctatgcctcacattcttttctatctccacttagagcttcaacctctaatcctccatcatcttttgcctggattgagcaaaagcctctttcttatttgatttgtccgcattcaatcatccactccacttccaatccagtctccagagtgtaacctcaattaccttcaacatttcaagcacatggtatcccccagcccctcgacacaaatcactcagc

SEQ ID NO: 769832 - DNA, 624 bp, Homo sapiens
tttcccccattggctagggttggatcccacagtctaagctaattctgattggctattttaaaaagagtgagggtatgagctggagtggcggagttagttttggtgggaggaaggttacagaacaggtgactaaggatgcctaaggacagaacaggagatagaggctaggtgggggttgtttactgaaactaggggaaaggagggkaaagaaagaggaagttaaactttaaaatggagaacaaagaacagggaagccgaacatattgacatattggttcttaatgcatacattaaggttcactctttatatgataaaatttgatgtgttttgacaaatgcatacaagtatctaccattacattatcatacagaatgatttcactgccctaaaattccctgtgcttcacctgctcaaccatatctcactgcatctcttaacacctggaaagcactgatatttttatcatctatacagttttatcttttccagaatttcatagtgttagaaccatacagtatgtgtagtcttttcagtgtcttcttttacttaccattacacgtttaaggcctttcgtctctttcagtggtttggtagcccatttgtttatctcattgaataatatt

SEQ ID NO: 769833 - DNA, 580 bp, Homo sapiens
ctgcaaatgagtcagttgctcaggcatggctatgaagctcttaaggcctggctctccatcccagacagaaacttcttgtcacttcacaagacctggtgtagagacagcagccagttgctatcacagtgacaccatagctctgttagcaggtgttaagggggatggtaacccaagtattcttgtcttgtttttcccaacatgaacttctgtcctatggacaaagggcctcagtattcttggcstcctgtagcaggactagccttctactgtatgaatgaggggtcaggtaggaaagggaacctccaaactttttttttttttttagacggagtcttgctctgtcgcccaggctagagtgcagtggcacattctcggctcactgcaacctctgtctcctgggttcacgcaattctcctgcttcagcctcctgagtagctgggattacaggcacccgccaccacacccggctaatttttgtattttttgtagagacggggtttcaccatcttggcctggctggtctcaaactcctgacctcgggatccaccctccttgtcctcccaaagtgctgggattacag

SEQ ID NO: 769834 - DNA, 584 bp, Homo sapiens
tgtatgcattagaacaatttctagagtctttattattgttcttcaagtaatttcttccagttaaattattgtttgggagaaagtctttactcttttttcttcattccagcagttaggttctgaactccctgttttttttttttttttgtttgtgttttttttttttttttggttagtttattttgagttttcattagtatcaactgatagtgtactactacatttactatagagaaatctcagcacctttgaataaactaaggtttgataarctatttagctgctgtattcatatttaaatcaaaaacatgaagacttttgatatttcacttgtgatgcagagcagaatttgaaacacaaaacatgaattaaggataactggtctatccaagagatttagttttgggtgatacaatgcagattgttattcccagttcatgtacaaactcataaagaccctttatgtgtatatttaataaaaattgaaattaggaaaattgaaaagaggaattaatatttctttttgatgaaaatggaaacactgggagtgcatctcattttcctgccatgtcctctgatgcact

SEQ ID NO: 769835 - DNA, 570 bp, Homo sapiens
gggtggacagtgagaggtgtgaagtgaaacactgcctatcaagtactaagctcactatctgtgtgacaagatcatttgtgtaccaaccctcggtgacacacaatttacccgtgtaacaaacctgcacatgtactttctgaacctaaaataaaatttgaataaaaaattaaaaataaataagtaattaaaatatagcaacttatttcaatagaaatttcaacaaagaagctatacaattggctaagaagcatatgaaaagatattccacatcattgcattagaaaatacaaataaaaaccrgaagagatatcacttaatattccatgctgtggctataatcaaaaagtcagacaaaaacaagtgttggcaattccttggaaaattggaaccgttataaattgccagtggtaatttaaaatgatgcaaatgctgtgcaaaacagttttacagtttattatatgactcagcaattttactcctatcaatacactcaagataattaaaaacaaacatccacacaaaatttgagcacgaatgctcatggaagcattatttataagaagcataaaa

SEQ ID NO: 769836 - DNA, 570 bp, Homo sapiens
gggtggacagtgagaggtgtgaagtgaaacactgcctatcaagtactaagctcactatctgtgtgacaagatcatttgtgtaccaaccctcggtgacacacaatttacccgtgtaacaaacctgcacatgtactttctgaacctaaaataaaatttgaataaaaaattaaaaataaataagtaattaaaatatagcaacttatttcaatagaaatttcaacaaagaagctatacaattggctaagaagcatatgaaaagatattccacatcattgcattagaaaatacaaataaaaaccagaagagatatcacttaatattccatgctgtggctataatcaaaaagtcagacaaaaacaagtgttggcaattccttggaaaattggaaccrttataaattgccagtggtaatttaaaatgatgcaaatgctgtgcaaaacagttttacagtttattatatgactcagcaattttactcctatcaatacactcaagataattaaaaacaaacatccacacaaaatttgagcacgaatgctcatggaagcattatttataagaagcataaaa

SEQ ID NO: 769837 - DNA, 530 bp, Homo sapiens
gattaaaatctttgatctggtgtcagagtgcttgggttcaattctcagccctattgcttactagctgagtgaacttgagtagattatttaatttctctgtaactcagttctctcatctttgagtggaaaaaatgccttcatagtattgctagcaagattaaatgagttttatatgaagaattcttaaagttatgttagacccacggcaaacattctccactgctgctaggttttactagggatgccctgaatcataatgaacaaatatcatatcatcagagaaccattctaaggtgccgacactctttatttttttactgtaaattgtttttcttcgtagatagttcacctgacatgttatttatttctttaattttttacatctttctyaccctcaatataaggatttttagaaaatgatgaattttgtctcactgtaatatttcttgaacttagaacattgcctaagtgaacacacatgaaagatgtgtgatttattttatttgactaaattaaaaataaattgttga

SEQ ID NO: 769838 - DNA, 620 bp, Homo sapiens
agattgtaaataaaatttgagaagattatgctatcaattttgaatttgtatttatgaggaagatgatagtaaattatagccaggtatttggtcgttttcatctgtattcaacaatttttgtctgcttttctgctgatttttgctctattatttatgggtttttgtttttttgtttttcccatttccatgtgtgactttcttgaaacagggctcatactttgaggatgagaactagttactttgtgatcttggattaaagtgttgacctgatgtaaagactcgtggtggattaaattgaatggatggaaacgcaaaggtttgcrgtaagagaaacctagcacattgtatttttgcatcttttaacagtaatagttctgaatcccagttttctataaaattatcaatggatttattgggtttgtatatattcagaaagaacaaattgggatttggagacataaattacatttatatcatgtaatagtgatgtgattgtgaagtttctgaattagttgaaaaattattatggtgcatgataatgaatggtcacctactaaacagatcttttttattaatatctatttatttctctgtgtaagactgtatcaagttcagatttc

SEQ ID NO: 769839 - DNA, 610 bp, Homo sapiens
attggtgttctgtgtatttattgtatctggatgtcaacctctagcaacattagggatattttcattaattgttccatcaagtatattttctaggtttttaactttttctttctctctcaggaataccaatacattgtaggtttagtcatgttatataatcccatatttctaaaacactgtttttttwacattcttttttatttttgtctgagtgagttagtttgaaagacctttaagctctgaaattctttcttctgcttggttcagtctattgataaaactttcaattgtattataaaaactccttaaatgagttttttaactccagaagttcagaatactttttttttttttttttttactgttaatctcttccttcatttcttggattgctttataagtttatttatgctgattttcaactttgtcttggatctcattgagcttcctgcaatccatgatttaattctttatctgtcattttgagtttccatttcagttagggatcattgctggagagctagtgcggtctttttgtggtttcactgtattcagatttttcatggtgccaaaattcttgtgctggtttctttgcaaatggagaaactag

SEQ ID NO: 769840 - DNA, 612 bp, Homo sapiens
tattctaagttcagtgacttttatattaaacttaagctaaatgttacttgcatgagtgatttttactttctaatatcctttatgtatactcaagatctactttgtaatgtgaaataaaatatgaggtaccattatctgaaataatattcaaatatattaattgcaaattgatttattcaaagtttaaaatacactattgctttgctgacttcagaattctcaggagaaggcacttgtttcttcaacatacctcttgaaaagatttatattaatgttagaaaatgaaaataaatgatttagcaaagagtatactttcatttgtagaaaataaaatgggaaatgatttcaaagtataaactttcagctactaatttatagaaaagatatatctcagcacatamcagaaattctatagaaattatctatttacatgtaaaaaatggaaaaatgcgatttaaatttcttttttgttctatgtaaaaacagtacaaatgtaagtacaaattcataaatcattgtaagaagtgtaaagaatgacttctgataaattaagcactaatgacatttgaaatgtcagtacagtttgtctctctattgagagaaacaattttc

SEQ ID NO: 769841 - DNA, 603 bp, Homo sapiens
aaagagaaagaaaaaatcttggaaacagccagagaaataacacattacctatagggaatcaccaattaaaataatagcagatttttttcatctgaaactgtgtagtccagaaagaagtggcacaatatttttcaagtagtgaaagaaaaaatttgtcaacttcaaaaactatatccagtgaaactaccttttaggaataaaagagaaacagggaccttcttaggcaaaggaaaacaaccattaaagattgactacaggaatttcttcagggagaaagaaaatgataaaagaaaaagtcttcagacaatcagaaaaaaaaaatgggaagagcagaagtctgtatatatgtacaataaactgtccctttcctcatgaatttcataagtcatagttkatgttttaactaaaaattatgctgaggtgggtggatcacttgagcccaggagttcaagaccagcctagacaacatggtgagaccctgtctctacaaaaaataaaacattagccaggttcgatggcacacatctgtagtctgaagtgtgctgaagggaaggaggctgaagtgggaggatcacttgagcctaagaggttaaggctacagtg

SEQ ID NO: 769842 - DNA, 634 bp, Homo sapiens
atttagtacctacatctctgtgtaagagaaacacagccctttataaaaagtgcatatcctgaagtgaggagctggaacaaagcaggagtcttgcttagaatgattcactgaagtaactggatttattaagatgtatgtgagctttggtgactatgccactgaagacatttgtgctcacctygtgagaggctgccactggaaataacaacaactaataataataataaaaggaaagaaaagactcaagttataagacttatccttgtattatcaaactactctgaatcttaaccttctctatgtctctttcccttctttcctctcgggatgccttcctttagatcccagaaagcatcttgatttcaaactaagatatacaagccacatggcttaaatagatgcttgacagttatctattacttcccatgtatattgccatgctacctcattatatagaaaggttacgtgattcttttttcaaggcatatagataattaactgccagattcagaattcacccttaattgtttatcttgtaaatatattggcatcttctcatgtgctctaaaatctaatgacctggcttggtcatgcatcatcctatgaatttgctgagaaatgagcaatgggaggg

SEQ ID NO: 769843 - DNA, 616 bp, Homo sapiens
gcagagttagaatgagcagtagtgttatagaaatagtgtgcaggtaatgccacagaaaggccatgcagaatcagaatttacaaatgttcaccggcttgacctcaggaggtaattggtaacctttgcatgaacagtttctgtggccacgtaatactaggtaataaccataagtttactttggttacacttaaacaatgacaagtgtttgcacttgtaattttcttgatcaaagtgacgcctatttgaatatcagccaacatttctagctaagacgtttcttagctaactttacatttgtcatcatmcccccaaagtgaatgcactttttggaaaggagcagtgtagtcatgttccctttattgagtttaagcaaagaattgttttatgtatatatacatatatatatgtatacacacacacacacacacacacacacatatacacacacactttattttggcaattatgttgaaaaccttcactgaattttgggaatatttgtttgttcactaaagttaaaaggatttgaggagcaaacatttgtatcatgaatgtggtactccacagatgatcagtttagccatgaccctcctaccggtccagtttgcacacacca

SEQ ID NO: 769844 - DNA, 480 bp, Homo sapiens
ctatgaaatttaggccctctcttgctagaacttctcatttttcaagagaagccagaaataagattgttatgtaaatcttaacatttttagtgctggcaactatttaaattttttagacactgtgggggacttctgcttytcataaggatgtcagaagttcaccctagaacaagctggctaaactaggttaaaattaaaaccatccaggaattgaagcacaaagaaacctaaataaggtgataagcccttcctaggacagaagagatgcacagctactttcatccctgatgaagcagcaggagaagggagaatctaccatagacagcagtaaggaggaaccagacaaacttttaacaaacttttaatggctatccgttgagattatggattaaatttctgggctttagccacagaacaagtctgcatcatctcaccaatggtgtcttcactaagtgcatgcaggtagtatactgaaggctg

SEQ ID NO: 769845 - DNA, 619 bp, Homo sapiens
atctataacaagtaatttgtaatagacataaattgatattaatataatagctgtatatttaacataaccatccattttgtctcatagtccacaaaatgtgtaataatcatgagatgcataaagtctccctgtgggaggcatggacttgagtcaagggaggcagccaacccatggaaattcaacaggaaaggagttaggaaaataatattcctgacttcactcctctcctttcctcctttcctcctatcttcatttagcactccactgggtaaacccaactagaagccatagagctgagaagcctattgatgcagtccatacaggccagcctcccagggcacgtagtagggtaggttagggtgaggtgtggagggacaagtggaagatttccagcacagtggcagtaaatgtagagaaatatgggttagatrttagcacaagacagtgttttaagtttatttaaccctatgctcaagggtgtggatttcaagactgaaatcaggatgcgtgttagtgctattgtatgccattttccattagtggctgaagaatactaagctagaaagataattaattatgttcacgatacaataaacccaaaaaagcaaataaattgaaa

SEQ ID NO: 769846 - DNA, 655 bp, Homo sapiens
attccatagatctcgttgcacatttgaagaaaacatgctaattcataaagaatatttatttatgtgaatatttatatgggggacaatgaaagatgtaaaggctaatatcctcatcaaattttctacaattaattcatcattggttccaatgcttttttcaactaagggcaaatcaaagtatataaaattctcagtggagtcttgagaagagaagcaggcaaggttaagttggaccatacagtgcagagrtttggatgacaggataagaactttggaattcattccataggcaattggaaaatgtgaaggagtttaactgaagagtaacttgatcacagctgatttcctggagagtttaatctattaatggtctgtaaatcaaatctgaagaagaaaatcatagagatagagaggaaaataataatataagaagcaatagggataaataaacagaaaaaaatggttaaagaatcttaagaaaagacattgctcaactttgtgctggtaaatttcaatatctgtcaataacatgtacaattttcaagaaaaatgaaaaaccaacagactccgaagcacgccaaataaaaaaagtcagatacaaaagtgtatgagccttactgtatgatttcatttatacaaattaaagaatatacaa

SEQ ID NO: 769847 - DNA, 615 bp, Homo sapiens
cattctctaagttcctccactcaccccccaacctcacaacaggccctggtgtgtgttgttcccctctctgtgttcatgtgttctcaatgttcaactctcatttatgagtgagaacatgcagtgtttggttttctgttcctgtgttagtttgcttaggwtgatggcttccagcttcatccatgtcactgcaaaggacatgatctcaatcctttttatggctgcagggtattccatggtatatatgtaccacattttatttatccagtctatcattgatgggcatttgggttggttccatgtctttgttattgtaaatagtgctgcaataaacatatgtgtgcatgtgtctttatagtagaataatttatattcctttggcatatacccagtaatgggattgctgggccaaatggcatttctggttctagatccttgagggatcaccatactgtcttccacaatgattgaagtaatttacattctaaccaacattgtaaaggcattcctatttcttcacagtcttgccagcatctattatttcatgactttttaataataactatttggactggcatgaaatggtatctcattgtggttttgttttgcatttctttg

SEQ ID NO: 769848 - DNA, 615 bp, Homo sapiens
cattctctaagttcctccactcaccccccaacctcacaacaggccctggtgtgtgttgttcccctctctgtgttcatgtgttctcaatgttcaactctcatttatgagtgagaacatgcagtgtttggttttctgttcctgtgttagtttgcttaggttgatggcttccagcttcatccatgtcactgcaaaggacatgatctcaatcctttttatggctgcagggtattccatggtatatatgtaccacattttatttatccagtctatcattgatgggcatttgggttggttccatgtctttgttaytgtaaatagtgctgcaataaacatatgtgtgcatgtgtctttatagtagaataatttatattcctttggcatatacccagtaatgggattgctgggccaaatggcatttctggttctagatccttgagggatcaccatactgtcttccacaatgattgaagtaatttacattctaaccaacattgtaaaggcattcctatttcttcacagtcttgccagcatctattatttcatgactttttaataataactatttggactggcatgaaatggtatctcattgtggttttgttttgcatttctttg

SEQ ID NO: 769849 - DNA, 746 bp, Homo sapiens
ctatgagcattgttctaatgcctgaaacgagcactacttcaagtacttctttgtcactaaaagctattcaattctactgaaggtcagttattcaagcttcatcttatgtactttttttttatcaaagttaattatgactgaaggtttgcctctatgatgtatgaatctggttttgtgctgtgttatcgtacagagaagataaaggcagrtcacttggattcaaattctagagtttccactcattatgtgtgatcctaaacaagttatttaaacttctctcaatttcttcatctgtaaagtggagataataatggtaccaaccttatagagttattatgaggttaaaattagttaatatttataaagtgcttagaagtacgtcacagagaagcccacataagcagtcattaattaaatagaccataatgatctaagacctcatcagcacaattgtacatgcttttatttggagagttttataagaactataattttcctactttactaatgggaaaactgaagcctggagaaatattagtgatttgtctaagttaacactgttaattaatcacagaactggacttctggactaatcacagaagtcctaaatcttctgatccttgacacagcttttactcctgtgcacctgtaccaacaaagttaaaatttttacaaccaaataggtctgtagtttcaaatgatagtaatacacatttcaggatccacaggttaaataaaaggagggg

SEQ ID NO: 769850 - DNA, 645 bp, Homo sapiens
ttgcaatattaagcagtatattcatttttattgtattagtttttgaatagtctgtaaaaggccagtgtttcatttagctccctgagccacctgtctttcctacaacatcccctaccagcacattcaagcattagcgttcaggatttctaaaatattgtagccattgatggctgccagcagtcaaattaaattcaaagggtytagtatcgcttcaggttttagctatataatttactaagaatgcccaaagcacttgcaatctaatttgcagttcagcaatgaataccatttcctaacaaaatatgcctgaaatttccttttaaggctctagaaaaaatacacttgtgacacctgtgtgccttccttctggcactgactccaaaaaaaaagaaaaagaaaaaaaagaaatctaccaaaaaatgatcatatacctcatgtaaggtgcaaaagaaaaggaaccaagagaatgaatttgtttttactgctaggtcatgtaggccagtacaggcaccatatgcttctttttaaaatttagattatttttctatttcttccaaatccaatattagtgctgtatttgttacagcatgaataatcagcataggcttaaccaaaatcttggctttctgaaaaactactaaataa

SEQ ID NO: 769851 - DNA, 645 bp, Homo sapiens
ttgcaatattaagcagtatattcatttttattgtattagtttttgaatagtctgtaaaaggccagtgtttcatttagctccctgagccacctgtctttcctacaacatcccctaccagcacattcaagcattagcgttcaggatttctaaaatattgtagccattgatggctgccagcagtcaaattaaattcaaagggtctagtatmgcttcaggttttagctatataatttactaagaatgcccaaagcacttgcaatctaatttgcagttcagcaatgaataccatttcctaacaaaatatgcctgaaatttccttttaaggctctagaaaaaatacacttgtgacacctgtgtgccttccttctggcactgactccaaaaaaaaagaaaaagaaaaaaaagaaatctaccaaaaaatgatcatatacctcatgtaaggtgcaaaagaaaaggaaccaagagaatgaatttgtttttactgctaggtcatgtaggccagtacaggcaccatatgcttctttttaaaatttagattatttttctatttcttccaaatccaatattagtgctgtatttgttacagcatgaataatcagcataggcttaaccaaaatcttggctttctgaaaaactactaaataa

SEQ ID NO: 769852 - DNA, 604 bp, Homo sapiens
ccatggtagggagaatgtccttggccacaattggattcatactgtacacacgctatttgacacaatactatgtttttccttactttattaagtactgacacttgtaatgccttatccccagggaaagaatctttttctctccttctagtattacatgtgctgttgggatctgggagaaccctgtttctgtcacttgtgctctaacttcctygggtgacagcaattgaaaatggattcaattgtttgcagaaatgaagtgttggaacccacctttatatatattcccccactgcttataagggtatctgagagaagtccccagtacagtaatataagcaaaatacatgttccctgtaagacccagtgatgtctcagggtgcctccatttttatgatagtcatcatagtaacccactactctttgagtgtttgacatgtgctaggctctgtgctacatgccttccacactttatctcatctgagcctcgccattctgtgaagtggatactttcatgccattttatagatgatgtcacagatagtgacttgatgtcctgtggagaatcattggtttttggctacaaatatttggaggctgtggaggc

SEQ ID NO: 769853 - DNA, 658 bp, Homo sapiens
atatggatggaggctaaattgatatattgaaaatgcaaatcacttcacagatggaggatgtcttctcatttgacctcttgtctcacatttctaatattgcaacattttgagatgaaatgccaaattattggcctagagtcaatggtaactatgattctgtaaaacccctgtatcatttatcctggatacagtcaggaaaattgtagctcctcagttaatgttaaatgcctgcaatgacaataataataataagataatcacaatggtgacagagcctcgcaatctctgaacatttggtagtaaagtccacaacatgtactcccctaggggcttaattttctttttcagattagaacagtgaaattctataactcraatgtaagctatacaaagatttgactagaaatattatctaggacttttgattgccagtccaaggatgctcaggcgggagagtggtgggtgggtattagagtcacagtcatctgctggtaggaaccagagtgaggcttttaaccccacatactcccatcacagaactttaatttgggtttcattcaaatagcttcagagaaggatgagagatttttatgcatactagaatcagttattattataattgatttaaacaagattgagaaacaatcattgtaaagct

SEQ ID NO: 769854 - DNA, 631 bp, Homo sapiens
agaaatcatccttctggctggcattaactccgtagcaggacttcccccacagcagcactgttgacatgtttggctggataatgacttgtggatgctcctatgcactgtaggatgtttcgcagcatcctgctttctacctaccagatatcagtagctacctaccagatatcactacctacccccccaccactgcccactcaactgtagccatcaaaaatgtctcagacactgtcaaacatccactggaggcaaatgycccagattaaaaaccactgctctaagcacaatttctatgcataaaacattatgaaaccaagactcagagagagaaataaaaaagttaaatcacaaatcttttttctagataatttaactttaatcatacaacaaaatatggataaatatttttctaagtttcctcaaggttcgtatttcctataacaatgttaatcatactctttttttaactctccagttaattagggtagagggatggatggtagtgtttatgtagaaaggcaaatttctaaggctgaacctagaattttctttttaaataccaagaaagttggggaattatgattttgctatatgaaagtttaaaatgtcgcatgttaattaaaaatagccc

SEQ ID NO: 769855 - DNA, 570 bp, Homo sapiens
tgtgattcatttctgtatttttaaaatttttattataattgccctattttcataactttaaaaaacaactttaatattctcataattcaactttgggacttcctagctgccttttatggttgtttgttaaaataaaataacttttatccattcaacttttcatggactctcttaarctcaggaatttaccttctctatgaaaaagagaaaaactgggttaatgctccaggttaagcagacacagaagcaggacaattgtatataacacatgagcctgggctggatcctaaaccaaagaatagtttttctcttactataaagtttttgtttttttttttttttgagacacagtctccctctgttgcccaggctgtagtgcagcggcatgatctctgctcactgcgacctccaccttccaggttcaagcaatactctcactcagcctctctagtagctggaactataggcatgcaccaccaccctcagctaatttttgtattttttgtagagacagggtttcaccacgtcacccaggctggtctcaaactcctgacctcaagtgatctgccg

SEQ ID NO: 769856 - DNA, 413 bp, Homo sapiens
gctactgctgcatacatcgctccctctatggttattctatttgattttcaaaagatatcttttcagagcactcaagtcattataaatactgatttacaaatgtattcaaaatatacaaaatagaaagtatgtttgtttattttccttctgtctattttctttttcactataactggctcacaacrtctccataccttttggacatttaaaaaacagctggtgtattgaaggaaaataatcaaaagatgatttcaataaaaagggaattagcctatcttgacccacctgataggaagaggatgattaatattttttgttgaattggctgcctgtgcaatagcctcccatacaggcaaattctaataagaccagtttgttagatgtcacttcggtctcataggctgaaaaatgcc

SEQ ID NO: 769857 - DNA, 604 bp, Homo sapiens
cacttattaaatactgattttgacaaacaaaacagtaatgcatatatatttgcagagcaggagtttccagcagttctaatggatcagagtatagcagaaagatatgtagctggtgaatccagtgattctgaagcagagattcttaaaccagactattactctttgtatggcaaaggaataaagtctccatggccagaatccatgtgtcttctggtcatctacagctagatgaagaagatgaagatgcttctttcaataaaccaactgytgaagacaggacttgctaaaaacatgtaattactttttagcttaaaagggtgaactctatgaacatttctgagtcagttccatgttacccaacttaggcaaaaaataataaagcttgtgaaaaccattttcttggttacaatgtattcattggcattaaggaaatcttctcattttggacacctattttatgaaagatctagctgctgccccatttgttgagcttcactcttctgctccctctgaagggacaatggaaagtgtcctctcctcaccagcactgtggtggggtgaggcaggtatttgtcctctccattacacatttcctcatagagac

SEQ ID NO: 769858 - DNA, 604 bp, Homo sapiens
cacttattaaatactgattttgacaaacaaaacagtaatgcatatatatttgcagagcaggagtttccagcagttctaatggatcagagtatagcagaaagatatgtagctggtgaatccagtgattctgaagcagagattcttaaaccagactattactctttgtatggcaaaggaataaagtctccatggccagaatccatgtgtcttctggtcatctacagctagatgaagaagatgaagatgcttctttcaataaaccaactgctgaagacaggacttgctaaaaacatgtaattactttttagcttaaaagggtgaactctatgaacatttytgagtcagttccatgttacccaacttaggcaaaaaataataaagcttgtgaaaaccattttcttggttacaatgtattcattggcattaaggaaatcttctcattttggacacctattttatgaaagatctagctgctgccccatttgttgagcttcactcttctgctccctctgaagggacaatggaaagtgtcctctcctcaccagcactgtggtggggtgaggcaggtatttgtcctctccattacacatttcctcatagagac

SEQ ID NO: 769859 - DNA, 618 bp, Homo sapiens
ccaccccatatccactacccactgtttccaagcaaaagcctgagacagagacagatccgcctggaaaacctctactagggcagtgcaaaaggaaaatatgggcttggagcccccacgccaccatcctacagcccaagagtcatggacctaccaacagctcacacccccagtatggaaaagcttcaggcactcaacagcagcccagcccatgagrgcagctgcaggtgctaaaccctgcaaagccacaggtgcactgccttagtagaggttttccatgagcctctgcctctgtggcaggctactcccctcctgctacacaccaccctacagccagcctacgtctccccaccttacccacctgtttttacttccaactccacccctctcccatccatgaataagtcacttcccaccaggccccacctgcaacattcaggattacaattacatgtgagtttaggtagggacacgcagctaaatcatactattctgaccctgatcccccaaatatcatatccttctcacagagtaaaatacaatcatgccttttcaaaagttgccaaaagtcttaagtcatttcagcattaactcgaatgtaaaaagttccacgtctcacct

SEQ ID NO: 769860 - DNA, 590 bp, Homo sapiens
taatgttatattggctaactcaaatcagtagttcagcaaatgcagaatcagagcttcttcagcgcggaactctcttgtggttcttgaagatgccatttctttttctttttttttttttttttgagacagcatcttcctctgtcaccaggctcgagtgcagtggcacaatctcaattcacagcaacttctgcctcccagttcagggttcaagcatttcttttgcctcagcctctgaagtagctgggactacagggatgtgtcaccawgcccagctaagctttgtattttctgtagttacggggtttcagcatgttggacaggctggtcttgaactcctgaccttgtgatccactggccttggactcctaaagtgctgggattacaggtgtgagccaccgtgcctggcctcttttttcagtctttaataaactgctgccatcatttcagaccacttgctattttaggcacttagaaatttttcactggaattcatgtaaagaaagaccatgggtgtttgtactggatttagtattcatccttcgactgcatgactcacccctagtgccataattttactaatgaatttttca

SEQ ID NO: 769861 - DNA, 601 bp, Homo sapiens
aaaataaaaaataatgttgacccttctttaggttatattcagtgtatgtcatcaatccattctaaaattgtatagaatttctaaaattcttgtattttttttttttctgagaaggagtcttgctctgacacccaggctggagtacagtggtgcaatcttggctcactgcaacctccacctcccgggttcatgccattctcctgcctcrgcctcctgagtagctgggactacaggcacccaccaccatgccaggctaatttttgtatttttagcaaagacggatttcactgtgttagccaggatggtctcgatctcctgacctcgtgatccttccacctcggcctcccaaagtgctgggattacaggcatgagccaccacatccaccctaattatggttattaagttattgtagaccacagaaataaccaaatttccttgtcaattgtctttatctataactatttaaagtcatttccacagttaattgcttaatggtgatgcagtttctaaaaacttcacaagaatgcaaaattctagaatatggtgtctcttagaagattcatgaaagaatgaaaaggatcctgaaaaacactcgtgaac

SEQ ID NO: 769862 - DNA, 663 bp, Homo sapiens
tgtttaaatcaggtaagtttacctgtaatgtgctttcatttatttcactgcaaattatattttggagattttatatatatatatatatatatatatatagtgtttcctctgcctctcttgtagcaatctgctttgtagagttgtagaaaaaaatggcatctgttttttcttttaaatatttaaatttccattattattatgagaaaatcaatctttcagagtaatgattctcattatggagtcatttgatgattaagaccagttggcataggaaaaagttgtgatttagaaattatgtgatacttttgaattggtgttaagctacattgttcattgatcactttttcaaattatgaatggattctattactttttatatgaccagattacattaatactaacataattatgatttcaaatttttataaatcagacttaattctgaattcagttattagttttgatattgctgaaatattttaagcttcagcttctttttyaacatattcagaaatgctctttgaatcactgactcaaaatgaaaggcaacaaacatataataattatgttattgttttaaaagtgtattattttcctttgttttagttacaagcacaatataaaaaacaactagagcagttaaacaaggataatacggcttca

SEQ ID NO: 769863 - DNA, 594 bp, Homo sapiens
aatcttggctcactgcaacctctacctcccaggttcaagcaattctcctgcctcagcctcccaagtagctgggattacaggcgcctaccaccatagccagctaattttctgtatttttagtagagatagggtttcaccatgttggtcaggctggtctcagactcctgacctcaagcagtccgctcacctcagcctctcaaagtgctgggattacaggcatgagccaccgcaccccatgttgatatttagagtctgaagtgttgtatgttgtacgcaagatagtgctttcctaatattgaggtatcttggagatgcaaatcaatcagaaaactgtttgttggaccaggatttaagggatgtattatctaggctgtgatgaacaacccatttccactgttggaaatataggtttttaatgattaaatggcaatggcactttawtgtgattcaagagatcttgcttctagttttagttctgccactacctgtactacctgttttagttctgccactacctgtgcttctagttttagttctgccactacctgtacttcgtttctttttgggccatgtagccctcatctgaaaaatgat

SEQ ID NO: 769864 - DNA, 641 bp, Homo sapiens
ctcagctaattgttgtattttcagtagagacggagcttcaccatggtggccaggctggtctcggaacttctgatgtcaggtgatccaactgcctcagcctcccaaagtgctgggattataggcatgagccaccgcacctggccctttgcccactttttaatggggttttctcttgtaaatttgyttaagttccttgtagatgctggatattagacctttgttagatgcatagttcgcaaaaattttctcccattctgtaggttgtctgctcactccgttgatagtttcttttgctgtgcagaagctcttaaagttaattggatatcacttgtcaattgttgtttttgttatgattgcttttggtgtctttgtcatgaaatctttgcccattcctgtgtccaggatggtattgcctaagttgtcttccaaggtttttatagtttggggttttacactgaagtctttaatccatcttgagttgatttttgtatatggtataaggaaggggtccagcttcaatcttctgcatgtggctagctggttatccagcaccgtttatgaaatagggagtcttttccccattgcttgtttttgtcagctttgtcaaagatcagttggttgtagatgcacggccttatttc

SEQ ID NO: 769865 - DNA, 559 bp, Homo sapiens
cagagctacatcccaatgagttgttgaaataatctggagcacttggtcctcccgtctatacaaatccctaatacctctgacagtaatttaatgtaatccacacttgtggtgatggttgatgttttattctatactattatctgatatttaaatcacactgcaattgtagttgtgaagtttatccagcctacaaaaattacaaacatgattttcaggataatagaggtgtcagtatagagcctcttttcatgtcatgatgaataaatataactatgtgacaattatatcaaaaaactgaatgtctgagaggcaatggctgcaatataaataacttaytttttttctgaaaggtgggcatatcatatgcttcatggatacagtactatccacagaaaatatctgaggtctgctgattatagtgaaactattatccctcttggccttaggcaatatctgtttgtagaaaagttagcattatgatgagtttcagatgaaaaaaatctgggaattggcagtttgcaggttcagatgtatcttgtgatagttctctgttaaaaag

SEQ ID NO: 769866 - DNA, 559 bp, Homo sapiens
cagagctacatcccaatgagttgttgaaataatctggagcacttggtcctcccgtctatacaaatccctaatacctctgacagtaatttaatgtaatccacacttgtggtgatggttgatgttttattctatactattatctgatatttaaatcacactgcaattgtagttgtgaagtttatccagcctacaaaaattacaaacatgattttcaggataatagaggtgtcagtatagagcctcttttcatgtcatgatgaataaatataactatgtgacaattatatcaaaaaactgaatgtctgagaggcaatggctgcaatataaataacttattttttttctgaaaggtgggcatatyatatgcttcatggatacagtactatccacagaaaatatctgaggtctgctgattatagtgaaactattatccctcttggccttaggcaatatctgtttgtagaaaagttagcattatgatgagtttcagatgaaaaaaatctgggaattggcagtttgcaggttcagatgtatcttgtgatagttctctgttaaaaag

SEQ ID NO: 769867 - DNA, 548 bp, Homo sapiens
aagtactataattatgcttcaatcaccatctatctggactgcctacattattaaaaccctatgaagaccaattggggtttacaaagtacagacccgaaagtaagttaaaatgacattttccactacaaaaatatatgcttttgtgtaacaatatttaacacttgaaatagtgtgtcaatgtgttactcttgatttcaaggattaaaaactgtcattcaactttgtttttcatgcaatttattgtaactttatttcattaatcaggaaatatccatagagaatttggcccaacattcttaattaaatttgaaatctcasacatgctacttgtgaaaaatctaccagtattccttaccaccatggccctttctaactatgccattttatcagctatttgcacaaatgcctagagttcagtcatggggaaactcctgagtcaaaaaagaaaataaaggcaacacttcagtgggatagtcaaacataaattgcaactccatcacacaactaattaaagatacaattgactaacaattaaccaataaaaatga

SEQ ID NO: 769868 - DNA, 629 bp, Homo sapiens
ctttataatgttctaacaaatagaggcattttagtcatcccggttttacttgaaatggtcaagcaacttggctcagtatgcagcttgtaaatgacagtgcaggaattagaacttgagtctgggtaatgttcggctctagatatttaacctgaatgccttactgtgtaggagggattctcacgttgggtagaaagtaaaagttacaaaggttgcaaaggaatataaaatactaaaaatatgcaaatgacctaagtagcttcctatgctttgagtatagttgagcaggcctgctttcaacaaaagaggggagagataggcccttgaaagagagagaaaccagtctatagtgaggggctcaagataaaagtcttttacktctttttacctccatttattctaagatcgaaattatccttgattcaggatgacaacgggtcaaagatcattgataaccatattctgatgagatcaacatccagtggggctttgggtagcttcgaagactgcttcaaatgttgagaggacacatgagcccttggtcactgggcatgactcatagactatgtcattaatatcaccacgattctcagcatatgcctgaagtacagcaagcactttattaatcttat

SEQ ID NO: 769869 - DNA, 613 bp, Homo sapiens
catgtctgatatgttttttattaaatttattccgtagtatctcttgttctttgatgctataatgaatggtatttctacttctattttcaattgtttattgcaaatatgtaaaactacaactaatttttatatattgactttgtaacttgcaacattgctgaatgtgcctattagttgtatattagtttttgtagattccttagagttttctatgtacccgatcttgttgtctgcaaacagttttctttccttccaatatctatgtctttcatttctttttcttgctttatttagtattagctaccctaatatgacattyaatggatatagtgaaaaggccattcttacctttttcccaatgttaggtagaaaatattaagtcattcaatactatatgattttaatacatagccttttaataatttgatgacatttcattttattcctagtttgttgagagtttttatcataaggtaagctgaatttcgccaagtgcttcttctatatcaatcatattgtttggtattttgtgtaagtcaatctagggagttacattgattcattttcaaatgttaagccaacattgtattattgtcatgagcctcacttggta

SEQ ID NO: 769870 - DNA, 613 bp, Homo sapiens
catgtctgatatgttttttattaaatttattccgtagtatctcttgttctttgatgctataatgaatggtatttctacttctattttcaattgtttattgcaaatatgtaaaactacaactaatttttatatattgactttgtaacttgcaacattgctgaatgtgcctattagttgtatattagtttttgtagattccttagagttttctatgtacccgatcttgttgtctgcaaacagttttctttccttccaatatctatgtctttcatttctttttcttgctttatttagtattagctaccctaatatgacattcaatggatatagtgaaaaggccattcttacctttttcccaatgttaggtagaaaatattaartcattcaatactatatgattttaatacatagccttttaataatttgatgacatttcattttattcctagtttgttgagagtttttatcataaggtaagctgaatttcgccaagtgcttcttctatatcaatcatattgtttggtattttgtgtaagtcaatctagggagttacattgattcattttcaaatgttaagccaacattgtattattgtcatgagcctcacttggta

SEQ ID NO: 769871 - DNA, 613 bp, Homo sapiens
catgtctgatatgttttttattaaatttattccgtagtatctcttgttctttgatgctataatgaatggtatttctacttctattttcaattgtttattgcaaatatgtaaaactacaactaatttttatatattgactttgtaacttgcaacattgctgaatgtgcctattagttgtatattagtttttgtagattccttagagttttctatgtacccgatcttgttgtctgcaaacagttttctttccttccaatatctatgtctttcatttctttttcttgctttatttagtattagctaccctaatatgacattcaatggatatagtgaaaaggccattcttacctttttcccaatgttaggtagaaaatattaagtcattcaatactatatgattttaatayatagccttttaataatttgatgacatttcattttattcctagtttgttgagagtttttatcataaggtaagctgaatttcgccaagtgcttcttctatatcaatcatattgtttggtattttgtgtaagtcaatctagggagttacattgattcattttcaaatgttaagccaacattgtattattgtcatgagcctcacttggta

SEQ ID NO: 769872 - DNA, 587 bp, Homo sapiens
acaaattgttcactgaggaatactcaaattctttaagttagttaagggttgagctaaccctgagacttaatgatccttatagtttgcctactgcttttttttttcctataaagcaattctatcccttaaaataaaagccaagccaaataaatgtaaaagataacaatagaaatggaaattctctctatcttattaggcctgtgctgcacatttctttgcctatgttcattaataatataaaaagagtgcatatgtcatggtatctgtctaatacgaagatcatcaagctcatgtcaccattgggctagaggtccgattaatgccaaaaacacagaacacataggaaaagatcatccgtgtstaattgtaacatcctggaagctgatgtgctgtcttctctgtaaaaatctattacattttgggagaaggcgtcagtatgaaaaatcatcccgccaccacttacttgaccaagagttaaatggaagaagaaactttgctcccttgagaaaaaatatttacaacacaccaaacatttttttttattagacacaaagtatcaagcacaaaggcatggaaggaaaaatcag

SEQ ID NO: 769873 - DNA, 488 bp, Homo sapiens
taactaaaaccatatgcaaaaagaaagatatgtagttttttctgtgtgtgtatatttatatataattgtatatgtatacatacacacacaccaaatacatatggtatgcacattgaagcagttgagagacataactgatgtctatggcccacttcaaaatgcataaaagtgattgatgtgatggataaagggatggaaagatgtacagatacatttaaaaagtcagtatagtataatattactgtagaatctagatggtggggatatagatttatactgtaaaatttcttcatgttttcyatgtttgaaccattttctaatacaatattggagaagaacatagatgaaactggaggttaccatgagataggaagcaatcttttatctcatgacaacaagggaaaaagctgaaaataaaaagattattgaatctgccgagtcaaaatgaaaagcttttgggtcaaaaatttttaaaaattaacaaagtt

SEQ ID NO: 769874 - DNA, 717 bp, Homo sapiens
aaattttgtaacacatatttttgtatattcttaagatacatatatatgtgtgtgtgtgtcttttaaaaaggaacgtaaatacaatggaataattaaacattatctctacttaataaaaaataagttttttttgcctcatgaaatagtaagacattttactttttgtttttctttcccaaaaacactcctctgaactgtrtcaagcctttaggacatccatctttttcttgatgtattgggaaaactgaatagggtcaaaagtgaaattcagtgtgacttgcagctttgcccttataaatcatacattacagtgacttctactgtcagtgtaatatgaggacattagttaaatctcctctgaacaaaagtgtttgaatatggactacctagatttttaattactggcaactgtaggtttttaaacttgtatgaattcgtttctagctgtccaaaaatgtccatccatttaaacataaatgcttttttgcagtacagctgtttctgaatcaggtggtttgcatctatgaattcatcaaataggctatccatgtctaaaatatccacttttaatcttttctcatcttacataacactttttagtgttctatgatatatctttctgttactcaaaaccttgaattcttttagttccactaagatgagattttgaataccgtatctttatttatattcatcgcctagaataagggttgggtc

SEQ ID NO: 769875 - DNA, 598 bp, Homo sapiens
cattaacgtaaccaaatggcaagttcagctgctcactgtttgcaatgtcgaataacaaggatgaggttaggtagaaagaaactgactttattgtctaaagctagtaatggggaagtggtttaggctcttttcttaatggaaccacctcaaatatggggcggaaagcgaaggtttaaaaagggaagctcggcatttggggtatgcatsgggggtgaggtggtgcaagtctacatgacttgttcctatgacttgagttattgctacatctggtgaatgggctgacaccatcacaggcacaactggagtgtaaattaatcacagccttgaagtgttctgatggtagggtagaatttcacagacacctggattgtttcaagactccatctctggaactcctaagaaaacatagataagctagcagtgcaaggggtatctggtgaaaaacagcaaagatcacaattacttctctaaggggctaagtaagcagtgagcacacatggaaaacaggaaaagaagggaaatggaaaaacaatttttaggaaaagaggtactcagtcacattagtactatttgacatttttgtttaaattttgtatta

SEQ ID NO: 769876 - DNA, 485 bp, Homo sapiens
cttctaactgctttcttaacttctattgctccatttctccgaatagaaaaattctttgcgtggtctgtctgtcactgattgagggctacaatagacccacctcctattatcttctccccaccccttcccacgcctgctgacactactgcatgacttccttaaccctargaatagagaggtcattcctaatgtgtgaaaagttctacctctctttccttctctctcatgctttatgtgtcgtgctctgctgttagtacaaccatgagctacttctactccagaggctgactctttggccccccaggttcctaagcaactgacctgttgatgatctggtcccctgctctttaccctgggctctccttccactgcccatctctctttactttgtgtgaactccagcagtaccccccacaaagtgtgaatatccccctcacactgcactctgctcaaacagccttatcatgtgctccatatatctaaaa

SEQ ID NO: 769877 - DNA, 583 bp, Homo sapiens
ccccagaggaaattctatatcttggcaagtaaaattttgatggaaaaatctactacgtcacccttgcaagacagagcatccctattgctatggtattttgcttaattagtatccttatagcagggataatagctaccaacaacaaggaagcatgaaagttttagtatctctgagtttgctagaaattcttactgggtttggtaatatctcacaccctagctatgcaaagaagattataaaagaaagagattttctgtgaaagtcatgacgggattgataatgacaggaaacatytagccaaggttaacactaaagttactctagccacccaaatccaagaaagatgttcttttttctcttttcttctacctattcaacctctgctcctaaactccttgtgtgtgtctgtgtcctaaattttcctggggcatgatgggcaaaccccagacaaatgtagctgcttcattaccatgtttggaagtgcctcatttgtagtatactcacagagtcaacataccctagtggttaagattacaatcagattatctgggttttaatctgggcttcactgttatagcaggta

SEQ ID NO: 769878 - DNA, 596 bp, Homo sapiens
tccccacaatatagagttaacattcttcattaaaattataaatagaggaaacattcactaagatagaccacattctgggccacaccttaacaaatttataggaatagaaatcataaaatgtctgctttcagaccacagtggaatttaaccagaaataagtaacagaaagataacttgaaaatatcaaaatgtgtggcagctacacaacacacttctaaataacatataagtcaaagaagaaatctcaagagacaygtaaacatattttgaactaaattaaaatgaaaatacaactcatcaaaatttgtgggatgcagtaaaagcagtaattataaaaaaatttaagtcatcgaatgcacatattaaaaaagaagaaagacctaaaatcaacaatctaattttccagtttaagaaactagaaaaagatcaaattaaatccaaagtaatcaaaagaaaagaaaaaaataagaattagagcagaaatcaatgaaagtgcaaacaaaatcaatagagaaaatcaacgaaaccaaacggtggttctttgaaaagatcaataaaatcaacaagattcgagccaggtaaatatgaaaaagaga

SEQ ID NO: 769879 - DNA, 596 bp, Homo sapiens
tccccacaatatagagttaacattcttcattaaaattataaatagaggaaacattcactaagatagaccacattctgggccacaccttaacaaatttataggaatagaaatcataaaatgtctgctttcagaccacagtggaatttaaccagaaataagtaacagaaagataacttgaaaatatcaaaatgtgtggcagctacacaacacacttctaaataacatataagtcaaagaagaaatctcaagagacacgtaaacatattttgaactaaattaaaatgaaaatacaactcatcaaaatttgtgggatgcagtaaaagcagtaattayaaaaaaatttaagtcatcgaatgcacatattaaaaaagaagaaagacctaaaatcaacaatctaattttccagtttaagaaactagaaaaagatcaaattaaatccaaagtaatcaaaagaaaagaaaaaaataagaattagagcagaaatcaatgaaagtgcaaacaaaatcaatagagaaaatcaacgaaaccaaacggtggttctttgaaaagatcaataaaatcaacaagattcgagccaggtaaatatgaaaaagaga

SEQ ID NO: 769880 - DNA, 596 bp, Homo sapiens
tccccacaatatagagttaacattcttcattaaaattataaatagaggaaacattcactaagatagaccacattctgggccacaccttaacaaatttataggaatagaaatcataaaatgtctgctttcagaccacagtggaatttaaccagaaataagtaacagaaagataacttgaaaatatcaaaatgtgtggcagctacacaacacacttctaaataacatataagtcaaagaagaaatctcaagagacacgtaaacatattttgaactaaattaaaatgaaaatacaactcatcaaaatttgtgggatgcagtaaaagcagtaattataaaraaatttaagtcatcgaatgcacatattaaaaaagaagaaagacctaaaatcaacaatctaattttccagtttaagaaactagaaaaagatcaaattaaatccaaagtaatcaaaagaaaagaaaaaaataagaattagagcagaaatcaatgaaagtgcaaacaaaatcaatagagaaaatcaacgaaaccaaacggtggttctttgaaaagatcaataaaatcaacaagattcgagccaggtaaatatgaaaaagaga

SEQ ID NO: 769881 - DNA, 611 bp, Homo sapiens
gtggtgatatcccttttatcattttttattgcatctatttgatttttctctcttttcttctttattagtcttgctagtggtctatcaatttttttgatgttttcataaaaccagctcctggattcattcattttttgaagggtttttttgtgtctytatctccttcagttctgctctgatcttagttatttcttgccttctgctagcttttgaatttgtttgctcttgcttctctagttcttttaattgtgatgttagggtgtcaattttagatctttcctcctttctcttgtgggcatttagtgcaataaatttccctctacacactgctttaaatgtgtcccagagattctggtatgttgtgtctctgttctcattggtttcaaagaacatctttttttctgccttcagttcgttatttacccagtagtcactcaggagcaggttgttcagtttccatgtagttgtgcagttctgagtgagtttcttaatcctgagttctaatttgattgcactgtggtctgagagacagtttgttttgatttctgttgttttacatttgctgaggagtgttttactaccaattatgtggtcaattttagaataagggt

SEQ ID NO: 769882 - DNA, 549 bp, Homo sapiens
aaatttccctctacacactgctttaaatgtgtcccagagattctggtatgttgtgtctctgttctcattggtttcaaagaacatctttttttctgccttcagttcgttatttacccagtagtcactcaggagcaggttgttcagtttccatgtagttgtgcagttctgagtgagtttcttaatcctgagttctaatttgattgcactgtggtctgagagacagtttgttttgatttctgttgttttacatttgctgaggagtgttttactaccaattatgtggtcaattttagaataagggtgatatggtggtgagaggaaggtatgttctgttgatttggggtggagagttctgtagatgtgtattaggtctgcctggtccagagctgagttyaagtctggatatccttgttaaccttctgtctctttgttctaatattgacaatggggtgttaaactctcccattattattgtgtaggagtctaagtctctttgtaggtctgtgaggacttgttttatgaatctgagtgttcctgtattgggtgcat

SEQ ID NO: 769883 - DNA, 518 bp, Homo sapiens
gatgtacacacaccaaattttctttatctagtgcactgttgatgggcacctaggtggattccatgtctttgttgttgtgaataatgctgtgataaacatatgagtgcatgtgtctttttggtagaatgacttatttttccttgggtaaatagtaacgagattgctgggtcaaatggtggtccaactcagttctctgagaaatctccaaactgcttcccacagtagctgaactaatttacattcccacaaacagcatataagcattcccttttctctgcggcctcaccaacatctattactttttgactttttaatgatagccattctgattggtatgagatggtatctccttgtggwtttgatttgcatttctctgatgattaatgatatggagcattttttaatatttttgttggccacttgtatgttttcttttgagaagtgtctttttatgtcttttggccattttttaatggggtgatttgttttatgcctgttgaattgcttaggttccttat

SEQ ID NO: 769884 - DNA, 524 bp, Homo sapiens
acagtgctatggtttggattggtttatttgtccctaccaaatctcacattgaaatctgatacctgacatcaccctaagggtatgaaaaaaaaaaagaagaaacttgatccccagtgtggtggtgttgggaggcagggcctagtaggagctgtgtgggtcataggagcaaatgtctcatcaacggctttgtgccattctcatggtagtgagctcttgcaagattggattggttcttggggagaacggatcagttctcattagaatgggttgttataaagccaggacccctactcactaccccggggatcagtctctcttcrcatgagcccacttgccctttgatcttctccttcatattttgatgcagcacaaaagccctcaccagaagctgagcagatgctggtgccttgcttcttgcacagcctgcagagctgtgagctaataaattaccccacttcaagtatccctttatagccacgtaaaatgggctgagacagacagtctcttcaataaatggtgttgag

SEQ ID NO: 769885 - DNA, 632 bp, Homo sapiens
actttttgttgagaaggaagatcaggaggttgacatttactttagctctatcaaataatttcatgactgcaactccttcatactgtagctgcagcaggtcctattaacaaaacaaaacaaaacattttgacagttaatcaagtctgtggaacaaggaaaaaggacacaatgtagggagggatccagatggactgaggcctgccttgtgtgccagatgtgaactggggcgaaagaaaagttccacgctaggcaactacccactgcacaaccagcctgagagctggagcaatagggcacattggccaagggaggcttctggttgatttggagttaggaagtcatgttgttcatatcaaaattcatcatacatggaaagaaaaagaaacatgttcaatwgccacacacatctaagctttttatttcagaagtcacaatgacattttcccatttcatccatgttatgggtcactagttttaataaatctggaaaaggtgaagcatttaaacctatgatgaaatatactaagcacggggaaatgagataaggctagtaatgtcaccttaatactatctgatagattcttaatttctattccatatgagaacactttctatcccgaaggcaaggggaa

SEQ ID NO: 769886 - DNA, 574 bp, Homo sapiens
acgaacagcaagcattgcacagaaaatacatacacacgcacaccaacaacagcagcaataacaacagcaatagcaacaacctaattgtgatggtgaattttatgtgtcaacttgactgggctaagggatactcacatagctggtaaacattatttctgggtgtgactgtgagggtgtttctggaagagattagcatttraattcgtggactgggggaagaagatcaccctcaccaatgtgagtggacatcctccaatcaactgacagcacagctagaacaaaaaggcagaggaggggtgaatttgccctatctgagctgggacattcatcttcttctgcccttggacttcagtgttctttgttctcagatctttgagctccagaacttataccacagacccctggttctcaggccttcagacttagaccgtattaagtcaccagctttcctggttctgcagcttgcaaatgacatattgtgagccctcataattatcagtcctcataattccgtaagccaattcctgtaatagtaaatatatataaatatttataagtatttataaatatacta

SEQ ID NO: 769887 - DNA, 452 bp, Homo sapiens
ttttgccccagtcgcccttttagagccctgatctttctaagaccaagcctctgtcctctccttgctaaactccacaactcccactttatccccttttcttactggctgtgctgccctggaacttggtctggtcaataggtttttgctactaatgaacttcactgatagggtttgactagtctccacagtattgcctacttctggattgggtcctgggtttgtgtctttcaaaamccttgctttttatggaactaagccacctctccccacagcagctttatgggagcactaacttggatcttttgccacaccactggaatttcccctggaccctgcaactaaggaagtgactgtgtgtgtattgagggttggcatggctcctagtcctagtctcagcctccagggatctgtgccaggcctgcccatgtctgcagcactcttagaggtacaaa

SEQ ID NO: 769888 - DNA, 496 bp, Homo sapiens
attaggctatgtcttgccgcaaggttttgcaagttatatttttgttgatcagataaaatagagacgtttcttgcgtttgccgccggcccccctcctcactctggtaacgatactctcaagttctaaatcattggttctcaaccagggrcactttctccccaggacacgtttgactatgtctggggatgttttggttattacaacttgggcagggaagaggagatagggaccaaggatgctgctgagtattctacaatgcacagcaaagctccccacaataaagagttttgcagtcccaaacatcaatagcgctgaggttgagaaaccctgttttaaagtgtcatgctgtctaaactgactaaactatcattgctcttaagcagatgatatagtatcagatataggatttcatataggatttgccctcaagtcccagggttttctgtaacttataatagaagagttgggagaaatcaagttaatcctagggatgtgc

SEQ ID NO: 769889 - DNA, 540 bp, Homo sapiens
tctgtagataccagctcccttctgccttccactgtaaatggaggcagtcagaggccctcatcagaagcagatgctgctgtcatgcttcttttattgcctgcagaaccatgagccaaataaacctattttctttataaattactcggcctcagctattcctttagagcaacacaaaagtggccctagtttcctagtgcagggagacagtagactacaggaagagaaagagtgtataaaaagggccagagtcagagggaactaacttattttgagcactaaccatatgtcaggccatgtaataaggcttttattcacagtatctcacttaaygtgcacagtaactctgcaaggaagcagcattatgcccatttaacagatgagaaaattgaggcttagactaagcaattgacggacatgagatctgaaggcaggcctaagtgaacccaaaccaattccttcacatgtttcccaccgctatatcatacttcttcaataaatatttattaagtgaataatgaagatagaaaaattataactgga

SEQ ID NO: 769890 - DNA, 653 bp, Homo sapiens
tgatctgaaataatactaaaaactccaataactatactataaatctccaaaagagtttgcacttatcctttttctcccacaatgcttatactgtcattcacacaaaagacatgcttaaaatatgttttaagtactaaaaaaaggcataagtgaaatttcactttcttaggctctttcrtatgggcaatttttccctcagaagtttgtttccacactagccctccccaccttttttgacttgattctttccagtcaatgcaattctttctggtccctgaaattctatagaatgaagcagttgtatgaaatgtaagaagttggcgtatttaaggtagactatggctctttgctttataccacttgcaaagccaatgttgagtacctgagtctaaaaatacttttcactgccaatcacatgtacagactaggttatttggtgtataatctgattaccagtatttaatgaaaaatactgattgcatcctaggatcacacatccttccaagaagttctatttaaatcactctgtaatttctcttactatgtaattggcattgtgacagtttgatagtttataagggccctttgaaagccaacttgaactgtagggcaaaatgtatttagcacatttttaaagcacattaaaaaagact

SEQ ID NO: 769891 - DNA, 527 bp, Homo sapiens
gctctagaatatggcattccagaagtgggatgctacaaatagtctcattgagagtcaacttgcacaatgtatcgtcctacccttacatcaatttctgaaacaacttctctttgcacttcccctatagttacatgcatmataaattctgacaactcttatgaagtcatggaataactttcttcttatgtttcctatcaatgtcattagccctttatcttgtttgagtttccatcagcaatgttttcaagtcccaagatcattcatgtatccacaagcaatgatacgccagatttggacaaataatactgaatactatcttattttcactgccatgatcaaggcagtgtggattgctgccaagtccaagagaagtgaggtcagcagctgcaagccacctccgtcatttagaaaagcttcatgatgtagtgtgtcgtttcgatgtgacactgtctcacagagttaaaatgatgtgcaaggaactgttcaatggaaatttagaaatttctctttttctcaattttagtgta

SEQ ID NO: 769892 - DNA, 600 bp, Homo sapiens
ttcagattcgaggttatacctgtatgaacttggctttcactcaagcaaactggtaaaacattagtgttcgaacaaagagacatgatctggattatgttttactatgatgattcttactagtgtatatacattagagaattttattatcaaatttaaaaattttcaatgatagtaaaattattataagtgtataaagcaacagatccccaaatgagacataatgaggtaccaagggagtctataaatgcagaaatgaagtggagagtgatgagatccttataggtgatggcaaattgatcattcagtttggagctgtggtagtgagcaggtaccttgaactacattttgacttaaggggaggaaagaaagaagaagaagaaacagaaytgccaacttacagggaaaaagtcctaagatttgagccatcagtgtaaaccattaaaagctgacacacaggccaggcgcggtggctcatgtctgtaatcctagcaccctgggaggccgaggcaggcggatcacttgaggtcaggatttctagaccagcctagccaacatggtgaaaccctgtctctactaaaactacaaaagattagctgcgta

SEQ ID NO: 769893 - DNA, 729 bp, Homo sapiens
ctggatcctctgactcagtctgtaacaagactgcaatgaagttgtcaggcaggctgcagctctctgcaggctcaactgaaagaggatctgcttataagctcactcccggctgtggacaatatttgcttcctcatggctgttggactgaaaatttaagttactaatcagctattgatcaaaggcctcttttatcttccagccacatggacttcctcatagggaagcttacaatatggcacctcactttcattayggagagcaagcaagagagtaagagaaggtaagcaagacagaagccacaggctttttatgacctaacatcagacattacatactattcacttttgccctgtcttcttttggtagaagtgaatcactaggtccagcccaccctcaaggagaggaattatgtaaggtcatgaataccaagaagcagggattatccaaaaccattctagaggctgcctatcacatggatcatgtcaaagatcaaaggaacagcttgaatgggctccaattgagttgaccatttagggaaatttgaccatctataagaataaatataataatttattatgatataatagattttaaaaatccatgagtccatactgatttttaaaaagtgggaagcagagaattacattcttatttataaaagaattccagctaataaatgtagaagaaatgatagaattagagaatcatcattttataacccccaaatgt

SEQ ID NO: 769894 - DNA, 610 bp, Homo sapiens
cctcaattagctttgtgtaaagggatactgctatttaccaaatatttctattggaaacggagtccaaattatccttgatcaaaacttaattggtaagatttaaaaagcaaaaacaagaataaagtcaaattcccaaatagggaattgatttctactagaaagccagtattttgggactttaaaatgaattgtgtgtctaaggcactcctctctttcaatttgttgagcacagcagtgtctggtggaaaaaatgtcaccacatcacgtccatgcctcctgtggtaatccttgtggtagtctgagatgttctgcgtactgagggcgcatctatgttcagcctcgccacagccttaagcaatgggttgtattttatttcagaggacttctttctccggtgaastatttaatagctactttggcacctagtactaaagtaatgttatttatttatctttgtatagtattttagagaagtcattctcaaagtgtggctcctggtccagcagcatcaacatcaccaggcaacttgttagaatgcaaatttctaggcaccacccaagacctactgaagtagaaactctaaaggtggggcacagccatctgtgttcta

SEQ ID NO: 769895 - DNA, 575 bp, Homo sapiens
ttttagcattagaaccttattgagttttatttttatttattttactttttttcttttttttgtgacagagtctcactctgtcaaccaggctggaatgcagtggcatgatctcagcttactgcaacctctgcctcccaggttcaagcgattcttgcacctcaacctcccaagcacctgggactacaggtgctcgccaccacgccagactaatctttttgtgttttagtagagatggggtttcgccatgttggccaggctggtctcaaactcctgagctcaaatgattcgcccatgtcggcctcccagagtgctgggattacagctgtgagtcactgcacctggcccctccttgaatttcagaaagacatatggctgcccagcctgtgaatgtatttcatagcctcccacatagctaagcgtggccatgtaattaagtttycctcaatagaatgtcagaagagtgatgtttgcaacctttatgacaactctttaaaaagaaattgcttgccctccattttctcttttgctctcttttggtcccacatgggatattggttaaccagcttcactcaggt

SEQ ID NO: 769896 - DNA, 618 bp, Homo sapiens
ttcaaccaatgggagaccatgggacacgcctcagagttggcccaccggagcggtgagaaggccggagtatttatacaccatctcctatccattattgttggaaggctgtcctggggccttagctccctggtagttctagccaagcccttgtgtaggctgagcacacagatatacctagaaaaggcccacaggcaaaaagtgacagctatttgcagccagaagccatctctgaataaggaaatgacacatactgagggcatacagatgggcggcaacaacactggctgcacatataactcaattagtggagcattcatgcaagagcatcagttcttagacacaagtgtcargcatgtagttaaaacactagttaattgattaagtagaaatcagctaagaaaagaatagtaacttgctttaaaaatggaaaaacaccataggaataaagctattcttttgttctcttattacttaaactatgtaccacttgtggcctaagttgaatgatcaaaggaattgcttttctgagtaacaaagtcaccctaggtcttcacatgcagcaggagtcctccaggtcagcttcagtggaaataagctaacagtgggacacataagatg

SEQ ID NO: 769897 - DNA, 618 bp, Homo sapiens
ttcaaccaatgggagaccatgggacacgcctcagagttggcccaccggagcggtgagaaggccggagtatttatacaccatctcctatccattattgttggaaggctgtcctggggccttagctccctggtagttctagccaagcccttgtgtaggctgagcacacagatatacctagaaaaggcccacaggcaaaaagtgacagctatttgcagccagaagccatctctgaataaggaaatgacacatactgagggcatacagatgggcggcaacaacactggctgcacatataactcaattagtggagcattcatgcaagagcatcagttcttagacacaagtgtcaagcatgtagttaaaacactrgttaattgattaagtagaaatcagctaagaaaagaatagtaacttgctttaaaaatggaaaaacaccataggaataaagctattcttttgttctcttattacttaaactatgtaccacttgtggcctaagttgaatgatcaaaggaattgcttttctgagtaacaaagtcaccctaggtcttcacatgcagcaggagtcctccaggtcagcttcagtggaaataagctaacagtgggacacataagatg

SEQ ID NO: 769898 - DNA, 599 bp, Homo sapiens
acgtgcaggtttgttacatatgtatacatgtgccatgttggtgatgacctctgttttgtgttgtcttcttgtctcatcctgtgacttcaaatgccttaaccatctgggaatgcagcccagtaggtttcagcctcattttacccagctcctatttaaaatggagttgctctgagtcacatggctctgacaagaagagccctgkatttcacttcttgccatgccattttccagctgcataactttggacaagttgcttaatcatttagaggctttctcaaaaatgagaatattttgattttgctgggattaaaaatgataaacaaaaaatggaatgcaaagtgtttggtgtaatccctatctagtttcatgacctgttattaagtcttacaagtgttttgtgagttgtcttttttaagccaatattttacttttcttttgtgttggtagatgtttaaatagatttgggaaaattatccacacagctgacgctcctccatttcctcactataaaatctttctataccatatacttaaagtattgcgcctgctctccttctctatagttggtctcccttttaatccatttctcacacttatga

SEQ ID NO: 769899 - DNA, 599 bp, Homo sapiens
acgtgcaggtttgttacatatgtatacatgtgccatgttggtgatgacctctgttttgtgttgtcttcttgtctcatcctgtgacttcaaatgccttaaccatctgggaatgcagcccagtaggtttcagcctcattttacccagctcctatttaaaatggagttgctctgagtcacatggctctgacaagaagagccctggatttcacttcttgccatgccattttccagctgcrtaactttggacaagttgcttaatcatttagaggctttctcaaaaatgagaatattttgattttgctgggattaaaaatgataaacaaaaaatggaatgcaaagtgtttggtgtaatccctatctagtttcatgacctgttattaagtcttacaagtgttttgtgagttgtcttttttaagccaatattttacttttcttttgtgttggtagatgtttaaatagatttgggaaaattatccacacagctgacgctcctccatttcctcactataaaatctttctataccatatacttaaagtattgcgcctgctctccttctctatagttggtctcccttttaatccatttctcacacttatga

SEQ ID NO: 769900 - DNA, 561 bp, Homo sapiens
ccccattatggaggaggtagaggggcagccaccgaggatccggggacctactgggtggcctgggcatctgccaagctctgaatccctaacagcccatgagctcccttgtcttgaaccctaatcctctgcagtgctatggaaactggtagaaagyagcacctcacagcaggcaaaatcaaatggactacacaaatgattagctgacttttcttctgtagacacagatttttatgcttgtggacctttgctgctggaacctgtaggctgtgacctgaacagagtgtggctaaacagtcatatccattaatttctgctctttaggagccagtaagtctttctcgagttgggattgaaaatttcaacattgtctttacactggcagcacatttttcctcttactctctccaaacttctagaaatgtgatgctgaatgtcctatttatttgggacaagggccaaaatgaattgtttctccatcagttatgctaagcagggagtaatacagcagtgtgtattgggataaattgacaaaacagccatagctgatgatgtgattccagc

SEQ ID NO: 769901 - DNA, 591 bp, Homo sapiens
tgctataagtctgctccgattttatattccttctggagtcagttttgataatttgtatgtttctaggaatttattcatttcatccaggttatctaatttgttgatgtataattattcataatattcttttctaatcatttttatttttgtaaggttggtagtaatgtctccattttcatttctgactttagttatttgcatcttcttcttgatttctttctcagtgtagctaatgtttgtcaatcttgttgatttttttctgggaaaaaacatttggtttcatttattctctgttgtttttatattatctctttaatttatctctgctgtaatctttatatttctctctgctatttttggttttaatttggtctccttayaaaaaatgtttgagtatgtattctgaactaaattatgctcccccattcatatgttgaagtgctaatccccagtgtgactgtatttgaggataaattcattagagagacagtcaaggttaaatgaagtaataagggtggggccctcgtatgataggattggtgtccttataagaaggagagacatcagagcactctcttgctctctgtgcat

SEQ ID NO: 769902 - DNA, 591 bp, Homo sapiens
tgctataagtctgctccgattttatattccttctggagtcagttttgataatttgtatgtttctaggaatttattcatttcatccaggttatctaatttgttgatgtataattattcataatattcttttctaatcatttttatttttgtaaggttggtagtaatgtctccattttcatttctgactttagttatttgcatcttcttcttgatttctttctcagtgtagctaatgtttgtcaatcttgttgatttttttctgggaaaaaacatttggtttcatttattctctgttgtttttatattatctctttaatttatctctgctgtaatctttatatttctctctgctatttttggttttaatttggtctccttataaaaaatgtttgrgtatgtattctgaactaaattatgctcccccattcatatgttgaagtgctaatccccagtgtgactgtatttgaggataaattcattagagagacagtcaaggttaaatgaagtaataagggtggggccctcgtatgataggattggtgtccttataagaaggagagacatcagagcactctcttgctctctgtgcat

SEQ ID NO: 769903 - DNA, 566 bp, Homo sapiens
ccagctcctacagctccagctgcatccatgttgctgcaaaggacatgatgacattcttttttatggttgtgtagtattccatggtgtatatataccacattttgtttatccagtctactgttgatgggcatttaggwtgattccatgtcttagctactgtgaatagtgctgtgataaacatacacctgcatgtgtgtttatggtagaatgatttatatttctttgggtatatacccattaatacgattgctgggacaaataagttctttgagaaatcaccaaactgctttccacaatggctgaactaatttacactcctaccaggagtgtatgagcattcccttttctctgaaacctcaccagcatctgttatttttgtctttttaagaatagtcactctgattgttgtgggatggtatctcgttgttttaattttcatttctctagtgattagtgatgttgagcattttttatgtgcttattggctacatgtatgtcttcttctgaaaagtgtctgttcacttcctttgcccactttttaatggggttgtttattttttgcttgt

SEQ ID NO: 769904 - DNA, 564 bp, Homo sapiens
gtaaagaagacatttttcacctgcttaaattgaccatatttggcttatcttgcattcaaccaagaacccaagggacacaacaagtttcactatattttattgctctaacttaggtctaaatctttctctggtggtttgagaactccacaagattctgaatttctgtttctatgaaaggctgtttgaggaaaataagttcataacagcctgggaatgggaagccataaagaggagatgctctagaaacattactctgctaccctgactttgaaagtcttagatttgcagggttatacagagayttttctagtttactttttgttcttatttatcactttagtaacttgagtgcaagagtgtagaatgaagttgtaacatatatctcaggggttaaagagctgttccattttcagatatcctatcctaaaagaacccatatatgtgtcaatgtttttggttcagaaaatacaggcagagtataaagccatccaagaacatccacaggtgataatacgtcatgggcaatgtgagcttcatgagtatcacgaataattacttgactag

SEQ ID NO: 769905 - DNA, 654 bp, Homo sapiens
cacttcattttccatatcactattagcattttggtcacaatcatttaacaagtctctagaaattttcaaacttttcctcatcttcctgtcttcttctgagccctccaaactcttctgcctattacccagttccaatgctgcttccacattttcatgtgtctttatagcaatgccccaactcctggtgctaattttctrtattagcctattttcacactgctataaagatataaatcagactgggtaatttatgaagaaaagagatttaattgactcacagttccacaggctgtacaggtaacatggctggggaggtcttaggaaacttacagtcatgtcagaaggtgaaggggaagcaggcacatcttcacatgcctggaaggagagagagagagagaaaaaatggggaagtgctacacactttcaaacaaccagatctcatgaaaactcactcattatcatgagaacacagcaagggggaaatttgtccccatgactcgattacctaccaccaagcctcttccccagcattgaggattacaattcaacatgagattagggtggggacatggagccaaaccatataaacaaatataccacaacaataaccacaacaatttgttatgaaatacacaatattagaagaggtaaatt

SEQ ID NO: 769906 - DNA, 595 bp, Homo sapiens
gagttttgtctaggtcctgctgcttacaacacataatgccagtcataaagacaagaagtattgcagggaagaggcttcaatctggggcggcagctgaagagatgggagatcagtctcaaatccatctccctgactgactaaaattagggatttatatgggaaggaagaaatgtaaccatgtatgggaaaacaggagttagggaagagtaaagaaaaggaattggtcaatatgtggtcaggtgatcatgatgggtgagaggtctggtatcyccttgtcagatgtggtgatctggtgaatgtcagttcctttattctatcttaagccctgatggctggtttcctgagaaaggaactcagataaaacaaatgaagcttttcaagtttcaagactgggaggaacagtttctatgtttattcaaaggaaaccacagacattggttctatgggacagcttgggtggtttcagtaacatttcataaaccctgagcaatgtcctcaaatgtgttttgttctacccacctagggcccctgcacagctaatttcttgtccagttacctattttctgccatgtctgaatgaaccttttattgtctg

SEQ ID NO: 769907 - DNA, 595 bp, Homo sapiens
gagttttgtctaggtcctgctgcttacaacacataatgccagtcataaagacaagaagtattgcagggaagaggcttcaatctggggcggcagctgaagagatgggagatcagtctcaaatccatctccctgactgactaaaattagggatttatatgggaaggaagaaatgtaaccatgtatgggaaaacaggagttagggaagagtaaagaaaaggaattggtcaatatgtggtcaggtgatcatgatgggtgagaggtctggtatccccttgtcagatgtggtgatctggtgaatgtcagttccttkattctatcttaagccctgatggctggtttcctgagaaaggaactcagataaaacaaatgaagcttttcaagtttcaagactgggaggaacagtttctatgtttattcaaaggaaaccacagacattggttctatgggacagcttgggtggtttcagtaacatttcataaaccctgagcaatgtcctcaaatgtgttttgttctacccacctagggcccctgcacagctaatttcttgtccagttacctattttctgccatgtctgaatgaaccttttattgtctg

SEQ ID NO: 769908 - DNA, 639 bp, Homo sapiens
ttctaaatataaattactgtcttagcttgggatgctataacgaaatactatatactgtgtggcttaaacaacacaaatttatttctcagttctggaagccaggaagttcaagatcaagatgccaaaacgtttgatttctggtgaaggctcacttcctgatttgtagacaactgtcttctcactgtattctcacatggcatagaaagctgagagctctggtctcttcctcttttcagaaggactctaatttcatcacagcagctttatcctcatggctttatctatgcctaataacctccaaaaacccctcctgcaaataccaacacatcaagggttaggacttcaacatacacatgttgaccagagaaacaaacatttagcctataacaatgatttggatttatttayggagaaggaagctatagaagaataactaaaatgcataaaggcaaattgaatgttcaaagggtaagcatgggtctgattgttaatatcactattagctcagctacaaatgagcatctggagcaatagcatctctctaggtttgaagaggtgagcggcggtgcctcagcgatctcctctgcagcataggaaatgatggctgtttctttccgctggaagcatggccacgaaagc

SEQ ID NO: 769909 - DNA, 577 bp, Homo sapiens
cttttctctggctttgtgctttcttagatactaaattctgccttgtggtgacgaaaattaatggcataaatgcattcataaaggaagttattaaagagttatgtgactgaattacaagtaaggattattatacttgcaagttcataatgtaaatttttwaaaaaaaaacataatacagaaagggcgtggcttctaaaaacacagtcccgagaagagttgtacaattcataaggatatctaagctgtgtataagtagtttgtgtaagtgcttgactttccataattttgatcctgtagtaatttttttaaaaaattaaaggccgtagggacatggatgaagctggaaacccatcattttgagcaaactatcgcaaggacagaaaaccaaacaccgcatgttctcactcataggtgggaattgaacaatgaggacacttggacacatggtgaggactatcacacactggggcctgtcgtggggtggggggaatggggagggatagcattaggagatatacctaatgtaaatggtgagttaatgggtgcagcacaccaacatggcacatgtatacatatg

SEQ ID NO: 769910 - DNA, 577 bp, Homo sapiens
cttttctctggctttgtgctttcttagatactaaattctgccttgtggtgacgaaaattaatggcataaatgcattcataaaggaagttattaaagagttatgtgactgaattacaagtaaggattattatacttgcaagttcataatgtaaatttttaaaaaaaaaacataatacagaaagggcgtgrcttctaaaaacacagtcccgagaagagttgtacaattcataaggatatctaagctgtgtataagtagtttgtgtaagtgcttgactttccataattttgatcctgtagtaatttttttaaaaaattaaaggccgtagggacatggatgaagctggaaacccatcattttgagcaaactatcgcaaggacagaaaaccaaacaccgcatgttctcactcataggtgggaattgaacaatgaggacacttggacacatggtgaggactatcacacactggggcctgtcgtggggtggggggaatggggagggatagcattaggagatatacctaatgtaaatggtgagttaatgggtgcagcacaccaacatggcacatgtatacatatg

SEQ ID NO: 769911 - DNA, 600 bp, Homo sapiens
atatatatataatttatacatttttctatgtataaatatgtataaaatttataaatgtattttaatattaagctcaaaaatggaaacctgtgttattgctcctaatcatgattccccttttccagtagaaggttttatatttatcattgtcctttgtcatgtgacttgcactaccgtaatatagggaggatgttattctccacctccttgtcaggttgatcatgtgatttgctttgtcaacagaatgtgtgtgaaagtgatgtacacgaggctgggcgcagtggttcacgcctgtaatcccagtactttgggaggccgaggmgggtggatcacgaggtcaggagatcgagaccatcctggctaacacggtgaaaccccgtctctactaaaaatacaaaaaaatagccaggcatggtggcgggcgcctgtagtgccaaatactctggaggctgaggcaggagaatggcgtgaacccgggaggcggaggttgcagtgagccgagagatcgcgccactgcactccagcctgggcaacacagtgagactctgcctcaaaaaaaaaaaaaaaaagtggtaagaaagtgatgtacacgagttgtca

SEQ ID NO: 769912 - DNA, 600 bp, Homo sapiens
atatatatataatttatacatttttctatgtataaatatgtataaaatttataaatgtattttaatattaagctcaaaaatggaaacctgtgttattgctcctaatcatgattccccttttccagtagaaggttttatatttatcattgtcctttgtcatgtgacttgcactaccgtaatatagggaggatgttattctccacctccttgtcaggttgatcatgtgatttgctttgtcaacagaatgtgtgtgaaagtgatgtacacgaggctgggcgcagtggttcacgcctgtaatcccagtactttgggaggccgaggcgggtggatcacgaggtcaggagatcgagaccatcctggctaacacggtgaaaccccgtctctactaaaaatacaaaaaaatagccaggcatggtggcgggcrcctgtagtgccaaatactctggaggctgaggcaggagaatggcgtgaacccgggaggcggaggttgcagtgagccgagagatcgcgccactgcactccagcctgggcaacacagtgagactctgcctcaaaaaaaaaaaaaaaaagtggtaagaaagtgatgtacacgagttgtca

SEQ ID NO: 769913 - DNA, 600 bp, Homo sapiens
atatatatataatttatacatttttctatgtataaatatgtataaaatttataaatgtattttaatattaagctcaaaaatggaaacctgtgttattgctcctaatcatgattccccttttccagtagaaggttttatatttatcattgtcctttgtcatgtgacttgcactaccgtaatatagggaggatgttattctccacctccttgtcaggttgatcatgtgatttgctttgtcaacagaatgtgtgtgaaagtgatgtacacgaggctgggcgcagtggttcacgcctgtaatcccagtactttgggaggccgaggcgggtggatcacgaggtcaggagatcgagaccatcctggctaacacggtgaaaccccgtctctactaaaaatacaaaaaaatagccaggcatggtggcgggcgcctgtagtgccaaatactckggaggctgaggcaggagaatggcgtgaacccgggaggcggaggttgcagtgagccgagagatcgcgccactgcactccagcctgggcaacacagtgagactctgcctcaaaaaaaaaaaaaaaaagtggtaagaaagtgatgtacacgagttgtca

SEQ ID NO: 769914 - DNA, 527 bp, Homo sapiens
gagtctggagagagggtgcacggaggaagagagagatgacttcgctggaatgagatgacccctccccatgctgagactctcaatgaatgccatgcacagcctccagctaggggtggccacagcggggccttgctcgccttgctcgctggggacagcccctatgctgcaggactagagttgctcctagcttctcagaacctgcgggatctgcttctgcagctccagtgatatggccrttcccagcactgactctggaataacacttgatctataggcggctccactagaaaagagccaagccccgcaagtcagaggggtctccccttacccaacacaggacacaggaaagctgcccttattccctgcaggacaaggcacatttcttgtaattagtgctttgcctgtcttctgggctacagttttcctttctactattgtttttattgagcacagtgagtagaaccaactaaatatctggagggatatttagtctctttaagagttaaaggaaatcccattaaagggct

SEQ ID NO: 769915 - DNA, 636 bp, Homo sapiens
aattgcagatgtctgggcttgtttcgagggtcactgccagttcaatgccctgtttcatctcccgtgtcccgtgtccttggacttgactcctaatttgggggatgagctcaagtcatgcagaattcccaatcacaagggaaggtgacatcctgtatgcttttcctacaaaggcatggttttaaatagccagcactaacaagatttcctggctacctaagtggcttttttctgaaatccaccccrctagttcctcagccccactccagcagcaccccctttgagggaattgaagaggtgaagagttggcatcgtggatttgtgaggcgttcatgctctcctacatcccccagatgttttggacaatgtgatgagaaaataacctgcaaagtctgggtcatatttacccaacatttgatgcatgttttggaactgaatgagaccagagaggatcacaaacacaaatgaagaaatgtcatttctgacattgtgtttattatatcaaagcattcatgccattttaagcagctcacacagaaggaacacaattgtatctttgatctgttaacacagttaggaaccaatatgtggattacctctcagcgcagaggcagctgctagagatgggtaaataattga

SEQ ID NO: 769916 - DNA, 551 bp, Homo sapiens
gcaagctggctcagttgccacctgtgggcatgcactattcttccacttgcagattagatgccaggacaagtgtcttccaaaggccacctagaaagcaaacgtcaatgaatctggggttagacctggctctgcaaggacccaaaggtcatggcagccctcttcctcctcgtcgtcctcagcggtcagtggcttctgatgtctctgttccccagtcgctgcatacttgtgcctcagagctgagcttcttatctaccctccactgacgctgcccactcgggaaggagcctcccttgctctgaagctgccactcaggtacggaggctggagggcsccataggggacagacagggtgggtaggggagtgctgcctgcctggcagattcacccaatgccagcatttctcatcacagcacctcagacaaggcagcctgacacttaacagccctcattatctgacctaaattcctgctgaaattgaggtcggcctcttctgattctgccccaagtgatctggaggcctcggtcggtcaccatgcccctgtgaggggaca

SEQ ID NO: 769917 - DNA, 618 bp, Homo sapiens
agtcactgtttcagtccaagtctgaaggcaggaaaaggcccctttcccggctcaagcagtgaagaagaggagtttccttttactcagcctttctgttccattgcgcctccaacggactggatgaggcccacccacgagagggaggaaaatctgcatcattgggtgtgccaagttcaatgttaatctcatccagaaacacagtcagtcacacccagaatcatgttggaccagatatctgggcaccccatggcccagtcaagtcgacacatacagttaaccatcaccctcagcaattgaaaaaaaagatttcatctctgtcccagacaagtagattgctctgtccccagtgctcatgtccttggatttcagggayttcggcaattccttcttgggctccagcaccctcagctcacgtttgggaagtgcctggctcagaacagtgttttctaggtgggaaagaacacctgtgtctcttgagacattagtgagcattcccccgaagaagtgctcagtcaaatcagtgctcagtcaaatcagcacccagttttcagctctgcctgaaaacttctcacagcatgggggctggcgccacctccgagaagcccgtctgggtccctg

SEQ ID NO: 769918 - DNA, 615 bp, Homo sapiens
aacaaacctttgccattacgtactctgtggaaggcactgtgtgagatacttaatatattagtgtcctagggctgctgtgacaaaggaccacaaactgggtggcttagaacaacagacatttattctctcgcagttccttcctggaggctggaagtctggaaycagggagtcagcagggctgtgctctttctgaaggctctaggggagatctgctccatgcctttttctgagcttctggttttgccagcagatctggagttccttggctcatgcgagcatcgtcactgcaatctctgcttctgtgttctccctgtgtgtcttcacatcatcttccttctgtgccagtctgtgtctgtctctcttctcttggattagggctcaccctaatgacctcattttaacttgattacatctgcaatgaccctatttctgaataaagtcatacaggtactgaaggttaagacttcagtaccctttggtgggtacacatttgaacccttaactagagataggtgagagaatcagattcattcttgaccttttataatacaaaccatgctgactagagacccatgcataactagcaataacccacattgcaagggcaagcacaat

SEQ ID NO: 769919 - DNA, 608 bp, Homo sapiens
ctttggaagaccaaatgtctgatttaaattccttgtgtttcagtttaggcctatttcatttcattctttcttttccataagctgcaagttgcttcccactgggtgatatgattcccattgacacggaaaagtgataaacagctttaccttgacccctcactccctccacaggatcctgcagtttcagaccctcttctttaggaaccactctgtcactctgcccactcagtagccacattttcgctgagtcatccctcccyggccctagctagccctagctggccctagctgaccccaccggccctagctgggccaatcaggacctctcgcctcagaactgagccacagagaaggaagctgagtcacatcacagcaaagctctgaaggggttcggttcttgctacccccaaaatttgccagtttgatacactgattattttgagttgaaggcacttaaaaaaacagcagtgcagagagaggccctctctgaacttcccttacctgcctaaggacagatcctgcaaaagaaactaaattgtcatcagtcccatccctgggagtttcatcaaccagggaagatgaactcatcacagagagactagaagttg

SEQ ID NO: 769920 - DNA, 619 bp, Homo sapiens
taccatgggcaagtaatatttgaagcactttataagtgttaatttatgttacactcacaacaatccgatgaggtagggactgttgtcatcatcccaaaggctgaagaaactgagtcacagaaagcaagtttcccaaggcctcatggctactgagaagtggagttagactagtcaggtgctggayctataggaggacaagacagagaagatgtttaccctcagggggttgacatttttgtgggaaggccagatatgaaacaaataagcatataaatctactaactgattgtaggttgtgataagtgttctgaaaagaatcagcagtgtgctataatagaaaataaagcaagggacataggagcatggtcccacagggcgtctaggagtgggtgcattagcttatctattgttggataacaaactaccccaaaaatgtagtgcttaaaataatagacctttactatctcccagtttctgtgggtcagggatttttgagaggctcatctgcgtagtcccagcttggagtttcccactagattgtagtcaagatgttgcctggctggagctgcagtcatccaaaggctccactggggctagtgaatctgtttccaaggtgatt

SEQ ID NO: 769921 - DNA, 619 bp, Homo sapiens
taccatgggcaagtaatatttgaagcactttataagtgttaatttatgttacactcacaacaatccgatgaggtagggactgttgtcatcatcccaaaggctgaagaaactgagtcacagaaagcaagtttcccaaggcctcatggctactgagaagtggagttagactagtcaggtgctggatctataggaggacaagacagagaagaygtttaccctcagggggttgacatttttgtgggaaggccagatatgaaacaaataagcatataaatctactaactgattgtaggttgtgataagtgttctgaaaagaatcagcagtgtgctataatagaaaataaagcaagggacataggagcatggtcccacagggcgtctaggagtgggtgcattagcttatctattgttggataacaaactaccccaaaaatgtagtgcttaaaataatagacctttactatctcccagtttctgtgggtcagggatttttgagaggctcatctgcgtagtcccagcttggagtttcccactagattgtagtcaagatgttgcctggctggagctgcagtcatccaaaggctccactggggctagtgaatctgtttccaaggtgatt

SEQ ID NO: 769922 - DNA, 596 bp, Homo sapiens
acagcagcctcacagcatcagtctgaggatagaatgggttaatgcagccaggcacagtggctcatgcctgtaatcccagcactttaggaggccgaagcaggcggatcatgaggtcaagagatcaagacaccctggccaacacggtgaaaccccgtctatactaaaatacaaaaatactagctgagtgtggtggtgcatgcctgtaggcccagctacttgggaggctgaggcaggagaattgcttgaacctgggagacggaggttgcagtgagccaagatcacaccactgcactccagcctgggtgacagagtgagactttgtctcygcaaaaaaaaaaaaaaaaaaaaaaagaatgggttaatgcctgaaaactctttggcacagtgcccagcacaaattcagcagtcactcagtgttggctatcatctttggtgatgttggtcccaaacccagacctctgctcttgtcctcggctcatacacccacctgtatagcccatatgcactttaaacatgagtccaaaatggaatccaaaatattagatgccctcgttgccaccaccaggtttgctttcctctcaagccactgagggatc

SEQ ID NO: 769923 - DNA, 495 bp, Homo sapiens
caaagaaaatttcaggccaagatggtttcactaataaattcatgtataatataagaagatacatttccactactacacaacttttccagaaaactgaagatgagaatatactttctgattcattctatgaagctggagttatgctgataccaaaaccagatgaagacattacaagaaattaagactacaggctggggcatggtgactcacgcctgtaatcccagcattttgggaagccaaggtgggaaaattgcttgagctcagaagttcgagaccagcctggacaacatagtgagatgctgtctctattaaaaattttaaaaaagtagttgggtgtgttggcacacasctatggtcccagctacttgtgagacagaggtgggaggtcaaagctggagttagctatgatcgcaccactgcactccagccaggaattagaacgagaacctgtctcagaaaaaaaaaaaaaaaaaaaaagaagaaaaaaagtgcaca

SEQ ID NO: 769924 - DNA, 495 bp, Homo sapiens
caaagaaaatttcaggccaagatggtttcactaataaattcatgtataatataagaagatacatttccactactacacaacttttccagaaaactgaagatgagaatatactttctgattcattctatgaagctggagttatgctgataccaaaaccagatgaagacattacaagaaattaagactacaggctggggcatggtgactcacgcctgtaatcccagcattttgggaagccaaggtgggaaaattgcttgagctcagaagttcgagaccagcctggacaacatagtgagatgctgtctctattaaaaattttaaaaaagtagttgggtgtgttggcacacagytatggtcccagctacttgtgagacagaggtgggaggtcaaagctggagttagctatgatcgcaccactgcactccagccaggaattagaacgagaacctgtctcagaaaaaaaaaaaaaaaaaaaaagaagaaaaaaagtgcaca

SEQ ID NO: 769925 - DNA, 578 bp, Homo sapiens
atatcttacttagcaagttctctattagacatatgtctgctgaatgaaacttaattacagatatttttgaacatttattaaatttaaattatatttgtacttgtaagaaatatttaaacaatgctttgtttttctaaaataaaagaaaaccaatagcacaaaccttcattttctaagtgtgtcaagttgttttgttttttttatttgcttgtgtgtttgttttttgagactgagtctccctctgtcgccaggctggagtgcagggtgcgagctcggctcactgcaacctccaacttgctggttcaagtgattctcctgcctcagcctcccaagtagctggaattacaggcatgtgcccctgcgctcggctaattttttttttttttttttttgkatttttagtatagaccaagtttcaccacgttggccaggatggtctcctcctgacctcgtgatccacccgcctcggcctcccaaagtgctgggattacaggtgtgagccactgtgcctggcctattttaactgttttatgtcttctggtttcgtgtgacaatgaaataagttaatatttcctgcc

SEQ ID NO: 769926 - DNA, 578 bp, Homo sapiens
atatcttacttagcaagttctctattagacatatgtctgctgaatgaaacttaattacagatatttttgaacatttattaaatttaaattatatttgtacttgtaagaaatatttaaacaatgctttgtttttctaaaataaaagaaaaccaatagcacaaaccttcattttctaagtgtgtcaagttgttttgttttttttatttgcttgtgtgtttgttttttgagactgagtctccctctgtcgccaggctggagtgcagggtgcgagctcggctcactgcaacctccaacttgctggttcaagtgattctcctgcctcagcctcccaagtagctggaattacaggcatgtgcccctgcgctcggctaattttttttttttttttttttggatttttagtatagaccaagtttcaccacgttggccaggatggtctcctyctgacctcgtgatccacccgcctcggcctcccaaagtgctgggattacaggtgtgagccactgtgcctggcctattttaactgttttatgtcttctggtttcgtgtgacaatgaaataagttaatatttcctgcc

SEQ ID NO: 769927 - DNA, 565 bp, Homo sapiens
  misc_feature 480: n = A,T,C or G
acggatccaagaaactcagcaaaccccaagcacaagaaacatgaagaaaattacactaagggataacataatcaaattgttcaaaatcaaggaaacattattaatagcaggtgtataaaaagacatgttacctatagaagaacaaagataagaacaacatcagatttcttttgagaaacaatgcaagtgagaagacagcggtacatctctaaagttctagaagaaaaaaggccaactagaattctatgcctagcaaaaatatctttcaaaaatgaaggtgaaataaagacacaccagaaacataaataatgaaataattcatcaccaggagaccttcactgcaagaaatgttaaaggatattcttcagaaacaaaatgatgtcagatgaaaatctggaycaatacgaaggaataaagagcaccaaagtggtaactatatgagcaaacatcttttaaatttttttattatttaaatctctnacagagatacatgtttaataaaaaaacagcaaaatgttacagagtttataacatatgtaaaagccaaatgcatggcagcaatagc

SEQ ID NO: 769928 - DNA, 565 bp, Homo sapiens
  misc_feature 480: n = A,T,C or G
acggatccaagaaactcagcaaaccccaagcacaagaaacatgaagaaaattacactaagggataacataatcaaattgttcaaaatcaaggaaacattattaatagcaggtgtataaaaagacatgttacctatagaagaacaaagataagaacaacatcagatttcttttgagaaacaatgcaagtgagaagacagcggtacatctctaaagttctagaagaaaaaaggccaactagaattctatgcctagcaaaaatatctttcaaaaatgaaggtgaaataaagacacaccagaaacataaataatgaaataattcatcaccaggagaccttcactgcaagaaatgttaaaggatattcttcagaaacaaaatgatgtcagatgaaaatctggaccaatackaaggaataaagagcaccaaagtggtaactatatgagcaaacatcttttaaatttttttattatttaaatctctnacagagatacatgtttaataaaaaaacagcaaaatgttacagagtttataacatatgtaaaagccaaatgcatggcagcaatagc

SEQ ID NO: 769929 - DNA, 624 bp, Homo sapiens
tcaggtatccaggcacattcatctctgcgggtctgccatcttgacacgaggggggggcagaaggagagagggtgtagagtcatgccagttcttaggtgctcctgacaaggagatctgcagcactctgctcacattcctgttttccagaactcagccagtacccagtgcaactgccaaagagtctgggaagcatagagagtacacggatagctggagatccctcatcactactgtcatgatatgttcatttatgcaatacatatcaatgggttcaccccagtcaggctgactccaagaggctaagatgacttcaccttgggtggtttgcagctgggaaagaaaggcaagtcggcaccgatcgaasagatcattcacttcagtgggctgtcgagctgtgctagaggcaggtgcagtgtgctgcagaaatacagatggtgactactaccctggagtcttggggagatcctggtgtgcattggtgtggggttggaaaggtgagttggcactcacccccttcaagaagaagtgggaaggacatttcagacaggggcaagtgcaaacgcacagggcctgaaagaactaggctgggagaagaggatggcattggaatgggtgggagagggg

SEQ ID NO: 769930 - DNA, 592 bp, Homo sapiens
acatgtttaaaaatcaaatgacattaaaagcctcgtaatgggccaggtgtggtgcctcacacctgtcatcccagcactttgggaggccgaggtgggtggatcacttgagggcaggagttcaagccagcctggccaacacagtaaaaccccatctctactaaaaatacaaaaattagccgagtgtggtggctcattcctctagtcctagctactcaggaggctgagccaggagaattatttgaacatgggagcyggaggttgcagtgagctgagatcacaccactgcactccagcccaggcaacagagcaagactccatctcaaaaaaaaaaaaaaaaaaaaaaaaggccttgtaatgagcaaccaactcttgtcttactctacgtccacatctgagggaatcacttttaatcttttcaggtcttttttcttgtggttaatgctatagctctaaataatcaactggtttactgctttatcaatgctagattttgttgactttctgctgtgaataaataaattctgatttaggtcttaaaatacacctccttccttctcccaatatagttgtattactatgtttagttcaatta

SEQ ID NO: 769931 - DNA, 592 bp, Homo sapiens
acatgtttaaaaatcaaatgacattaaaagcctcgtaatgggccaggtgtggtgcctcacacctgtcatcccagcactttgggaggccgaggtgggtggatcacttgagggcaggagttcaagccagcctggccaacacagtaaaaccccatctctactaaaaatacaaaaattagccgagtgtggtggctcattcctctagtcctagctactcaggaggctgagccaggagaattatttgaacatgggagctggaggttgcagtgagctgagatcacaccactgcactccagcccaggcaacagagcaagactccatctcaaaaaaaaaaaaaaaaaaaaaaaaggccttgtaatgarcaaccaactcttgtcttactctacgtccacatctgagggaatcacttttaatcttttcaggtcttttttcttgtggttaatgctatagctctaaataatcaactggtttactgctttatcaatgctagattttgttgactttctgctgtgaataaataaattctgatttaggtcttaaaatacacctccttccttctcccaatatagttgtattactatgtttagttcaatta

SEQ ID NO: 769932 - DNA, 625 bp, Homo sapiens
acttcatttcatcacttcatttcatcatttcatatcatttcttcatttcaccatttgatcttctcatttcatttcatcatttcatcatttcacttcatttcatcatttcatttcatttcctcatttcatttcaccatttcatttcatcatttcatttcatcattccatttcatcatttcattacatttcatcatttcatcatttcacttcatctcatcatttcatcatttcatctcatgatttcatttcatctcatttcatcatttcatttcattctttcatttcatttcatcatttcatctcaacatttcatttcatttcatcatttcatttcatctcatcatttcatcatttcacttcatctcatcatttcatcatctcatgatttcatttcatctcatsatttcatctcatttcatcttttcatctcgtcattacatttcatcatttcatttcatcttttcatctcgtcatttcatttgatcatttcatcaattcatcatttcatttcatttcattatttcatcatttaatcatttaacttcatttcctcatttcatttcatttcatcatttcatatcatttcttcacttcaccgtttgatcttttcatttcatttcatcat

SEQ ID NO: 769933 - DNA, 497 bp, Homo sapiens
tttttttagccagaaatttagattattgtataaaatcactcaaatttttaaatgctgacaactaattcaaatttaaacatcattcaagggccagatgcagtggctcacccctgtaatcccagcactttgggaggccaaggtgggcagattgattcatcccaggagttcgagaccagcctgggaaacatggcaaaaccccgtctctaccaaaarttagttgggcatgatggtgcattcctatagttccagcttattcaggaggttgaggtgggaggatcacttgagctcaggaggaagaggttgcagtgagctgagatcatgccacactaatccagcctgggtgagagaatgggaccctgtctcaaaagaataatataaagtaaaataaaacatcatgcaggccaggactgtataagttaaaccaaacacacttaaaggggatttgggccacaggctatcagttttttacctctaaaatgtaaaaaatatgatcttca

SEQ ID NO: 769934 - DNA, 403 bp, Homo sapiens
ttgaaattcttccctcaggcatccccccttcctcagatctaggcactttgatttttctttgactgcagtgcacatctccatccctaggaccttcctaggctgtgaacacactgcataccttgcatattttcctacctttcccttccatgtaaaatatacttgtcctatgttccayttccctagattctgtcctcaaccaaagtcacaatgaattaatcatataaacaaattagttagcccgtgcgctacacctctcacctagaaaaatatgtctgtaatcttgtttaaatgcttattttcatcaaaaaacatttgactggactaggtaaccttcaaattgtctcccaacgctaacattgtaaaattatatgagtaactccaaccagaaaaaaaaaaaaagtaa

SEQ ID NO: 769935 - DNA, 491 bp, Homo sapiens
tccacttttatctgcacacttgactcagataaatacatctattcacctagacatgtcctagcatgctcatagaagcaccatttctaatagccagaaatacccaaattccatcaagagtaaaattgataaataatgtatatttacacattatacacaaatgagaatgaatgttaacagcaaccacatgcagtatgatggctctcattaacataatgttgagtgaaagaagctagaaacaaaagagtacwtaatgtatgatgtaagttatatgaccaaaacatgagccaaagtaccaaagcaccctatgctgttagaagtcaatgtcatgattaccctcagtggagagaggaatgaggagccagaatagattgtgagggggcttatgtggtgccggtaatgttcttcttcttgatctaagtgctggtgacacagatgtgttcagtagctaaaagtttattgattttaagtgatgatatttttacttttctgaa

SEQ ID NO: 769936 - DNA, 556 bp, Homo sapiens
gttacagagaatctttttgtaacagctttctcagatgctggttgtagtagtgatgtggtgggtatgtaagcgggttcactgtttcctgtggggctggaatggcagaggtctcatgaagcttattttgttccccagtggtgtctactttgttttttttgtttttttttttgaracagggtcttgctgtcacccaggctggaatgcagtgacacgatcatggctcattggagccttgacttcccaggctcaagtgatcctcccacctcagctttttgagtagctactataggcatacaccgccatgcctggctaatttttgtattttttatagagatggggtttcaccatgtttcccaggttggtttcttttgtcccacggggtgttctgttaatgtggtgcactctgcctaggagtagcagcccctgagggccagactactgtgaatcctgctgctcctctgggtctagccacccagtggggctgccacactccaggctggtgctggggaatgtgctgtgacctgtcctctagtctcccagtagcaggtaccagtac

SEQ ID NO: 769937 - DNA, 560 bp, Homo sapiens
atgaagtaatttctcaacctccacttaactcccacctctcacctttctgagtctccactgtctatcatttcacactccatgttcttatgtacatattatttagcttctacttataagtgagaacatgtggtgtttgttttctgtttctgagttgtttcacttaagataatggccttcagtttcatccatcctgactcaaaaaagacatgatttcattctcttagaaatgaattatcaaataagaattgaatttcctttggctctattctctttttaattgagttctatgatgcacttcaataaaataaaaacacaagctgacagaagaagggcaagtctaaaacctaattgcaaatgyttttctcaaatttgactgtgtaggactaaatgggatctcttctcatccattaaaccgtatccagcccccgaatgtctacttgacagtcttctctgcttatacaatggttagactccaaaagtatttatcagtctaaaattatacaatgtcagtaactgcaagtcttcctgtaggtgttctgcattattcatgcatttaagtt

SEQ ID NO: 769938 - DNA, 607 bp, Homo sapiens
gtatatttaaaatcatgaaaaaagtgtcattgccaaccttcaataattattgtaactatatattcctactaacaaatttttcactaaaacttgaattgtttcatatttatgagcttattgatccagccacctggatttctattactacttataataatgatttattwtatttttaagaaaaataaatagagccactaagaccgcatccttggttcatcaagtaagcatatttccactaaatagtgggaactggatttggggaaaactggcaagatcatgttgtgaataagttaagaaaaaagtaagattaagtgggtttcttaaaaaatgttattaacaccaaaaaaagttgaggtcatctggagggctacaggaagagtcttattcagcactttgtcaactcgtgttaggagtaactgtctcagagggcagaagtgatagcctggcatttggagaggaaatatgcaaagattgtataaccttggtagtgtgacaaccttcccagcctaactccttttctcccagctcgcccatctctacggcagagtcctcttcacctctatctgtgtgtagcccttgagttaaactgcagaatgtaagaagccag

SEQ ID NO: 769939 - DNA, 590 bp, Homo sapiens
aatcaagttatgtgcaggcaaagtgaggagattcaatgaagtatgatagataactattctaataattgtagttcattgtcttatactactgtacttttttccatctagaatacatatagtcattcctatttttctattctttaaaacaacccaatttctaatatttgaagtcagaattgtagagtgattaagagtgttgattctggaaacaaaccacctcatttacaytacttactagctcaatgatcctaggtgagttattttacctctatttctctttgataaaatagagataaaaacagaacttaggctggacatgattcctgcctgtgattccagcacgttgggagacagaaacgggaggatcacttgaagccaggaatttgaaaccagcctgggcaacatagcaagaccgtatctctacaaaaacaatattaaaaaacttaagaaaatagaacctgccaatattttagttgtagagattacatttattgatatatgtctaatattttgaatattgcctggcacaaaaaaaaaaaccttacatggacatgttgcctcttattagtagtgatttggatccagaaaag

SEQ ID NO: 769940 - DNA, 541 bp, Homo sapiens
aagtcaacaagtaataaccaaaatcgatgtagttggaaatgagagcaaagctctgtatcttttgctatttaattccctgagttctccatctgctttttaatacagtggctcttgatgtattatgtttcttggacacttagtcataaaaaaatgagaaaaattaaatattgatgttcacagtaggatagttgcaatatttcataggcttttaccaaataagcaatatttctgcttgccaggacattctctgttgatgaaagattatttttcttctcacttgaaaggaaatctgaaaagtcattttaaactatatttagctattatggaactatttacttctttttttttcagaagcaaacagatgtgaaatgcaatagaattgttgacagaatyggcttttcctggtgacaaatctgatgatttcagtgttaaaacagccttgttttatgtagaaacatggctatattctaattgaaatgtttggaatattttatgactgaaaaactgttgactccttgtttagtaatagatttatccttcc

SEQ ID NO: 769941 - DNA, 607 bp, Homo sapiens
agactggcagatcatttcaatccatcgattgtgctaagagcattaaataacacatattataattaagctatttaatctattgacccaatgctatgattagaatctggaagaaattagacaaataattacatgacagatttagaaaggagaaataaaccagatagcggattaatccgttatttctttgaagatatttagggcaagtgtagctgttgttccatttttttaaaaaaaaatgaggagaccctyattctaatattaagctatcaatctctaagaaacaaatatcttttgggagttaaccgttacttacaataacagtaagcaactcaacaaatataattattcctggactaattatagtattctatcatgaaacaagtgcttactaatcagatttccaatgagaccattactcttcagaaagagactgcctgaggggtagcataaaaaaccccttgtccctgttaccacaccaaattaaaaactccctagttctttcaaatacatgtaagacatatgtcttgcccatgtttttaagatctctaaaactttcaggaccaccatagactactcttgttctctgagaacagatactgtcacacac

SEQ ID NO: 769942 - DNA, 603 bp, Homo sapiens
atcaatagcagcatttaaaagaaggagtataggaggaaattgacattctgatgtgactgcataatagtaaaaatgctatctgactacacacaggagtgtagatacaggcttaatctaactttaaaacataaattagagcacaacagtacccacatatatgacgaatatcacatatttttcattagcctaaaaagttatgagggatatgaaacattctgaaaagggcaacattttttgtgtcaataaggactaggataccatctaagaaagactcttccacatyattcagtctatctttttttattttctcagaaaccacttttattcccatgaaaaagaagatacagcctagattacaacacacaagtccttttaaatatctggaaagccttctcaaggaagacaggtacaaacaagctcagacagtgaagactataataaatacataattcttcaatggccagacacagatgaacatctaccagtatcaagacactccaggaaaacatgaccttaccaaatgaactaagtaaggtaccaggtaccaatcctggaaaaaagagacatgtgaccattcagagagagaattcaaaatagctgttt

SEQ ID NO: 769943 - DNA, 580 bp, Homo sapiens
ttctaaatatacaaccttgtcatctgtaaacagagacatttttacttcctcttttcctatttgaataccttcctcttgcatgattgccctggccagaacttccaatactgtgttgaatagaagtggtaagagagggcatccttgtcttgtgctggttttcaaagggaatgcttccagcttttgtccattgagtatgatattggctgtgggtttgccataaatagctcttattattttgagatatrttccatcaatacctagttaattaagagtttttggcatgaaggggtgttgaattttatcaaaggccttttctgcatctattgagataatcatgtgatttctgtcattggttctgtttatgtgatggattatgtttattgatttgtgtatgctgaaccagccttgcatcccaggatgaagctgacttgatcatggtggacccctcccttacaacttatacaaaaattaactcaagatgaattaaagatttaaacgtaagacctaaaaccataaaatccctagacgaaaacccaggcaataccattcaggacataggcatgggcaaagacttcatgac

SEQ ID NO: 769944 - DNA, 534 bp, Homo sapiens
gacagctttctttaaatgtccctgctccgtcaccattttctgtgaacaagtctctgctccatcaggatgcacaacaactacccagacccatgtagtgacattccaaataagcttctctttggtcttggagccaaagaaccaagtcctaattcccaatttctcccaaactttcactatctcagtgtattctctcttctcactcttatttctatcaagacacctatgaatggccttctctttcattgaacaacagttgattcagatacaatcaattcaataactctcattttagatcagaaacatacatttatgtttagaaaagactaatcaattgagtacctaagaaaacaaacaaggagctaatttaatgtsctgttcccaagagcactctcacacagacacagaaacaaacatacactcacacatccctacacaccaactgttttactaaaatccagccacactaccttttttgtcttccttcatcaggccatgcttgtttggggcttttgaacacgcttttctacaaggctc

SEQ ID NO: 769945 - DNA, 607 bp, Homo sapiens
atagattttaaatgttatcaccatacacacacatatacatacacacaaatgataagtatgtgagatgatagatatgttaagtagcttgatttattatttcacactgagtatatatatgttaaaacatcctttgctcaccataaatatatacaatttcatttgtcaattaaaaataataacaaagttacatatataattttttttatttcaagtggtatggctttatataatgctgaatgactcactgactgattgaatcactgtcattcattcaacagacatttattcagagcctggtatgtgccaaagactgcaaagtggcatacaaaaagaaagaataagacaaagcctatgcttataatatgtcagggtaagtagacacccaaaaataatcattttcaaagtttaagatcttattctagaagcctgtgctctgggagcacactggaatggcatttaactttccagaagaatcaaggaagacttcactgaggaggtgatatttgagctgggctttaaaagattaataggwtttaactagatagcaagggaatggaatgatatttcaggcagaagaagcattatgtactcagaggcatgaaagtac

SEQ ID NO: 769946 - DNA, 590 bp, Homo sapiens
atttgtcctgtagagggtacctgtacctctggtgcatgtgtcccccagccctgagggtggctcaagtttggctgtttatagatagaagcagtgattgaagcttggatgagaggcgggagtggtcatacataggctggcacatgagcaattttgagagcttaaagaatccttaaacttgaagtttggccttctgagtcatttgaagctatatttgccaaagtagtataagaaaagattatttaggagtttgcctgattcatgaataacgtgtacctatttagacataaaagcacgtgggcctccatggttctctttccctgtgaatgataggatacacctgatattcagaatacttartggggagaggggtggaataatatagcagaatagaagactccatggatcattccctcccacaaggacaacaatttaacaactatctacgcacaaaaaaaaaaacctcataagaaccaaaaatcaggtaagcactcacagtaccttgttttaacttcatattgctgaaagaggcactgaagagacagaaaaaacagtcttgaattgctgacatcccccatcccccaccatctagc

SEQ ID NO: 769947 - DNA, 630 bp, Homo sapiens
gtttctccaagatcacctaatgtgcaatatgtttttagaatgacaattttctgaatattgtgactcttagctgttatgcatgccaccaatgtcatgaatattataaatagttgggtgggtttctggtttccaaagcattttctatccagtctacagcttcctccctcttctttcagtttacatctttgcattattcaatttttctattttgcttcagcttatctatggacggtttgaaataatttgtggagatgcaagctaggcagctccagtgtaaaatgaatataaattaagcagaatagatacactgcctagaagtagctgctgtcactccatcttttcttcaagtcagttcaacccctcttctcccaggcaggctgcaaccaggagaatgaccttgttagtttttcttgartagcaccatctttaatctctctctctcattcctctttctggggatcttttccttgcatccacttccacctatcttagaaaccagtcaagcccctattccaggtatcctaaatttttatctctctttatttgataactactcaagattgagggctgtgtgtttgttgcttcaacactcattccaatccacatggaagttgctttcctttattatag

SEQ ID NO: 769948 - DNA, 630 bp, Homo sapiens
gtttctccaagatcacctaatgtgcaatatgtttttagaatgacaattttctgaatattgtgactcttagctgttatgcatgccaccaatgtcatgaatattataaatagttgggtgggtttctggtttccaaagcattttctatccagtctacagcttcctccctcttctttcagtttacatctttgcattattcaatttttctattttgcttcagcttatctatggacggtttgaaataatttgtggagatgcaagctaggcagctccagtgtaaaatgaatataaattaagcagaatagatacactgcctagaagtagctgctgtcactccatcttttcttcaagtcagttcaacccctcttctcccaggcaggctgcaaccaggagaatgaccttgttagtttttcttgaatagcaccatctttaatctctctctctcattcctctttctggggatcttttccttgcatccmcttccacctatcttagaaaccagtcaagcccctattccaggtatcctaaatttttatctctctttatttgataactactcaagattgagggctgtgtgtttgttgcttcaacactcattccaatccacatggaagttgctttcctttattatag

SEQ ID NO: 769949 - DNA, 566 bp, Homo sapiens
agagatgtcctgccctgtgaggaggactctattcaggcagtctggccactgctgctttactttggtgtggcgaattccacccagtccaaacctcccagcctccttagcgctatcaggggaaaaccgcctactcaagcctcggtaatgccgggcgaccctccacctaccaagctctatcatttcaggtcaacttcatactgctgtgctggcagtgagaatttcaagccaatggttcttaggtttctgggmtgtgtgggagtgggacccactaagcgagaccacttggctccctggcttcagccccctttccaggggagtgaacggttccatctcactggggttccaggtgccactggggtacgtatgagaaaaactcctgcagctagcttggtgtctgcctaaacagccgcacagttttgtgcttgaaacctggggccctggtgatgtcgtcacctgagggaatctccagatctgccaattgcaaaaaaccgtggaaaaagcatagtatccggaccagatagcacagtccctcatggcttcccttggctgggggagggaggtgcccc

SEQ ID NO: 769950 - DNA, 566 bp, Homo sapiens
agagatgtcctgccctgtgaggaggactctattcaggcagtctggccactgctgctttactttggtgtggcgaattccacccagtccaaacctcccagcctccttagcgctatcaggggaaaaccgcctactcaagcctcggtaatgccgggcgaccctccacctaccaagctctatcatttcaggtcaacttcatactgctgtgctggcagtgagaatttcaagccaatggttcttaggtttctgggatstgtgggagtgggacccactaagcgagaccacttggctccctggcttcagccccctttccaggggagtgaacggttccatctcactggggttccaggtgccactggggtacgtatgagaaaaactcctgcagctagcttggtgtctgcctaaacagccgcacagttttgtgcttgaaacctggggccctggtgatgtcgtcacctgagggaatctccagatctgccaattgcaaaaaaccgtggaaaaagcatagtatccggaccagatagcacagtccctcatggcttcccttggctgggggagggaggtgcccc

SEQ ID NO: 769951 - DNA, 566 bp, Homo sapiens
agagatgtcctgccctgtgaggaggactctattcaggcagtctggccactgctgctttactttggtgtggcgaattccacccagtccaaacctcccagcctccttagcgctatcaggggaaaaccgcctactcaagcctcggtaatgccgggcgaccctccacctaccaagctctatcatttcaggtcaacttcatactgctgtgctggcagtgagaatttcaagccaatggttcttaggtttctgggatgtgtgggagtgggacccactaagcgagaccacttggctccctggcttcagccccctttccaggggagtgaacggttccatctcactggggttccaggtgccactggggtacgtatgagaaaaactcctgcagctagcttggtgtctgcctaaacagcygcacagttttgtgcttgaaacctggggccctggtgatgtcgtcacctgagggaatctccagatctgccaattgcaaaaaaccgtggaaaaagcatagtatccggaccagatagcacagtccctcatggcttcccttggctgggggagggaggtgcccc

SEQ ID NO: 769952 - DNA, 551 bp, Homo sapiens
attcttatttaaaaaataaaaatagactaggcacggtgactcacgcctgtaatcccagcactttgggaagctgagatgggaggatcacttgaggtcaggagttggagaccagcctagtcaacatggcgaaaccctgtctttactaaaaatacaaaatttagccaggcatggtggcctgcacctgtaattccagttacttgggaggctgaggcatgagaatcacttgaggstgggaggcagaagttgcagtgaattgagattgagccactgcacaccatcctggatgatggagtgagactctctcagaaaaaggtaaaataaaacattatggactgtgcttataagccagaagacttttattttaaactcacaattaggctaataacacagctcggtttatagcacattgtcatttattttgctttgcaagggaaagagaaaaattatttataattttttttctttctccatccccattcccatttcttccattctccagctctcattataatacataatatattccaatccaactttataaacttatttag

SEQ ID NO: 769953 - DNA, 524 bp, Homo sapiens
aaatcatgtaaaggcagaataaattttttttacaatattgccatatttaggagggatcttactccaattacaaattatataattggtctcccccttaggaagcttggtgagaaaggttaaagctctaaagagcagaattatttcttctacacagatttttagggctaggaagaaaggtggagctagagcgagaaagagagaattatccaaaatattaaaaatatacttcatatacactcagaaatattaaaagtaaaatgrtaaaaataagatggagcatgcaaacactagctgaagaaagctagtatagctataaaaattttaaagtaaactacaggtaagaatcactattagaaataaaaatatttccaaatggaagagaagtcaattccatagtatattggcatcaaatatctgtgttcatcaataatatggctttaaaatatatgaagcaaaaattaatagaactaaaagaacaactagagaagtacacagtcatacctgagattttaacacatttttct

SEQ ID NO: 769954 - DNA, 584 bp, Homo sapiens
agaaagctagtatagctataaaaattttaaagtaaactacaggtaagaatcactattagaaataaaaatatttccaaatggaagagaagtcaattccatagtatattggcatcaaatatctgtgttcatcaataatatggctttaaaatatatgaagcaaaaattaatagaactaaaagaacaactagagaagtacacagtcatacctgagattttaacacatttttctcaatagttgattttttaaaaataataataaatccacatcctactttgcatccagtttttaagcatagaattatgtgctacaaagtcatttggctccttgtaraatactttttatgatgagacactcactacttttttgaggtaatcaaatccatttcaagagcactctaatctaacttgtgactcagattttattaggtagtgattcctagaaatggaagtacaacaataatatatgtcctctctaagaacattcagcaagttagtgtttgatctgggtcatgaatcctggtctcaagactcataattcaattaaatattctctaaatgaattttaaatattatctgactggatt

SEQ ID NO: 769955 - DNA, 390 bp, Homo sapiens
attctcatctgtcaactacagaaagaaaagatgggggcaattgatttcaaagaggcccactggctattctatgttacccccagggaaacatttccctggcccagactttatgctggtttcacttgaagacctgaagtttaagctacaacagttttcaaytcaaccatgttgaggaaaacaccaacttggagcttgaggaaattttgataccaaaaatgatatgaattttagaggctgaacagtacatttctaacctttggaaaggtcactcttcctgttttcaggtttatgtgccacattgtttgtggtgcttttgtttcaactcttgtttctttctccttcagggcatttctgtgtaaatgtcactttcgtccatcagcacactgcaaa

SEQ ID NO: 769956 - DNA, 533 bp, Homo sapiens
cttgtcactttttgtttttgttgtgtttgattttggagtcttcattatggcagataatacagggttttctaggtatagtatcatgttgtctgctaaaagagataatttgactttctctcttcttatttggatgccttttatttctttatcttgcctgattccttgggctaggacactctgtactattctgaataggagtggtgagagtgggcttccttgtcttttctcagttctcaaaagaattcttccagcttttatccattaaatatgatgttggctgtgggtttgtcatggattgctgttaytattttgagctatgttccttcattgcctattttattgaaggtttttaacatgaagccacgttgaattttacttaaagctctttctacatctattgagatgatcatgtgtttttttgttttagttttgtatatgtgatgaatcacatttattgatttgcttatgttgaaccaaccttgcatcttaagaataaagcccacttggtcatggtagactagctttttgatatg

SEQ ID NO: 769957 - DNA, 624 bp, Homo sapiens
attttgtatttttagtagagacagggtctctccatgttggtcaggctggtcttgaactcccgacctcaggtgatctgctggcctcggcctcccaaagcgctgggattacaggcctgagccaccgtgcccggccctgacatgaggctctttactcctgtctttacgacgctaagttcttccattcagactgagactcctcagyctggaaaaatactctaaagagcaaaatcccctaatattctgccttatcttggtgaaacatttcatttcataaagatctagcaagtcttgcattagagtatatcctgaatattcacaaagacagctaacacggacaacagtttaaaatgttactttatatttttaagattgggagttcctaactttaggcccatggactgtgaaatttgtgtctgtgtatatgtgtatgcacacatttttaaattgtcttttggaaaagagtgtctggtgcttttgtcagtgtctttactgaaagacttgagaacctctgaattgaggtgtgagttttttgcatattagaaaggcaaacgtttagacacagtttctaaatttagttaatgaactgtatattgagcatatggaggcatatgttaagcaaaaatc

SEQ ID NO: 769958 - DNA, 588 bp, Homo sapiens
aatgtgtgacctcgaccatattgtttaacttcttttcgtctgagtttacttcgtttctaaagggaagattttcattgtatccatttcataggatttgggtacacattaaattagttgaaagttgtaaattgcttaccacaatgcattccacataaactgaataaacattagctgttwttattatcaggtggtttatcacagcatcgtttataagaataaaaaattgaaatgacataaatatctattttaagagactaaagaaaccattatataatgattcttccatgtaatgtgagactttacagctattaaagctgatgtttataagactctttaatggcatggaaaaatattgcttaatggaaaaaaacaagttacagatgttattcttagggcaattccatttgttaaacatattatgtagatacatacagaaaaagaagatagtatacacacacagtgttagccatacgatcacagatgactttttttttgtccttagttttgttttctatcataaacaagtgttaaatttgcaatcagagaaaagcgtatatattttattagggcaacaacaatttggtttca

SEQ ID NO: 769959 - DNA, 574 bp, Homo sapiens
tggagggctcgttaaaatacatatggctgggccccactcccaatttcttattcagaaagtttgagttgggaactaagactctccatttttaataagctcccagatgatcccatgctgctggtccaaggactacactttgagaaccaccggattagtcaatcacctarggaaattctgtgcccagttgctcccttggttgttaataattagtgctcaaggggtccataaaagagaaatggagccagttacaacatttttcgtctttctagttgcaaagagagttgaaatcatcagtgactacaaatggaaagtctgagtgaacacatgaatcaaactatattccttttggccaaatcccaaataaaagggatcattaataaagagaagggaaattggaaaggctgtatcctggtatactaaggttgcccaaaatttctctataaacaagaaggcacacctccccatcttgctgcctcctaaaccacctttattgaattaaattacatgctctaaacatgtaatgagtttaaatgtaaattctgcagaggtcccaagaatatcacgtttggccctt

SEQ ID NO: 769960 - DNA, 612 bp, Homo sapiens
tcccattgtgtattattgttgactttgttgaagatcagatgattgtaggtgtgtggttttattcctaggttctctaacctattccattgttccatgtgtttgttttagtattagtaccatgctgttttagttactgtataggcttgtactgtagtttgaagctgggtagtgtaatgcctttggccttcaattttgttttttgttttgttttgtttttgctttggattactttggctactcagactcttttatggttccatatgaattttaaaataattatttctaactctgtgaaaaatgtctttggtaatttgatagaaatagcactgaatctgtacattgctttgggtaggatggctaagttaacaatatcaagtcttcctgtcyataagcatggaatgtttttctatttgtttgtgtcatctctgatttctttcagcagtgttttgtaattctcattgtagagatggttcacctccctggttagttggattcctaggtattctattctttttgtggctattgtgactgggattgcattcttgatttggctctcagcttggacattattggtgtatagaaatgcttcggatttttttcaataagttattg

SEQ ID NO: 769961 - DNA, 471 bp, Homo sapiens
tgcatatatacttcttgtataagtttttggatttccttgcattgagctttgtctttctctggttcctccctgattagcttaataactaacttcctgaattcttttttgggtaaatcagggatttcttcttgatttggatccattgctggtaaactagtatgattttgggggagggttgatgagccttgttttgtcatattaccagtgttggttttctggttcctcctcatttgggtaggctctgtcagagaaggctgttcagattcttttgtcccacggggtgttcccttgatgtagtaccttcctccttctcctatggatktggcttcctgtaagccaaactgcagtgattgtctgtcttctgggtctagtcacccagtgagtctacctggctctgggctggtactgggggttgtctgcacagagtcctgtgatgtgaaccatctatgggtctttcagccgtggatatca

SEQ ID NO: 769962 - DNA, 580 bp, Homo sapiens
ccctgagggttttttatatttctgtggtgccagtggaagtgtttcctttttcatatccgattgtgtttatttggatcttctctgtttttttttttctgtcagtctagctagtggtccactaatgtatttattatttcagaagtattatgtaaaacccaacttctgtttttttgatcttttatatggttattctcatctccatttcattaagttcagcwctgattttggttattttcttcttctagctttgaggttggtttgctcttgtttttctagttcctttagatgtggttttagtggttgatttggtatttttctaattttctgatatgggtacttagcactatgaactttcctgttaacactgctttagctgtgtcccaaagattctggtaggttgtttctttgttttcattagtttcaaagtattttcttatttcttccttaattttattctttaccccaaagtcattcaggagcagatttcttaatttccatgtaattgtatggttttgagggattttctgggtattgatttctattttcattgcattgtggtttgaaattgtggttggtataa

SEQ ID NO: 769963 - DNA, 615 bp, Homo sapiens
aataaaaataaaacataaattagcttggggcagtagcatttgcctgtactcccagctactagaaaggctgaggtagaaaaatggcttgagaccaggagtttaagcctgcagcgagctgtgattgcaccactacatactccggccttgggcaacagagaaagaccccataccaaaaaaagaaatgaacaaacaacaacaaactgcttcataagtaaaagtatagaatcttctttgactctcaaaaacatttacattaaaaaatagtgaaaattagaaatattttgaatacagctttttaaaatgataagcatttaacaaaatttctgcacagctgctgtcaatcctgaaaagcctaaccagttacctaggacttccaaatcatagcmagacctatgtatctttcacataataaacaatatccaatctttgaagtttgccccttatctatacagttgcactatgtttgttagataataggtaatcccttcctagcctaggtttaaaaaaaaaaaaccaatgtaaacatattcagattatttagaaatacatacactattattctggatctttataaaaaataatttgacttcttcagattttaaatgagtgatctaa

SEQ ID NO: 769964 - DNA, 537 bp, Homo sapiens
ttgtgagaaaaatgttatttgaattctttcaattacatcttatcagattttggtgatgcttttgaattctcaaatgtttcaagttgcaattctctgttaagatttattacatcattatcaaaactttgtattaagaaaagagtatawctttctgaagtcccgtagtacatattgtttctgccattcatttgatgcttatatttctcatttgctaacatttataatcatctgttcttacgcaaagcagtatgtcttggtggagaggtagtggaaaaaaacaaaaaacacccatgaaataaatctgtactcaaagaattcagcttgcttaacttcccaactaagtgatactactttggggaaccataactgctttccttactccatcccttttgtttcacagtgccttgttcacagctcaattatttgaagtctttatagatctgtttctctcttttgttgtttctgctgtacacctggttgtctttgacattacttctgccagtctttgtggtcacaagtgacttgtggagcatttta

SEQ ID NO: 769965 - DNA, 537 bp, Homo sapiens
ttgtgagaaaaatgttatttgaattctttcaattacatcttatcagattttggtgatgcttttgaattctcaaatgtttcaagttgcaattctctgttaagatttattacatcattatcaaaactttgtattaagaaaagagtatatctttctgaagtcccgtagtacatattgtttctgccwttcatttgatgcttatatttctcatttgctaacatttataatcatctgttcttacgcaaagcagtatgtcttggtggagaggtagtggaaaaaaacaaaaaacacccatgaaataaatctgtactcaaagaattcagcttgcttaacttcccaactaagtgatactactttggggaaccataactgctttccttactccatcccttttgtttcacagtgccttgttcacagctcaattatttgaagtctttatagatctgtttctctcttttgttgtttctgctgtacacctggttgtctttgacattacttctgccagtctttgtggtcacaagtgacttgtggagcatttta

SEQ ID NO: 769966 - DNA, 604 bp, Homo sapiens
aaaccaaattctttaaaatatacaaaatgatcgatttctggagtctgataagaataatacatattttgtaagtaatgcctttgaagagcttgaaaataatttttcatttattttatagattaaaatatcctcttacaattttgtttgtagtctcaatgcacttgtgactagtagattaacatggaggttactatactgtccctaatgggctttcctgtgtctctttcctatgcccatcctcttcctctccattctgctatgtcctctccaatgcatccagggtttcactttctttcacaactccgattgattttctgtcctaacaagcctgattccaaacacagttctacagggacaaaggtatagagaacaaactcaataggttgctcatccaygaaacaacaggtgacatggcagagttagaaaaactagtaaggaggccatgccaggaatgaatgcaacaaacttctttgaatatatattcaaacattatatttaatatatattctcgaatggaatgtatatattccattccatttcctagtatggaaagaaggtctaccagacaatgtacttaacaaactaaactattttcccatcaatc

SEQ ID NO: 769967 - DNA, 641 bp, Homo sapiens
gaaaacaaattttaaaaatggcaagcataagtccttacttatgaatgataacactgaatgtaaatggaccaaactctccaataggacataaagtggctgaatagattaaaaaaaaagactcaacaatctgctcccaataagaaacacacttcacctataaaggcacacatagactgaaactaaaagggtggaaaaagatattccatgcaaatggaaaccaaaaaagagcaagaatagctctatttatatcacacaaattagatttcatgacaaaaaccataaaaagacaaagaaagtcattacataatgataaaagggtcaattcagcaagaggawaagaagggtcaattcagcaaggtgcatataaatataaatgcacccaaccctgaagggcccagatatataaagcaaatattattcaagctaaagagagagatagaccacaatccaatagttggagacttcaatactccactttcagcactggacagatcatccagacagaaaatcaacaaagaaacattggaattaatctgcacaatagaccaaatggacctaatagatatttacagaacatttcatccaatggttgcaggatgcacattctactcagcccatggatcattttcaaagaatgatat

SEQ ID NO: 769968 - DNA, 627 bp, Homo sapiens
tagtgacactcctgtagcaatgagcacatctagtgcatagatcttagttcctaaatttccttctctaatccagggttccttggagaaacagttaatttcagggctggggcagagaaaatacaagatgagcctgaagtatcttgaggtgacggaaactaaggaagtagtcacaagacaaggatggaggtatattgaagggcacaggagccaactggggagaattactcttccaaaattaagccagaacaacttgagcaacaaaatarataacagtaatactgtattatagtctaaagaccaaaataaatatcaatgaacccaggaaatttccaaggaaaaaagagagaaaaaggagacggctaacagatgctaaaaatagtacaaagctacctaataactaacacagtataatactggtacataagttacagacatatcatctgcatagcccagaaatacaatggaaaacattctggaaaataaaaaatgataaatgtggcatttcaaatcagtggggataaggaatggattattcaattcatgatgctaggacagacagatcattagtcatctgagaaaaattaaaagtgaagtcctacttcacaacatacgccagataaatctcag

SEQ ID NO: 769969 - DNA, 595 bp, Homo sapiens
agcagccagaaagagcagacagtaaaacacagacaagacagctcaggcacagagggaagtgaagggaaagtctcttgggtaactgccaaacttcaccctcatacaatggaccccagtaaaacagtaggccttaataagcatattcctttcccttcaggtgcactaagatagggaacctaaaagcagacttggagggtatgcctgcagctgcagaaagatgtatgggaacagacacgcaactctccctcccagataagcacaacaaagagacacagaagcagtccaaacctctaataaactctcccaccctgaatccttaaaaactcttagtctgggcagggcgtggtggcttaggcctgtaatcccagcactttgggaggcttaggtgggtggatcacgaggtcaggagttcgagaccagtctgkccaacatagtgaaaccccatgcctactaaaaatacaaaaaattagcctggtgtggtggtgtgtgcctgtaatcccagctatttgggaggctgaggcaggagaattgcgtgaacctgggaggcggaggttgcagtgagccaagatctcgccattgcactccatcccaggtg

SEQ ID NO: 769970 - DNA, 550 bp, Homo sapiens
taacgctatgcataaactcttagggattcaccaaagttactcgcccattcagaggccttacggacccttaaggcccatctctacgggtcacaagttcatagcccccgcggccacccagtattgggacccagtcagactttgtctttaagcatagtccccagctgttcacaaagttccgtggccctcgtggagagtcctggcctgcggctcttcgacgcaagctgggggtgcccttgcgggtagtcccagaggtagggacattcctcccacgccgcacgcgccttgcttcccgcctcctctgactccacccggagcggatcttccagctacgcaccttgtagccgccacaggtgargccggcgttacgcttggccaagacgcacttcatcctcaagaagaaggagcgctcgatctcatactctgggagagaggaacgaagggaagctcaggtcgtgtgacaccggcggcgtgggacagcacgcgtctctgccacgactaattggggaaaaaccacaagcggactgcgatgggccctgacgtcgcaagcact

SEQ ID NO: 769971 - DNA, 550 bp, Homo sapiens
taacgctatgcataaactcttagggattcaccaaagttactcgcccattcagaggccttacggacccttaaggcccatctctacgggtcacaagttcatagcccccgcggccacccagtattgggacccagtcagactttgtctttaagcatagtccccagctgttcacaaagttccgtggccctcgtggagagtcctggcctgcggctcttcgacgcaagctgggggtgcccttgcgggtagtcccagaggtagggacattcctcccacgccgcacgcgccttgcttcccgcctcctctgactccacccggagcggatcttccagctacgcaccttgtagccgccacaggtgaagccggcgttacgcttggccaagacgcacttcatcctcargaagaaggagcgctcgatctcatactctgggagagaggaacgaagggaagctcaggtcgtgtgacaccggcggcgtgggacagcacgcgtctctgccacgactaattggggaaaaaccacaagcggactgcgatgggccctgacgtcgcaagcact

SEQ ID NO: 769972 - DNA, 592 bp, Homo sapiens
ttcttctttctcatgaggtgctttggatattcgggatcttttttggtcctatatgaatttgagaattttttttctatttctctcttttcttattcctggtcttagagggaaagttttcagcttttcaccattgagtataatggtagcctgccctatataatctttactatgttgtgttacatttattctatactaatttgttgagagtttttatcatgaaaggatgttgaattttatcaaatgctttttcagcatgtrttgagatgatcacatgatttttatccttcattcagttaatgtggtatataacatttattgatttgtggatggaaccaaccttgcatcccagggataaatcccacttgatcatggtgtatgatcctttcaatatgttgttcaattttgtttgctagtaatttgttgagaatttgggtgtctgtgttcaccagggatactgacatgtcattttcttttcttgtggtgtcctttttggcttcagtatcagggtaatgttggccttgtaaaatgagtttggaaatgtttcttcttcaattttttggaagagtttgagaaagattagcattaattattt

SEQ ID NO: 769973 - DNA, 580 bp, Homo sapiens
cctgagctccaggaaggaactagattttcaagactttgcaaagaaaaaaaaaaaagaggaagaaaaagaagacagtcataaaagcccacgttgctgagctgctgaacacagtattaaggcaattccacaataagaaaataactaaacaatacatgtatgttgtaaaacactgtttagcgtaagtgatataaatttgcaaagggttttcagtaatatgggaaatgcttataatatcatgtcatgtaaaaaagtaggaacaaaactttatgtattttaytgtcacagctatggaaaaattgcatagaagactcactggaaagaaaactgcagtgttaagaataattgctcctaagagagcagagcaggacttttttctctcttttttgacagtattttattattttcaaattctctataaagagaacatattaatttaataagccaggaatgtttaaaactggagaataaagaaaacatacccagtgaatatttcactcagcttacaaaaaaatcaacctaaagctacacatctcagcattccttcacgtaggctgcagagatttttcattaccttgtgcta

SEQ ID NO: 769974 - DNA, 580 bp, Homo sapiens
cctgagctccaggaaggaactagattttcaagactttgcaaagaaaaaaaaaaaagaggaagaaaaagaagacagtcataaaagcccacgttgctgagctgctgaacacagtattaaggcaattccacaataagaaaataactaaacaatacatgtatgttgtaaaacactgtttagcgtaagtgatataaatttgcaaagggttttcagtaatatgggaaatgcttataatatcatgtcatgtaaaaaagtaggaacaaaactttatgtattttactgtyacagctatggaaaaattgcatagaagactcactggaaagaaaactgcagtgttaagaataattgctcctaagagagcagagcaggacttttttctctcttttttgacagtattttattattttcaaattctctataaagagaacatattaatttaataagccaggaatgtttaaaactggagaataaagaaaacatacccagtgaatatttcactcagcttacaaaaaaatcaacctaaagctacacatctcagcattccttcacgtaggctgcagagatttttcattaccttgtgcta

SEQ ID NO: 769975 - DNA, 642 bp, Homo sapiens
cccatgcctatgtcctaaatggtattgcctaggttttcttctagggtttttacggttttaggtgttaggtttaaatctttgatccatcttgagttaatttttgtataaggtgtaaggaaggggtccagtttcagttttctgcatctagctaaactgttttcccaacaccatttattaaataaggaatcctttccccattacttgttttgtcaggtttgtcaaagatcagatggctgtagatgtatagtgttatttctgaggtctctgttctgtcattggtctatatatgtgttttggtaccagtaccatgctgttttggttactgcagacttgtagtatagtttgaacttaggtagtgtgatgcctccagctttgttctttttgcttaggattgtcttggctatatgggctctttttttgytccatatgaagtttaaagtagttttttctaattctgtgaaggaagtcaatggtagcttgatgggaatagcattgaatctataaattacttgggcaactggccattttcatgatattgattcctcctattcatgagcatggaattttttttccatttgtttgtgtcctcttttatttccttgagcagatttgcagttctgattgaagaggtccttcacatcc

SEQ ID NO: 769976 - DNA, 637 bp, Homo sapiens
ggcacaagtgtatagtcccagctactcgggaggctgaggtaaggattgctggaacctgggaggtcaaggctgcaatgagccatgatggcatcattacaccccagcctaggcaccagagcaagaccttgtctcaaaaaaaaaaaaaaaaaaactacaaatggccagtgggtacgtgaaaaaaaaaatgttcaacatcactaatcatcagggaaacacaaattacaaagacaatgagatatcatctcaccccagttaggatggctattaccaaaaagacaaaaaaataacaaatgctggtgaggatgaagagatargggaatgttcgtacactgttggtggaaaataaactagtacggccgttatggaagacagtacggagtttccatctagaactatcatatgatccagcaatctcactgctgggtatatatccaaaagaaaagaaatcagtatatcaaagagatatctgcacccatatttattgcagcactattcataataagcaagtatgaaattaacctaagtatccatcaacagatggatggataaagaaaatgtggtatacgtagacaatggaatattattcaactataaaaagaataaaattctgtcatttgcagcacatggataaaactgg

SEQ ID NO: 769977 - DNA, 601 bp, Homo sapiens
ctagaactatcatatgatccagcaatctcactgctgggtatatatccaaaagaaaagaaatcagtatatcaaagagatatctgcacccatrtttattgcagcactattcataataagcaagtatgaaattaacctaagtatccatcaacagatggatggataaagaaaatgtggtatacgtagacaatggaatattattcaactataaaaagaataaaattctgtcatttgcagcacatggataaaactggaagtcatactataaatgaagtaagccaggcacagaaagacaaatattgcatgttttcactcgtaagtgtgagttacctcactcacctggaggtggagagtagaatagcggttaccagaggctgagaagggaaggcgaggaagacaatggaaataaattggttaatgggataaaaattacagttagacagaagaaataacttttagtattcaatagcacagtagagaaattatggttaaaaataatttgttgtatatttcaaaatagctagaacagaagaattgtaacattctcaacacaaagataaaggtttgaggtgatggatatcccaattaccctgatttgaggatt

SEQ ID NO: 769978 - DNA, 601 bp, Homo sapiens
ctagaactatcatatgatccagcaatctcactgctgggtatatatccaaaagaaaagaaatcagtatatcaaagagatatctgcacccatatttattgcagcactattcataataagcaagtatgaaattaacctaagtatccatcaacagatggatggataaagaaaatgtggtatacgtagacaatggaatattattcaactataaaaagaataaaattctgtcatttgcagcacatggataaaactggaagtcatactataaatgaagtaagccaggcacagaaagacaaatattgcaygttttcactcgtaagtgtgagttacctcactcacctggaggtggagagtagaatagcggttaccagaggctgagaagggaaggcgaggaagacaatggaaataaattggttaatgggataaaaattacagttagacagaagaaataacttttagtattcaatagcacagtagagaaattatggttaaaaataatttgttgtatatttcaaaatagctagaacagaagaattgtaacattctcaacacaaagataaaggtttgaggtgatggatatcccaattaccctgatttgaggatt

SEQ ID NO: 769979 - DNA, 576 bp, Homo sapiens
aaataagtgaaaacctccaggataatgccagtagaggtgagaacagcagaataaaaatagaagattgagcactgaattggcttccaggggtggtaaaagactgtttgcctttgggaggccattaaatgggcagtgactatctgtgtgctgttctgtctgtagcttctgcsgttatggctcttgtgaaggtggtgattaaagtctacatgagatgcctcaaagcagtcatcactgaggccatcaagaaagacttcaaatgaacagaaatgtcaagacttccaatagagaactagttctatgacaccaatgccctcttcccacctgggacacagaatcccaacctctcccagcctactaaggaaaaaactgttgcaaaggtctcaaacccctgatgtttactgagtgcttaatacaaataattttgcatggcctttagtcttattttaagaattaatcatactcttccaattctggtattataatcctatgtttattattttctgtaaattggcatttcagatgagatagattcataaaaggaaaaaaaatacttcaggatgcaaacttccagttgct

SEQ ID NO: 769980 - DNA, 656 bp, Homo sapiens
caaatggagtgaagtgccatatgtgcaaactttcttttcattaagagacaactcgcaattacggtgtatgccctacaggaagccctcagagtctacctccctatcccagcatccccccgactccttccccaactaataaggaccccccttcaacccaaacggtccaaaaggagatagacaaatgggtaaacaatgaactaaagagtgccagtattccccgattatgccccttccaagcagtgggaggaggagaaattggcccagccagagtgcatgtacctttttctctctcagacttaaagcaaattaaaatagacctaggtaaattctcagataaccctgatggctatattgatgttttacaagggctagggcaatcctttaatctgacatggagagatataatgttactgctagatcagacgctaaccccaaatgaaagaagtgccgycataactgcagcccgagagtttggcgatctctggtatctcagtcaggtcaatgataggatgacaacagaggaaagagaacgattccccacaggccagcaggcagttcccagtgtagaccctcattaggacacagaatcagaacatggagattggtgccactgacatttgctaacttgagtgctaaaaggactaaagaaaactagg

SEQ ID NO: 769981 - DNA, 600 bp, Homo sapiens
ctcatcattctgttgctcaaagcaatagacaatccagcacagattcaaggagtggtggtataagttttgcctttgcatgcaggaatagcatgggaaaacagaggagggagagatttctgggggacatctttggagactagctaccatatggagtcactgtctctacaggacatgagtttcctggtactatggttccttttgtagtaattctcctgttaccagtggagggtgtccaggttcttggtgtcttgaacaaagagttggacaaaacaygtgaacaaagcaaggaaagaatgaagcaaagaaagcagagatttattgaaaacgaacgtacactccatagggtgggagcaggtccaagcataggagctcaagagcctggttatagaattttctgaggtttaaagaccctctaggaggtttcccattggttacttggtgtacaccctatgtaaatgaagtagtgtcctgcaatcagtctgattggttgtggaaagtggccgatcacaggctgaagtgaagttacaaagttataccctatgcaaacgtctggttgtggaaggtgaccaatcagaggccgaagtgaagttacaaagttat

SEQ ID NO: 769982 - DNA, 600 bp, Homo sapiens
ctcatcattctgttgctcaaagcaatagacaatccagcacagattcaaggagtggtggtataagttttgcctttgcatgcaggaatagcatgggaaaacagaggagggagagatttctgggggacatctttggagactagctaccatatggagtcactgtctctacaggacatgagtttcctggtactatggttccttttgtagtaattctcctgttaccagtggagggtgtccaggttcttggtgtcttgaacaaagagttggacaaaacatrtgaacaaagcaaggaaagaatgaagcaaagaaagcagagatttattgaaaacgaacgtacactccatagggtgggagcaggtccaagcataggagctcaagagcctggttatagaattttctgaggtttaaagaccctctaggaggtttcccattggttacttggtgtacaccctatgtaaatgaagtagtgtcctgcaatcagtctgattggttgtggaaagtggccgatcacaggctgaagtgaagttacaaagttataccctatgcaaacgtctggttgtggaaggtgaccaatcagaggccgaagtgaagttacaaagttat

SEQ ID NO: 769983 - DNA, 600 bp, Homo sapiens
ctcatcattctgttgctcaaagcaatagacaatccagcacagattcaaggagtggtggtataagttttgcctttgcatgcaggaatagcatgggaaaacagaggagggagagatttctgggggacatctttggagactagctaccatatggagtcactgtctctacaggacatgagtttcctggtactatggttccttttgtagtaattctcctgttaccagtggagggtgtccaggttcttggtgtcttgaacaaagagttggacaaaacatgtgaacaaagcaaggaaagaatgaagcaaagaaagcagagatttattgaaaacgaacgtacactccatagggtgggagcaggtccaagcataggagctcaaragcctggttatagaattttctgaggtttaaagaccctctaggaggtttcccattggttacttggtgtacaccctatgtaaatgaagtagtgtcctgcaatcagtctgattggttgtggaaagtggccgatcacaggctgaagtgaagttacaaagttataccctatgcaaacgtctggttgtggaaggtgaccaatcagaggccgaagtgaagttacaaagttat

SEQ ID NO: 769984 - DNA, 539 bp, Homo sapiens
gggcattggtgacaatttcttgaaatcatcttgtttttacattctgtggcaagttcagtcaatcacttatctatatcactatagcaccccagaccaaagcagttgtccaggatggtgactgccttccaggaagtaccacgacctgaagccaagtggagcttcacaggtctttgtttttagctggatcacaggtggctttrataatactatagcaaaaataatctcaaaacagctttgagcaattcagtgacaaaaatcccctttattaccaaattccataacaattctctcaaaatatgattcagtcctttctcattcctatcatataaggaaataaataaaacaacataaaaacatgaagtcttattttgaatcagccctgtaacgcccttccacttcttatataagatgctatctgaggccatgaaaatcattttttattgagacaaaatgtaataagaagtgttgccatgtttgtctgaactctccatgtttccctacataacgacatgtgttttaattccccctctgtgaagcta

SEQ ID NO: 769985 - DNA, 447 bp, Homo sapiens
tttatgaccagaatttggaagcctttgcctgcataactaaagacactaagctgttgttgtaattacagtctctttaatactgctattgatagacattttaactgaaaaatattttaaaaatgcagaatcacatataataatcatttggaagacacraatattgtcctaaagttataactaaaagttataattttatattttacagagtaattttacaatctggtaatgttgcttctctcaaaccaattaatttaaatagaccaaagtccacaaacagatatacagacagtgcaactcaacatatcagaatccagtataatgcctgttctgcgttgagataatttgtatagtgacagaaagtggtttagtggttgcctagggctgaggatgagaatagggtgggtggtaactttcatcgggtacaaggcccatttgtagggtgatgag

SEQ ID NO: 769986 - DNA, 568 bp, Homo sapiens
aactatgttgaggaagtattagttcatgttgcatactactcccaagattaatttttaaaagcgtaatatcaaagtggactttaatgtttgtgttttgattctttatttcttcggctctatgcatcagtatcactgtcccctttttctatcatatggaatggtcactgggtagtagcttcacatcagggacttcaagccccctttgtagccagatggggatgagaacctgtttctgcctgttggatgtgagtggaagtgatacggtcacttctagcccaaggcagctgaaaagcaggtacatcactcaactctccaaccacccaccatctgctgaatgatgtggaggactcaggcccaaggggttggggaaggtgatacagcaggtagttaggcatgagtggtgcagtaaagggctccccaaaacccagccaaygaggaatgtcaggccaccatcaggtgatggttcggcagttatctctggctctctaaaatgataattggtcacagctgacaccagggagaggcagtttcctgatggtccagcagttgtcacactggttctctaaaa

SEQ ID NO: 769987 - DNA, 493 bp, Homo sapiens
gaatttcaagccagtggattttagcttgtttggttccatgggggtgggatccactgaggaagaccacttggctccctggcttcagccccctttccaagggagtgaatggctctgccttgctggcattcaatgtgccactagggtgtgaaaaataaactcctgaagctagctcrgtgtctgcccaaatagccacccagttctgtgcttgaaacctagggccctggtggtgtaggtacctgagggaatcttatgtcacttaatgtaatgtcctccagttctgtccatgttgctgcaaatgacaaaattttattcttttttatggttgaataatatttcatcatgtgtgtagaccacattttctttatccattcctccactgatgaacacctgtggattccatacgttggctactgggtacagtgctgcaggaaacatgcgggtggaactatctctttgaggtactgatttcctttcctttgggtatctaccctgc

SEQ ID NO: 769988 - DNA, 493 bp, Homo sapiens
gaatttcaagccagtggattttagcttgtttggttccatgggggtgggatccactgaggaagaccacttggctccctggcttcagccccctttccaagggagtgaatggctctgccttgctggcattcaatgtgccactagggtgtgaaaaataaactcctgaagctagctcggtgtctgcccaaatagccacccagttctgtgcttgaaacctagggccctggtggtgtaggtacctgagggaatcttatgtcacttaaygtaatgtcctccagttctgtccatgttgctgcaaatgacaaaattttattcttttttatggttgaataatatttcatcatgtgtgtagaccacattttctttatccattcctccactgatgaacacctgtggattccatacgttggctactgggtacagtgctgcaggaaacatgcgggtggaactatctctttgaggtactgatttcctttcctttgggtatctaccctgc

SEQ ID NO: 769989 - DNA, 635 bp, Homo sapiens
ccagagagtgggtactgaatctgaggacaatcacactgcccaaaagtccaagggtaagggagaagttgttgggtttacaaagtgtctattcccaagctatcccaccttcgcctcatgactaacccactaggtatggaatttcattacctccatgtgacagaggtggaaagagaaattttgaagggtcagggctgtggggctcagtaagaagcatggagaccagagacagagctatggaaaggagccttccaagaaagacaccaggtcatggaacatgcttgcgagctacatcagctccctgcatgcaggctgcaatgaaaatttaaccacatattaaagaacttctggttggaaaaactctttcactttaagataccaattagattycatttaagatatcaattacaagagtttgaacattcttttttgcaaaaccacatgcagctgacctgtactgaattacaggtttaaagagagtttccaatctcagccactttatagaatatatattcttttttttagccacaaattggacctaggcacaatatttagaggccattatctgtttgaacaactccataaatataaacctccataatagagtaccatataattggcttcaagggaaatagtag

SEQ ID NO: 769990 - DNA, 650 bp, Homo sapiens
gtttgccttagataaatggctatcaaactccattagccagtgattctgccttctttcatcctgtgcaatgaggagggaaaagtaaaccattaaatcacaaaagtcagcactgaaacacttggaaagtggttcaaatatggacagatctgttgggaagagcatcaatgtgatcttctaattactaacaggcaaaatgatatggatgaagccatcctgggtcamtttctgtaaagcttgaatgtttcttcattacttgggttatatttcccctcaccatttactactccatcacaacctgaagtaccagtttaaatcattcatttaaacttgatcatatggggcaatttaaagttcttacttcctcttgccagcttacaaacacatcaattctaggagtctttcaaattccaaaatgaaagtcactcactttatatttaattgtcatcatcatcgtcatcatcatcatagtcatcatcaacattgctatcatcccagtagtttaataatgcctggatagtacagagatgagcaagcctttcaggactgttaatattgatttcagcatcagccatgaccttgtttggccctcctatgcatgtcccttggatatgtaaaacaagaatcaggtaatgacatcaaatgatttatga

SEQ ID NO: 769991 - DNA, 589 bp, Homo sapiens
catgctacttccaggagcacttttaactttcatctaattttacttgatgtagcgtagattcagttagcaaatgttcagaaacatgacaacttcatttgtagtttactaagttgtcacaaaaggtaagataagggggcaagtgcagatttatagccttccaccataagcctccatattcatttcaaatttaattcgagaataattttaaagcatacgtgtataaatatctcctttatttatttatttatttatttatttatttatttatttatttatttatttgagtcagagtcttgctctgtcgcccaagctggagagcagtgatgcaatctccgctcactgcaagctttgcctcccggactcaagtrcttttcttgtctcagcctcccaagtagctgggattacaggcactcactaccatgcctggctaattttgtatttttagtagcgatggaatttcaccatgtttgccaggctagtcttgaattcctgacctcaggtgatcggcgcgcctcagcctcccaaagtgctgggattacaggcatgagccactgtgcccagcctaaatatctcccttttatgtcagatg

SEQ ID NO: 769992 - DNA, 537 bp, Homo sapiens
aggactaagaaaatagaagagaataggctttgtaatgcagtaaaggaaggtaggaaaaagtatagcagaagacaggagaaagaaggaagagtttggaagtcttgaaaatataaaatatttttaaaatggaataatrggacaaaacccagaaaaccaaacagaggccattttatttcatgaagctttaggagattttgtggaaataaatcatttaacaaaataaatactaaacaggagtcattttggaaggtagttaaaaatgtacccaaaaggaaagaactcaggattaggaaagccttgtgggagatgctttcaggaatatgtgggatgcaatttagagctgaacttgcataatgactgtggaaataagatgggagggaagcaagagctctttggaataaagtcaagaatttttataaacatctgtttatgacatagcttgggcaaccaccttcacctcaattcaaaatgtaatgatctgtttctcatctcccccaacccacactgattttccttccaaaaccccttacctcagtc

SEQ ID NO: 769993 - DNA, 537 bp, Homo sapiens
aggactaagaaaatagaagagaataggctttgtaatgcagtaaaggaaggtaggaaaaagtatagcagaagacaggagaaagaaggaagagtttggaagtcttgaaaatataaaatatttttaaaatggaataatgggacaaaacccagaaaaccaaacagaggccattttatttcatgaagctttaggagattttgtggaaataaatcatttaacaaaataaatactaaacaggagtcattttggaaggtagttaaaaatgtacccaaaaggaaagaactcaggattaggaaagccttgtrggagatgctttcaggaatatgtgggatgcaatttagagctgaacttgcataatgactgtggaaataagatgggagggaagcaagagctctttggaataaagtcaagaatttttataaacatctgtttatgacatagcttgggcaaccaccttcacctcaattcaaaatgtaatgatctgtttctcatctcccccaacccacactgattttccttccaaaaccccttacctcagtc

SEQ ID NO: 769994 - DNA, 618 bp, Homo sapiens
catgcaaattaaataatgctgatctttagaatactccttagtactgccataaactgcttttcttagtcttaaaaacagaatttctctctactgacaatcatacattacacagaatagatcccatttggtctcataaatattacatttgtttgtatatacacagaaattaaagtgggaaagatctccctgcatgtaatatgcagttgcatagataagtgatgagaagtggagccctatgaacatattaagtcctatgatgctagrgaaagcatatgttctatccctaatgattccagattaacacaatgcaaactttaatttctaaaaacacagtagggaaatcattacatataatttccatcatgcttcccctttttgccttatttccacacatttcccagatgaatgcttgcctacagtagtgcctgtcttctatactgaatgagaattgggccagaaaagagatggtctgatatttgttaaataaatgtcctatacttgagccagcaggaaggggagatactataaatggctatatgccataaaaatgccacagactttttcaacttaccctctgaaaattactgctggaatcaaacagtcaaagaaaaccccatc

SEQ ID NO: 769995 - DNA, 639 bp, Homo sapiens
ttgatgatgcaatgctgctatgcacagcccactttctggctaggtgggtcagaaagcaccctgttcatgataagcagttcaggttgcatgatggcttgatgatccatagtcaaatattcagtttccaccaaagcccagttataggccaagagctgtgtcaaaaggagactagctatctgaagaagatggcagggccttgctccaaaattctagaggcctccactgtgattcacctatgggggcctgtcaaaggcttcaaacagcatccctatctggcactaacacctsaagcaccattggatctgctgggtcatatggccaaagtgccagagcagcttgcacagcagcctggacctgttgcaaagccttctcatgttcatatgaggaatgtgttgcctccaaaatccaagtaggcccactaggcattgtgactctttcctggttgtaggagggtccaaatgcagcaactcatccttcatcttagaaggaatatctcaacaggcctcacaccactggactcctagaaattttacttaggtagaaggtccctgaattttagtcagatgtattttccatcttctggcacataaatgtctcaccaataagtccagtgtgtttgctacttcttgttcactggat

SEQ ID NO: 769996 - DNA, 570 bp, Homo sapiens
ctgcttctaacagcctatgaacagatacagaagcaaagaagtgacttaaagttggaactcatgtttaaaagagaagaacatacaaatctggaaaatttacaacctaaccatgtggcagaaaacaaacaaaaaaacatttttaggacactaatataagcaggcttcaagtaacctcttactagagggatttggatggctaaaagggagccaagtgctaatatctgagacaatgggaaaaaggtttagaaggcatttcagaaattttytaagctgcctctcccatcacaggcccagaagcttaggagaaaagaatgttttcaggggccaggcacaaggcaccgctgccacgctccacttcaggacactgctacttgcatcctggctgctctggctccagccttggctcaaaggggcccagatacagttcagcctgctgctccagagtgctcaagtgataagccttggtggcttatacatggcattaaacctacaggtgctcagaatacaagagtgaaggagacttgacagccttcacctaaatttcagatgttgtatgatgtatttcagaag

SEQ ID NO: 769997 - DNA, 570 bp, Homo sapiens
ctgcttctaacagcctatgaacagatacagaagcaaagaagtgacttaaagttggaactcatgtttaaaagagaagaacatacaaatctggaaaatttacaacctaaccatgtggcagaaaacaaacaaaaaaacatttttaggacactaatataagcaggcttcaagtaacctcttactagagggatttggatggctaaaagggagccaagtgctaatatctgagacaatgggaaaaaggtttagaaggcatttcagaaattttttaagctgcctctcccatcacaggcccagaagcytaggagaaaagaatgttttcaggggccaggcacaaggcaccgctgccacgctccacttcaggacactgctacttgcatcctggctgctctggctccagccttggctcaaaggggcccagatacagttcagcctgctgctccagagtgctcaagtgataagccttggtggcttatacatggcattaaacctacaggtgctcagaatacaagagtgaaggagacttgacagccttcacctaaatttcagatgttgtatgatgtatttcagaag

SEQ ID NO: 769998 - DNA, 543 bp, Homo sapiens
tatctacatacgttttggaaggacaagaagaacaaagagaagtaggtgaagtggagggagctaaagtaacagaaaagaagaaggggtggcacttttttgatgcaaagcagttaaaaccactcgtctggagcccatttgcctgcacctgccactgtgctgttggtgacactcataatcagtcctggactrctgaagatgcatcatgtccgtcaaagctggaacctaccagaaaggggtggcccctacccatgttcttaaagtcaagaatcgccccactcccaatgcaacccccccagtactgaagtcagaagcagaaagtttcgctctcccagtaacttctccctcaagtgcctcctattggcagaacctaacaagaatccagcagacgtgagaggctgataaatgcaatttgtagactcctgttccataaatataaacaacagagtccagaagagagaatgggacttgagaatatccagacacaagaagaaatatgctgttctacctacaatggctttattttctagagttagaagtgactgt

SEQ ID NO: 769999 - DNA, 616 bp, Homo sapiens
aacaaagtctatttttataagtttcttataccttaaatgaaacaagagacttccatgagttaaatatcaatattgtaaaacccagactcatctccaaaataaaaaaaaattatagctataaaccaatattggaagtaaaattggctcataaaaaatattgtatctaaatgacaacaagatgagaggggaaaaaaggaaaagttatgtcgaatacataatgaagagcaataggacatatttaaaccaaatatatcaataattatgttaaaactaaatggtcaaatcaaatggttaagtccgctgggcatggtggcttatgcctgtaatcccagaactttgggaggccaaggtgagcggatcatgaagtcaagagatcgagaccatctggccaacatggtgaaacctcrtctctactaaaaatacaaaaattagctgggcatggtggcacatgcctgtagtcccagctacttgggaggctgaggcaggagaatcgcttgatccccgggaggcagaggttgcggtgtgccaagttcgcaccactgcagtccactctgggggaaaagagcgagactccgtctcaaaaaaacaaaataaaacaaaacaaacaaacgaaaac

SEQ ID NO: 770000 - DNA, 610 bp, Homo sapiens
ctctttcttccgtaaattgcccagtcttaggtatgtctttatcagcagcatgaaaatggactaatacagtaaattggtattggtagagtggggcgctgctgtaaagatacccaaaaaatatggaagcaattttggaactgggtaacaggcagagtttagaacagtgcagagggctcagaagaggacaggaaaatgtgagaaagtttggaactttctagagacttgttgaatggcttcraccaaaatgctggtaatgatatggacaatgaaatccagctgaagtggtctcagatggagatgaggaactagtggggaactggagtaaaggtgactcttgctatgttttagcaaagaaactggtttcatttttcccctaccctagagatttgtgaaactttgaacctgacagagatgatttagggtatctggcagaagaaatttctaagcagcaaaggattcaagaggtgacttgggtgctgttaaaagcattccattttaaaagggaaacagagaatcaaagttcagaaaattttccatctgacaatgtgagagaaaagaaaaacccatgtagaaagctgaaactggatcccttccttacaccttatacaaa

SEQ ID NO: 770001 - DNA, 610 bp, Homo sapiens
ctctttcttccgtaaattgcccagtcttaggtatgtctttatcagcagcatgaaaatggactaatacagtaaattggtattggtagagtggggcgctgctgtaaagatacccaaaaaatatggaagcaattttggaactgggtaacaggcagagtttagaacagtgcagagggctcagaagaggacaggaaaatgtgagaaagtttggaactttctagagacttgttgaatggcttcaaccaaaatgctggtaatgatatggacaatgaaatccagctgaagtggtctcagatggagatgaggaactwgtggggaactggagtaaaggtgactcttgctatgttttagcaaagaaactggtttcatttttcccctaccctagagatttgtgaaactttgaacctgacagagatgatttagggtatctggcagaagaaatttctaagcagcaaaggattcaagaggtgacttgggtgctgttaaaagcattccattttaaaagggaaacagagaatcaaagttcagaaaattttccatctgacaatgtgagagaaaagaaaaacccatgtagaaagctgaaactggatcccttccttacaccttatacaaa

SEQ ID NO: 770002 - DNA, 586 bp, Homo sapiens
atactatgcagtcataaaaaagaatgaaattgtgtcccttaaagcaacatggatgcagctggaggccattatcctaagcaaattaacacagaaagagaaaaccaaatactgcatgttttcacttataagtggatgctaaacattgggtgtatatggacacaaagatgggaataataaacactgaggattccaaaagggtgaaggcagagaaggggctagggttgaaaaactacctattgggtgctatgttcactattgggcaatgggaccattagaagcccaaacctcagcatcacacaatatacccatgtrataaacctgcacatgtaccccctgaatctaaaatttcaaaataaattaaaaataaaaaatgaaataatggtgaatcaacaaaaatgcttttgttgctgttttaaacagattgataaaggagatctgaggctttaattttgtcactctgtagtttaagtttttgtagtttaattttgtcactctatagtttaagtttttgtctttttatcattattcttaacttttacagttatgggaagtccagaagccagattatacatccagggctaacata

SEQ ID NO: 770003 - DNA, 569 bp, Homo sapiens
ctagtagtccccagtctctgttgttgccatatttatgttcatgagtacccaccgtttagctcccacttgtaagtgagaacatgcttatatttggtctttggttttctttttctgttagtttgctttggataatgggctccagctccacccacgttgctgcaaaggacatgatctcattcttttttatggctacatagtatttaatggtgtatatgtacattttcttcatgcaatctaccattgatgggcacctaggttgattagatgtctttgctattgtgactagtgctgtgctgtgatgaacatatgagtgtgtgtgtcttttggtagaacaatttgtttttagttgcatatatattcagtattgggattgctggcttcagtggtagttctgytttaagttatttgagacatctacaaactgcttcccacagccactgaactaatttacattcccaccaacagtgtataagaactctcttttctctacacccttaccagcatctgttattttttgactttttaataatagtcattatgactggcatgagatgccatttccttatgta

SEQ ID NO: 770004 - DNA, 488 bp, Homo sapiens
tctcataatgtctttgctgctttgctttttcatctccagtgtatcattccacttcactctccctcccctcttcccagctacgacaacgaaacaccatatctcgaaaatcttccccagtagctgcagtcctcgggaacctatctcctcctacgtcatcttgcagtatcccctttttccatggcagccttcttcctgagggagaccactctgctgatcttccctgacaaaaaaaacccaacattktgtaaaactttacaattcacaaagcaatttcttccaagataaagtcatttgattttcacaataacccagagaggaaggcaaaacaagtatcattaactcctgtttcaaatgagaaaatcgagactcagaggggctatgtgatttgctcaggatcatgcagctgcaagatgaataaagactcaaagcatggttttctctctccatgccccaagctctttacactgaatgattttgcatgttctctc

SEQ ID NO: 770005 - DNA, 577 bp, Homo sapiens
tcttgaggtgtaagactgtgtctcactcaccttagtatctccagggcctggcacatgatccagcacaacatggaaactcaacgttgctcacctgaataaatgtcttcaaaatgagacctgtttagagaattggcccgttttcttaaaagcctttattttccattctcctcttcttttgtctccaccaattcctttgcttatcctgctccccaggacactgaccccagggtccttttggtccttctgtatctgtgtccataaaacacatagccattttagatgtcaagagtcatttttagagccattatagcagggaagccatcctgtctttcatcccttttctccagggggttacagaatgagggagtagatagaagaaagaaaagctaacttgaaattttwaatgttttttaaaaacagcttttaattagtagcttagactccataatccccaattcaaggctcctcataaaaagttaaggtgtatatgtggctcagtttggaggctgaaatagggtctagggtgatcaactatgtcaatttgcctgggactgaaaggattccagaaacgctgggc

SEQ ID NO: 770006 - DNA, 641 bp, Homo sapiens
ttcttcagggttggataatgcatttcctaaatcaaaacaagtgtacttagctcttatatgtttgccaggaatcattttctaggttttgaatatattctataaagtgtaccgcttaagatttatagtgatctttaaaagtaaacttattggacaatgacttgaatrttcttacattatgcgtgaaagaaaggaacgtcctttccaggtgagcagttagtacttatctacactgggtgtgcagggtagctgaaggatttggtatttggtgagaattagcttcagcttactagcttagtgaaattcaatcatttaaatggaaaacttgtttgttttcaatatgatgattaatatagtatcacatttccttcaagctcaaaaatgtaatatcaactggctctctttttattgggagaggaaagatttgtccctgccaattccagaagtccatattaatttctgacagctgggagacggagagatctaatgagaattgtattaattcagagtgtagcctgaactaaactactcatgaaggaagcgtggcggagtgaaatgcaatgtgatcttctagataaagtctgaatttgagctctggcttggccactagtgactgtggttttaggcaaatgatttaacctttg

SEQ ID NO: 770007 - DNA, 641 bp, Homo sapiens
ttcttcagggttggataatgcatttcctaaatcaaaacaagtgtacttagctcttatatgtttgccaggaatcattttctaggttttgaatatattctataaagtgtaccgcttaagatttatagtgatctttaaaagtaaacttattggacaatgacttgaatgttcttacattatgcgtgaaagaaaggaacgtcctttccaggtgagcagttagtacttatctacactgggtgtgcagggtagctgaaggatttggtatttggtgagaattagcttcagcttactagcttagtgaaattcaatcatttaaatggaaaacttgtttgttttcaatatgatgattaatatagtatcacatttccttcaagctcaaaaatgtaatatcaactggctctctttttattgggagaggaaagatttgtccctgccaattccagaagtccawattaatttctgacagctgggagacggagagatctaatgagaattgtattaattcagagtgtagcctgaactaaactactcatgaaggaagcgtggcggagtgaaatgcaatgtgatcttctagataaagtctgaatttgagctctggcttggccactagtgactgtggttttaggcaaatgatttaacctttg

SEQ ID NO: 770008 - DNA, 571 bp, Homo sapiens
gttctcggggtttgcagactcttagaaatatgatacaaattcaaagagtaggacttttcctttgacgtataagcctgatcaaaaatccatctctccagacaatatttagttcagtggggggactcttaaacttaaatctagctgtgtctgcaaggctgctccaggttatatttctgctgcttcaaaaagaattccgattagcattgatttccaataacctgtaaaatctgtgacacctccytacaggctcaagttgaggatgtcaatccttggttggcctttctgcacctggcatcttttagaagcatagcaaggcatatttccacagagtgggaagagagccaaatgcatgctaagcaagtcataaagataagacttactgtttccagaggattggtgattttctatgacctgaaaataaaaatcaaaataacattcgagcatcctcactcatttgagagtaacacttgggtagttttgatggaattgggtcattgcctttaaggattatgctttctaaactggaaacgatatatattcaaagaagctgcaaatatctaggattttgggg

SEQ ID NO: 770009 - DNA, 571 bp, Homo sapiens
gttctcggggtttgcagactcttagaaatatgatacaaattcaaagagtaggacttttcctttgacgtataagcctgatcaaaaatccatctctccagacaatatttagttcagtggggggactcttaaacttaaatctagctgtgtctgcaaggctgctccaggttatatttctgctgcttcaaaaagaattccgattagcattgatttccaataacctgtaaaatctgtgacacctccttacaggctcaagttgaggatgtcaatccttggttggcctttctgcacctggcatcttttagaagcatagcaaggcayatttccacagagtgggaagagagccaaatgcatgctaagcaagtcataaagataagacttactgtttccagaggattggtgattttctatgacctgaaaataaaaatcaaaataacattcgagcatcctcactcatttgagagtaacacttgggtagttttgatggaattgggtcattgcctttaaggattatgctttctaaactggaaacgatatatattcaaagaagctgcaaatatctaggattttgggg

SEQ ID NO: 770010 - DNA, 571 bp, Homo sapiens
gttctcggggtttgcagactcttagaaatatgatacaaattcaaagagtaggacttttcctttgacgtataagcctgatcaaaaatccatctctccagacaatatttagttcagtggggggactcttaaacttaaatctagctgtgtctgcaaggctgctccaggttatatttctgctgcttcaaaaagaattccgattagcattgatttccaataacctgtaaaatctgtgacacctccttacaggctcaagttgaggatgtcaatccttggttggcctttctgcacctggcatcttttagaagcatagcaaggcatatttccacagagtgggaagagagccaaatgcatgctaagcaagtcmtaaagataagacttactgtttccagaggattggtgattttctatgacctgaaaataaaaatcaaaataacattcgagcatcctcactcatttgagagtaacacttgggtagttttgatggaattgggtcattgcctttaaggattatgctttctaaactggaaacgatatatattcaaagaagctgcaaatatctaggattttgggg

SEQ ID NO: 770011 - DNA, 507 bp, Homo sapiens
aatcttgctactgctcactctttgggtccacactgattttatgagctgtaacactcaccgagaagatctgcagcttcactcctgaagccagcaagaccacggggccatcgagaggaacgaacaactccagacgcgctgccttaagagctgtaacactcaccgccaaggtctgcagcttcacttctgagtcagtgagaccatgaacccaccagaaggaagaaactccgaacacatctgaacatcagaaggaacaaattccagacgcgccaccgtaagagctgtaacactcaccrtgagggtccgccgcttcattcttgaagtcagtgagaccaagaacccaccagttccggacacaacggttcggggattggaaaggaaccagtccgagttcacctgaactaaatcatcagagctgacctgcccctgccgctcagagctcagctatagtgaccattcaggactcagttgtgttgatcaatcagctgaatttgaattctttttttacat

SEQ ID NO: 770012 - DNA, 560 bp, Homo sapiens
tgtaacaagataaaaatatccttacatgatcagtacagaagcaatttaaaaaatatattttccatccgcagttctttgaatccacacatgtggaacccactgttatagagaaaggactgtattgcggtgacagggttatcagaattaaatagaaagacagtcttttaggcagcttacattctatgcaatgagatgagacaataaacaagaacacaaataaataaaaatgaacgcaatatcagtgtattagtccatttttgcactgtataaagaactaccccaaacagagtaatttagaaagagaagagatttaattgactcacagttccacatgactggggagtcctcaggaaacttgcagtcatggtrtaaggcaaaggagaagcaagcgccttcttcacaagtaagcaggaaatagagcgaagggggaagtgcaacttttaaaccatcagatctcatgagaactcactcactatcacaaaaacatcataggggaaaccagccccacgatccaatcacctcccaccaggtccttccctcagcatgtggggattagaatt

SEQ ID NO: 770013 - DNA, 560 bp, Homo sapiens
tgtaacaagataaaaatatccttacatgatcagtacagaagcaatttaaaaaatatattttccatccgcagttctttgaatccacacatgtggaacccactgttatagagaaaggactgtattgcggtgacagggttatcagaattaaatagaaagacagtcttttaggcagcttacattctatgcaatgagatgagacaataaacaagaacacaaataaataaaaatgaacgcaatatcagtgtattagtccatttttgcactgtataaagaactaccccaaacagagtaatttagaaagagaagagatttaattgactcacagttccacatgactggggagtcctcaggaaacttgcagtcatggtataaggcaaaggagaagcaagcrccttcttcacaagtaagcaggaaatagagcgaagggggaagtgcaacttttaaaccatcagatctcatgagaactcactcactatcacaaaaacatcataggggaaaccagccccacgatccaatcacctcccaccaggtccttccctcagcatgtggggattagaatt

SEQ ID NO: 770014 - DNA, 617 bp, Homo sapiens
ttaaaaaaaatttttttttagtatattctgtatgtagttatattttattcaattttgttgttgttgttgtggcaggatctcactctgttgcccagcctggaatgtagtgacacaatctcgactccctgcaacctacctcccgggttcaagcgattctcatgccttagcctcccgagtagctggcactactacaggtgtgtgccaccatrcctggctaatttttctgtatttttgggagagacgggggtttcaccatgttggccaggctggtctcgaactcctgacctcaagtgatccacccactttggcctcccaaagtgctgggattacaggtgtgagccactgcacctggcctagatctatttcagatttttcagttccatcatcatgtcaagctttatatctgtactcaggtctatatttaggtaactgaaatttatttctcatcctaaggaattggaaggttcttcaggattttcaaacaaggagaggatatattcctactcaatcaaaatgttcctttttctttcttctccaggtcaaagcttagaatgtttagtggtaagccttttccccccaagatttgaccttgtactcagctattgcatcaattttct

SEQ ID NO: 770015 - DNA, 617 bp, Homo sapiens
ttaaaaaaaatttttttttagtatattctgtatgtagttatattttattcaattttgttgttgttgttgtggcaggatctcactctgttgcccagcctggaatgtagtgacacaatctcgactccctgcaacctacctcccgggttcaagcgattctcatgccttagcctcccgagtagctggcactactacaggtgtgtgccaccatgcctggctaatttttytgtatttttgggagagacgggggtttcaccatgttggccaggctggtctcgaactcctgacctcaagtgatccacccactttggcctcccaaagtgctgggattacaggtgtgagccactgcacctggcctagatctatttcagatttttcagttccatcatcatgtcaagctttatatctgtactcaggtctatatttaggtaactgaaatttatttctcatcctaaggaattggaaggttcttcaggattttcaaacaaggagaggatatattcctactcaatcaaaatgttcctttttctttcttctccaggtcaaagcttagaatgtttagtggtaagccttttccccccaagatttgaccttgtactcagctattgcatcaattttct

SEQ ID NO: 770016 - DNA, 567 bp, Homo sapiens
aatgtatcaactatatacataaaatagtcattttatgtaaattatactttaataactatataaaatatttgtacctgacattttggatatctttattgccatataattcacatattgtaatattcacatgtttaaattgtacaattcagtagtttttggtatgttggatttgcacaataactaaaatctaagcatagacaattttcatcattgttaaataaatgtcctaaaagaaacaactttatgagtagttttttctctcatctttctccctatttcttgctcatcctctctttttctccatatgtagaataaacatatctacaatgcttctagcatctgcttctagattttttatttctccatmtgtagaataaacatatgaatgacacaatgtagtttatatatacattagtttgtaaacatttacctaagtaactacaattatttgtaaagctaaacataaatccaaatattcaagtttatgaatatttaatttatgtaagcatttccccactattggaaatatagtttattttattgaaggcttttgaaaaaagtaaacta

SEQ ID NO: 770017 - DNA, 607 bp, Homo sapiens
ttgttaaaaattacgttactgttttgatagacaaagtggtaaaaataaatcccttgctaacattgtctgggatatcatttgttattattagtggagatgggacgccaagtccctggaatgctaaaataaggaagatgaagtaacagaacattataaaaacagatgtgatggggaaatggattggaaattaacaaagagatacaagaacttagaatcagtaatgctggctctatttttgtttcatttatttattttagaactatattttggaaattggtgyctgtgcttcacctgagaagttgaagggttttttgttttttaatgtcttctgtgaacaagctttttttttttttttttcagaaatttcaagttgaaattagctgaaataattcttaaagagacaatgctatgccattatggagatagcaggagtaacaattgaaagctatgaaactgtagggaaacagtaactcattctgaagccaatttttatattgctattgcagacttaccactcagtggtcactctatctactctgtcatcttcaagttcacagcaattatttagagagatggtttctgtcttgatagacaagatgcaaaatac

SEQ ID NO: 770018 - DNA, 583 bp, Homo sapiens
gactttattttataaaacactccacccaacaaatgcagaatatatactctttttacaggcatgtagactaagatagatcatattatggataaatcacagtaattttaaaagaaaacaaagaaaagagtctgcaagattcaagatggggaaactaactattacaataaatctgagtggtgatttactactcaatagcatagtttccatcctggaatcccatactcactccaaatatcgatcaatcatgagaataaactaaatacatttttaaataaacgacatctaaaagactaccttgttatgctgtttctaagaatgacagtgaggaagtgatacacataaagaaragagtaattgagaaaaaaatgaaacgagagaagaaagaaaacaaaaaaaattcaatgctcaagatgaaataaatgtataagatgatggattagtgcaattctgggataacggctatgttgctgacttgacagagccaggaggtcagataggagcatgaagatggtgagctcttcaaagaatatcactgaaaatagacaaaattaataattatgagggatttttaatgtactgactg

SEQ ID NO: 770019 - DNA, 635 bp, Homo sapiens
gagactacaagcgcatgccaccacacccagctaatttttatattttttgtagcaatggggtttcagcatgttgcccaggctagtctcaaactcctgggctcaagcgatccttctgcctcagcctcccaaagtgctgacattacaggcgtgagccaccgcacccwgccagtactattaataatacacatgtaatcaatatccaaagctttcataaagctaaaataatatacaaaaagcatctaaataaagtttaacagagatatgcaagtacacatttaggctttaaaaattgtatttcactagtttaaggtgaagaagaagtggcttgtcagcagttcatatgagaaataaagctttagtgcaaataagtttaacaaaaaccaaaagaacaacaaggtagctataaaaactaaggcaattttaggtcacagatagcaaagaatgcatccaaaacaagtatcctaagagtagtgaagtgtctggaaatcatggagcaaactgaaagaactggaggtatttaacatggagacgagaaaagggaaacatcacggcagtctgaatatttgagatactgtcatgggaataaaagtggacacatatgtcctctactggtattcctcaaaccatctgtggta

SEQ ID NO: 770020 - DNA, 635 bp, Homo sapiens
gagactacaagcgcatgccaccacacccagctaatttttatattttttgtagcaatggggtttcagcatgttgcccaggctagtctcaaactcctgggctcaagcgatccttctgcctcagcctcccaaagtgctgacattacaggcgtgagccaccgcaccctgccagtactattaataatacacatgtaatcaatatccaaagctttcataaagctaaaataatatacaaaaagcatctaaataaagtttaacagagatatgcaagtacacatttaggctttaaaaattgtatttcactagtttaaggtgaagaagaagtggcttgtcagcagttcatatgagaaataaagctttagtgcaaataagtttaacaaaaaccaaaagaacaacaaggtagctataaaaactaaggcaattttaggtcacagatagmaaagaatgcatccaaaacaagtatcctaagagtagtgaagtgtctggaaatcatggagcaaactgaaagaactggaggtatttaacatggagacgagaaaagggaaacatcacggcagtctgaatatttgagatactgtcatgggaataaaagtggacacatatgtcctctactggtattcctcaaaccatctgtggta

SEQ ID NO: 770021 - DNA, 561 bp, Homo sapiens
aagaactaagcctccctatttcatgtaattctaaggagggtggctggtttacatagagaaagaatctgcagtaagatagggtaaagccaacagagagaaaagcaatattgacagaaggtatccttctaataaagaatcttggccaggtgtgatggctcatgcctataatgccagggccttgggaggctgaggcagggggatcacttgaggccaggagtccaagaccagtctgggtaacatarcaagaccctgtctctaaaaaatataaaataaaataaaacaaaataaaataaagtaaaataagctgggtgtggtggtgcacgtctacagtcccagctacttggaggttgatgcaggaggatgacttgagctcgggagtttgaggctgcagtcaattatgatcatgccatggcactccagcctgggcaagagtgaaaccctgtctcaaaaaagtaaataaataaaggaatcctagctaatcaactcaaaactcgataagaagcatttagggaataaatgtaatatttgtattactgaatacaaacacaactcaattataaa

SEQ ID NO: 770022 - DNA, 629 bp, Homo sapiens
tgatttttgtgatttgtagtcatctcctaaactgtttgcatttttaaattttcccctgatttagttgatcatggccttgccaggttggtgacagtatattgtgagcatggtcataaagctgccaaaatcaaccccctcttcaccggacaagccctgctggagaatgtgcctgaaatccaagccctggtgcagacactgcagggacccttccacacggcaggtatggcttctgcacagcaggcgggagctcggagctgcacmccaggccaggctcctgcctctgttcttgaagaagcagcatccccactggagctgaggctcccgcaggtgtgaggagacccgaggggcatgttgaagtacggtccgggaggagcattcttgggattctagaagttctgaggaggcctgttttctcaaggttcaaaaacatttaattggctgggcacaatggctgacacccataatcccagcactttgggagcccgaggtgggagagtcatttgagcccaggagtttgagaccaacctgggcaacatagtgagactgtctctacaaaaaaaaaaaaaaaaaataactgggcatggtggtgcacgcctatagttccaggcactctggaggtagagatggga

SEQ ID NO: 770023 - DNA, 445 bp, Homo sapiens
ttggtaaagaaaacatttctcaattattcagaatttaattatgggtcatcttgatctaaggtgatatttcatagactcatttatgatagtggtgcaattatacaaggcatctgtgtgacaaatctcatagatatgcagagattaatgtatagsataaagatcggtgggctacgacttagggagtcctgagtaattagtatagtgctaattattaccttttttctttttgaaaattttagttagagatctggcttctgtctgttgcccaggctggtcttgaactccttggctcaaagcaatccccctgcctcagcctcccaaagtgctgggattacaggcataaaccactgcatctgaaatataaattttttttttgagtagcagagcctttatttgtatactttctgataggtactacagcactgattataattcacaagtttga

SEQ ID NO: 770024 - DNA, 445 bp, Homo sapiens
ttggtaaagaaaacatttctcaattattcagaatttaattatgggtcatcttgatctaaggtgatatttcatagactcatttatgatagtggtgcaattatacaaggcatctgtgtgacaaatctcatagatatgcagagattaatgtatagcmtaaagatcggtgggctacgacttagggagtcctgagtaattagtatagtgctaattattaccttttttctttttgaaaattttagttagagatctggcttctgtctgttgcccaggctggtcttgaactccttggctcaaagcaatccccctgcctcagcctcccaaagtgctgggattacaggcataaaccactgcatctgaaatataaattttttttttgagtagcagagcctttatttgtatactttctgataggtactacagcactgattataattcacaagtttga

SEQ ID NO: 770025 - DNA, 633 bp, Homo sapiens
ctttctagtttttatctaaaggtattttctttttcaccattggcatccaagagctcccaaatatgccatcacagatccttcaaaaactgtgtttccaaatgctaaatgaaaagaaatgttaacatatcataaagcagtttttcagatagcttcattctagtttttatctttgtattttcacttttttgcaattcacctcaatgagatcccaaatatccattcacagaaagtacaaaaacagtgtttacaaacagctgaatcaaaagaaagttttacatctcatagatgaatgcacaaacaacaaagcagtttctcagaaagcttctttctagtttttatttggagatattttctttatccacataggcctcaaaagacacccaagtattccttcacagatactacaaaaacagggtttccaaattgctgaatgaagagaaaggtttaccttggtgagatgaatacacatcaaaaagcagttcctcagatamcgtttttctaatttttatcctgggatattcactttttcaccattgtcctgaatgagctcctaactgtccattctcagaatggacaaaaccgtgtttctaaactgctgaatgaaaagaaacttatacctctgtgggaagaatt

SEQ ID NO: 770026 - DNA, 334 bp, Homo sapiens
aggggatctttttgggaaatggctattatcaacttggtttgagagtcaaaccatgaactgaataccttaccaaaattagttcatcctactgccaggaatgaacaaggacagtttaaatgctagaagcaagatggagttgattaagtctgatrtcttttgctgtcataatttcttcagttataatttttgcaaaggcagtttcaataacatcaagcagaagaaagaatcagtgaaacagaagactagtcatttgaaattatggagtcagaggagcaaacgggaaaaggagtgaagagtgaagacagcctaagagacttacaggatgccatcaagc

SEQ ID NO: 770027 - DNA, 595 bp, Homo sapiens
cagacaaattctaccaaaagtgtaaagaagagctggtaccaatgctactgaaattattctgaaaaaatgaggaggaaggatccctccctaactcattttatgaggtcagcatcattcagatatgaaaacctggcagagacacagcaaaaaagaaaacttcaggacagttatcactgataatcatagatgcaaaaatcctcaacaaaatacaagccaactgaatccagcagcatatcaaaaagctagtccactatgatcawgtaagctttattgctgggatgcaagtttggttcaagatatacaaaccaataaatgtgattcatcataaaatagaactaaaaataaaaacatcccttcttgatataaaccctcaacaaatgagttactgaaggagcatacctcaaaataattgaagccatttatgacaaacccacagccaacttcatactgaatgggaaaaagctggaatattccctttgagaactggaacaagacaaggatgcccactctcactactcctattcaacatagtgctggatgtcctagccagtgcaattaggcaagagaaagaaacacagacatctaaatacgaaga

SEQ ID NO: 770028 - DNA, 602 bp, Homo sapiens
ctggagaccacaaaagccattaaggagaaatactgttacttttgccctgatatagtcaaggaatttgctaagtatgatgtggatccctggaagtggatcaaacagtacacaggtatcaatgtgatcaaccaggagaagttcataatagacgttggttacaaaaggctcctgcaacctgaaatatttttttacccagagtttgccaacccagactttatggaatccatcttgaatattgttgatgaatacaaaactgtcccattgatgtgcattgtccactgtataagaatgttgttctttcaaggggtttggccatattcagggatatgaatctcaactacagagagatttgaagagtggtacatgccagattaaaactcagtaaggagctcagtggcaggataatcaaacctaagcttacagaggtycgggtggtaatccgtcacatgcagcactatgccttatggtttggaagcttaatgctagcctcaactctggagttatttcaggtctgtcacaccaagaaggactataaagaatatggccccagcatctgccaccagagccttctctttggagtaatgtcttagtgtctgccttga

SEQ ID NO: 770029 - DNA, 602 bp, Homo sapiens
ctggagaccacaaaagccattaaggagaaatactgttacttttgccctgatatagtcaaggaatttgctaagtatgatgtggatccctggaagtggatcaaacagtacacaggtatcaatgtgatcaaccaggagaagttcataatagacgttggttacaaaaggctcctgcaacctgaaatatttttttacccagagtttgccaacccagactttatggaatccatcttgaatattgttgatgaatacaaaactgtcccattgatgtgcattgtccactgtataagaatgttgttctttcaaggggtttggccatattcagggatatgaatctcaactacagagagatttgaagagtggtacatgccagattaaaactcagtaaggagctcagtggcaggataatcaaacctaagcttacagaggtccgggtggtaatccrtcacatgcagcactatgccttatggtttggaagcttaatgctagcctcaactctggagttatttcaggtctgtcacaccaagaaggactataaagaatatggccccagcatctgccaccagagccttctctttggagtaatgtcttagtgtctgccttga

SEQ ID NO: 770030 - DNA, 584 bp, Homo sapiens
atattttgaaactggataatgtgatgcctcctactttgttcttttygctcacaatttgctatttggagttttttgtggtttcacatgaatttggggacttttttctgtttacataaaaaatatcattggaattttgatggagattacattgaatctgtagatcactttgggtactaagaacattttaacagcatgaattcttctaatccatgaagatgggatatatttccatttatttgtgtcttcttcaatttctttcaccaatgttttatagttttcagtgtacaggtctttcacctccttcgttaaattaattcctaagtatttgtgtagccattataaatgaaattgctttcttgatttctttttcagatagttcattgttagtgtatacagatgctactcatttttttatgttgattttgcatcctgcaactttactgaattaatttactagttccaacagttttttttggtggactctttagggttttctacatttaagatcatgttgtctgcagagacaatttcacttcttcctttctgactttaatgcctttatttcttcttcttggctaattgct

SEQ ID NO: 770031 - DNA, 453 bp, Homo sapiens
gtccattcgcataagggcaaaaacagtgtttccaaactgctgaatcaaaagaaaggtttatctgtttgagatgagagcacacctcatgaagcagtttctcagaaagcttctttcttgtttttatctgaagacattttctttttcaccataggcctcaatgcgctcccaaatawcccttcacagattctacaaaatcagtttttcagaactgctgaatgaaaagtatgttataactctgagagttgaatgaacaccaaaccaggtggtttttcagataacttccttctagtttttattctgagatattcactttttcactattggcctcaatgagtttcaaaatgtccattcagagaatggacaaaaacagtgtttccaaacaattgaatcaaaagaaaggtttaactctgtgagatgaatgcacacatcacaaagatattttccagatagctt

SEQ ID NO: 770032 - DNA, 453 bp, Homo sapiens
gtccattcgcataagggcaaaaacagtgtttccaaactgctgaatcaaaagaaaggtttatctgtttgagatgagagcacacctcatgaagcagtttctcagaaagcttctttcttgtttttatctgaagacattttctttttcaccataggcctcaatgcgctcccaaatatcccttcacagattctacaaaatcagtttttcaraactgctgaatgaaaagtatgttataactctgagagttgaatgaacaccaaaccaggtggtttttcagataacttccttctagtttttattctgagatattcactttttcactattggcctcaatgagtttcaaaatgtccattcagagaatggacaaaaacagtgtttccaaacaattgaatcaaaagaaaggtttaactctgtgagatgaatgcacacatcacaaagatattttccagatagctt

SEQ ID NO: 770033 - DNA, 453 bp, Homo sapiens
gtccattcgcataagggcaaaaacagtgtttccaaactgctgaatcaaaagaaaggtttatctgtttgagatgagagcacacctcatgaagcagtttctcagaaagcttctttcttgtttttatctgaagacattttctttttcaccataggcctcaatgcgctcccaaatatcccttcacagattctacaaaatcagtttttcagaactgctgaatgaaaagyatgttataactctgagagttgaatgaacaccaaaccaggtggtttttcagataacttccttctagtttttattctgagatattcactttttcactattggcctcaatgagtttcaaaatgtccattcagagaatggacaaaaacagtgtttccaaacaattgaatcaaaagaaaggtttaactctgtgagatgaatgcacacatcacaaagatattttccagatagctt

SEQ ID NO: 770034 - DNA, 637 bp, Homo sapiens
tggatttctgcaaaagataaaacaccaggcatggttgctcacacctgcaatcccagcactttgggagtgctgaggcagggaggatcacttgagtccaggacttcgagaccagcctgggtaacatagtgagactctgtctcttaggaaagtaaaaaawtagccgggcatgatgaagcatgactgtagtctcagctacttgggaggctgaggtgggaggatcacttcagcacaagaggctgaggctgtggtgaggtacgattacgcccccgcactccagcctggatgacagggccagactttgtctcaaaatatatgaaagtagataaaattagtttacttgctgaacataatcaaatatagcaactttccagtaaaagactattaggacaaactatgttaacacaacctcagatgatgcagcatagttaaaacaaaacaaaacagctttgggcatattctatactccaacctctgtggtgcaaagggactatatggccaactaggtgttgaggcagtcacagaactgctgcacatgtggtttttaaacaagatttttaattccccctaaagtggaagaagtcatctaacaaaatttattatgacttaaattgctacttctttatttagtttttctcaa

SEQ ID NO: 770035 - DNA, 608 bp, Homo sapiens
caaatctcttctgatagttttttattttggttcaaataaaaattgcaacttggaaactgcacaaaataaatctcatccacgttaacgcaaatgtcgtctaaaaatgaacaaatttgccatatgttaaagcaatttttagtattacacrtgatgtttttatactttgctttcttacattgttaatttttatattttcacaccaagagtatgttggagctttggaacaaacatggaattcggaatcattagagctgtttctggctccagacccatttctaatgagtcaagcctgagctaagtcacaatcccattcagaatctttgtcttcatctgtaaaattagaagttgacttatgtgacctcaaatagcttctccaggcttgagtattaggataaactggggagatgacatgccccaccctgctgcctaccattggcatatcaagagcaggtgcatgtttgtgagtcaatatccacaaccttgcaataacaaccttttgatttgtgtgcgctgcattgcttacactagcttactcagctgactttatttggaatttgttgacatttaccatttatagtgtcaacaaatttacataagaaactgtcaca

SEQ ID NO: 770036 - DNA, 608 bp, Homo sapiens
caaatctcttctgatagttttttattttggttcaaataaaaattgcaacttggaaactgcacaaaataaatctcatccacgttaacgcaaatgtcgtctaaaaatgaacaaatttgccatatgttaaagcaatttttagtattacacatgatgtttttatactttgctttcttacattgttaatttttatattttcacaccaakagtatgttggagctttggaacaaacatggaattcggaatcattagagctgtttctggctccagacccatttctaatgagtcaagcctgagctaagtcacaatcccattcagaatctttgtcttcatctgtaaaattagaagttgacttatgtgacctcaaatagcttctccaggcttgagtattaggataaactggggagatgacatgccccaccctgctgcctaccattggcatatcaagagcaggtgcatgtttgtgagtcaatatccacaaccttgcaataacaaccttttgatttgtgtgcgctgcattgcttacactagcttactcagctgactttatttggaatttgttgacatttaccatttatagtgtcaacaaatttacataagaaactgtcaca

SEQ ID NO: 770037 - DNA, 632 bp, Homo sapiens
ttgggccatgaccaaacgtatttattctcacatgctttaagataccaaaaaaacaaaacaaaattatactccttgataaaatatgtattctaaatttaatgagaggaaaatgagggctttaattttcttctttttgggcagtgtgcacactgaggcgggcttagtctgctatcaaaatatgcagcagtgggtttatgtagctgagaggtctgctgaattttcactcttaactaagcatgcaagatgagtaccaaaatcattacatttatgtgtttttaatggcttgtctgggttgtgttttgtccacagctagtgacggagctgagtgccagccaagttttttagaattcacgcagctccacttccacatcgtaatttgacaaataccgagggcttctgccattcccctggttatatttckgagtcaatacacagcagtcagccggcaggggatcttcccagtctcctcccatggtaatgaggcacccacctggcccaaggagcctcccacgctgcaggagggtgcacgtcgggcgaagacagggtgctgcctttcaccttagaagagctcttttgatagacatggtcttcaagggaagtgaagtaaaccccacctctgacaactgtggaga

SEQ ID NO: 770038 - DNA, 649 bp, Homo sapiens
gtaaaccccacctctgacaactgtggagattcttgcgttcctttgagggaagccccccgggcggtgttgctagacagtacccattgtttgtacctggctattatttgtactgaagttgttaacagaatcaacatatagcctgtggtgtggaagtagagacaccctttgatatagcaaaagttaaaacggaatcaacccttaggttggcagaagagggaatcccaaactttccatttatatgaaaatgcacttctccatcacaaccaccagccaacggacctctgatcagctctctgatttacatctgagtttgttaaccatgatgtttttgctctaaacacttaaaatttcaaatgcgatttcgatggaaatccgaagttagacaagtttgacttggtgatttaaaactataaatcgccttatttttcttttaaagaagacaarttaagaaaatatgaagaatttggaaacaccatagtaaataaactaaaataaatattttgtgattttagtactggtatacaatacagttttttactaaacatatttgatttctttactaggtacacatatatttgaaatttcaatgtcagtaatacaaaaacgtacttctaattttcttaggaaaagacaaattgctgttttgaat

SEQ ID NO: 770039 - DNA, 513 bp, Homo sapiens
aggactgtgtcgagcaccctctcaggcctccgtcagtatctgaggtgcagagtcgccgggctgtgcaggttgaccacccctcttgtccgttgactgcttgaatctctgggagatccaggtgaggcctcccggcgtgcctggtgtctgccccagcatagccccagcctgggtagtgccgttgctatggcactgctggggaaatgcaggctagagatgaacamgggttcaatgaggaatcccgactgttcctttcacacttccagctgcaagaccgctcaacacttcgagttctcttaggaccctcggtgtatgctaatcgcctccacctaggtcaattggtacttatagaagcagcaccccctgtcagttattttgagcaattggtaccttgggaatcaattcagtccaacagtaattggtagaagaatcaaggaaagtgctaaataggaagaggtgaattgcacattgaattccctgtatagtgcagataattagccaatattccaaaatttt

SEQ ID NO: 770040 - DNA, 609 bp, Homo sapiens
ccctgaaaaagacttaatgaaagatctaatagacaaagacttttaaaaaattactttaaagatgctcaaagaaggaaggaagagtgaaaacatcaagaaaactgtgtaaacaaaatgaaaatatcaattttttttctacagaagacaacctaaaaagaaacaaacaaaaaattctggagctgaaaaatacaataactgaaataattcaccagagggcgcgggcgcagtggctgacgcctgtaatcccagcactttgggaggccgaggcgggaggatcacgaggtcaggagattgagaccatcctggctaacatggtgaaaccccatctctactaaaaatacaaaaaattagcctggtgtggtggcggagcctstagtcccagctgctcgggaggctgaggcaggagaatggcgtgaaccccggaggcggagcttgcagtgagccgagatcgcgccactgcactccagcctgggggacagagcgagactccgtctcaaaaaaacaaacaaacaaaaaaaaaaaacaattcaccagagggactcaaaggcagatttaagcaggtaaaagtaattattagtttatatttttggtcacagaagaaataaaaat

SEQ ID NO: 770041 - DNA, 609 bp, Homo sapiens
ccctgaaaaagacttaatgaaagatctaatagacaaagacttttaaaaaattactttaaagatgctcaaagaaggaaggaagagtgaaaacatcaagaaaactgtgtaaacaaaatgaaaatatcaattttttttctacagaagacaacctaaaaagaaacaaacaaaaaattctggagctgaaaaatacaataactgaaataattcaccagagggcgcgggcgcagtggctgacgcctgtaatcccagcactttgggaggccgaggcgggaggatcacgaggtcaggagattgagaccatcctggctaacatggtgaaaccccatctctactaaaaatacaaaaaattagcctggtgtggtggcggagcctgtagtcccagctgctcgggaggctgaggcaggagaatggcgtgaacccsggaggcggagcttgcagtgagccgagatcgcgccactgcactccagcctgggggacagagcgagactccgtctcaaaaaaacaaacaaacaaaaaaaaaaaacaattcaccagagggactcaaaggcagatttaagcaggtaaaagtaattattagtttatatttttggtcacagaagaaataaaaat

SEQ ID NO: 770042 - DNA, 538 bp, Homo sapiens
caccctgggtgcacgttatgttcacctggggagctttgcaaacacactgaagcccaggccacagcacacgcagcagccaagctctcggggggctggccaggtggccttcaggtgattcccaccagcatctcagctcgcaaggccctgttgtgggaactgaagtcgatggagttggaatctgacaraagaagacctggaccctatgctgaaaaggatgcaacaaagtcatttggaaatttaaaaacaaaaaagaccaatgtaggaagcttgtgaattattttttaaaaatcacatgagatgcattatccagtccaaatggtaattatttatattatcccaactgccatagttacagttttaaaaacttgacattggtctcagtctcttgtttttgtgtcatcagtttagtttttatgtttgtcgttactactgtcatgattctgtttttgccggtggggaggaggtgagtgtcttgccctgtttgccacctgcccgaaggaatggagaggagcggctttcacagccatttggctgtact

SEQ ID NO: 770043 - DNA, 538 bp, Homo sapiens
caccctgggtgcacgttatgttcacctggggagctttgcaaacacactgaagcccaggccacagcacacgcagcagccaagctctcggggggctggccaggtggccttcaggtgattcccaccagcatctcagctcgcaaggccctgttgtgggaactgaagtcgatggagttggaatctgacagaaraagacctggaccctatgctgaaaaggatgcaacaaagtcatttggaaatttaaaaacaaaaaagaccaatgtaggaagcttgtgaattattttttaaaaatcacatgagatgcattatccagtccaaatggtaattatttatattatcccaactgccatagttacagttttaaaaacttgacattggtctcagtctcttgtttttgtgtcatcagtttagtttttatgtttgtcgttactactgtcatgattctgtttttgccggtggggaggaggtgagtgtcttgccctgtttgccacctgcccgaaggaatggagaggagcggctttcacagccatttggctgtact

SEQ ID NO: 770044 - DNA, 635 bp, Homo sapiens
cccagtgcctcgctcccgtttccattggttatctgcacagttccttgaagagtcctgtgaaagcttgtctgtgtgaaggtcaagcattctaaacggcggctccgtggagagtgtgccctcgttggacgtgaagaaccagccagctgctgtttcttctttctttattttcatagattattgcaatagcatcatcaaaggaactgcaatgctattctgaaggaaataaaaattagaatcaattccagctttgagttcaaattattttctattggtatcatctttgatttttttaaaaaaatgtgttcattggtatttttgtttgtttgttcaacgggaagaaagtcaagagaaaggtgycatttttctcattttgaatttctataatcagaaccatttctaatatataactcttatgtgggtcttgcataagcctcagacacaaataatttgggaattattcctggttccagtaaaagcttgcctcctttaaaccatcacaaaagggaaattactggtctattataaatgagatacagacttcttaagatacatttttttgggggagggaggtattggttatcagtctcattaatctaaacacaacttctcgtgatttttcttgtgcctccaccact

SEQ ID NO: 770045 - DNA, 613 bp, Homo sapiens
taaatgtagaaaaataatccacaaagaagttttctttgcttgtttgtttttctgcatgtgaggtgtcctacggggagccatcctaacaatgacattcataggcatctggagggacaataaggaggaagagcaaaccatrggactttgcacagccaaaagctcgtatttacagattagtaactagactgattaaggtatagaaataatgtctaactgacaaagtcttagtgcttatagggtaactgcatttagaaggatcaagacttctctgcaaagtttatgaatttctaatgtaagaacctttatagtgaggctcgttcagaaaatggaaaaatacaatacacaatgggcatttgcaggatgacccagaattaaaacagagaccaaaggtgtgggagctgggggttgggagatacatgaaagaccgggacagagttaaatgccttcgttactgttggctgctaggcacagacatccctaagtagagggtgttagcagccacatcataacctcactgtacaattgtaatctgagatgtattcatgtttattgagcccaattttatctaacagtttttttttaatagtaaactagagtgggttcatttattttc

SEQ ID NO: 770046 - DNA, 533 bp, Homo sapiens
tgggcctctgaggctgcaccttgagtttgaacatgtattaaaattggcatgaagccattttcctcccaggctgtaatttcagaaagccttgtctgggaagaaatgacctttcagctacttcaaaagcagctcctccctaacaccctatgatgtcagggctgactgggactgtggcagggctctcaattaaaaggatgacttctaaatagtgtctcatcatgtcacctcaggcttgtgatggtgacctctgtggccggagggagaaactgtggctacacaggagtcaaagttagagtcatgagtttggaaatgaacagaaaaatgaaaaggagaataycaccactttttagggaagaattttttcagaatatgaaatgcaggcagctgtgaatatacctagagtactccagttggcttcacaaaagtggtagctagcttgtgctgggttctacttcccaagccttgtcctgcagctctctgatccgaagggcattttgccttttgaagatcaaaggcatccttaggaatatgtc

SEQ ID NO: 770047 - DNA, 502 bp, Homo sapiens
aggtaactcttgttatgttttagcaaagagactggtagcattttgcccctgccatggagatttgtggaaccttgaacttgagggagatgatttagggtatctggcggaagaaatttcgaagcagcaaaacctttaagaggtgtcttrgatgttgttaaaggcaatcagttttataagggaagcagagcataaaagtttggaaagtttgcagcctaacaatgcagtagtaaagacaatcccattttctgaggagaaattcaagcaggctgcagaaatttgcataagtaacaagctgaatgttaatcctcaagacaatggggaaaatatctccagagcttgtcagaggtcttcacagcagcccctcccatcatgggctcggaggcctaggaagaaaaaatggtttcatgtgtcaggccatgggtccctgtgctgggtgcagcctagggacttggtgccctgtgtctcaacctctccagccgtggctgaaaggggccagtgtaga

SEQ ID NO: 770048 - DNA, 649 bp, Homo sapiens
ttaaaataaaccaaattctgatcatagttattaaaaagtctgcacaggcacaaatggtatataatatcaacatttaggggttctcacaactggaagtgaggatagggggattcaaagttacaaagaaaactgacagaatgactgtaagaagtagaggaaagggagcagtcaaagatgaatcaggtttcgcacttgagattctgtgagaatactgatgccttgaaaggaatgaaaaatagccatgcagttgggtttgtgatgaagataataagcccagatttaaacacattaattaaagcacaggttttgttaaaggggatagatgtttccagtagggtagtggaaaaagttgagcttattgggaatattrcccaggagattaatcatagaattatccaacaaaaccaaagagataagatgaataaccaggattttttaaaaagagagaaggggaggaagccacaggtcagcacatcaaacaaaggcatatcctaaagcacagaaaagatcaaataaacacagtaagtccaagcaagtaaaagtgggcaggggtgactgcaaatctaagtgtgggaatactaggctcaagcaaggacatttctttcacgagaaccttggtgcatttgtccaggccaggagccttcaggag

SEQ ID NO: 770049 - DNA, 664 bp, Homo sapiens
ccttggtgcatttgtccaggccaggagccttcaggagctgggccaaaaatggacaaggtgcaagtaaaggtatctagaagaaaatgccagcaagcaattgacaatggctgggtctttagaggtggtttaggctacagatttggatgttggggccattcctattgaggtaatagttgacatcactgatggtgacacatagggagaaaaaagtgtgscttcacaataatgggatggtagtggaaaattcagctaaaatgaaacttaaagggaagatggtagaagataaaaaaagaccaacagagcagtactatttactgcataaagagaggcagaactacaagtggctaagtgtggttgacggcatcaagtgctgttgaaaggtggaagacagcattgttaagtgaccattgaacattgttaaccaaaaggtcgtttgtcactgatgaccttcacaaagagaatttgattagcataacctgagtaaagaaagaagctaagagattaaggaggttacagatggtattattagaggctattttgggcttccagcttaatcaggagggagagatacaagtccaagctattcttgttcatatttctttgtgactgatgtcttagactcctgcatttttcttcaatacctttttgccttagaataattgac

SEQ ID NO: 770050 - DNA, 637 bp, Homo sapiens
tcgctctccaatttagagcccctaaaatgaccttattgatttgccttgggacaatctccttccaacacaggtttcttttcattgaatggatgtcctttgaagtcaattaaacttgggcatggcacacctaagactacaagcacttttatagctgaaggcaaaaagtatttgackagtgacatggaaatcacactcctgatatgaagcactattttcaaccttcaagtatgtgggaaatacaaagtaagtgtatttgtttgatatttaaaattgagctgtttcagagctttggagaataaatatacaaatttagctgagcttttcttaactttttttaagtgcaggcctacagaactttattctgttcccagttgccagttttcttataaatgtgcggccttgcctactatagtgatcatgtgagagattcaagagcagatcaaagacaattcaacaaccacagatgctgggaatggctaaatgtgggtaatctgggtcatctgtcaaaacgggaaacttagatttggctcagttatttcagaaatctttgattgataccaggttattcccatttgatacatttctaaatctagtggtgaatctaaactagtaattcagaatagccccctttgtggta

SEQ ID NO: 770051 - DNA, 625 bp, Homo sapiens
aatgatacagaaggaaataagagacaaaatgagaaagtaaaagttgacactcagcttggagcctgggtaacttggagaatactggcattatttataagatttagagagacagaaaaaggcacttgttttggaaagataatgactttttgaaaaaagaagcatggcgaatctttgacgtttcaggagggagtcatctgaattgaagtgttctatcagcagtataggacatggagatagtataaaagacaccagagctacagttaagaattacaggtgatctaaaattttgtgatcaagatgtcaattttccastgataagtaaagaactggggataaagtactaaatctttggaaatatccatacatatgggggcaaagcaggagaatcaattaaatggtccggagatgatgcagtcagtgctgcttctgtgtgtacaagatctgtgctggaatacagtacacatgcttttaagggccttaacccctaggtcacggttagggttaggacaccagttctcagattcaaaaacctaatttatcccaagtggaagaagtaaagaagccaaacagttaaacattaataaaacattaataaaaaacatttatgacctcactagtaacaggt

SEQ ID NO: 770052 - DNA, 586 bp, Homo sapiens
gaaaacaaacaatgatattgtgtaaggaaaactgatagcacttcttttcgttgttgttattcgtatgcttgtttttagttaagagatttttaaatgttgtttaaatatcctatggctggttaccttatttgtattctcatagcacctgtaagcactactgcaagccagagcttgtcatctgggctcatttcatcactgaataatggccatgaaaagatgtccaagttctaatccttggaaccagtgattggtgccttaccagtgattgggcttccgggttaccctagttggcccaattgtaaacataaggtacttataggaaggagtcaagaaagtcaaaggcagaagaaaaagatgggatgatggaaacagaggttgaaatcatgcactttgaagatggaggaaggtggtcatcaataaaagamtataggtgatctctggaaactagaaaaagtgaaaaaaggattctcctctagagtcttccaaatggaacaccggtctactaacatcttgattttagcccagttaaactggttttagactgacctccagagctataagattaaaaaatttgtgttgttttaag

SEQ ID NO: 770053 - DNA, 585 bp, Homo sapiens
caaatgtaaccaaatttctttcttttcactcaaattatgcactctcataccttacccatactcatacacacacagtccaaactttaaaaagaactaaaaggaaattattatagaaaatatagtaagagaaaaagccactcaattaattacaaaataataatgcaaacttgatgcaaataccaggaagccattatttttaaaaagtgagtgtagatccaaaaatactgaatgaactattagctaatttgaatttatcagtgagtataaaaatactgtattattatcaaatctaacttattctagaaatttaaaagtattcagaattagaaaaatagttactataatataacttacytcattatcaaattaaagtgaaaaatcaaacatttctcctaaggcatacaaagaagacattcagaaaatgtcaatattgaatatggtttataaaacacaaaaaatgtacaagaaaaatttaatatctcattaaaaatgacaccacaaccaaaaggaatttatgaagtgaaggatagttcaatatttcaaaatggattaatttatcatatcaatacacgtaaatggaaaaaa

SEQ ID NO: 770054 - DNA, 631 bp, Homo sapiens
atatatcatgaacttaaatgcaaaacattaaacttatttaaaaattaattggagtaaatcttcaggagtcaatactaagtgggcagttattatacttgataccaaaattatgatccattaaaaatcaataaattaaacctgatcaaaatttcatcttttgctctgtgaaagatcttaagagggtaaaaaacccagctatagaatggggaaaatatttgcaaactatatattataaaaaggaccaatacctagagtatattaagaactatctggctgggtgtggtggctcacacctgtaatcccagcactttgggaggctgaggtggygtggattgcttgagctcaggagtttgagaacagcctgggcaacatagcaaaactctatctctacaaaaaatacaaaaattagctgggcatggtggcacaggcctgtagtccctgttactccagcagctgaggcaggaggattgcttgtgcctgggaggtcgaggctatagtaagatcaaggatgcagtgagtcaagatcacaccaccgcattccaggttggacaacagagtgagatcctgtctcaagaaaaaaaaaaaagaaaaaaaaaagaactatacaagccaaacatttaaagaaatccaa

SEQ ID NO: 770055 - DNA, 567 bp, Homo sapiens
gaaatcagtgttaaaatatttcttttgacacagtcagctaacatctttctatttttgctgagtaactattaattatattttaagttcaactaactcttgacacagcaatggaatttgaagtgaatatactactttgaaaaataaatggtgtatttagagtgttgacatttaraaaatggtagttttgtgaaatttgcaatgtgttttagaattataaatgctaaagtaagtgaatgcatgattatatttaatagaataaaaacagaagaattttttaagtcttgacgacccaaggcagggttctgttttaagtattcccctttcaatcaacgttacagctatcctaacttaaaactgcttcaactaataatgtgtatttatattaaaaatgtaatccatggctctgaaccctggcttcctagtagaatcacatggcaagattttaaataatactcatttcttggctctactaaagtccaattaaaacagaacttcagtttttagaaagaggtgtcggtagtttgaaatgttccacattattctaagatgtgggtgagattaagaacc

SEQ ID NO: 770056 - DNA, 539 bp, Homo sapiens
ccacatttggtgttctcatctgaccaaaccaaattttatgtatacattcaattctcaatccaacccagtctgtttgcctaagccattccagacaaacttccactttgaaggttttaaatgcataagtcagatagcaatccttcagttgccccagaggcacatcacgttctttgaatgcttcagtatagtcctcttcatttagcaatcagtgaggcaatacactggcatcatgatccctwtttttaggaactctgtacaaaattccctttgaaaatataaattttggaaatgagtgatgagcaaaggggtttcattaacattatcacaatctcttgatatatctgcttgataatgtagcacctattatttggggccattaggaccttggcagaaattctggtaaatgtaaagaaaccacatttaacatccagttaatttagtttgtttgtttgttttgtttttgtttttgtttttgagacgttgtcttactctgtcacccaggctagagtgcggtggtgtgatctcgactcactgcaacc

SEQ ID NO: 770057 - DNA, 598 bp, Homo sapiens
aatgtttgccacaatttactacagagttgtagtaaatagatatagaattcattgtagtcaataaattacaaactatagattgcattgatgcttttttttttttttttttttttgagacaaaatctcaccttgtcacccaggttggagtgcagtggcacaatctyggctcactgcaacctcagcctcccagattcaagcaattatcctgcctcagcctcctgagtagctgggactacaggcccgtgccaccatgcctggctaatttttttgtattttttttttttagtaaagacagggttttatcgtgttagccagtatagtcttgatctcctgaccttgtgatccgcccaccttggcctcccaaagtgctgggattacaggcatgagcaactgcgcccagccgctactgcattgattctaaagattaacttccagagaattcacatcaatgttgcatcttcaaatctaagaacatggtagatctttacatttatttaagtcttctgtaatgtttctctacaagaaattttaaaaagttttagtgtgaaagatttttaaaggtttcacttaaattattcttaactatttttataccatt

SEQ ID NO: 770058 - DNA, 644 bp, Homo sapiens
tagatgtctgaaaattggctctatttttttctcaaaattctaggtcctgtgaattttccaaacaaattttggcaatagcttgtgaatttctctcaaaatgtttgccacaatttactacagagttgtagtaaatagatatagaattcattgtagtcaataaattacaaactatagattgcattgatgcttttttttttttttttttttttgagacaaaatctcaccttgtcacccaggttggagtgcagtggcacaatcttggctcactgcaacctcagcctcccagattcaagcaattatcctgcctcagcctcctgagtagctgggactacaggcccgtgccaccatgcstggctaatttttttgtattttttttttttagtaaagacagggttttatcgtgttagccagtatagtcttgatctcctgaccttgtgatccgcccaccttggcctcccaaagtgctgggattacaggcatgagcaactgcgcccagccgctactgcattgattctaaagattaacttccagagaattcacatcaatgttgcatcttcaaatctaagaacatggtagatctttacatttatttaagtcttctgtaatgtttctctacaagaaattttaaaaagttttagtgtgaa

SEQ ID NO: 770059 - DNA, 606 bp, Homo sapiens
tgcccaggagacattttcaccattgtcttggggattgacattcagttcctcgttacttatgcaaatttctgcagccagcttaactttctcctcagaaaatgggtttttctcttctatcacattgtcaggctgcaaattttctgaacttttatgctctgcttgccttataaaatgaatgcctttaaaagcacccaagtcacttcttcaaygctttgctgtttagaaatttcttctgtcagataccctaattcttctgtcaagttctaagtttcactaatctttagggcacgggcaaaatgctgccagtctctttgctaaaacataacaagagtcaactttgctctagtttctaacaagttcctcaactccatctgagaccacatcagcctggatctcattgttcacatcattatcagcgttttggtcaaagccattcaaaacgtctctaggaagttccaaactttcctgcattttcctgtcttctgctgagcccttcaaactgttccaacccctgcctgttacgcagttccaaaattgcttctgcattttcaggtatcttttcagcagcatcccactctactgataccagtttactgtattagtctg

SEQ ID NO: 770060 - DNA, 540 bp, Homo sapiens
tctcacctctgcggcagactgcttgtttctgaactgttggagagccctccattctcacaagcccaagcactggtgtgggccgcaatcttggaacaaattgaggacagagaacaaggctactatttcctgcagtgccacttgcccttcacccagccccaagatgaggtggtgggcaccatactggatatgcctctgtggtggacttctatactgcctttgagtgaragagaggcttgccccatccccttgccggcttccttctccgtccctgcgtcgagctgtggctagatttctccatgagggcagagggcagggcaagaggcgtgagaagcatcttctggaaggtctgcgggcaccctcctgcgggtggacaatgagcgcctgggaggccgttgtccttggttggggagcggtcgtctggatctagcctagcaaagaggctgctccggatggggagggaatgaaaacccctgcggctccgacgcagatgcccacgttgcccaggccttcacagacccccaagccggaaccgccgggaaa

SEQ ID NO: 770061 - DNA, 487 bp, Homo sapiens
catccgtcgttggcgcccagggtgcgcgtcgggccactaggggtaccccaactcggacagaaggcccatgagttgaatttgaagtttgtgggaatagaggtgaggcaccaggggcagaaaaaaaacaggagacctcgcctcagacaagcggggcctgggtcccccatggatgaaagtgccttcccattatgctgtaccctgggcagagtggacagwgacgaccctggttcgagcccagggtgcgcttcgggaccgcttgcggttaccagaaagtgaacaaatggtccatgagcggaaggtgaggcacctgaggcagagaaagtaaagaaacgcgccgccgagaagcagtgcctgggtccctcacggaggaaattgtcttctccttagcccgttcgcttggcagtgaggtccctggcgtccctggtttgatcccagggtacgcctcgggccactagtgttaccccaaggtgggcagaaagcccataag

SEQ ID NO: 770062 - DNA, 605 bp, Homo sapiens
aacgaaaatagacaaacatactttattaagcatattgcataacctatgctactttcagcttatttatattcatttaatccctcattcaacttaatataatatcctcttttcsttcctggctttctacctgcctgttctcattcattaacttgttttagccaatgagtcatgagtagctactctgttcaggcattgttctcagttctagtgatacagtagcatacaattttaacaaaatatcgccctcatgaagctacattttagaggaaggaactcagtgaacaagtcaacagaaaaatataaaatattttagaatacaaataattggtatgaaggaaaaccagtcaaatgaggggtaagacatattcaaggtagagaacaatctacaattacactgagccctgaacaaagagagaaaataagctatacataaatttggggaagaacatttcaggaagagggaagtgtacaggctctaatgaaatcaaaaagctagtgtattcccaaaagagcaaaaaatcattatgcttgaaattgaattgaatgagcaatgagaagaatagtaaaaatgagatcaaacaataatctagagctagatcagaaaa

SEQ ID NO: 770063 - DNA, 617 bp, Homo sapiens
tcccaggtggatatcaggcctcaagaggatggcagtcaccaggtagacatcaggcctcagatagacaccaaggtcccagatgtacagcaggccccaactgaaccccagactcatgtggacatcaggccacaggtagacaccaagccttaggtagatacctaacttcaggtagtcatcagacccaaggtggacayccagtccccaggtggacagtcaggccccaggcacacatcaggccttaagtggacacccaggccccaggttgatatccagttcccaggcgatcaccaagccccaggtagacaccaggccgtaggtgagcaacaggatgcagtaggtcatcaggccacagctggataccagtccccggtgatcacaaggccccagtgggacatagatctaaggcagacatcaggccccaggtggacatacaggtctgaggtggaattcaccctgagggggacattcggccccaggtacgcatcaggcctcagctgaataaccagtccccaggtggacattaacccacaggtcaaccacagtccccaggttgatacctggtccccaggtggctactcaatctgcagggtaacattagtcccctgtaggatcccagg

SEQ ID NO: 770064 - DNA, 516 bp, Homo sapiens
aggcattggccttggttacaaaatttaaggggttatcaaaggcatcagtaataaagatgaataatatatatatttttaagaccttaatttgttacagcacttttattttcacagcaaaattgagaggaaggtgcagagataccccatatgctctttgccctcatacatgcatagcctcccccattaccagcatccctcaccagtggtatacatcaggggtccccaaccccgtggccgtggacccgtacctggctgtggcctgttaggagctgggctgcacaacaggaggtgagcgcaagtgaacattactgccggagctctgcctyctgtcagacgggcagcagcagcagactctcgtaggagcacgaaccctatggtgaactgcgcatgcgagggatctagattgcgctctgcttatgagactctaatttatgcctgaggatctgaggtggaatggtttcatcccgaaactactaaggttggggaccactggtgtacatcttacacctgatgaac

SEQ ID NO: 770065 - DNA, 570 bp, Homo sapiens
gtgcatgtgtgtgtgtttccataaatcttaaagaattctacatatctaatgtaatcctttccattaagactctataggatcacatttcttctttatgagtttacccaatgaaaaagtagccacttcaaacacctgtctgttaaacatggaatttattcctcatatataaaatgataattacaaagatatcccatttagtaagatcacatctcagcttgtgctgtgtcagaaaactttgggtgctttcttaaacttcttttatttttttctkgctgttgctgcattcctacttctggcctccagagctcagtcaagaatggctgcagaatgggtgtgaggactatatgtagatgcccaaggctacactaaatttgttgcatctgctatttgcttgggttgcatctttccttcggagtccaaactacaggcaagtctcattttgttgcactttgctttattatgctttgcagatactgcactttttacaaattgaaggtttgtggcaaccctgtgtctagcaagtatatttgcactatttttccaatagcgtgtgctcattttgtgtccctg

SEQ ID NO: 770066 - DNA, 426 bp, Homo sapiens
aattctgtgaacaaaacctccaaatctgtactatcaactctgattccactccaaaattttgcacccatatttataactcgctgatagacatattacactggaggttctgttggcatcataaacacagtgtacctaaaattctttgcttttcctgtttctcattttggttttctgctttgttttaataatattgtcttggtttgttttttaccacaccttgcrgctaagggtcatcccctctcttatactcaatcagtggacaaattctcatgtttcttcttttctaatgcatctggcacccattcttttcagtgcatcccttctgccaagatcctagttcagttcataattacatcatgcctgtactattataataagaattaactcacttccacgcctctagtttctaatccttccaatctatgt

SEQ ID NO: 770067 - DNA, 426 bp, Homo sapiens
aattctgtgaacaaaacctccaaatctgtactatcaactctgattccactccaaaattttgcacccatatttataactcgctgatagacatattacactggaggttctgttggcatcataaacacagtgtacctaaaattctttgcttttcctgtttctcattttggttttctgctttgttttaataatattgtcttggtttgttttttaccacaccttgcagctaagggtcatcccctctcttatactcaatcagtrgacaaattctcatgtttcttcttttctaatgcatctggcacccattcttttcagtgcatcccttctgccaagatcctagttcagttcataattacatcatgcctgtactattataataagaattaactcacttccacgcctctagtttctaatccttccaatctatgt

SEQ ID NO: 770068 - DNA, 593 bp, Homo sapiens
ttacactgtaggaaattgagcctacagtctggtgactccagggccagagctgccaaagtctatatcataaactctttctagggaaggttgtttgaagttatacattaacgttacatacttctcctcagagttcacttcagtcttcatttgcatagtaggagataatccaactgatcaggaatgatataaacaaacataaaattgaatgattaagatgaatcttacattttttaaatcaagtttcaaattctgtatgaaaaaaaccatccagtaaaactggcagataattaatgtctgacagttttatttcctttttgtattttgtaggaaacaatatgaaaaaarcatagtgagtggcaaatgttaatccatactttaaattagaaatgtattgcttaaatttctatagtttgttaattttttttgtagaggtaatctctgaaggatcattctgagttattctttttacctagtctctgccagatagcctggctcaggaagacagagctaatataccaaaacatcttaacatctaacctagtcagagctaataaaccataagacaaaatttacacataactgtatgtgtgcct

SEQ ID NO: 770069 - DNA, 633 bp, Homo sapiens
atgtaattgagactgatctcctgttttggctgcagcatgttattaaagccttcttccttggaaattgttgttgtctcagtggttggctttctgtgtggtgagtagcaggacctaaaccaaactcctggtgttttggtaacagtggcacgatgaatgggactcttaatagaccaggtcaccaggaatccagatctccataccccaggatttcccccactcaaatgtacccttaaaaattgaaataaatttgactttcaaaccctaaaactaaaaagataaaactaattttcctttacataactatgaaaatcctggccaaagaatggaagtacaaattttaatactatccttcagatggaccttttctgccaccatcaggacaaatagtcagaggtcccmtatttacaaaccttcatggtcttaagggaagaccctcacctttgtaaagcttgtaaagtagatgccactgtcttaactatgcttagacacctgatccagagcccatggagaagacttggaaactctcatgcacactcccctcagcctcctcctccagaggccaaagagggagaaacagctaccccctggctcttcctccaggctctgcccattacaagaggtaagtgaaccaac

SEQ ID NO: 770070 - DNA, 460 bp, Homo sapiens
ggcttcctaacagaaaagaaaaggaaagaaaaccctgtaggagaagcggcatccatcaactggcgcttaatgaaattgtatgactctttaaattcaagtactcatttttattaagaatatctaaaaaattcagaattatttatgtgcaaaaagatattcatggctttgcttttcacctaataaatagcagaaagctaaagcattttcttatcttagaaatatgcctataatagtatctatgaaaaactaatgctctgcgacagaaagagcagcacttctttgttttatgtgagaatgttcctgctcagagacaaagggtttttytgcttctttcattacaaatccttttattctatatggctgtggttggttgggcctattcattccataacttgcatccttattggggaagggcatgttactttcaatagaggtttgtgccactgctgcttaatccccc

SEQ ID NO: 770071 - DNA, 606 bp, Homo sapiens
aaaacattttcaaactcattctgtgaggccagtattaccctaataccaaaaccaaagacacatcaaaagaagaaaacttcaggccaatatccctgatgaatattgatgcaaaaatcctcaacaaaatattagcaaactgaattcaacaatgcattaaaaaaatcactcatcatgaccaaatgggatttatgggatggaagaatggttcaacacatgcaaatcaatcaatgtgatatatcatatcaacagaatgaaggataaaaaccaaaaccatacaatcatttcaattgatgctgaaaaagcatttgataaaattcaacatctcttcgtgataaacaaactgagcatagaaggaacatacctcaacataataaaagtcatatatgacagacccacactagtatcatactcratggggaaaaactgaaagcctttcctctaagatctggaataaggatgcccactgtcaccactgttattcattatagtactggaagtcctaactagagtaaccagacaagagaaagttataaaagccatcaaaataggaaaggaagaagtcaaattacccttgtttgcagatgacgtgatcttatatttggaaaa

SEQ ID NO: 770072 - DNA, 606 bp, Homo sapiens
aaaacattttcaaactcattctgtgaggccagtattaccctaataccaaaaccaaagacacatcaaaagaagaaaacttcaggccaatatccctgatgaatattgatgcaaaaatcctcaacaaaatattagcaaactgaattcaacaatgcattaaaaaaatcactcatcatgaccaaatgggatttatgggatggaagaatggttcaacacatgcaaatcaatcaatgtgatatatcatatcaacagaatgaaggataaaaaccaaaaccatacaatcatttcaattgatgctgaaaaagcatttgataaaattcaacatctcttcgtgataaacaaactgagcatagaaggaacatacctcaacataataaaagtcatatatgacagacccacactagtatcatactcaatggggaaaaactgaaagcctttcctctaagatctgsaataaggatgcccactgtcaccactgttattcattatagtactggaagtcctaactagagtaaccagacaagagaaagttataaaagccatcaaaataggaaaggaagaagtcaaattacccttgtttgcagatgacgtgatcttatatttggaaaa

SEQ ID NO: 770073 - DNA, 572 bp, Homo sapiens
aactctgcgtaccaaggaggaaaccatgactttgtagctgggagaagagtgagagagtctttcacactaaccaattccacgggttcccacattgaaggaaacaagaatggtggaaaagaataaagggaaagaaaacagaatagagggcaccagatattatgtctcatgttttatagaggaggttgttgttatgagctattctcattatgaaaaccaccaaatcttttctttctctggctctttattgtgcattcggagatcccttaggctatttcatcaagtatccatgaataaaaagcccccacaagacagacacaaaaggaaagaagggctggcttaatgctgcaattctccctagaaggaagagggtttgtaaycagccttggcagggcctaactgtgcagtagccccagtgtgggtgcatctgcccccgcatcataaattaggaaagccacattggcctgataactgtgaggttatgtacagctcttgttgtatgatatgctctcaggtctaccgttaggccttgctgtgctcccagaagatgcctcaggtgaggtgacagagactta

SEQ ID NO: 770074 - DNA, 644 bp, Homo sapiens
tcgagctatggtcgggcctggtcttcatgagacagatctgtttcattcctctttttaaaaaaattttaaacatttaccattattaagacaattaaaaataaactctagtcagggtcaagtggttcacacctgtaatcccagcactttgggaggccaaggtgggcagatcacgaggtcaagagctcgagaccatcctggccaacatggtgaaaccccatctctactaaaaatacaaaaattagctgggcgtggtggcggctgcctgtagtcccagctactcgggaggctgaggcaggagagtctcttgaactcgggaggcggaggttgcagtgagccaagatcgcgccattgcactccagcctggcgacagagcaagactccgtctcaaaaaaaatcaaaaaacagaactctaatctgcttggatcactctctgttccctttccatttcgctggaaaattagacacagctggaagctacatgtataggaggayatggacgttggcatcagagagatccagtcttgaattccaatttctctccaggcagggcaataaacgcctcgagcctcagtttcatcatccttagaaccaggtttggagtgtcttacaagcaatagacaataaatggtgagttttcgggtacg

SEQ ID NO: 770075 - DNA, 571 bp, Homo sapiens
cactgacttgtgttagaactgcctgcttctgcttccctctccttcttcagcttgttggcactcactctcattcagaggcaccctggctcatgaaatatcatctacaaatatgggaatctctgcaccagccgcacattgttgatggctctggagttgtttataaaaatatccttggcattccctgcccgacgcggtttcgcgtcatgctgcacttgcaggcgagcttcgccagcctgataaagagccctttatttgacctttaggaaagttatgactcacatcaccagctttccttccccttctagagtgtatgttatccataaaaagggtcattataaaggtgttggagaagattaaccctagtcctgggttttaaactttatctgtaggacacagtygaatcagtggtaccttgtgaccctaggaactagttagcttaaatggggacttgttagctcagtcagtaacatgtccattcatcttcggacttgctagtttagcaaggggctgtatggttcagggaggatctggttagccaaatcatgggctggttatctcatatttggattgg

SEQ ID NO: 770076 - DNA, 561 bp, Homo sapiens
attcatcttcggacttgctagtttagcaaggggctgtatggttcagggaggatctggttagccaaatcatgggctggttatctcatatttggattggaaattgtagttggttaatgtacttgtagaatcattaactcaaactkgttatagtgctgggctttgaaagaaaaactctgatatttctttccctgagaggaaggcagtataattctgccagaggcactaactacagacttcaggactaaccccagctagcaaacataccagtgcaaagagtatgaatggatcactgcagtatatcagcatcataggaagaccagctctaagcataagcccaacctttagctcatatctaggacattaggtctatgttgtctttgaacctcaagcagggtaccagtagagagaatagtgaggaccaaatgagatcatgttcacctacgtacttattcagtgatgtttctgagtatccactattgcccagacgttgtgcaaggcactgggcactgaggacacagacaagatggaattgtgcacactgtttgaggatgcctcctagcc

SEQ ID NO: 770077 - DNA, 492 bp, Homo sapiens
tgcttttttgctattatgaataatgttgctatgaacatttgtgtttttgcatgcacgtatattttcacttctctctcatttcgtatctttttttttttttttttcaaatggagtctcgctctgttgcccaggctggagtgcagtggcatgatctcggctcactgtgagctccacctcccgggttcaygccattctcctgcctcagcctcctgagtagctgggactacaggtgcatgccaccacgcccagctaatttttttgcgtttttagtagagacagggtttcactgtgttagccagaatgctctcaatctcctgaccttgtgatccgcccgccttggcctcccaaagtgctgggattacaggtgtgagccactgcgcccggctcatttcatatcttggagtggaatttctggatcatagagtaactctatatttaatcatttggacaaccactagactgttttctaaagcggctgtaccattttaaatt

SEQ ID NO: 770078 - DNA, 631 bp, Homo sapiens
aaactggtaaaacagtataggcacttcccatgaatggcacttgcaagacaggaagtggcactgggtgagtcagcgagtgactaatgagtgtgaaggcctaggatgttactgtacaccgctgtagacttcacaagcactgtacacttaggctacactacatttataaagaatatttttgttttcagtaataagttaactttggcttactttaacttttttactttataaacttcttatttttaaaaaacattttgattcttttgtaacaacactagtcttaaaacacaaagacatcatacaacagtacaattatattttttctttatattcttatcctatgagctgtatttatttaattttttaactttttaaacttttttgtgaataagtaagacataaacactttagcytaggcctacacagagtcaggattgtcaatatcactgtctttttccttcacgtcttgtcccactgaaaggtcttcggagcattaacacgcatggcaccatcatatcctatgataacaatgcctccttctggaatcactcctgaagggtctgtctgaggctgttccacagcgaacttttatttttcgtaagtagaaggagtacactttaaaataactactaaa

SEQ ID NO: 770079 - DNA, 633 bp, Homo sapiens
cttaggggactttaggggcaggtgctggggtggatccataggcaacgaaacagaaactttgaacttgactgattgcaataggcacagagtgcatcaggccagcagcaagagaactctgtccccactcctggattagggtaaggcctcaccagagataggattacaaaagttctaaactgtgagtacgtattaagtactaaggaagaagacaaagagaaagagaagatggtaagggttaaaagcaacaaaaggagaagtcacaaggggggaaggctactccacttatcctaatgttctaagttttatattagatacttggctataaacagaagaaaataaaccttttaatgacaaaaaaattcccaactttggaaagtgctgctaaacactgtgctctagctcatagattgcatatgatttgcaagaacattggcttcagagtgagasataatttaaatgatttatttgacatgtaagtaactaggctaatgaaatcaaataaggataaggaatatactggatttccttcaggtcaggacttgtgatggcctatttttttttttcctgacatttgcttctagatactgaatctaacccttcaaagcttttgctaagatgaagcccgagtcaaag

SEQ ID NO: 770080 - DNA, 633 bp, Homo sapiens
cttaggggactttaggggcaggtgctggggtggatccataggcaacgaaacagaaactttgaacttgactgattgcaataggcacagagtgcatcaggccagcagcaagagaactctgtccccactcctggattagggtaaggcctcaccagagataggattacaaaagttctaaactgtgagtacgtattaagtactaaggaagaagacaaagagaaagagaagatggtaagggttaaaagcaacaaaaggagaagtcacaaggggggaaggctactccacttatcctaatgttctaagttttatattagatacttggctataaacagaagaaaataaaccttttaatgacaaaaaaattcccaactttggaaagtgctgctaaacactgtgctctagctcatagattgcatatgatttgcaagaacattggcttcagagtgagacataatttaaatgatttatttgacatgtaagtaactagrctaatgaaatcaaataaggataaggaatatactggatttccttcaggtcaggacttgtgatggcctatttttttttttcctgacatttgcttctagatactgaatctaacccttcaaagcttttgctaagatgaagcccgagtcaaag

SEQ ID NO: 770081 - DNA, 623 bp, Homo sapiens
aagaccctgtctcaaaaaaaaaaaaatacgctatttaagcatgaggtctcagaaaaatagagattcctgcaaggtatttgataatgtccctcaaattcactagggcaaaaaataagtagctcttatcttgagaatatcatttatagatttagagacaacaccgaggtgcaataaattttctcctagtaatattacgatctgcaaacttgtcaacatttctgtaatatccccttttaggaaaaaacatcctacatggggaggacagataattctctgtccttgaaccaaaggtccttctctggaaaggttgccttttttgacttaaagtccaatcctcagaaagaacacacatgaaatctacctgcttagtgagacaggtccccagaaktgagcctgatacacatggggactgggatgtgatagacaggatgtctcactggggcagggaaagaatcacacatctgggttatgctggagagattatgtcaccaatttttaatatgatagaactaacattgatatcagagatctagattcaacagcatattacattacaagctgtctgctatagctacattacatagggtgtgtggactagcaggaagagtgtttaaaacaatatt

SEQ ID NO: 770082 - DNA, 677 bp, Homo sapiens
ctggttcattatttagttcatttggtgaggttatgctttcctggatggtcttgatgcttatagatatttgtcagtgtctaagcaatgaaaagctaggtatttactgtagtctttatagtctgatcttatttctggttgtccttgaggaggctttcagggtatttgaagggatcggacctgaagccccataatgctgtcagttttgcagactcatagaggtaccactctggcagtcttggataagacctggaagaattctctgaattaccaracagaggctcttgttcttttcccttacgttctcccaaacaaacagagtctctctctgtgtgtgtctctctgtctgtctctctctatctacctatctatctgtctctctctctgtctctttctctcgctctctttctctctctctctgtactgagccatcttaaactgagggtgtggtgatgcaagcatccctgtggccaccaccactgagaccgtggtgggtcagcacctgaagccaacatagcactgggtattgcccaaggccctttccttcacagcaacaagttcctccaagctgcaggcatgtccatggatgttgtctgagagccagagattggagtgaaaaaccttagcaacttacttgatattctactgctgctaagctgtcattcaaatcacaatacaaa

SEQ ID NO: 770083 - DNA, 677 bp, Homo sapiens
ctggttcattatttagttcatttggtgaggttatgctttcctggatggtcttgatgcttatagatatttgtcagtgtctaagcaatgaaaagctaggtatttactgtagtctttatagtctgatcttatttctggttgtccttgaggaggctttcagggtatttgaagggatcggacctgaagccccataatgctgtcagttttgcagactcatagaggtaccactctggcagtcttggataagacctggaagaattctctgaattaccagacagaggctcttgttcttttcccttacgttctcccaaacaaacagagtctctctctgtgtgtgtctctctgtctgtctctctctatctacctatctrtctgtctctctctctgtctctttctctcgctctctttctctctctctctgtactgagccatcttaaactgagggtgtggtgatgcaagcatccctgtggccaccaccactgagaccgtggtgggtcagcacctgaagccaacatagcactgggtattgcccaaggccctttccttcacagcaacaagttcctccaagctgcaggcatgtccatggatgttgtctgagagccagagattggagtgaaaaaccttagcaacttacttgatattctactgctgctaagctgtcattcaaatcacaatacaaa

SEQ ID NO: 770084 - DNA, 526 bp, Homo sapiens
atagaggaatgtgttagatgacaccagaagatcaatctgccaagtctagaatgtgagaaaattctttaggacaaatgatctatttcttcaacaaataaacgccaagggagaaaaaaaaagaagtaaaggatatttctataaagacttaagaaagatatcaactaaacgtaatgtataaccctgtttggatatagcgtcaaataaaccaggtacaaaagggcatttatgatacaattgagaaatatgaaaactaactggatatttcacaagsaatagtaaactgttacaaattttgggggggactgtgataatagtactgtgtgtatgtaggattttgtgtgtatgtatgtttaattcttatcttcaaagatacataagtttttacagatgaaatgctactatatttgggacttattctaaaacaatcatgtcattaagctgaattttgaggagcaataaaaaagaaaacaaaaataaaaactaaggccaggtgtgatggctcacatctgtaatcccagcactttga

SEQ ID NO: 770085 - DNA, 524 bp, Homo sapiens
  misc_feature 1, 2, 3, 4, 5, 6, 7, 8, 9, 10, 11, 12, 13, 14, 15, 16, 17,18, 19, 20, 21, 22, 23, 24, 25, 26, 27, 28, 29, 30, 31,32, 33, 34, 35, 36, 37, 38, 39, 40, 41: n = A,T,C or G
nnnnnnnnnnnnnnnnnnnnnnnnnnnnnnnnnnnnnnnnnggttgaggtgagctgagattataccattgcactccagcctggatgactacgtcttttaaaaaaaaaaaaaaaattataaatattgttaactttttaatttttacaacattctaaagatgtctcctggaaccctaacttcaagatacctagtttgaaaaacattaattaatgacaaatcttatttttatgaatttaccaatgcaaacgacaataacaattagatgctactaattagcaaattatcttactttcccarccaaggtttatttgtgagtggcccttccaaaccactcatagctctttttcgactatctggttcaagaactactctggttatgttgctattaatcgaaacaggaactggtggttcagtctggatcacaatgttagcagctgttggaaaaaaaaattgaaattactgagtttttcaggagtctcaatgattaatatatttagtctaaaagctaaaaactactatgaata

SEQ ID NO: 770086 - DNA, 634 bp, Homo sapiens
gcagtaaattattcccccaactcagtttcaatctctctctataattcttcttctacttctctttctactattgactgagacttgagctaaccggcttctgttttagcagttattcctgtattatggctcttgtttactgaaaacctttcatgacttttcttctgygcggccatgtcgtctgagtctctctattctttgtatccaagttcttcaagaaaaaccgtctagtcgggcaaataattatagtacagcatagagtacctacaatgaatggatgtctaagtttaggacatacctcaaaggctgtgtaggtcattgtagagttgagtgcctttggtgttgttataatgtggtctaaagcttagtcacataggcattagaatctagcatctttggttatgtaaaagtcacttatttcttttatgagcattgaattgtgagtagacaattcaagcaagttaatgagtgatatgaacgaaagaaatgactaagagaaggaggaagaagaagagcaggaacaagtggcttgggaaaagtttattaaagtaatacttggcatgctttttatgttttatttgaaactgacaataatataactttctaggaagaattattttttagctcttgaagaaac

SEQ ID NO: 770087 - DNA, 634 bp, Homo sapiens
gcagtaaattattcccccaactcagtttcaatctctctctataattcttcttctacttctctttctactattgactgagacttgagctaaccggcttctgttttagcagttattcctgtattatggctcttgtttactgaaaacctttcatgacttttcttctgcgcggccatgtcgtctgagtctctctattctttgtatccaagttcttcaagaaaaaccgtctagtcgggcaaataattatagtacagcatagagtacctacaatgaatggatgtctaagtttaggacatacctcaaaggctgtgtaggtcattgtagagttgagtgcctttggtgttgktataatgtggtctaaagcttagtcacataggcattagaatctagcatctttggttatgtaaaagtcacttatttcttttatgagcattgaattgtgagtagacaattcaagcaagttaatgagtgatatgaacgaaagaaatgactaagagaaggaggaagaagaagagcaggaacaagtggcttgggaaaagtttattaaagtaatacttggcatgctttttatgttttatttgaaactgacaataatataactttctaggaagaattattttttagctcttgaagaaac

SEQ ID NO: 770088 - DNA, 557 bp, Homo sapiens
tgagcaggtggaggagccggggtgaatgcctttgggaactgacaggaacaaaccctgtaccaacccgtggcagcatctaggggttgcccgtgacctctggagccccacagggcatgtgttacaaacaatgctcttctagcatttgccgtctgcagatggctaagtgttaaaccagctcagtggagggtcacgatgacagccttttacaccctgccctattggtacctgggttcttgtctggcatccaggaagaatcaggtcacatagacttgaaggatggtaaatttggagattttattgagcagtggaagtagctttcagygggatggagagctggaaaggggatagaatggaaagataatcttcccctggagtttggccatccccagccaaactcctctccatagtctctgatgtccagctgcctcttcttctcttgacattcagacacttctctctttctctgccaagccactctgttcctctgccagtggagtttggggtttttatggacacaggatagggggtgtcatgggccaaaaggtaacattcaggtg

SEQ ID NO: 770089 - DNA, 464 bp, Homo sapiens
taaaaggcaagaaaaaagaaggcttcttatttctaatttccagataagatatcccctaccttgtccctggatgatagaactggatattgtaaaataatagtaattagtatttgaatgccatttaactctttataaagcaccttaactgatatttgcttattcataattctgtaagttcttccaaaattactatacactttgaggctggtggtgtgatgtgtgaagatgagatagaggaagtaagcgtggaggatttggatttgcaaaaacattygataatgtattgcttttcattggtctcaaggaggtctatttctaggagtattgagaaagatatatatgtgtatatgtttacccatttaccagaaaatgggtttacttctctaacgttttagcaataaaaagaattccagatatgcagcaaataaatctgactgttagtcagccctcaggagctgctgata

SEQ ID NO: 770090 - DNA, 600 bp, Homo sapiens
aaccctcttttcttgacatccttcctgggatggactgaactttgggactggaccactagaacaagccacacaataagtggttccttgaagggtcccttaggaacaatcattagaagagcccaagtccacagttgttagagaactcagactctctggaactagccacaaaacttgagatagagatcaaaagataaaggagggcagtctggtattgaggggccctttcatttccaaatcattagattcataattgccctttggtgtttttcaaaatgaatggaaagctcaggctgggtttggtggctcaggcctgtaatctcagctctttgagagggcgaggtgggtggatcacctgaggtcaggagttcgagaccagcctagccaacgtggtgaaacccsatctctactaaaaatacaaaaaaattagctgggtgtggtggtacacacctataatcccatctactcgggaggctgaggcagaattgcttgaaccggggaggtgtaggttgcagtgagcggagatcacgccactgcactccagccaggtcaacaaagggaaactccatttcaaagaaaaaaaaagaatgcaaagttcaaagt

SEQ ID NO: 770091 - DNA, 605 bp, Homo sapiens
gaagtaacggcatcagtactggtgcaatatatgaggtcagagaaaaatagacccagacctaaaacaggggttagggggaaggttaggagtaaaggatggccaggaagactattaatatcacagtgataaaacagacatgctagttaaggcaaacaaatggaatcagtaagtgaggaaaaatgtgaaaagtcatggcttgggacatgctggtataatcggttatatataaagaaatcaggaggaaagcatgcccagatatcttaatgttgagatagagccaggataatcttaacagtgatgtccaacatatactggaccttttgatctggagttccaggraaagaccaggtttagagatgttgggtttgggaattctcagaatctgggtaataactagagccatggataagaaaatggaaatgcaaggaaactagaactgcactgacatacacaggtgggcgatgatgaaacatgggaggtggaagtgactgaacaaatgaatcaggagaagacagccaaaacagaacccatttacactgtagaagtgaaggaggaagagaattataaggaagacttgccccatggcatcaaattctttccatgtc

SEQ ID NO: 770092 - DNA, 567 bp, Homo sapiens
gctaacagaactttaagaatcaatctttcaaaatagctcaaatatgaaggtcaatgtaacataaaagctcctcatttttcaagcaactttatttggaccatggctgaaaacgaatccaacatacagccatttagcctttgtgtgactctgtgccagacaaaatatttttcataagcaatggaaaaaaaaggatcactttaaccttctaaatttcaaataatttacataaaggagagctcctaacctgtcacttaagagatattattttcttaaaattaaattataacaagattccctaaccaatagcagataagcagtggaaaactgggcccaagaactcactcacccactcaacaaactagcagtgcacacatgtgtcaggcaccgttcttggtgctgggggttrcacaatgtacaaaccagacaaggtccttgccctcattctttcagaactcatgtctatatgcatcagaatcacctgaggcatctatgtttctcaaacagatttctgggcccgactgtcaaggaatccaattggaacggggcccaggaatctatattttgagc

SEQ ID NO: 770093 - DNA, 594 bp, Homo sapiens
aaatagagaagttgagcccaagggctcttccttcacccaaacagtaagacaatcctccctactttccaccactaacactcccaagaaaaaataaaaacaaaaaaactgaaaaaacatctccgaagatattaaggcttttggagaaactgaatttgagatcaaaggaacatccacagggaaatgtctggaacattgataatcaagtctggagctctagatggatgtcacgtaaagacacaggagccaaaagatgaaccaaaggatcggaagatattacttcagaggactgacactgaggagaactgaagattttgagaaacatcttcrtgaaaaagtatttagccaaaagaaatcagtgatggaaactgaaggaagtagccagaggtagggatgggaccaagaaaggacaatatcacagaagcaaagataaaccaaagaacatttctaaaaaggagagaaagacttgaaaaaaaagtgtttcaactggttaaatagaatgagaactagggaaaggttactgaatatggtcagcaaaaggtcactggtgaacatgaatgtaactggtttcatggaatagctttcattcaatcagcg

SEQ ID NO: 770094 - DNA, 503 bp, Homo sapiens
ctactcccatcaagctaacattgactttttttgcagcattagaaaaaaactactttaaatttcatctggaaccaaaaaagagcccatatagccaagacaatcctaagcaaaaagaacaaagctggaggcatcatactacctgacttcaaactatactacaaggctacagtaaccaaaacagcatggtactggyaccaaaacagatatatagaccaatgaaacagagacctcagaaataacaccacacatctacaaccatctgacctttgacaaacctgacaaaaacaagcaatggggaaaggactttctatttaataaatggtgctaggaaaactggctagccatatgcagtaaacagaaactgaaccccttccttataccttatacaaaaattaactcaagatggattaaagccttgaatgtaaaaccccaaaccataaaaaccctagaagaaaacccaggcaataccattcaggacacaggcatgggcagagacttcatga

SEQ ID NO: 770095 - DNA, 586 bp, Homo sapiens
acagaactacgagataataaatggctgttgctttaaaccactatgcttgtggttatttattattatgcagcagtagaaaatgagtacactgttaatgatccaaagttgtacatcatttccctggctcatcagaggctaggagagtagatagtaacarcatgtgattattattttgctttttatctgtcccagaaagggaagcacaactcagggaattttgtggtcccagaggatggctgggttcattcttatgaccctctgcaggaagattactgtcatccccaaataccctcttcagcaaagtccctagaaaagacttcttaaattttgtcatcctttaggcttctgcttaattgaaataaagagaaacttcccctaatcactgagtctattgttgtccacctctcagaggcgcttcatagtgctggtccgtgattatctttcttatttgctttctggtttgctactatgctctgatttgaaagtaagaaacatgaaggcaaggaccttgtttattttgctcactattttatctccagagccagtacaagtggctggcaatgaatgaacaattgctacatgaaag

SEQ ID NO: 770096 - DNA, 544 bp, Homo sapiens
aacatgatagagactctccactgctggctaagacagagggagccatgtggcaacaaatagagtgtattttagtggccaagaatggcagcttcagatggcagccagcaaggaaatgggagcctctgtcctacagcaacaaggacstgagttctgccaacaaactaaatgagctggggagaggatccctcgttccagatgagatgagcttgagtttggtaaacattatgatttcgagcttgtgagtccctaaacacagagcctagctaggccatgctcagactgctgactcatgtaaactgtaaactaacaaataggtgtaattttaaactgctaactttgtgtgagtctgtcttagagcaataaaacacaagtacagaataattgcctacatggagtttctgggtagttaggagcatgagagaatctctctggggctttctggcacctggaaggccttccctatggactggcagaatacttcctgttcgagcaagtctctccaaagcaatggggatcatgaaaaactgaactcattgacaatccc

SEQ ID NO: 770097 - DNA, 574 bp, Homo sapiens
cactagagtgcctaatttcattcttggcgcatagaggggactcagtagttgtatttttgattctcactgattctaagtggcaggtttgagactggaatctaggtgtacacaatccccaaaactcttctttttctgctgtggcaagctgctcctcagcctggattctcacctgccacaatgttctttttgagggtatttttcctccctggaagctcttactttataagaaamgataggttcatccactccggccacctctgtaacgatcagtaattcgtggtggtttctagatcaaagagttcgggagcgtgcctgggtggagtgtgggaaccctctggatgtttgctggaacgctgctccacactgtgtacctgggagggtaatctttcatcctttctgagccttccttagaagcctatcaaacaactccatgccttttccttgtcccttttatcgccctcgggagcaaagttgggacttgtgcaactgcagggctcttttctgtgggaacaataatctcatttcaatatgtgtgggtgggtagattatacgttatgggcttggagctcatttg

SEQ ID NO: 770098 - DNA, 560 bp, Homo sapiens
gtaatatgaaacaaacaaaataatatgaaagcattataattagttggatggcacatttattatattttattttatttataataagcgcttttgatcttgggaaaaatgaatgaggattctgcatttatctgtaatccttaacactcaataaatttcttttctgtttccactgtatcatttagactgacttaaaatgtgatatgaattcattcattcattcaccaattatttttgaatgcacacttttaccaaacactgtacttttttttttttttgagatggagtctcactctgtcgctcaggctagagtgcagtggcacaatctcggctcactgcaacctctgccccctgagttcaagcgattctgcctcctcagcctcccgagtagttaggattacaggcgcctgccaccgyacctggctgatttttgtatttttagtagagacggggtttcaccatcttggccaggctggtcttgaacgcctgatcttgtgatccaccagccttggcctccaaaagtgttgggattacaggcgtgagccaccgaccctggcccaaac

SEQ ID NO: 770099 - DNA, 596 bp, Homo sapiens
tgtggagtgtttaataaattcagtaaatgatctgtaagaccctcaaagtttgtgtgcaatctctccaaaattaaggatgtttacaaagcgaaaatgtcagtgatctgtacccattttcagaatgaataaataaatcagttaattaaaagttttagtacttaaaaaatctgttgtttatttaggctactttctgtcaaaagcaaagggatagttatcatttgacacacttttttttttttttttttttttgkccacctgcagagtaatggtcaaaaacagtgatgtggctcctggtgtccacggagtggtccaggttctctttattcatcataatagccaattggaagcaggttcatggagggttgtagaatagagtatggttaccatccctgcagggaaaggtctcagacccgacgtggaaatggcaatgaacttaggcatctcatgctctttgtggtgtgacttcaggaaggcacttggtgtgttcactcccaccatgggaaacttggcaaaatacacgagggccttctacacacaagctgagccctgggtcaccctgggcacacttgacatgggctgtatcagtggtggtcaag

SEQ ID NO: 770100 - DNA, 616 bp, Homo sapiens
atttttttttgcatggatccaacgcattaagagaaacatgatgtaagtttattccattagtgataatattatgttttctcatctgatgaagtccatgtccagcagattttccattgtaaaggcatctttttttttccgttgtagttaataaattatttggagtgaaacttcaagaatatgtaattatcctgttctcaaaacattttccrtcaatggtaactatgtattttatcttatatccaatctttattcaaaactttacatttacctcataaatatcctaagttgtttgtttgaatcatgatccagaccaagttgaaatattttatttcattaaaacatttattggtacatatttgtacatttttagtgggtatatgtggtatttcatttcatgcataggatgtgtaatgatcaagtagggtatttagagtatccatcacctcaagtgtttattgtttttatgtgttggaatatttccatgtgttgggaatcctccttttttttagcagttttgaaatatacaatacattattgttaaatatagtcaacttactctgctatcaaacattataacttatttcttatagataactgtatgtttgtacccactgat

SEQ ID NO: 770101 - DNA, 584 bp, Homo sapiens
ttcaagtgtctggagtgttgtatgtttgtttttagcctaggaaatctttctccaaaaagcttgatcggaagcccaatgcagtaaaaaacagacaaaaatcaaagctgcttagtgaaatccagaaagtcaatgaggatctcaaagccgagatggaggcccagctcctcccagcagagcccctgagaagccgccgctagtgaagccctaggtctcaggtggcacatgatgaccattactggtctagcgctttgtgttttcttgggtagcattctttttatctgtagcgctatcatttactgctatcctactacatgccaggcacaattccaggtagcctacgtacrtaactttatttaatgaattttcctaacattcttacccaaggatatttctatttccattttacagtgagaaaaactggaatttggggaatttattagattttccccaaatttccagaatgagtaaaaagtagaattgggattcaaatccagtaccctctgatgccaaagtatccgcccgctattttgtactgctttcctaaggcagaaatcgtctgattaatgagttgtaactatttaaat

SEQ ID NO: 770102 - DNA, 600 bp, Homo sapiens
ctgtaggtttgttataaatagctcttattattttgagatgtgttccatcaatacctaagtttattgagagattttaacatgaagggatgttgaattttaccaaaggccttttctgcatctattgaaataatcatgtggtttttgtctttggttctgtttatgtgatgggttacacttattgatttgcatatgttgcatatgttgaatcagccttgcatctcagggatgaagccgacttgattgtagtggataaggttttcaatgtgctgctggattcagtttaccagtattttattgaggattttcgcatcaatgttcatcagggttattggcctaaagttttcgttttttattctgtctcttcccggtttgggtatcaggatgatgccagcttcataaaatgagttagggaggratccctccttttcagctgtttggaatagtttcagaaggaatggtaacaactcctctttgtatttccggtacaattcagctgtgaatccgtccggtcctgggcttttttgtttggtaggctattaattactgcctaaatttcagagcttgttattggtctattcagggattcaacttcttcctggt

SEQ ID NO: 770103 - DNA, 528 bp, Homo sapiens
tattaatagaaaaggggaaaagcatgcagccactttggaaaacagtctgatggtccctcaaaatgttgaacacacacttaccatatgattcagcaataccactactagcaataccactacacaagagaaatgcaaacatatatccatgtaaaaacttgtacatgagtggtcatagcagcattattcatatagccaaaaaatggaaacaacccatgtattcatcaattgaggaacagttaaacgaaatttgtcacatccatataaaggactatttggtcagaaaaaggaatgaagtactgatatatagtacaacttggargaaacctgaagagattaagttcagtgaaagaagccagtcacaaaataccccatgcaggatgattgtgtttatatgaaatgtccagaataggcaaatctataaagcttggggaagaaaataagaaggtgactgctaatgagtatggagttccttcttagagtgatgaaaatgttctaaaattgattatgatgatggttgtacagctcaat

SEQ ID NO: 770104 - DNA, 621 bp, Homo sapiens
cctggatcctatctgcctgacttgatatgagcctatccagtgagctcagtcatccagcaattagagactaactgtgatggatgaacacattaattatttggcaactctgccaggcactgttttggacattaaagatatggaggcgatcaagatagatatggtctcttccttcatggaacttttggacaacaggaggctagagacatgtagcagaaaattttatcccaactctgataataactcagacggagaaagcatgcttytgacatattatacaagatcctcctacactagctgcagataataaaatatgcatttagaatcctttccatagtatttaaagtgccgatgaaatggttattcataatgttttatctgctatctttattttattctttttaattttccttactattaatattaacttctctggtaaaagaagaaaaataaaataaaccccttccaaatttttgtgaagccaggagaaaaaaaaaaaaaaacagagatatccactagcaacttgcaaagacaaaagggagttctaggggtaataaaacatacacttgacaaccgatattatccactggtgagatattgttcataaatccacagcctgaaatt

SEQ ID NO: 770105 - DNA, 641 bp, Homo sapiens
ttcaagaccagcctgggcaacataaagagacctcatctctacaaataaaaaattatctgggtgtggtggcgcatctctgtagtcccagcttcttgggaggttgagggggaagaatcatctgagtccaagggttccaggttacagtgcactatgatcatgccactgcactcagcctggacagcagagtgaaatcctgtctgaaataaagaaatgaaaggaaagtcctagttttatagaattcttgggatatagtacctaagtaagagctctctatagtaacatgttctgatgacacctgttttgctatggcacgccacctcccacctggttaaaagcatgtattttgcttatattttttaatcaggattgagtgaccaagtctattggaagggaatatgttgatcccttttccaacaaagaagacagggtcatagttagacctagtcatgggaaggaaagaccgcacrggagtctaggaaagtctagccgaggaaagactgcacatttattgtaaataccatgatttggggtaaaactctatagcttccaaattttattataagcgtagacattaaaaaaaaaagatgaaaatcaccccagggtccaagaaaatcaactgagggagtgaggcatctcagtct

SEQ ID NO: 770106 - DNA, 660 bp, Homo sapiens
catatttgctcctgcgagagtactgatgttgacggcagataccacagaaaagtggagtgagaccaggagctaaaatgcaggattagttgacacctgtatatggaacatacaaacccccagagtctcttgccatcacatggggctggatgacacctcccacacacagagtgacttgcataccccacctcagacaggagktagcaggcttattctcaggacaaataaaaaggaagtggtttgggactcaaagacatcttgtgcagtaaagggcaagatgaaacatgagatttaaaagaagtctgtatgcaaatgatgggagccccactatttcttcctgcttcccaaaactcctatagccaggctatttttcacaggaaagaaaattgaccttaaagaaaatacataaatatatctttccatattaacaattaggagttccccaataaagtaaattagttttttgaaaagcaccctgcagtgaagacaatgcttctcaaatgctcaatgggtaacacattccactttatagtgccccactgcaatctaaaaggatattcaagcaaggaccactaataactgaagaaagacacccaaacaaaacaaacagaaaaaaaaaatccacgcagataaaacagacagtgagaaaataaaagttctaaa

SEQ ID NO: 770107 - DNA, 660 bp, Homo sapiens
catatttgctcctgcgagagtactgatgttgacggcagataccacagaaaagtggagtgagaccaggagctaaaatgcaggattagttgacacctgtatatggaacatacaaacccccagagtctcttgccatcacatggggctggatgacacctcccacacacagagtgacttgcataccccacctcagacaggaggtagcaggcttattctcaggacaaataaaaagraagtggtttgggactcaaagacatcttgtgcagtaaagggcaagatgaaacatgagatttaaaagaagtctgtatgcaaatgatgggagccccactatttcttcctgcttcccaaaactcctatagccaggctatttttcacaggaaagaaaattgaccttaaagaaaatacataaatatatctttccatattaacaattaggagttccccaataaagtaaattagttttttgaaaagcaccctgcagtgaagacaatgcttctcaaatgctcaatgggtaacacattccactttatagtgccccactgcaatctaaaaggatattcaagcaaggaccactaataactgaagaaagacacccaaacaaaacaaacagaaaaaaaaaatccacgcagataaaacagacagtgagaaaataaaagttctaaa

SEQ ID NO: 770108 - DNA, 644 bp, Homo sapiens
aagggcaagatgaaacatgagatttaaaagaagtctgtatgcaaatgatgggagccccactatttcttcctgcttcccaaaactcctatagccaggctatttttcacaggaaagaaaattgaccttaaagaaaatacataaatatatctttccatattaacaattaggagttccccaataaagtaaattagttttttgaaaagcaccctgcagtgaagrcaatgcttctcaaatgctcaatgggtaacacattccactttatagtgccccactgcaatctaaaaggatattcaagcaaggaccactaataactgaagaaagacacccaaacaaaacaaacagaaaaaaaaaatccacgcagataaaacagacagtgagaaaataaaagttctaaaagtaaaatatacggcctggccaaaagaccagcctggccaatatggtgaaaccccatctctactaaaaatacagaacttagccgggcatggtcgtgggcatctgtaatcccagctacttgggaggctaaagcaggagaattgcttgaacccaggaggtggaggttgcagtgagcccaagatcgtgcattgcactccagcctgggcgacagagcgagactccgaaaaaaaaaagaaaaagtaaaatacagt

SEQ ID NO: 770109 - DNA, 644 bp, Homo sapiens
aagggcaagatgaaacatgagatttaaaagaagtctgtatgcaaatgatgggagccccactatttcttcctgcttcccaaaactcctatagccaggctatttttcacaggaaagaaaattgaccttaaagaaaatacataaatatatctttccatattaacaattaggagttccccaataaagtaaattagttttttgaaaagcaccctgcagtgaagacaatgcttctcaaatgctcaatgggtaacacattccactttatagtgccccactgcaatctaaaaggatattcaagcaaggaccactaataactgaagaaagacacccaaacaaaacaaacagaaaaaaaaaatccacgcagataaaacagacagtgagaaaataaaagttctaaaagtaaaatatacggcctggccaaaagaccagcctggccaatatggtgaaaccccatctctmctaaaaatacagaacttagccgggcatggtcgtgggcatctgtaatcccagctacttgggaggctaaagcaggagaattgcttgaacccaggaggtggaggttgcagtgagcccaagatcgtgcattgcactccagcctgggcgacagagcgagactccgaaaaaaaaaagaaaaagtaaaatacagt

SEQ ID NO: 770110 - DNA, 596 bp, Homo sapiens; identical to SEQ ID NO: 757228

SEQ ID NO: 770111 - DNA, 643 bp, Homo sapiens
atccccttctgcatattagaaacaataacactgtggaggtgtacaccccctgcgatattgggagtaatatcagcctttagccacctggatatcaggaacaatatcaaaggggtggtgtaccccccccctgcgatattgggagcattatcatcctcttctcgtctggatattaaaaacgatgtaatgggggggrgtacaccccttgcgatattgggagtaatatcatcctaaccccttaaacattaaaaacaatatcacagaatgggtttacaccccctgcgatattaggagtaatatcatcctctcccttcctggacattaggaacaatatcacaggaagggtatataccccctgcgatatcgggagtaacgttatactctcccctcagatattagaaacaatattagagtgggagtatacacttcctgtgatattgggagtaacatcatcctctccccctctgcatattagaaacagtatcacagggtgggtacacacccactgcgatattgggagtaatatcaatctctcctcttctggatattaaaaacaatatcacgagggggtgtacaccccctaggatattgggagtaatatcatcctctccctcccttgatattaggaacaatatcacgggggggt

SEQ ID NO: 770112 - DNA, 643 bp, Homo sapiens
atccccttctgcatattagaaacaataacactgtggaggtgtacaccccctgcgatattgggagtaatatcagcctttagccacctggatatcaggaacaatatcaaaggggtggtgtaccccccccctgcgatattgggagcattatcatcctcttctcgtctggatattaaaaacgatgtaatgggggggagtacaccccttgcgatattgggagtaatatcatcctaaccccttaaacattaaaaacaatatcacagaatgggtttacaccccctgcgatattaggagtaatatcatcctctcccttcctggacattaggaacaatatcacaggaagggtatataccccctgcgatatcgggagtaacgttatactctcccctcagatattagaaacaatattagagtgggagtatacacttcctgtgatattgggagtaacatcatcctctccccctctgcatattagaaacagtatcacagggtgkgtacacacccactgcgatattgggagtaatatcaatctctcctcttctggatattaaaaacaatatcacgagggggtgtacaccccctaggatattgggagtaatatcatcctctccctcccttgatattaggaacaatatcacgggggggt

SEQ ID NO: 770113 - DNA, 414 bp, Homo sapiens
acttcaatgaaggtctgttaaagtctttggcgtattttaaaaattgggttgttggttttcttttcttttctttttctgtctttttttttttttttttttttttttttgaaacagtctcactctgttgccaggctggagtgcaatgatgtgatctcagctcactgcaacctccacctcccaggttcaagcaattcttgtgcctcaacctcccaagtagctgggactacaggtgcacsccaccgcacccagctaattttttttgtatttttggtaaacatggggtttcaccatgttggccacgatggtctgatctcttgacctcatgatccacccacctcggtctcccaaagttttgggattataggcatgagcccccacccctggccaggttgttggttttctaattgctgagtt

SEQ ID NO: 770114 - DNA, 555 bp, Homo sapiens
tatccctttcttcttccaagcgattgcagtgaagttgccactgcttttgcctatctgatgacagacatgtggctgggagactcagactgtgtctcaccagaaatattctggtcagctcttggcaacctctacccagcatttacgaaaaagatgcaacaagatgctcaggaattcttgatttgtgtcctaaatgaacttcatgaagctctaaaaaaggtaagtagagttaatgaccttgaaataggatagtcctgaacctttatcagcagcttccatttttcattcttttacttgttcaattaatattgtctactttgtgccaagcactgtgstaggtgtcccatggagaacatccaagttagtatttgaatgtgtagctgtatttaccaaacttacttgtcatcagaatcatctgggaagattttacaacacagattttaaggcaaatactccaagggtaattaattagaatgtcttttgggaaagcttacttggcatttccagtggtcagctaggctttggaaacactaatctacttttctttgtaaatagagg

SEQ ID NO: 770115 - DNA, 610 bp, Homo sapiens
aattaggacatacatttcattaaacatgaaatcatcagttactctagaggttttgcctttatttacaaaactcactgcccttagccttggtctgagacccacattctctgaaaatgtgtccttgactttatgcaacrtccttctgctaacattacctcactgcacctctaatacccagggaatggttagcataaaggttgcaaactatagctattaattgttctcattggcagatctcagttccatttttcatttagagtaataaaaaagtactcatggccaggcgctgtggttcgcgtctgtaatcctagcactttaggaggctgaggtgggtggatcacttgaggtcaggagttcaagaccatcctggctaacacggtgaaaccccgtctctactaaaaatacaaaaatcagccaggcgtggtggcaggagcctgcagtcccagctactcgggtggctgaggcacaagaatcgcttaaactcaggaggcggaggttgcagtgagccgagatcatgccactgcactccagcctggacgacagagcaagactccgtctccaagaaaaaaaaaaaaaaaaaaaattgaaagggaaaaaaaaaaacaaaaac

SEQ ID NO: 770116 - DNA, 714 bp, Homo sapiens
  misc_feature 638: n = A,T,C or G
atgtctttttattcctgtatcattaaccattccatgcccttatgctttaggtatttatattagaaatggaatgtagctgggttttattttttatcaatctatcacttttttttttttttttttttgagacggagtcttgctctgtcgccaggctggagtgcagtggcgcgatctcggctcactgcaacctccgactccstggttcactccctggttcaagcgattctcctgcctcagcctccggagtagatgggattacaggcacacgccaccacacccagctaatttttgtatttttagtagagacggggttttaccatgttggccaggatggtcttggtcttctgactttgtgatccgcccacctcagcctcccaaagtgttgggattatacgtgtgagccaccgcacgcggccaaatctgtcaattctaattgtctttttttcaggttttttttgctttgttttttgagacagagtctctcactctttcactcaggctggagtgcagtggcctgatcatggctgactgcatcctcagcctcctcggcttaggcgatcctcctgcctcagacttccaagtagctgggactacaggagcacatcaccatacctggctaattttttagcttttggaanagaaatggcgtttcaccatgttttccagggtagccttgaattctgtctaaaaggatcctctcaccttggctcccaa

SEQ ID NO: 770117 - DNA, 556 bp, Homo sapiens
acagggtagtaagtaagcccttaatcaaaaggcctttgaaagcagaagaagcaattttcattccaatatgagattttaagttctccaactcttaaggatttgaaatgcgaaatttctttatgttaagaaattgtttttaagaacatgtgcctggcatatcccatgtcaggggaacataccagaggaactatagamataattcctgatgccagtaaaagcaaaaacaaataagcaacagaacagatgctagagtgtgctcaagttattcagtagcttgatgaggtacttttttctcatattgggtttttttgattgctgttttgctttgttttaaggtagtgtctcgatacattgcccaggttggtcttgaactcgtggacccaagcgatcttcctacttcagccttctgaatagctgagactacgagtgcacaccactcacctggctcagattagtttttaatcttcttgtcttttcttttctttctgaaactgggtcttgctctgtcacccaggtgcagcggcatgatcttggctcactgcaatctctgcatcct

SEQ ID NO: 770118 - DNA, 586 bp, Homo sapiens
caggtgaccttggcatttcctctcctggccactccagtgcctctggatccctccatgctgttcatgggatcaccattttttttgagttctcatccttttggttttcagacagatttccacccttcttgacgtctcagcaatatctttgacctctcccctcgttttatccaccctcagccaatcagaggcaacaccagaactcccaatctctgcccaacccccactcccaarttcctgcagcaatcaccctgtactacttccccttgtaggggtgccactgaatctttcttctctgttatatgtaacaacgatgtcttacttaattttgcttccccacagcacctggcacagggcttctcacccagttggcactgaggaacatttgtggaatattcattgaatgaattttggatgcagtagaaccattttaaaacagttttatgttcctaaattcctacatgaatattttgcattaagagcataggttctggcgtcaggctgcctggattctaatccttgctctgccacctcctacttgtgtgatcttatgcaaatcaaccttggtttcctcctctgtaagatggaa

SEQ ID NO: 770119 - DNA, 452 bp, Homo sapiens
ctttgaactaactggagcactcagtctgtcttggtgaatttgcaaagaggctacctacatacatctttcctctaagcttcagattaatcaacatgactgcttatacggttaaaacattctgtgtttcctgtatttgctggctagacaaagggkttatttacactgtggttgcttgtttgtttgttttttactttattgagcctttttgtgattagatttaaacagtataaattgggaagctgggggaaacaaggcagggagaatagagagctacaaggattgagttatgattctgacccttcctgatggttcctcatccctatcccctcttatcagtaagcagtaatggcacatttgacctttatttaaatgaacacaccaaaacagaggacagtatgaaaactatgactgtgtcttatttacctttgcaccctcacgacttggccatgtag

SEQ ID NO: 770120 - DNA, 599 bp, Homo sapiens
aactgttgggcaacttttgggaaatattattgtcttggttcattttctgctgctataacagaataccacagactgggtaaattataaacagtagaagtttatttggctcatgatttcagaggctgggaagtccaagaggatggcactggtgtctagtgagggtcatctgatgatggaaggcagaaagtgcaagtgagcacacaagacagaaaactgggccaaacttcatccttttattaggagcccactcatgtgataactgcccacatccatgacagtggcattaatccatrcatgagagcagagattaagtgtcccacattttattaggccccatctcccaacactgttgtattagggattaagttccaatacatgaacttttagaggacacattcaaaccatagtattcctcctctgcacccccaaatttacctccttctcacaatgcaaaatacattgatttcatcccaatggttccaaagccttaactcatttcagcatcaactcaaaagtccaaagtccaaaatctcatctaaataagatgtgggtgagactcttaaggcatgattcaccttgaggcaaataccttccaactg

SEQ ID NO: 770121 - DNA, 638 bp, Homo sapiens; identical to SEQ ID NO: 746045

SEQ ID NO: 770122 - DNA, 544 bp, Homo sapiens
cacagtgcctgcttgggtctctttcaaatatgcttttctttccttcctgctctaaagctttttaataaatttccactcctgctctgaaacttgcctcagtctcttttgctgccttatgcccctctgtcaaattctttcttctgaggagacaagaattggggttgctgcaggcctgtatggatttgctgctggtaacctggatatttgccacccctaasaatttctacttctacaattttgtctagattagttttatctagaattccagatagatggaatactacagcatgtagtattcctttgtgtctgattcccttgtgtctgatccatcctttttatctgttatctttcactcagtatgtgtaatgtttgtgagattcatttatattgttgttataatagtaagtattcctttttattgctaaatagtattccatagtataaatatatcacagtataagcatgtattcttccattggacatttgcatttgttgtaataacccagtttaattgtttccagtttggatattatgaatgaaactg

SEQ ID NO: 770123 - DNA, 618 bp, Homo sapiens
ttgaggagatgaacttcaattttaaaagaagttcgactgtgggcaaaatgccatcaaacagcatcatatgctacaaagaaatctttcatgaaagagttagtcaatgtagaaaacttcactgttcttttattttaaaaaattgccaaagccatcccagccttcggcaaccaccaaccccatcagtcagcagccatcagcatccaggcaaagccctcaaccagcaaaaagactccaacttgctgaaggttcagatcatccttagaaatttttagcaatcaagtattttttatatgcacattattgttattattatttttattayactttaagttctagggtacttgtgcacaacatgcatgtttgttacatatgtatatatgtgccatgttggtgtgctgcacctattaactcattttcattaggtatttctcctaatggtatccctctccccagcccatgacaggccccggtgtgtaatgctccccaccctgtgtccaagtgatctcattgttcaattccccccatgagtgagaacatgtggtgtttggttttctgtccttgcaatagtttgctcagaatgatggtttccagcttcatctatgtctctacaaaggacac

SEQ ID NO: 770124 - DNA, 618 bp, Homo sapiens
ctgcagtaataaagtcagtgtgactatcgacacaaagataaataaagcaataggtcaaaatagagagtcagaaaatatgtatgggaaaaaatgaactttccacactatcccacagtatgccttaaacaataataattggaggaaaaccatmaacataagtctgaaagtgaaaaacaatcttcagaataaaacagtagaatatctttatactctggttttaggcaaagatttcttaaacaagctacaaagaactactcataaaggaaaaacaagataacttgaacctggtgaaaattaagaacttgtgttcatcaaaagccaaaattctaaaaagtcattagttaacctacaccttggtggaagtctttgtgacacattcttgtcttgtgtttcccagtatcccatgtgcagcccagtgcctgacacccagaggtgcaaacaaaagatgtgctttctccctgcctctcttccttcccccatctggtggccttatgcttgtcttgcgggcatgaatttctgtatcagcaaaggaatcaacgttccactatgcctggtatgaagaatcatataaaggttcactgtctagttgtgggtcttttattctgcaaatgttctaaa

SEQ ID NO: 770125 - DNA, 635 bp, Homo sapiens
ctaatccccagaatctgttaccagactttgtgggtgtgattaaggctgataaatgagaagaggactctgtattatccagctgagtacaatctgaacatgtgaatcctaaaagtatagaacctctcctgggtatagtcagttagrgagaaatgtgacaacaacaaggaaaaaaagcagtcaggctgttgctagctttgaagatggaggaaggagaaatgagcaaagaaatgcatgcagcctccagaaatgaaaggcaaggatcagattctcctcttgggcatcctgaaagcccacagcctaatcaacactttgattttagtcctatgagacctgtgtgggacttctgacttccagaactgtgaaagaattaatttgtgttaaatcactaagtttgtagtaatttgttttggtggccttaggaactgacacagtcaccttccattccttgccatgtgtttctctgtatagggagctcagagatggcagtttatttccacaaagccagcaagggagagagtctccttgcaaaagaggagttacaatcgtatgtaacgtaatcctgtgcatcccaacacctttgccaaattctatgggttagaagaaagtcacaaatcctgccctcactcagaggaagt

SEQ ID NO: 770126 - DNA, 635 bp, Homo sapiens
ctaatccccagaatctgttaccagactttgtgggtgtgattaaggctgataaatgagaagaggactctgtattatccagctgagtacaatctgaacatgtgaatcctaaaagtatagaacctctcctgggtatagtcagttagggagaaatgtgacaacaacaaggaaaaaaagcagtcaggctgttgctagctttgaagatggaggaaggagaaatgagcaaagaaatgcatgcagcctccagaaatgaaaggcaaggatcagattctcctcttgggcatcctgaaagcccacagcctaatcaacactttgattttagtcctatgagacctgtgtgggacttcygacttccagaactgtgaaagaattaatttgtgttaaatcactaagtttgtagtaatttgttttggtggccttaggaactgacacagtcaccttccattccttgccatgtgtttctctgtatagggagctcagagatggcagtttatttccacaaagccagcaagggagagagtctccttgcaaaagaggagttacaatcgtatgtaacgtaatcctgtgcatcccaacacctttgccaaattctatgggttagaagaaagtcacaaatcctgccctcactcagaggaagt

SEQ ID NO: 770127 - DNA, 635 bp, Homo sapiens
ctaatccccagaatctgttaccagactttgtgggtgtgattaaggctgataaatgagaagaggactctgtattatccagctgagtacaatctgaacatgtgaatcctaaaagtatagaacctctcctgggtatagtcagttagggagaaatgtgacaacaacaaggaaaaaaagcagtcaggctgttgctagctttgaagatggaggaaggagaaatgagcaaagaaatgcatgcagcctccagaaatgaaaggcaaggatcagattctcctcttgggcatcctgaaagcccacagcctaatcaacactttgattttagtcctatgagacctgtgtgggacttctgacttccagaactgtgaaagaattaatttgtgttaaatcactaagtttgtagtaatttgttttggtggccttaggaactgacacagtcaccttccattccttgccatgtgtttctctgtatagggagctcasagatggcagtttatttccacaaagccagcaagggagagagtctccttgcaaaagaggagttacaatcgtatgtaacgtaatcctgtgcatcccaacacctttgccaaattctatgggttagaagaaagtcacaaatcctgccctcactcagaggaagt

SEQ ID NO: 770128 - DNA, 627 bp, Homo sapiens
tgtccacgccacaaaaatgaccaagcacctccctctcctggctcatgtgagtgacactgctacttgaccaagcatagcattagcctcactctaattggccctctctatagataagacattccggcatggcgacgcccctgtttcttgatcacatccaatccagagcaaagcccgcttcctgaaactctccccagtgtcacctaacacaggcctaaaccctgcrttcaccttctgtaacacacccttactgacatgagccaaggtgccctattctgtgtgttctgcctgcaacattatgaacccaattgtgtgtccctggcagagttgtgctttaggatattgatattacagtctcatcagagaccttttctctgccctcatcccaggtgaggcatgagtggcgggtcagggaagagtttggtggtctttcactctgctttcctggtgctcagagcaaaggcgtcccccacctcttaccacctagtgttccatttctccatgcacccacccttctccccctttaaaaactgtaaagtgattgggacataagcattgctggaggacagctgcccccacacaaccagccaacaagtggagtttttaaactccatatttgagtttaaaaag

SEQ ID NO: 770129 - DNA, 616 bp, Homo sapiens
atatttcaaaatagctagaagagctgtttctgagtgttctcaccacaaagaaattataactgtatgaggtgatgaataggctaataattaccctgatttgatcattttgcaacatatacacatataacattgtaccccataaatatttacaattaccatgtgtcaattaaaaataaatgaaaatttcaaagacaaaaataactgcaaattaagaagactaaatccatcaaaatattatttataaattgaggcaaaacaaagatattttcagataggtaaagcctgaaagaattcacatccagcatatttgcactataaggaagctaaaaagacrttcttaagcttgatggaaaaagatgccagaagaaagcccagatctataaggagaaataaggaaaatgagaaaagaaaaatatgtgaataattatagggcacctttttatttatttatataggtatctgttttgacaagtgtgtacacacacacacacgcgcggaggcaattggctgttaaaagcaaaagtaagcatggattttaagtattcagaattttaaaacaatatcagaagagcacaaaggataaaaggtattatgaatggaattataggtcctatcc

SEQ ID NO: 770130 - DNA, 616 bp, Homo sapiens
atatttcaaaatagctagaagagctgtttctgagtgttctcaccacaaagaaattataactgtatgaggtgatgaataggctaataattaccctgatttgatcattttgcaacatatacacatataacattgtaccccataaatatttacaattaccatgtgtcaattaaaaataaatgaaaatttcaaagacaaaaataactgcaaattaagaagactaaatccatcaaaatattatttataaattgaggcaaaacaaagatattttcagataggtaaagcctgaaagaattcacatccagcatatttgcactataaggaagctaaaaagacgttcttaagcttgatggaaaaagatgccagaagaaagcccagatctataaggagaaataaggaaaatgagaaaagaraaatatgtgaataattatagggcacctttttatttatttatataggtatctgttttgacaagtgtgtacacacacacacacgcgcggaggcaattggctgttaaaagcaaaagtaagcatggattttaagtattcagaattttaaaacaatatcagaagagcacaaaggataaaaggtattatgaatggaattataggtcctatcc

SEQ ID NO: 770131 - DNA, 589 bp, Homo sapiens
tgcattgtatatttcaaaatagctagaagagctgtttctgagtgttctcaccacaaagaaattataactgtatgaggtgatgaataggctaataattaccctgatttgatcattttgcaacatatacacatataacattgtaccccataaatatttacaattaccatgtgtcaattaaaaataaatgaaaatttcaaagacaaaaataactgcaaattaagaagactaaatccatcaaaatattatttataaattgaggcaaaacaaagatattttcagataggtaaagcctgaaagaattcacatccagcatatttgcactataaggaagctaaaaagacgttcttaagcttgatggaaaaagatgccagaagaaagcccagatctataaggagaaataaggaaaatgagaaaagaaaaatatgtgaataattatagggyacctttttatttatttatataggtatctgttttgacaagtgtgtacacacacacacacgcgcggaggcaattggctgttaaaagcaaaagtaagcatggattttaagtattcagaattttaaaacaatatcagaagagcacaaaggat

SEQ ID NO: 770132 - DNA, 642 bp, Homo sapiens
accaacacaaagtattcagtcacattgctccatccattcaggccctatttcccaatggcagaacaactagtcttcctctgcaaactccagcattcctctggggccaatttaaaaaagcttgggacttcaaaatgcacgggcacacttttctttataaagaacagcttttgggtaagcagcattgtgaaagggactgaatttataaatccacacaaaagccatgtatttcttttgagacagatcaactcacacactttgtcttctgattcactgtgtgtgctatctggtctacaatgyagacagttccctaggtcagaaaatgcatctgctcatgaacagacagaaatggcaatgttcttaacacttgtcttagatgagaagtctgcttacatgctcacaataaaacaaggaagcaatttttgactctagtcaagaagcttctggaatcttttttccaacacaaatgtttctcatttagtccaagctctgtttcaattacacgccaagaaaagacaaagaaaaaccccctctaccacctactcctgccttcacgaaaacattgtaaattatctttattacatcatatagaaaagtcatctcacatagggtaaattgttgacaaatggttacagcagccgtttt

SEQ ID NO: 770133 - DNA, 604 bp, Homo sapiens
aaatacatgagcattagatgagggggatgcattctgactaatcacatgattagctattcagaggaagatactgcccttgtatcaaaagtagtgttgagaaaaataaaggcagagcctagcatttgcctcctagcacaggctgaaacatgctagtggccttgtgcagaagaatgatgctttcagctgagctgcaagataggagctggaccaactgggggcttggacaggggtgggatctgacctgattaggctttcyccatccaatctgggcctccaaaagccgttctctggccctctggacaaggcagactcagcaaatctgggaggtatggggattctgccaattccccacctagccccacctcccccaggtttggcaggcgatctaatccccagggtgcagccccacccccacctgaccccacatctggacaaacacatggcaaatatggaaactgaagcccagctgggctggagcacatctggttgttgctgcattggagtcatcttgcagatatcctgagataatcaggcctcacccacagtggccatgttgagacagcagttgtttttttttaaagatgattcacgttgctccaggcga

SEQ ID NO: 770134 - DNA, 616 bp, Homo sapiens
agcaggacttgatggttggggtttttatctccatctgccccaggatttctgtgaatgcattagcccaaagcagtcagaactttgtggcagtcctgaccagaccacttaactatttctgtgcctcactttctccagctgcgaaatgagtaaacagacagcccatcttccttctcttcccttctcaggaaagttgtaaataggctcaccctacatgttaagagtttaactgtaccattttataaaatgaaagatttcttttttgaacagcctaacaatagcatattaagttatttgctcatggcatacctagccagctaattctcttaatgaatccaggctttttttcttttgcatagcatctgattgcacaaagccaatagttaaayattttggcaggtgacgagttaatgagtatactgccagctaggtccaaatcacagacacaccagagcacagggcccttttgataaattttctttaacccaacgcatctagcaccctggccaaccatcccataggtgctcatgctgactgggttgccaaggttacaggagctgatatcataattggtgtctgagctctgcccccctaaatggccatgaggagccacttcaat

SEQ ID NO: 770135 - DNA, 514 bp, Homo sapiens
cagaggttgaaatatacagtatttatgaagttttaccaagaaaaattctgtggtaggtattggctttaaccgggaataaacacctactcttcaattttactattattaaactgcaactactgaaaggtcaaactgtgtatatgttaaaggcctaaagcctaggattcagagctataaatcaactacaatcrtctatatagctttttaaaataagtcaaccttcaaaagagaactttcaccactgctgagactggagtaaggaatcaccaaagccttttaacttcctctttttttaccaggggcaggggtggtggttgtggtagagaaacttcatggtggctcacctggtgcccatccatacccactatttttcagggatcttgtatgtgaaactgattaagataggtatagtcagtttatgttttgctcctacagtaacaggaaaaagaatctttgtgttaagtttcaatgcatactaccagttaggtttttttttttttttttgctacatgaa

SEQ ID NO: 770136 - DNA, 576 bp, Homo sapiens
catgcattaacccagagacaggcagttaagtgccccttggggaaccggatccagaaccatagctttattctttgccagctcctttagctgtgtagataaatgttttcaatcctcccccaaaccaccaccatcttttaaaatagcacttgaggcttggcgcagtggttcacgcctgtaatcccagcacttcgggaggccgaggcaggcagatcacaaggtcaggagatcaagaccagcctggccaacatgaagaaatgctgtctctaccaaaaacacaaaaattagtgcacrcctgtagtcccagctactcaggaggctgaggcaggagaatcgtttgaacttgggaggcggaggttgcagtgagccgagattgcatcactgcactccagtctgggcaacagagtgaaactccgtctcaaaaaataataaaataaaataaaataaaataaaatagcacttgaagatgttaatgaaacaaaatcttacctggcaactgagtttgcaatccaaacaagatggggatgcttgcagaggtggaagtctccttccaacaggccagcccagccttttttctct

SEQ ID NO: 770137 - DNA, 576 bp, Homo sapiens
catgcattaacccagagacaggcagttaagtgccccttggggaaccggatccagaaccatagctttattctttgccagctcctttagctgtgtagataaatgttttcaatcctcccccaaaccaccaccatcttttaaaatagcacttgaggcttggcgcagtggttcacgcctgtaatcccagcacttcgggaggccgaggcaggcagatcacaaggtcaggagatcaagaccagcctggccaacatgaagaaatgctgtctctaccaaaaacacaaaaattagtgcacacctgtagtcccagctactcaggaggctgaggcaggagaatcgtttgaacttgggaggcggaggttgcagtgagccgagattgcatcactgcactccagtctggkcaacagagtgaaactccgtctcaaaaaataataaaataaaataaaataaaataaaatagcacttgaagatgttaatgaaacaaaatcttacctggcaactgagtttgcaatccaaacaagatggggatgcttgcagaggtggaagtctccttccaacaggccagcccagccttttttctct

SEQ ID NO: 770138 - DNA, 635 bp, Homo sapiens
tgggtcaacctgagtgctgctccagctcagggtactatgcctggtaagtgctgcccagagctccttgggaggggcaaggcaagagacatgtgagcacagtctgagggacatatgggcagtttattctttgatgtccttggaagagtggtcataatttgcgtgatataagccaacaaccaagatagataagcctcaggagagctaaggtcatttcaactaacaaatcacttgctccatagtggaraaagcaaactacagatccatacacaaacatggtaagttcatgggaaaagattttaagtcagttctctctctccctgtcctttacatctctctctctttctctctgtcatttacatctgggggaacctttgccaggtaactgaatgacacaaagcagcatctaggagaatggcttctttcttaagcacacccaacatgatgagattacctagagatgagtgcttcttttgtggggagaatttgatctgtgcaccattacaaaccaggcttgggggaagccaagcccacaatcagaatgtaattgaagtatgttacctataataggttcagatgtttgtgatcttcagcactttatgaattctgcagcagatgggcgagggccaggtagcagg

SEQ ID NO: 770139 - DNA, 609 bp, Homo sapiens
ggtcaacctgagtgctgctccagctcagggtactatgcctggtaagtgctgcccagagctccttgggaggggcaaggcaagagacatgtgagcacagtctgagggacatatgggcagtttattctttgatgtccttggaagagtggtcataatttgcgtgatataagccaacaaccaagatagataagcctcaggagagctaaggtcatttcaactaacaaatcacttgctccatagtggagaaagcaaactacagatccatacacaaacatggtaagttcatgggaaaagattttaagtcagttctctctctccctgtcctttacatctctctctctttctctctgtcatttacatctgggggaacctttgccaggtaactgaatracacaaagcagcatctaggagaatggcttctttcttaagcacacccaacatgatgagattacctagagatgagtgcttcttttgtggggagaatttgatctgtgcaccattacaaaccaggcttgggggaagccaagcccacaatcagaatgtaattgaagtatgttacctataataggttcagatgtttgtgatcttcagcactttatgaattctgcagca

SEQ ID NO: 770140 - DNA, 525 bp, Homo sapiens
catgggagtagcaagagcaggatccttgccccttggcatcgagacactgccagagacctgctacaacaattgagtggcagtgggacattccagctcaccatgggcctgttgtggacggtggttctagaagaccaacttgactagacatagcagcatgcactaatttgggtaaagtcatttcagtccttggtaagagatccagaaatagtaggggaggcgaatgcctcaggggtcgggacttataacatgagttggyggaggcttacggtaatggggatttggatactaaagtgctaatggaacatttggattgcattggtaacccaattaaagtgtagctggggaggcaggatggagtagtgtttgaggcacaggctttgaattcagatagatttgatggcaaatatcagttcgatttcctcagcaggttatttaccctctctagccttggtttctaaatctataaaatggatgtgataatacctaccccaccgagctctcttgaggattaaatatgcaaagtgt

SEQ ID NO: 770141 - DNA, 730 bp, Homo sapiens
gtgaccagcgtgtctccagcctgagggtcccatcaaaagcaagtgaactttctcgatcttgcttgtctgtgtcccaaaaacgttcttccttctgtagggcctttgcatatgatgttctttgaaccatctccccaatccccacagcccgtttcctccaaggtctcctttagatcttagatcagggtcatctcctcaggaagcctccctggaatgcaccatagccccaaagatggcgaggatcatttgattaatgtgagtgatcctccccycaaactgtaagttccatgagggcagggagtgggtgtgcttttctgttcagcattctattccccgtgcataataagcactcgagaaatagttgtgaatgaatgagtagttaaatgaatgaatgaatgaatgaatgaatgaatgaacagagttttctgaaggagcacctgcttcctcactatccaatgatcagctgtttgggggtggagggaaggctgtttgggaatcctgggccttctcaaccgcaactttttattcattaagcctacgctatggctgtttccaggctcctccacccccgccattgccctgtgactggaggccaagccctgccctcctgttgacagagtggagtcttccttatgctgatgaatgaagtgaccgttaataagatgaaaccaggccagaaaaagccaaatgaggaagctggcagctttgtaagtggtttttcagggggaaaagt

SEQ ID NO: 770142 - DNA, 614 bp, Homo sapiens
tttttattttttttctttaaagaactttttttagagacaatgtttcattgtgtcatccaggcttgagtgcagtgacacaatcatgactcactgcagccttgaactcctgggctcaagtgatcctcccacctcagcctctcaaagcgctgggattacaggcatgagccaccatacccagcctctatttcttaatgtgggtatttatccttgtaaccacataatctgctaccaccacacagtcagaggcttctttgtgtggggtcccaaggcctgaattgcccttcagctgccygtgcgatgctccttgaggactctgcacagtctcaggttcatgtggccaagcccgtgtttattctgatttgaggggagtgtgggagtggacttcctgccagaatcctgccctgatattccaggtaactgaccacaagccatggccctttctatgctatttatagtgagtgacaaaaatagcctcacccctctgaaaggcatacctgtgccatctgcccactggcttcctacaacctgacaggcactttctctcctgacctcaggaggaggcaggactgtgtcctcacacagacccaggagcactgggtccctcatgtgcacac

SEQ ID NO: 770143 - DNA, 583 bp, Homo sapiens
tttccatgattccatttgcttttttgcacctttgccatcaccacaaaaagaacatggctggactagtatgctactcaaggaagaggatgaaagacaagtggagtggggctgagttgccccagccaagccagcctagatcagccaacccctggccaggccccaactccrtgagaatacatgactgtggctttaagacactaggttttaagcaattccttatacaatatgtttgtggcaattgctaacttacagactcattcttccttttctttacagttttactgcagacgtgcccctgaacatatttagctttgcatatttttgaactgcacttaacaggtaacatactagtgaattcttttgcataggtggcattaggatttaaaaggtccgagtccatgattgaaaagagccctatataagccaagagttttaaaaaattacaatagttagcaggtaaacagactttcaggtgggcatattgccaagaggcccctgcagccaggtcaacataaacaataacaccagcacacagacgataagtctttgggaaaaaaaaagcacagaaaaaaatgaagaatga

SEQ ID NO: 770144 - DNA, 583 bp, Homo sapiens
tttccatgattccatttgcttttttgcacctttgccatcaccacaaaaagaacatggctggactagtatgctactcaaggaagaggatgaaagacaagtggagtggggctgagttgccccagccaagccagcctagatcagccaacccctggccaggccccaactccatgagaatacatgactgtggctttaagacactaggttttaagcaattccttatacaatatgtttgtggcaattgctaacttacagactcattcttccttttctttacagttttactgcagacrtgcccctgaacatatttagctttgcatatttttgaactgcacttaacaggtaacatactagtgaattcttttgcataggtggcattaggatttaaaaggtccgagtccatgattgaaaagagccctatataagccaagagttttaaaaaattacaatagttagcaggtaaacagactttcaggtgggcatattgccaagaggcccctgcagccaggtcaacataaacaataacaccagcacacagacgataagtctttgggaaaaaaaaagcacagaaaaaaatgaagaatga

SEQ ID NO: 770145 - DNA, 631 bp, Homo sapiens
ttttcataccagatagcatactggaatgcaaaaaataactccagtcaggagctctgatttttggtttcagcttccgcaaatcctagctgtgagtacttggtcaatcatttaatcgctctgagcctgagttttccggtcagagtaaaatagatagatcagtaatagttgtcttacctatcttacatgatagccagaaggttcaattaaaatacattgcattgaaagtctttacaaattgaaaaacattctagaaatggcaggtgttactctttacccccatcccatatgccagtagttcacaaagtatagtccctggacagcagcatcagcgtcactgggagcttgttagaagtgcaaattgttaggctccacccagacctgctgaattatgaaatctgggggttgggtccaggaaactgtgtttgttaagttctccaggtgattctgatgcacactgaattttgagaaccactgtcacacatkcttggacatacgttcacaggcacacacactcatattcaggtaaaatcaagttaaaataaatattaaataaaaaagaagccatataagagctgcctgtggatggtgtttgggagaaggaggtagtgagccgtgctaagaagaggcttgg

SEQ ID NO: 770146 - DNA, 606 bp, Homo sapiens
aacgtataggtaaaaagaagaaaatttaagtcaccctttattccgtaagtcagaaataaccagaattaacattttggtatatacatctttccagacttttttaggagaggagatttttgttttgttctaatgaaaccaagatcatactgaaacttgctttctttgatcaattacatatcatgaattcgtttccatgccagtaaayatatttcttatcatgactgctgaatatgcccttgtatgggcagagcgtcatttatttaatgaatccaaaggtgatttttttaaatgattttatttttatttgtgttttttgttttttgttgagaaaagttctcactctgtcacccaggctggaatgcggtggtgcgatcatgtctcactgaagcctcaaccttctgggctcaggtgatcctcccacctcagcctcctgagtagctgggaccacaggcacacaccatcatgcccagctaattcttatattttttgtagagatgggttttttccatgttgtccaggctggtctcaaacccctggctcaagcaatccgtccaccttggcctcccaaagttctgggattacaggtgtgagccaccatgtccagcc

SEQ ID NO: 770147 - DNA, 604 bp, Homo sapiens
atttgttttctgttttaggagacagggtcttgctctgttgtccaggctggagtgcagtggccattatagccctctgcagcctggactcaagggatcttccagcctcagcctcccaagtagctgggactacagccatgcacaccaccgtgcctagctaatttgttgttgttttgggcttttttgagacagggtcgcccatgttggagtgcaatggcacaatcctggctctctgcatccttgagctcctgggctcaagggatcctcccacatcagtctcctaagtggctgggaccacaggtacacgccatcacgactggctaatttaatttttttaattttacagacaaggtctcgctatgttgctcaggctggttttgaactcctgggctcaagcgcttctcctgcctcagcytctcaaagtgctgggattacaagcataagccaccaggcctagccactggagaatttactaagaaaaatacaaattgctggggagcacccccagagtctctgattcagccatctggagtggggcctcacatcacatttctcaggacttctgaggtgatgctggtgctgctagttgggggactagcctccagaa

SEQ ID NO: 770148 - DNA, 604 bp, Homo sapiens
atttgttttctgttttaggagacagggtcttgctctgttgtccaggctggagtgcagtggccattatagccctctgcagcctggactcaagggatcttccagcctcagcctcccaagtagctgggactacagccatgcacaccaccgtgcctagctaatttgttgttgttttgggcttttttgagacagggtcgcccatgttggagtgcaatggcacaatcctggctctctgcatccttgagctcctgggctcaagggatcctcccacatcagtctcctaagtggctgggaccacaggtacacgccatcacgactggctaatttaatttttttaattttacagacaaggtctcgctatgttgctcaggctggttttgaactcctgggctcaagcgcttctcctgcctcagcctctcaaagtgctgggattacaagcatragccaccaggcctagccactggagaatttactaagaaaaatacaaattgctggggagcacccccagagtctctgattcagccatctggagtggggcctcacatcacatttctcaggacttctgaggtgatgctggtgctgctagttgggggactagcctccagaa

SEQ ID NO: 770149 - DNA, 692 bp, Homo sapiens
ggctcaagggatcctcccacatcagtctcctaagtggctgggaccacaggtacacgccatcacgactggctaatttaatttttttaattttacagacaaggtctcgctatgttgctcaggctggttttgaactcctgggctcaagcgcttctcctgcctcagcctctcaaagtgctgggattacaagcataagccaccaggcctagccactggagaatttactaagaaaaatacaaattgctggggagcacccccagagtctctgattcagccatctggagtggggcctcacatcacatttctcaggacttctgaggtgatgctggtgctgctagttgggggactagcctccagaaacactgycttttttttttttttttttttttgagatggagtcttgcactgtcacacaggctggagcgcagtggcgtgatctctgctcactgcagtctccatctcccgggttcaagcaattctcctgcctcagcctcctgagtagctgggattacaggcgtgtaccaccacacccagctaatttttatatttttagtaaagacggggtttcgccatgttggccaggctggtctcgaactcctgacctcgagtgatctgcccaccttagtctcgcaaattgatgggattacaggcatgaggctctgcacccagccaagaaacactgatttcaagacata

SEQ ID NO: 770150 - DNA, 574 bp, Homo sapiens
aacttgattcaccaatatttttattatattaatgttgactttatgtcaattactgtttaatcatggagagcagtatctcatgatgtccagaaaaaccagtcccattccaggaaattatcactcccatcttccctgtaaacatttttccttattttatagactctgtagccttgaaaaatatcatatattaaggggacattaacaagaaaccatattcataatcccatcacctttatatatccactatttccacagtcttctgctttaaaaaataatttgggggctgggtgcggtggctgatgcctgtaatcccagcactttgggaggcygaggtgggtggatcacgtgaggttgggagttcaagaccagcctgaccaacataaaacccatctctactaaaaatactgaaagggtggcctgcccctccacacctgtgagtatttctcatcaagtgggacaagagactgagaaaagaaataagacacagagacaaagtatagagaaaaaaaagtaggcccaggggactggtgttcagcatatggaggacctacaccagcaccagtcgctgagtttt

SEQ ID NO: 770151 - DNA, 619 bp, Homo sapiens
agctggagaaaaaagacaaatacatgcaaattttcacaacaaaagatctgagtgacagatatagtgatcatctgcctcaaagaaagacacagctcattgctgaaagggtggccgaacagtgtggaccctgaaagactacagaacttcagaggagatcaaatgactgcagtgaccacccctgtgcaggcracaacttctacatttctctctcaatttgaccctggagctgcagatccatctttccaatcagctcagtaagtatttactgcgttaaagagcttctggagtgaaaacatgaagaagccatgactcctgcagccatgtgttgggggaagcagaacacttacccactctccctgagcctcaatttcctcatctgtgaaataggaatgataacagtacttactatcttatgagaggattaagagggatgaaaatcttcccagaggctgcagctaccatttattgcttgctttccatgtgcaagtacattgaatcctcagatttcactgacactgagatagcaaataacttgtccacagttgcaaagctagtaaatggcggaaaagctcctgttcttggccatctgcttctactgtacatgtgataatggatcgaa

SEQ ID NO: 770152 - DNA, 528 bp, Homo sapiens
atcccagctacttgggagactgacgccggagaattgcttgaacctgggatgcagaggttgcagtaagccgagatcacgccactgcactccaggctgggtgacagggtgagactccatctcaaaagaaaaaaaaaaaaaagaaagcaaaaaaatttttcataaaagaactccacagctattagcagtctaaaaatattttcttccatgctgtggattgtcttttcactttcttggttgcatcatttgcaacaaaaatgtttttaattttgatgaagtccagcrtatttcttttttctttttctttttgtacttttggtgtcatatctaagaaaactttacctagcccaaggtcataaagatttactcttgttttcttctaagagttttatagttttagctcttaaatttaagtctatgctccagtttgagttaatttttctatatagtgtgaggtaggggtgcaagtgattcttttgcatatggatatgtagttacctttgcagtagttgttgcaaagacaaattatgg

SEQ ID NO: 770153 - DNA, 701 bp, Homo sapiens
gaatatgccagaacttttcaaagctcttattcccaaatcacctcattattcagatttttctcccaagatttttggttagtctattgcctgtcccaactattatccattgcctcagatagcagtgactaacacaattacctataaatgttttcagagtaagttaaaatgccacaaagctcatcattcctactgaggttcagcctgtttttcttaagtagtctcctggttgctgcaagctttgagttaatttccagagttctgaaaaagttgattccaaccatttttgcctgttttttcattgcatttatggagggatgaacttttggcatttcttattccaccatttttgctaggcactagccttaaacaaggtggagtgggccacttctgcaggcccagagggtttggggtatatggtgagttaagatttttttgatagcattgatccagatgtcgtgttccatatctcaaggcgccactccttcccaatcagggccctgatcttggtagagcggactcactggagttgaaaatttcactttctctggagctctgmtgctcttataattaactcctaggcctgactctcagctttttctgtccactggctacagtagataagggtctcttttaatgcagctggcatgggatactgctggcaagaaattcactggcctggtgcaatgtctcaggcatttaag

SEQ ID NO: 770154 - DNA, 665 bp, Homo sapiens
tgggtccccagaaggcagccatggtgactgccttcaaaccatttatcaacttagcaatacacaatgattattgtttcatcagctgtcacttccttaaactactgccatccgtctctagcccctaaacccattcctcaccagttctttcaaaactgtggtgcctctcaaagtaaacttaaataaaagcatctgtttcaaatggtaccatccaaacagccttccctgggtctcaggataaataatcatgaagacatactctctccaatgaagtgcttcacgaaccttaacaaagcattaacatcccaagctaccaatttcgactgccatcaactcatcgtcaaacagactaggtttctttttattaataaagagcatttattaataattaatatttkaaaaatcccttaatagaaggctgccaatatgcaatcttcattaaccagggaaggctgatatttccctacaagtatatgaaccttttctacctactaccctagcttccacactggctatcatcagaataactgtggaagcatcttaaaaagacacagtatcagatccaaccctctgatacactgattaagtatgcctggggtgagacctgctccttggccctatacaatctattcatgattttggagtcaggttcaggcacccacatagca

SEQ ID NO: 770155 - DNA, 659 bp, Homo sapiens
atcccaccactttgggaggccaggaggatcccttgaagctaggagttagagaccaccctaggcaataaagcaatgccctgtctccataaaaaattaaaacattagccagatgcagtggcttacaccagtaatcccagaaacttgagaggctgaagccggaggattgctttaacccaggagtttgaggctgcagcaagctatgattcagtacattccagcctgggtgacacagagtgagatctcatttcttaaaaaaaagaaacaaacaaaaatttccaaatgattttagaaagtagttcaaaactgttgtttaacttatgaatcaaaaagatataattaaggggggccaggcatggtagcacacgcctgtaatctcactattttgggaggctgaggcakgataatcatttgagcccaggagtttgcgatcagcctggacaacatagtgagaccccatctctacaaaaaaaatttaaaaattagccagatgcgggggtgcatgcctgtagtcccagctactcaggaggctgagatgggaggatcacttgagcctaggaggtcaaggttacggtgagctatgattgcaccactgcactccagcctgggtgacagagtgagaccctctctctcaaaaaaaaaaaaaaaaaaaaagataatta

SEQ ID NO: 770156 - DNA, 595 bp, Homo sapiens
ccagaatttgcaatgttacagtttctatggtagtagagtctaccactgctctgtacatcatgaatatgaatataaagtttggtagataatgaaggattttcaggttcctggtttacattctaattcccacataccctattaggttaatgtttttggaaactttattatttactttattttttaatagatagggtctcactatgttgcccaggctggtctcgaattcttcagctcaagtgaccctcccatgtcagcctccmgagtagctgggactacaggcacgcactgccacacctggctctaggataatggttttttaaaaaattaatctgactggttaaaaagaagtaaaagaaaaaacatacctgctaaacaacacattttatttcaaaatcttaagaacattcttgtgattaggtctttggacacatatgaagaaaaccaatctacttctctttagggaaatgtcatcatagcttacataaaggaaactgtgaagggagcaggaacaagcaaacaaacttgacatcacctgggaaataaatatttcagccttcacctttctatgaatacactttgagaaatgcaattcaga

SEQ ID NO: 770157 - DNA, 609 bp, Homo sapiens
ctggtaaaccactggtataagtccaagagtccaaaagctgaagaacttggagtctgaggttagagggcaggaagcatccagcatgggagaaaaatgaaggccggaagactcagcaggcctgctcttccatcctctcctgcctgctttattctagccttgctggcagctgattagayggctccacctagactgggggtgggtctttgtctcccagtccactgactcaaatgttaatctcctttggcaacaccctcacagacacacccaggaaaaatactttgcattcttcgatccaatcaagttgatattcaatgttaaccatcaccaaaggggaaactgggacagagataagcacactggggaatgccacatgaagatgaaggcacaggatgccagagatggccagcaacccccaagctgggggagagcgtggaacagatgcttcctcgaagcatcagaaggcgccaacactgccgataccttgctcttggacttctagctccagaaccatgaggccacctgtttctgttgtttaagccctgtgttcgtctgtcctcacacggctataaagaactacctgagactgggtaatttacaaagaaaagaggc

SEQ ID NO: 770158 - DNA, 609 bp, Homo sapiens
ctggtaaaccactggtataagtccaagagtccaaaagctgaagaacttggagtctgaggttagagggcaggaagcatccagcatgggagaaaaatgaaggccggaagactcagcaggcctgctcttccatcctctcctgcctgctttattctagccttgctggcagctgattagacggctccacctagactgggggtgggtctttstctcccagtccactgactcaaatgttaatctcctttggcaacaccctcacagacacacccaggaaaaatactttgcattcttcgatccaatcaagttgatattcaatgttaaccatcaccaaaggggaaactgggacagagataagcacactggggaatgccacatgaagatgaaggcacaggatgccagagatggccagcaacccccaagctgggggagagcgtggaacagatgcttcctcgaagcatcagaaggcgccaacactgccgataccttgctcttggacttctagctccagaaccatgaggccacctgtttctgttgtttaagccctgtgttcgtctgtcctcacacggctataaagaactacctgagactgggtaatttacaaagaaaagaggc

SEQ ID NO: 770159 - DNA, 609 bp, Homo sapiens
ctggtaaaccactggtataagtccaagagtccaaaagctgaagaacttggagtctgaggttagagggcaggaagcatccagcatgggagaaaaatgaaggccggaagactcagcaggcctgctcttccatcctctcctgcctgctttattctagccttgctggcagctgattagacggctccacctagactgggggtgggtctttgtctcccagtccactgactcaaatgttaatctcctttggcaacaccctcacagacacacccaggaaaaatactttgcattcttcgatccaatcaagttgatattcaatgttaaccatcaccaaaggggaaactgggacagagataagcacactggggaatgcyacatgaagatgaaggcacaggatgccagagatggccagcaacccccaagctgggggagagcgtggaacagatgcttcctcgaagcatcagaaggcgccaacactgccgataccttgctcttggacttctagctccagaaccatgaggccacctgtttctgttgtttaagccctgtgttcgtctgtcctcacacggctataaagaactacctgagactgggtaatttacaaagaaaagaggc

SEQ ID NO: 770160 - DNA, 609 bp, Homo sapiens
ctggtaaaccactggtataagtccaagagtccaaaagctgaagaacttggagtctgaggttagagggcaggaagcatccagcatgggagaaaaatgaaggccggaagactcagcaggcctgctcttccatcctctcctgcctgctttattctagccttgctggcagctgattagacggctccacctagactgggggtgggtctttgtctcccagtccactgactcaaatgttaatctcctttggcaacaccctcacagacacacccaggaaaaatactttgcattcttcgatccaatcaagttgatattcaatgttaaccatcaccaaaggggaaactgggacagagataagcacactggggaatgccacatgaagatgaaggcacaggatgccagagatggccagcaacccccaagctgggggagagcgtggaacagatgcttcctcgaagcatcagaaggcgccaacmctgccgataccttgctcttggacttctagctccagaaccatgaggccacctgtttctgttgtttaagccctgtgttcgtctgtcctcacacggctataaagaactacctgagactgggtaatttacaaagaaaagaggc

SEQ ID NO: 770161 - DNA, 544 bp, Homo sapiens
catcctgacagctattttaaaaacatgtcatgccagaagatctgttctgtttccctctgtatctccatgtatctgtctttgcgtctgtctgttgtctctctctcagaggaggaggagaaaggagaattcaagaaggaaggagaagagagacatgttatagagtggaatcctcaatcgtataaaaatgtggaaatgtccaaaaggtgtctatttttgctcctaaagcaaaatacttttttgtgcaagagcatgtttctttttattttrtttatatattttttcagagacaaggtctggctctgtcacccaggctggagtgctgtggtgcgatcataactcactgcagactcaaacttctgggctcaagcaatcctcccaagtagttgagactacaggagtgaaccaccacatccagctgatttttttttttttactttttatttatttatttattttgtagagatggggtctctacactctatgtcacccaggctggtcttgaactcctgggctcaagcgatcctccagccttggcctcccaaag

SEQ ID NO: 770162 - DNA, 588 bp, Homo sapiens
gattttcacttgcctttgcccagctctcaatgatataaacctgattgcctgtcagtgatgtaaacctgtgttttgccacttactagctgcgggaccttgaacaggttatgtaaattctaaaccatacgtttcctgagggttgttaggaggattaaatgcatatataaagtgtttagcagaatatgtggtgagcccttcctacaatcttagctgttgttttgtrgtctttggtctctgttttgggagagtagccttagtcccaggactttttttttctttcttggagggtattgtctcctgtcctgccttacctcattggcaagtatatttgtttttgaccatgaaaacagactgtgtgtctcctccttgtcgctagagttttagttacagctgccctatatcaggttaaaagtgggtgaagtagacacaagggtagtgtatttgttcctacttggctctactttcatttgtggttggagaatcttgtctgaattttgtatttatttatttatattttattctattattttttttgagagatagttttgctcttgttgcccaggttggagtgcaatggcgcgatctcgc

SEQ ID NO: 770163 - DNA, 654 bp, Homo sapiens
cctttctgcctcctgacccacctggtgttacccgataggatcctgaatgctgggccgaggctcctgtttctaaggaactctgagtataaaagctatcttttcaatggtggtcacctcctgatctgttggcctcaccatacctgaataataacaaaaccaacatcttaaaacacagctccaatctcacactcccagaaagtgagaaacagaagagaaaccaaaacctatgattaccagttcaatccagaacactgagagacagaggaggctctgacggagaagggctgcgaccaacatcttctgactgtgaacactgtccaagtcagcttcatcaagagcttggaaagtggacgttttgtcaggctcattttgccgatgggcaactactgttatgggtggtgagtctctacgggtctgtagtatcctcacttcttgcctcctcagataaaagaattcgaccgagaggcataaggcrgaggagagacccaggcaagttttagagcaggagagaaagtttattaaaaagctttagagcaggaacgaaaggaaggaaagtacacttggaagaaagccaagtgggcaacttcagagatcaagtgtgcggtttgaccttttgacttggagttctatacattggcatacttccggggtctt

SEQ ID NO: 770164 - DNA, 506 bp, Homo sapiens
atacaagtttttgaattttaaaattttttgtgggtacataataggtatatatattcataggatacatgagatattttgatataggcatacaatgcataataatatcagggtaaatggggtatcaatcacctcaagcatttatcctttttttgtgytacaaacattccaattatacttttagttattataaaatgtacaataaattactattgactgtagtcaccctcttatgctaccaatactgcatctgcttctttctatttaacaatatttttgtacccattaaccatccctacttttccacggccactacccttcccagcctctggtaaccatccttctactgtctacctccatgaattcaattgtttttatttttagcttccaaaaatgagtaagaatatgtgaagtttgtctttctgtgctttatttcacttaatgacctccagttccattcatgttgcaaatgacattatcttattctcttttacgcctgaatagtgaat

SEQ ID NO: 770165 - DNA, 625 bp, Homo sapiens
agttcatgtgttagaaacttgatccacaatgtgggggttttggtaggggagcctaaagagaggtgtttgggttataaggatacctccctcacaaatggattaatgctgtttttgcaggagtgagtttgttgtcattgcaggagtgggttaggccctctcttattctctcttgtccatgtgatgccttttgccatgttatgatgcagcaaaaaggccctcctaagatgctgccgccttgatcttaaacttcccgtttttgagaaccataagctgataaatttttgttttttgtaaattacccagccttcagtattctrtgatagcagcacaaaagagactaagataatgacttaacatttcccccagggttgaatcaaaactcttaacaagaccctttactccaccacccttacttaaatttccatcattgttgaaatttgtttcagcttatcagatgaaccattctctccctttctgccccagatgtttgtacatattctttatagtttacattctcctctggctgcttttctcctcccaacatcctctcctctttttaacgaattcttactcataaatttaagttctggtttaggtctgactatttctgggaagctttccctga

SEQ ID NO: 770166 - DNA, 685 bp, Homo sapiens
gatcaatagcagattttatgcaaggctcatttatttaaagatatatagaaatctttaaatataacaatataatcatttttaaaataatattagaaaacatttaaaacttaccaagctgaatatttcttatccacactgattgttttgtttcttttaagattttctcaaagtaaaccccagcaaagccacttgaaaaacatgctgtgagaactgccatgagtcctacaaattgagaaccagctgaaagttccttagaatcaagctgagaatctgagggccactaaataagaagaaaaataaaattgaagtttaatttccataacattttacataaacatattgagagcccactcttagaccataacttagaaatgcaaccaatatcatttttgggactgcaaaggagagcttttaacataaaaccttacaatcatttgatttttttcctcacagtgataatatattactaacttataatttcaaaaagcaccttagaaataataaatattttacatttcatctattacagagaccaatgytaccttgagataattccttaaagtttaatttattaaaaagcaccatctcaaatacaggtagaagaaagaatgagaatctcacatcccctctgctgtgtcagcaaaagtagagatcagctggaaagtagtgttctaaatcaagcata

SEQ ID NO: 770167 - DNA, 545 bp, Homo sapiens
gcatatctaaaagcacagcacttgattctttaccttgtctatgatgcaaagacctttgttcacgtgtttgtctgctgaccctctccccactattgccttgtgaccctgacacatccccctctcagagaaacacccacgaatgatcaataaatactaagggaactcagaggctggcgggatcctccatacgctgaacgctggttccctgggtccccttatttctttctctatactttgtctctgtgtctttttcttttccaagtctctcgttccacctaatgagaaacacccacaggtgtggaggggcaacccaccccttcactcgggtcatgcaggaatcatatgtgcaaaaataatgtgataaaaacacacctataaggtgaaaaacatctacgtatttgytataaatacacatactttgaatttctatattctggcaaaagcattggaggacaaaaaaaaaatcttttcaaaatacaaatttgaatatgtatgggcctcacttttccacccactaaagccaacctggttagcaggatatttcg

SEQ ID NO: 770168 - DNA, 582 bp, Homo sapiens
tgggaaacagagctaatttggattcatgaattctgtaaacaagtatttcttgagaagctcctggttgtgaactacctagaatgaaactgggtaaactaatatcaacatccattcttttgccaaacatcactgataaactgcaacattttttttttttacgtgagtggtcttggaatcagacatttctgcattgaaaacccagcactgttgctgactggctgcatggcctgcatctacttctcacatttctgactgcctaccaggttccaggcactgttctaggcactgaagatgaaaagatgaataatatggagttcccatcttcaaagaagttacaattttaaggaagactggcaaataaaagttaccmcacaaaataataaaaatacaggggtaaaactagggcatagttatattttggctggtctctttacctctgaggttcttttgctttttatgtaattggattttaacctcagaagactgtaaggttaaagatgataatgtataaaatcagtactctgagtaatgatcaaaattttctgttgccatccacacatttgagtgagatgtagtgagtgc

SEQ ID NO: 770169 - DNA, 446 bp, Homo sapiens
acatacaatttttagctgtactaaaaaaccaatgttttctttttttaaagttatcaatctcattgctttttagtcaaaataaagcaaagacccagtctaacaggaagtgcactaacacggggtcagggctggagtcaggaggagctcaccaccacctggacgacctggatcaagtcatccatgttttcagtctattttttcattcatctctaaaatcttaatgttaggaataaatccttaaaagatttaaggatcttttaaattctaagatctaataatactgaaacwatattatggaaaatttctaaacacctaacaataaaaagtaaagagaacagtacccatgactcagctccaataatcaacacttggccagctgtgtttcatcaaaaccctcctctttcccctccagagtaccctgaagcaaaccttgggcatcatctcat

SEQ ID NO: 770170 - DNA, 650 bp, Homo sapiens
attgatttggcccagaaaggtgggatatcttgaagagggtagctatgggtcataggcagagtcaatgattttctgagtgacaattggttgaaaaggttaagctttgcctgaagaattgaagttagcagaaagaaatgcttgagtgaagataagggggaagccaaggttcttattatgtagatgaagactccaggtagcagggttcagagagaatagatgataacagtctcttattagaccttaaaagatgccagtctcttagttaagtctctcctgaataaggagaagacctrgaaagggaagggaattctctacaaaatgcaaattttccccataaaagatggctttgcagggccatttcaatacatgtcaaagaaatatattttgggataaaatactttgatttccttcagggcctgctatattttgtgtgatgctatatcaggggtaggttggagtacagtatctcattgctacaaatagtctgttttgtcagtcttaggatctctgttttaatattaatgctggtcaattttgcttaaacttcaacaacacggggtataatgaggcacgtttgacctcccttcccctcatagcctgaaatagcttttaggttttctttaggatccccttggccaatcaggagagag

SEQ ID NO: 770171 - DNA, 540 bp, Homo sapiens
tatttgctataaatagggccatcccaggctgctgtcagaatataacagcactcccaaagaactgggtactcaacactgagcagatctgttctttgagctaaaaaccatgtgctgtaccaagagtttgctcctggctgctttgatgtcagtgctgctactccacctctgcggcgaatcagaaggtaagtgtcgctctttccgctagcacagaagaaagactattttcattttccttttagccttgagctcaactgggggtccctaagggatggaaaactgttaggaagtatacaagaggtrgtgatggaagttgtctgcccatggtggagtggaggagagaagagttactgctgcggatcaggctttcctctctgctgtcaatctcagcagatttggggagtggtgggctcttagagatccctaaacttcaggataaagccaaagtgatgtttctgggagtgatataaagtgtgtaatgttaccagtagatggggccattttgaaatgtagagaatcctcctgtgtccccaactttcgtac

SEQ ID NO: 770172 - DNA, 565 bp, Homo sapiens
tcatcatcgttattattattttaatttagtgatttcttacatgatgtattagatttctctatgcatttgatagttactagctgcctgattcttgttgcaaagatgcctactatttatataatttaaaggcaatctggcatttggttgtttgttaaaaactgaaaaatgaacattagttaaacagagatcaatggttctgatttaygttgacaataatagacagtaacactttatcaatggacagaaggcacctaacaccagcatgccatagatactgaacttggagacacaagataagtgtccatagcctgtttctgtcattaatgagctgagttaggttgggcaagggccatcctctctaaacctcaatttcctcatctgaactctgagctgcttgacatactgagttgagattaagggcaggtgaagcaacctttaggtaccaaagtcattcccaccatgcagtcaccttgtcattacttacacttttcttctttttcattttacagtaaaaaagtcaagaacatgtaaaaactgtggcttttctggaatggaattggacata

SEQ ID NO: 770173 - DNA, 601 bp, Homo sapiens
tgaacccaggaggcagaggttgcagtgaggtaagatcttggcactgcactacagcctgggtgacagagtgagattatgccaaaaaaaaaaaaaaaaaaagaaagaaaggaaggaaggaaggaaggaaggaaggaaggaaggaargaaagaaagaaggaaggaaggaaaagaaacaaaagaaagacattgaaaaaaagagaattcagaggcccttcaccttgatcttttactgagttgctggttgaacaacaaacactgtatttaatggggcatatggggctcttttcaaataaatgccaatctgtgttcactatcctacttaatcattctttaatttttcctgaaatcttaccttgaggtgtttcctaagctaatcccttctgttgatcctgcactaatgtgcaaacagttggagagttgatcaaagatgaacaagaaaagcaaaataatgaaaaagtaacaaaaatctgtaattttgaaagaggcgagtgattgtggaaatgtgtaaaaggtacttgaatcagaaaatgaaggcagaggggcaaagtttcctccaacatcacctttaaaagcctgagaaataatcgagaatgaatgccta

SEQ ID NO: 770174 - DNA, 604 bp, Homo sapiens
atgattttaaaaataatttttttctagttctgtgaagaatgttgttggtagtttgataggaatcacactgaatataatccaatgtgattgaatctgctcaaattgctttgggcagtatggcctttttaatgatattgattccycctatccatgagcatggaatgttctttccatttgtttgtgtcatctcttatttctttgagcagtgttttgtcattctcattgtagagatttttcacctccctggttagttgtattcccaggtattttattctttttgtggcaattgtgaatgggattgctttcctgatttggctctcggcttggctgttgttggtgtacaggaatgctaatgatttttgtatgtggattttgtatcctgaaacttttctgaagttgtgtatcaactgagggagcttttgggccaagactatggggttttctagatatagaatcatgtcatctgcaaacagggatggtttgacttcctctcttcctgtttggatgccctttatttctttctcttgcctaattgcccttgacaggacttccaatactatgttgaataggagtgataagagagggaatccttgtcttgtacagg

SEQ ID NO: 770175 - DNA, 548 bp, Homo sapiens
cactaacgtccttcgcaggtggtggatcccaggacatggggccaggtggcgatcagggctgtggaggaggagaggaagtgggtgggggatgcctcttccacagatgaggagtggggaatgccccagggagctttggcttccagccaggccagggccagggcggggccaccagggctaaagaccatggggcagcaggggttacctccctagagcaggctggcctgaatcatagaaccaggggcctgggcgcagcatctgaggacttaggccacagccacctgcccccrgttcctcgactgctagacttcccagacttctcctactctctgtggagtcctggctttagtgagtaactatttattagcatctataatatgccaggcactcgctgttctagcacaggagatacagcagtgaagaaagcagccacaactcccttccctcctggagtttatatggaaagaggtggggagcagaggtgatttggaggggcagacacaatccgggtctcccagctgacactcccaggggccgagtgtggagaaggt

SEQ ID NO: 770176 - DNA, 655 bp, Homo sapiens
catctggaacacccatgaagtctaagttaatgaatggtgcaaattctgaacccctatttggttctgcaaaaatagcttaagccttttagttacacacagaatactactcaagtggtagcatgttctagtaagaaaaaaagctaggtttatattctgatcaygtgggtctctgcaggcaacttgtaaatctctatctaataatccaatgtacacacagcccctgggccaggtgtctgattcccatccctccattcccctcacctctctagcaaccatatttctagatgactcctctagtgtgatctatcagtttttgctcaaagattgtatgaacatgtctcaacatcagcctggtccaagtagagtttggtgtgcaatttgctaaccacactcctgaagaagcagatggcagtgggttcaggtttgcctgtagtttaaaaagactcatgttgctggtccctcagagaaggaagataattaatcattggttctaaaggattctgggtcataacatgtctgagatggaagagaattctgacctgtgtctctgtccacatgtgtgagccattcccagggtggtgtggtctgcggggacctggactccactgcctcctgtggctcagggggtgtggccatcagcagtggtgcactgtgt

SEQ ID NO: 770177 - DNA, 527 bp, Homo sapiens
tgtcatctaagttctttatgaacacaaaagtgagcacaatatagatactgcatagatctttgcattttttacctaacacttgtggaggtttttttcatattttggtcttcagtgtttccaatgtttacagactattccattatatacagtgccataaattatttagataatcatctaagtatctctccgtagacactgtaggtatttccattgttttgctttgctattcctaataacagtgtaatgaatagaatacaaatatttataaattgtacatacacataccatataaatataagtagtttttcataaatttatgagctgtttatcttttttttgtgaactgcaagttcctacccttggatgatttttttattgattcgatcattctttcattttaaatttgtatgggctctttgtaaattgaaggtattaactttgtgtcaagtgctgtaaataygttttgccagttgtcattggtattcacttctttgagatttaagacaactcacgaaagtaaggccgtg

SEQ ID NO: 770178 - DNA, 674 bp, Homo sapiens
gtccttgaccttcacattcagccactgctcactctctgactcacctgagcaacttccagtttttcaaattccattcatggtaagttccctatagaggaatagcatttttaatcttttataccatattttactgtaccttttccatgtttagatatgtttagatacacaaatacttaccattggattataattgcctacagtaatcagtatggtaacacactgtgcaggtttgtactctggagtaaaaggttattccagaaagtctaggtgagtagtaggctataccatgtaccatctaggctagcagtaggtctagtgaaagtatactctatgattttcactcaaagatgaaattgcctagtgaggcattttttagaatgtatatccattaagtgatacatgactgtagttgcaaaggaaaatttggccataattatttttgtttccttatttaaacttactggagttttaacattgtttacaaagattgttgtggtcctttgcaacacagtagraattaaataaaaatatgaatgaatgaaaatagatcttacatcttgttcatctgaacaaaaaacttgtaacactgatttaaatttcaccttaaaataatttataaattaggtagaaacatcttattaattattaattatatctttattagaaagtactaa

SEQ ID NO: 770179 - DNA, 552 bp, Homo sapiens
ctgtcacctgagcagaatatactgtatctaatatgtagtctttatccctcacctcccaccattccccctgagtccccaaagtccattatatcattcttatggctttgcatcctcatagcttagctcccacttataagtgagaacataccatgtttggttttccattcttgagttacttcacttagaataaaggtctctaactccatccaggtggctgtgaatgacattatttcattcctttctatggctaagtcatattccactatatatatattattttcttacctatttgttggttgataagcatttaggctggttccatatttttgcagtgtgaagtgtgctgctataaacatgcrtgttcaagtgtcttttttcatataatgacttcttttcctttggatagatacactcatccttcttgagagtgctttctaagaattaaacagggattaagtgttgtgacctaggcctgtggtcactgcagctctttcagcactaggggataccctaagcccagggaaactataactcttgcaagctcctggatat

SEQ ID NO: 770180 - DNA, 754 bp, Homo sapiens
gatgtactttttgttttttattttgttttattgtaactttaggttgcaggaaaccagtgatgctcacatctgcccctatgtatagcataaacctgtttccttttctaaatccacttttccaagttcaccatgctaaatcatcatccctttgaagctcatgcaaaatcaaaccactatcagcatttgtactcrgtcttctggtttttgtttgtttttttcattcttatccattcctttgctttctctttgttgttaatttctttctccctctttttccaatttcaaacttaaacttgtttgtaaactctttgtatcagcaatgatgagggaaaaaccagttattttattagagaaaattcagcacacccctacttgatctgtagaatattctctagctcatatcctcgctaataatttgagtataaaataaggggaagtctttcgagtgtgggcccaacataaagctcttggtccattcttagtagggcacaatgtttttaagataatgcttcccaagccagggtcatagcttgcacctgtaatcccagctactccagaggctaaggcaggaagattgtttgaggccaggagttcaagaccagacagagcatcatagtaaaacctcatttctaaaattattttttaaaattagtcaggcatagtgacatgcacctgtagtcccagccactccaaaggatgtggaagaaggatcccttgagcctaggagtttgaggctgcagtgaaatgtgatcac

SEQ ID NO: 770181 - DNA, 589 bp, Homo sapiens
ctaaatcatcatccctttgaagctcatgcaaaatcaaaccactatcagcatttgtactcggtcttctggtttttgtttgtttttttcattcttatccattcctttgctttctctttgttgttaatttctttctccctctttttccaatttcaaacttaaacttgtttgtaamctctttgtatcagcaatgatgagggaaaaaccagttattttattagagaaaattcagcacacccctacttgatctgtagaatattctctagctcatatcctcgctaataatttgagtataaaataaggggaagtctttcgagtgtgggcccaacataaagctcttggtccattcttagtagggcacaatgtttttaagataatgcttcccaagccagggtcatagcttgcacctgtaatcccagctactccagaggctaaggcaggaagattgtttgaggccaggagttcaagaccagacagagcatcatagtaaaacctcatttctaaaattattttttaaaattagtcaggcatagtgacatgcacctgtagtcccagccactccaaaggatgtggaagaaggatcccttgagcc

SEQ ID NO: 770182 - DNA, 609 bp, Homo sapiens
gtaagtattattttgatggaattaataattgtttaattgtgtctagaggtgatcattctattcatttaaatgtatgttttcttttttcttcaagtttttgttatggactatgttcatttctgggagtttgaagaaagtatattttaatcctactaattgcaattttccttaaagatcattcctccttaagctcaataattgactctgagaaccatcctgcaatacaaatgatgtactgatactgagttacaattcaaygataaatgttaattggtaacaaaaataaaaatcaaaagtcagcaatttgtttttgcttaatttggcttagttatgacctctcagaattacagaagtaggtaggacatctccccatccttctactgtatttttattttcacaacttacattggttttcagatttaagcaccataatcaaaccctggagcaacagttgaagggctcagaatgtggtagtagccttaaaagtaagtgaactaagcagtcatatatgaaatgatttgaaagacactaaggattttcccctacatctctggaaattctaccattaggcattcattgctttggctaaatggttgtctcttctctgtt

SEQ ID NO: 770183 - DNA, 609 bp, Homo sapiens
gtaagtattattttgatggaattaataattgtttaattgtgtctagaggtgatcattctattcatttaaatgtatgttttcttttttcttcaagtttttgttatggactatgttcatttctgggagtttgaagaaagtatattttaatcctactaattgcaattttccttaaagatcattcctccttaagctcaataattgactctgagaaccatcctgcaatacaaatgatgtactgatactgagttacaattcaacgataaatgttaattggtaacaaaaataaaaatcaaaagtcagcaatttgtttttgcttaatttggcttagttatgacctctcagaattacagaagtaggtaggacatctccccatccttctactgtatttttattttcacaacttacatyggttttcagatttaagcaccataatcaaaccctggagcaacagttgaagggctcagaatgtggtagtagccttaaaagtaagtgaactaagcagtcatatatgaaatgatttgaaagacactaaggattttcccctacatctctggaaattctaccattaggcattcattgctttggctaaatggttgtctcttctctgtt

SEQ ID NO: 770184 - DNA, 609 bp, Homo sapiens
gttttcacacccaaaaagttgcctttcaacccaccacaccccctaccctgaacccatataaaccctgaattccaagctccagagcagaccagcaagccagcagaccagcagacagatagtggaatgatgtagcagataaaggggggagaagaggaacatttgaacacctagaggagtatggctgggggtggtcagagaggagtccrgctactggacggcccaactccaggggaggatcacctactcactccatcccccacttccagttccctgtctatcccgctgaaagccacctccaccactcaataaaaccgcacgttcatccttgaatctatgtgtgacccaattttttcggaacgctggacaagatctcaggatacagaaagctgtcacactggccctctgcccttgcaaaaagacagaggatccattgagctgatttgcactcaagccatctgtggatggcaaagctgaaggagctttgtaacactggggttgcaggcacccacccctagacactacaacagagctggagcccaaagcactcccccagactgtgcacctgcctgtctgcatgcttcccctcccacaaggggtttgagcagcagg

SEQ ID NO: 770185 - DNA, 645 bp, Homo sapiens
gaattagttcagaaaaccagtctttgagctctaagactctttcctcagattggtatacttgttttgagacagagtcttgctctgtcacccaggctggagtgcagtggcacgatctcggctcactgcaagctctgcctcccaggttcctgccattctcctgcctcagcctcccaagtagctgggactacaggcacccgccaccacgctggctaatttttcgtatttttcagtagagacagggtttcaccatgttagccaggatggtctcgatcttctgacctcgtgatctgccctcctcagactcccaaagtgctgggattacaggcgtgagacaccacgcccggccacaaagtatttttagttttgaagtttgagctataatccagtagatggtgcttaaccataatggcctgtaggtaggctcttgctcagctaaatggttcttctgcattttgttagaattgcagcacgytccctgtgagtgctgcaaaggtgtgagctcctctcctactccagtcctggctgcagatctcggcttgacactcctgggctgcccaccacacccgtggggttagctcaggctttatgttccctccccagcttagaagccgtagaagggaccttggaagttctgtggcagagggc

SEQ ID NO: 770186 - DNA, 614 bp, Homo sapiens
aagtttgagggaattttcaggctaggggacaacagttatcagatcaacagaaacagtatattaaagtattgaaacagctgcttaaagctagtggaatcatggtttygcaggctcaattaagggacctaatgcaactgttgtttcccatactccatggttcatggaagaagggatattagacctggagctctgggaacaagtgtgaataaatcttaaacaacatcatgcacaagagcaacaggtaccagtaacatctctaatgttctgggacttagttagggctgctttggtcctgctctacacagaagagcctaagaagggaagggaggaggaaccatcacctaccttaccacctcctccttctccctcagcactgccattactgggtaaagacacaaaagagaaaatggagatttcccctgagcctcctcctccaataaattggaagaaagacaagggatacactacagctatgggaccctgtcttaggcaagcagcattagaaggggagctcttagcctgcctggtgatgcaagatcaacaaggcaatcaggtatgaacactgtaatatgaattacaggtatgaatcagtaatatgaacccattactttcaa

SEQ ID NO: 770187 - DNA, 627 bp, Homo sapiens
aggcctttgtcatttaatctgtactaaataaataaaaatggctccagcttatcgaggctgcactctcatctgtggtgctaagctgtgcagtcccctagccatgctctcagacaaaatacctgtgtctgcacacttctttcagctgtcgctcagccagagtctgtgggacagacttggcagctggttccccgtgtgaggaatgctgcaacggattgtgacagcaccctcgaaaatgaaggtgaagagaatgcatagtcagtaagtcattggtgcccgctcgggatttccaagtttgagggaattttcaggctaggggacaacagttatcagatcaacagaaacagtatattaaagtattgaaacagctgcttaaagctagtggaatcatggtttcgcaggctcaattaagggacctaatgcaactgttgtttcccatactccatggttcatggaagaagggatrttagacctggagctctgggaacaagtgtgaataaatcttaaacaacatcatgcacaagagcaacaggtaccagtaacatctctaatgttctgggacttagttagggctgctttggtcctgctctacacagaagagcctaagaagggaagggaggaggaaccatc

SEQ ID NO: 770188 - DNA, 611 bp, Homo sapiens
gaaactaacctttgatcattcacctgcaggactgctctctactcggggggtcgacagtgttaattacccacaaactctgtttactctaggcctttgtcatttaatctgtactaaataaatacaaatggttccagcttgtcggggctgcactctcgtcgcgatgctaagtcgtgcagtcccctagccacgctctcaggcaaaatacctgtgtctgtgtacttctttcttcygtcgctaggccagagtctgtgggacagactcggcatactctgatggaggatctgagactaaattaagaatcaaggggtgctctgttttttgcaatatgaacttaaaagccaagaacctggcattgcttctttgcatgacccagtcagatcacacatcgttgcattttcctgtctccctcaaagttattctctgccttggaatcctgccaccaaacctcagcttgaggagacagatttgaatattacctgctctctgccttgaaaacctgccaccaaacctcagcttaaggagacagatttgaatgttatttcctatcttcttgctggtcaatcttgcaagaaaacttcttttctcaaaagctggtgccacagctaaagaaa

SEQ ID NO: 770189 - DNA, 611 bp, Homo sapiens
gaaactaacctttgatcattcacctgcaggactgctctctactcggggggtcgacagtgttaattacccacaaactctgtttactctaggcctttgtcatttaatctgtactaaataaatacaaatggttccagcttgtcggggctgcactctcgtcgcgatgctaagtcgtgcagtcccctagccacgctctcaggcaaaatacctgtgtctgtgtacttctttcttccgtcgctargccagagtctgtgggacagactcggcatactctgatggaggatctgagactaaattaagaatcaaggggtgctctgttttttgcaatatgaacttaaaagccaagaacctggcattgcttctttgcatgacccagtcagatcacacatcgttgcattttcctgtctccctcaaagttattctctgccttggaatcctgccaccaaacctcagcttgaggagacagatttgaatattacctgctctctgccttgaaaacctgccaccaaacctcagcttaaggagacagatttgaatgttatttcctatcttcttgctggtcaatcttgcaagaaaacttcttttctcaaaagctggtgccacagctaaagaaa

SEQ ID NO: 770190 - DNA, 469 bp, Homo sapiens
caaagatgcaaataatgcacagaccatctgtacatgagaaccagatgtctcatttgcatttggatttttccagtagaaatgaatgtggaggctttgagaaatgcattaaatttattttaattgacatagacttagaatgttgagacaaattattttccaggcatcaaatgcaaaggtcagtgtgtgcacttgaagggataaaaataacaatgaaagaagggcaaggcagctgaggtcggcactagaagcatytggaggatatggaaactataaggaggcagatattggaggcacagataaacacccaactttaactaatattgcttgagaccatctcatataccagttgttgtaaaagcaacttctgtattcattatttcatttaattatcataacatccatatggagaaactcatgaaaccccgctctgcagattaaaaaataaaaagacatagagactcaaagaggt

SEQ ID NO: 770191 - DNA, 601 bp, Homo sapiens
ctactttatctgaaaagtaaggaagtctcacgtttacctttgtcttaaggctgttttaaaccttaagccaaataataagtctgcatgtgccaatcataatgcctggcacataaaagacatttatacattaaaacctaattcatacctacagttttgctttgtttgttttttgagacatgatctggctctgttggccaggctggagtacagtggtgtgatctctgctcmctacaacctcttcctcccaggctcaagccatcctcccacctcagcctcccaagtagctgggactacaggcatgcaccaccacacctggctaatttaaaataaaaaatcatagagatgtggtttcaccatgttgcccaggctagtctcgaactcctgagctcaagtgatctgcccacctcagcctcccaaagtgctgggattacaggcgtgagccactacgcccagcccatacatacagtttatacatttattgggatacatttctgattctctcccatcctccatgctccaatcttcatcttcctcacccaactgacagtggcccaagataacattttcccatatatcttagtttcatatttgaaaggttgat

SEQ ID NO: 770192 - DNA, 601 bp, Homo sapiens
ctactttatctgaaaagtaaggaagtctcacgtttacctttgtcttaaggctgttttaaaccttaagccaaataataagtctgcatgtgccaatcataatgcctggcacataaaagacatttatacattaaaacctaattcatacctacagttttgctttgtttgttttttgagacatgatctggctctgttggccaggctggagtacagtggtgtgatctctgctcactacaacctcttcctcccaggctcaagccatcctcccacctcagcctcccaagtagctgggactacaggcatgcaccaccacacctggctaatttaaaataaaaaatcrtagagatgtggtttcaccatgttgcccaggctagtctcgaactcctgagctcaagtgatctgcccacctcagcctcccaaagtgctgggattacaggcgtgagccactacgcccagcccatacatacagtttatacatttattgggatacatttctgattctctcccatcctccatgctccaatcttcatcttcctcacccaactgacagtggcccaagataacattttcccatatatcttagtttcatatttgaaaggttgat

SEQ ID NO: 770193 - DNA, 571 bp, Homo sapiens
atcacatcattcgcggtagcacttcgcccagagaaacctagcccaatatggtaacatcagaacaatgcttcacctcacatcttcctttgaaagataaagaaaacacagaatcattctgcttctctccgggaaggaaggcaaagcgtttccccaggccctcagaacaccatctggctgcagtctttccttttagggacctggtattttctggcccagggacaaagcgcatttatttcagatggatcaacmctgtcacccagcgggcagacagctaggcaggctgaggccttagccttgctcttggcttgacagccagtatttgaataggaacctgtttgtttcgggtgatcaggattaattgttaatattctcttggagggaactgggacaacctcagctgacaagcctttgatttggatgtcatgggtgagtgcaacttaagaaagacatatattttcatcgtgctgatgcttttttttttttttttaagccactagtgaatttataagaagcacaggctgtaaaccaaccaagcatgtctaccaagactcccagaatcaaataggtttgc

SEQ ID NO: 770194 - DNA, 571 bp, Homo sapiens
atcacatcattcgcggtagcacttcgcccagagaaacctagcccaatatggtaacatcagaacaatgcttcacctcacatcttcctttgaaagataaagaaaacacagaatcattctgcttctctccgggaaggaaggcaaagcgtttccccaggccctcagaacaccatctggctgcagtctttccttttagggacctggtattttctggcccagggacaaagcgcatttatttcagatggatcaacactgtcacccagcgggcagacagytaggcaggctgaggccttagccttgctcttggcttgacagccagtatttgaataggaacctgtttgtttcgggtgatcaggattaattgttaatattctcttggagggaactgggacaacctcagctgacaagcctttgatttggatgtcatgggtgagtgcaacttaagaaagacatatattttcatcgtgctgatgcttttttttttttttttaagccactagtgaatttataagaagcacaggctgtaaaccaaccaagcatgtctaccaagactcccagaatcaaataggtttgc

SEQ ID NO: 770195 - DNA, 578 bp, Homo sapiens
acgcgatggacccccgaaaaagaaggtgaagaaggaccacgcggtcaagtcagtgagtaatcagtaagtcattggtgcccactcgaggttaccaagttcttggggaagttggttcaagctgagttttcattatgagacaacagttatcagctcaacagaaacagtatatagaagtgttaaaacactgttgcttaaggctagtggagcatcagtttcgcaggctcaattaagggacataataatacaaactgctgtaatcccaagaccatggttcccagaagaagaaacgaaagatgtagaactctggaacaagtggggagaaatcttaagcaacatcatgcgcaaaggcaacaggtcccagtaaaatctctataacgttatgggctttaattacagcacccctggctcagttacccacagaagagcctaaaaacgsgaaggaggaggaaatgtcacctgccttatcacctcctcttctttcggccctagtatcacccggccggccgaaataacaaagaggaaacggagtaaagtctccctttacctgagcctcctcctccaatagataagaaaaaaaa

SEQ ID NO: 770196 - DNA, 632 bp, Homo sapiens
ttaatcttcctgtgaaacccattaaagttggagagattttacaaaggacaagaatgggaaagtaacaataaacgaacaactttgaacatcggcagatttgtagagcatatttaaaaggctttcagtaaataaagcatcttaataagtcagctgctctaagcaggcaaagactcttggtttggttatagtttacattcccttgcttcctgaaggctactagctgaagtaatctaagctaaataacctacttcattggtgatcctgattgttttttagatgataggtgaggaaattctgactttaaagtgtcaggaaatttgcatatagaatcctggtacagcctttttatctactctactttcctaagcctccagagttaaacagtacttctttaaaagttaccatctaaatagtccatgcagagcatgtggctaccacagatgattttstaagtcgcttagaacagagacctagaggttattccctatccagtagcctataatggtgcagtccagtcaaaatagaatgcaagccacaaaggtaaggcaagtgagtaatttttaaccaaccttccttatttacttctttcctccctccctccctctctctctctttctttctttctttttctt

SEQ ID NO: 770197 - DNA, 572 bp, Homo sapiens
aaacaacagcttcctaggagagaaaagaaaaataaacagccaagaccacttcctgtaaactgtgctcaaccacctgtaacttcacagctgtcatttgccactgtacatgtcaagggcaaatcatctcacagtgcaaagtcatctctggtaccccaaagccaaaaaagtcaggtcatgcaatccaggaaaacagagctttagacctaaaaagaatctgcccatgactcttgaaactccacaaagaagacagaacaccctaaaagggggtgagagcacctttgttctgaattctttaaaaggggttcaaggttcaagtcattaracgccttctctagattttttggtactgcaaatggcaaaagggggaaggaggtatagggtggaagaaaagtagatgaaaggacgagttttttgtttgtttgtttgtttgtttgtttgttttaagacaggctgcaaacacagaaaccaaacacgtttttttcgtttgtttgctttttgcagctgcaaggaattttagccaaattagagaggccatgtaacccataatttggaattctcactcagatttgacc

SEQ ID NO: 770198 - DNA, 572 bp, Homo sapiens
atcatcactgagcgcgctaatggtaaggggaaattaagaccagctgtttgttaatcttaactttagccaagacaaacaccaattcagttacttacctagggatgggtctcaggctgaggactgctctctaccarcctagaagcaggaaaaagtaaactgatcttccctgttggatgcgcgctcaaattccataaaggagttatttgtcttacatcgtcatggaggcaggaaaaacttgccttccttgtgttggaagcaagtaaaactccaaaaaaaaaaaaaaaaaagcaggaattgtacagcaaaataaactttagatctcgaccaaattttgggagatcagggactttctggagggcgtgctctcagacctcagcaaattgtcctattggtttgagacataaagttagctcatgctggtaccaggcaccgataggagatttgtcaaaggcaggggcatctctactcagaatccctttgtggttaccaaaatgtgaacgctgaaaatttgagacaggtctcagttaatttagaccatttattttgccaaggttaaggatgcatgcctgtga

SEQ ID NO: 770199 - DNA, 604 bp, Homo sapiens
caagtcaggtagagttggtcaaatccattgggagaaagactggaacaaacaacaacaaaaaatcccaaccttatcatcactgagcgcgctaatggtaaggggaaattaagaccagctgtttgttaatcttaactttagccaagacaaacaccaattcagttacttacctagggatgggtctcaggctgaggactgctctctaccagcctagaagcaggaaaaagtaaactgatcttccctgttggatgcgcgctcaaattccataaargagttatttgtcttacatcgtcatggaggcaggaaaaacttgccttccttgtgttggaagcaagtaaaactccaaaaaaaaaaaaaaaaaagcaggaattgtacagcaaaataaactttagatctcgaccaaattttgggagatcagggactttctggagggcgtgctctcagacctcagcaaattgtcctattggtttgagacataaagttagctcatgctggtaccaggcaccgataggagatttgtcaaaggcaggggcatctctactcagaatccctttgtggttaccaaaatgtgaacgctgaaaatttgagacaggtctcagttaattta

SEQ ID NO: 770200 - DNA, 527 bp, Homo sapiens
taaagataaaatcagcttcagaactgggtaacaggcagaggttgaaagagtttggagggctcagaagaagacaggaagataaaggacactttgaactgcttagagactggttaaatggttttggccaaaatacttatagagataytgacagtaaagtccagactgacaaggtctcagatggaaataagagtttttgggaagtagagtaaaggtcatctgtgttacatcctagcaaagagcttggctgcattatgactacgtgctgggaatttgtgaagggttggacttaagagcgatgacttagagtatctagtggaagaaatttctaagcaaaaaagcattcaagatatggcctagctgcttctaacatcctatgttcagatgcaggagcaaagaaatgatgtaaagttggaacttatatttaaaagggaagaagagcataaaagtgtgggaaatttgcagtgggctgtggagcaactacttgctaaagagattagcaggactaaaagggagccaatgctaatatc

SEQ ID NO: 770201 - DNA, 527 bp, Homo sapiens
taaagataaaatcagcttcagaactgggtaacaggcagaggttgaaagagtttggagggctcagaagaagacaggaagataaaggacactttgaactgcttagagactggttaaatggttttggccaaaatacttatagagatactgacagtaaagtccagactgacaaggtctcagatggaaataagagtttttgggaagtagagtaaaggtcatctgtgttacatcctagcaaagagcttggctgcattatgactacgtgctgggaatttgtgaagggttggacttaagagcgatgacttagagtatctagtggaagaaatttytaagcaaaaaagcattcaagatatggcctagctgcttctaacatcctatgttcagatgcaggagcaaagaaatgatgtaaagttggaacttatatttaaaagggaagaagagcataaaagtgtgggaaatttgcagtgggctgtggagcaactacttgctaaagagattagcaggactaaaagggagccaatgctaatatc

SEQ ID NO: 770202 - DNA, 633 bp, Homo sapiens
tggtagcagagattgttaactcacctgcctatttttatttccttagcacctcagacagtgtctggtacacagtcagctctcaatacatgttgaatgaatgaatgaataaatgagtttctgaatacttaaggctgagactcaggccatggttaatgaaaaatggccaatattactattattattattattaatttttagagcagtagttttcccccagtgacaccctcaacctcaacatttgggatttactgtttattatgtgtcaaacagaaatctttgcacttttgcaggagagagtgagtgaggctgttgttcttctctttcatgttactgttagatctgcagatatgaatttcctgtggtctgagaacataagactcttggaaggacatcatgaaaagtcaattctgctggtgacatttctcctyttctctattactttgagacttgagtataagatgtgtttttcttataaattcttctgggaacattctttttttcttttctgctgtgtcaactccaagtgaagccacagttctcctgggctgccatcatggctatttcctcaccttaggctgtaaaggatcctaggagagaattatatgattttcagtgtaaatcaggcagcaggag

SEQ ID NO: 770203 - DNA, 649 bp, Homo sapiens
tttgtcagtgtgccagcagattataaacaatctgaacttgctctctatatgagtgaattcacatctcaatacttctgttgtttcttccctttttccttttgaagacttggaataaaacttccatagaatgaagcaaatttgatgtccttattttatttctttttttgtcartaaaccatcaggcaaaaggatgcaatctaagggaatttattgacacagtcttgttggaaattgtggtagagatttagaaagctcagtctctgcagttgtttatgaatatggtagtcccccttatctccggggaatattttccaagagccgcagtgtatgcctgaaaacatacactgctttttttccatacataccttcctgtgataaactttcccctttttactcaaaggaagcactttatggcttctctttggcatacctgaattgccagcattactacttttgtgctttggggccattattacataaaaagaaggttatttgagcacaagcactgtgatactgaagtgggtgatctgataacctagacagccactaagtgactcatgggcaggaaacagcacaaatactctggacaaagacaggattcttgtcttgggcaggagggagcagagcacaagatttcctcacactactt

SEQ ID NO: 770204 - DNA, 649 bp, Homo sapiens
tttgtcagtgtgccagcagattataaacaatctgaacttgctctctatatgagtgaattcacatctcaatacttctgttgtttcttccctttttccttttgaagacttggaataaaacttccatagaatgaagcaaatttgatgtccttattttatttctttttttgtcagtaaaccatcaggcaaaaggatgcaatctaagggaatttattgacasagtcttgttggaaattgtggtagagatttagaaagctcagtctctgcagttgtttatgaatatggtagtcccccttatctccggggaatattttccaagagccgcagtgtatgcctgaaaacatacactgctttttttccatacataccttcctgtgataaactttcccctttttactcaaaggaagcactttatggcttctctttggcatacctgaattgccagcattactacttttgtgctttggggccattattacataaaaagaaggttatttgagcacaagcactgtgatactgaagtgggtgatctgataacctagacagccactaagtgactcatgggcaggaaacagcacaaatactctggacaaagacaggattcttgtcttgggcaggagggagcagagcacaagatttcctcacactactt

SEQ ID NO: 770205 - DNA, 649 bp, Homo sapiens
tttgtcagtgtgccagcagattataaacaatctgaacttgctctctatatgagtgaattcacatctcaatacttctgttgtttcttccctttttccttttgaagacttggaataaaacttccatagaatgaagcaaatttgatgtccttattttatttctttttttgtcagtaaaccatcaggcaaaaggatgcaatctaagggaatttattgacacagtcttgttggaaattgtggtagagatttagaaagctcagtctctgyagttgtttatgaatatggtagtcccccttatctccggggaatattttccaagagccgcagtgtatgcctgaaaacatacactgctttttttccatacataccttcctgtgataaactttcccctttttactcaaaggaagcactttatggcttctctttggcatacctgaattgccagcattactacttttgtgctttggggccattattacataaaaagaaggttatttgagcacaagcactgtgatactgaagtgggtgatctgataacctagacagccactaagtgactcatgggcaggaaacagcacaaatactctggacaaagacaggattcttgtcttgggcaggagggagcagagcacaagatttcctcacactactt

SEQ ID NO: 770206 - DNA, 642 bp, Homo sapiens
gaggtcccatgcctggcccatgaaaccattctttcttcctaggactctatgcctgtgttgacaggggctactacaaaggtctccaaaatgccttcaaggtctttttctcattgtcttggatattggtagttggttcccttttatttatgcaaataacatgctaaacatgataaatatcctgacttcaaaaatcatgcatattccatggcagacgggaggcaggacyagattgcagctccagacagagcagcatgtggagttttgcattgtgaattttagctccaggtctactgcaagaacaaaccagcaatttcgagagcacccagagaccctctgaaagaagagaactgttcttacaggacccaggagacactgcaaatactgtgagtgccccagctagggaagtgggaaacagagactctcctttactgaacacacacccccactggagaagctgaaggtctgtttgtgggagaagtttccaactttatatggagctgaatcaagttagccaagcgaaatacaggggtagaggaagcagcaaaaaggccctgggggcttgctgggtccccaagcagcccattcctgcctgacaccacagggatccatcaggagggtggccagaggagcagcgcataaaac

SEQ ID NO: 770207 - DNA, 642 bp, Homo sapiens
gaggtcccatgcctggcccatgaaaccattctttcttcctaggactctatgcctgtgttgacaggggctactacaaaggtctccaaaatgccttcaaggtctttttctcattgtcttggatattggtagttggttcccttttatttatgcaaataacatgctaaacatgataaatatcctgacttcaaaaatcatgcatattccatggcagacgggaggcaggactagattgcagctccagacagagcagcatgtggagttttgcattgtgaattttagctccaggtctactgcaagaacaaaccagcaatttcgagagcacccagagaccctctgaaagaagagaactgttcytacaggacccaggagacactgcaaatactgtgagtgccccagctagggaagtgggaaacagagactctcctttactgaacacacacccccactggagaagctgaaggtctgtttgtgggagaagtttccaactttatatggagctgaatcaagttagccaagcgaaatacaggggtagaggaagcagcaaaaaggccctgggggcttgctgggtccccaagcagcccattcctgcctgacaccacagggatccatcaggagggtggccagaggagcagcgcataaaac

SEQ ID NO: 770208 - DNA, 631 bp, Homo sapiens
atggctgcaaccggggagtactcgggatcctcccggaatctcttccttggcatctggctcataataaggtttcaggtgtcttggtggtatccaaatcagctgttgatttttgcctggagaaatacaagcataacctctaccccaagttattattttacctatttcctaagtttttgtaatcagatctctccaccaaatcagttgttctgcttctgtctttgcagctggtttctgtagatgctgttcagctgctgataacatctatcctttgggcaggctcaaaaaatttaaagttaataatgctaggttcagttgyatctgtggggtcccatactctctgtctccccttttctgctgttgcaactgctgttttagggagagattcattctttctactatggctggtccttgagaattgtatgggataccagtaatgtgtttaatattctacatagagaaaaatgtagctagggcttggctagcataacctggggcatcatctgttttaatagaagctggaatgcccttcaccgcaaaacactgcaaaaggtgatgtttaacactggcagaagactctcctgtttggcatgtagcccagacaaagtgagaaaaggtgtccacacatacatgt

SEQ ID NO: 770209 - DNA, 724 bp, Homo sapiens
ggctgcaaccggggagtactcgggatcctcccggaatctcttccttggcatctggctcataataaggtttcaggtgtcttggtggtatccaaatcagctgttgatttttgcctggagaaatacaagcataacctctaccccaagttattattttacctatttcctaagtttttgtaatcagatctctccaccaaatcagttgttctgcttctgtctttgcagctggtttctgtagatgctgttcagctgctgataacatctatcctttgggcaggctcaaaaaatttaaagttaataatgctaggttcagttgtatctgtggggtcccatactctctgtctccccttttctgctgttgcaactgctgttttagggagagattcattctttctactatggctggtccttgagaattgtatgggataccagtaatgtgtttaatattctacatagagaaaaatgtagctagggcttggctagcataacctggggcatcatctgttttaatagaagctggaatgcccttcaccgcaaaacactgcaaaaggtratgtttaacactggcagaagactctcctgtttggcatgtagcccagacaaagtgagaaaaggtgtccacacatacatgtacataagctagtctcccaaatgaaggaacatgtgtgacatccatttgccaaagacagttaggttccaatccttgaggattaactcctcctgtaaa

SEQ ID NO: 770210 - DNA, 526 bp, Homo sapiens
aaaattgaggtataatagaaaagtaactgtgcacaaattttatttcactatttttactctgcagcctggtatctggaataactcaggcaatgatgatgccttaggtatttcttttaattattccagcgctaccttgcctcctagccctactgcaagcactcagctactccaagcaaagccattctaacaatttcgattaaatcctggcctcttcgcaaccacacacaaattaaaagcattactggatgatcccagctctagctcttgaaagtgttgttatacaaagaaggaagaacgctgccaaaggctgcttggcatttcctctgccacaggggagaattaacccattgggtttcagggaccaagcttttttttttyccctcactttcaactgttctttaaaaaaaacaaattctatcaagcacactttaaacagatttataatatggaaggtaccaatgagtttttcaagagcacacatttcccccaaagttttgagaatgccagcttcatgtttgtaagatgt

SEQ ID NO: 770211 - DNA, 606 bp, Homo sapiens
attgcaaaaggaaaacattaatggcaggaaatgctggagtaaaaatattctctatgctttgggtcacattatggaaagacatattttataaggacagtattacactgggtgtttgctgttgcttgcaaagtagtgtgagtttgtttagaagttaactcttaccatgccccagaaaaaaaggtggtggaaatgaagtagaccctactactactactactactactactamtaataataataataatcagctggagcacagaggtcagtcacccttctgacctctgtgactaagtgttactgaagggtaaagatccagactacatagcctttgcttttctgtagcccccaacttccaagttggcaaagataccactctcccagctaaagagccttcacaggagggtgctcaggatggagaggtgtgactgggacaatggtaagcaatgagtgagccagggactggagatactgattctggagaagaggggcctaagatggcatggtagcgaagggaggaaaaagatttgtttttaattaacttaaggggtaggaccaaaatgatgaaggaaagaaacctatagaagacaaactctgtctcagtaaaac

SEQ ID NO: 770212 - DNA, 601 bp, Homo sapiens
tgttaagagtcttagaatcccaggtggtagtgaggggatttctggatcctgaaggtcaagtgtttccagagaaaaagaggaatagagattaggaaacaccttctaatgtgggagctcgggcagggagagagtctacaactgtggtagctctatttaatatgataatgcatttctttttctttgtgccctttgcgcctttgctgtttattaactgcaccaactaccaggaaaagagaagagggtgtgggggaccaagatttaaaccattcaaacttcatattgaaagtttggttacagttgtattagaagaagggataattaacttgaggggtctgaggtctttctctttttctggaaacagggtttcactttgttgccgaggctggagtgcagtggcatgagcagggmtcactggagcctccacctcccaggctcaggcgatcctcctgtctcagtccccccaagtagccaggactacaggcacgtaccaccatacccaagctaatttttgtatttttagtagagacagggttttgccatgtgtccaggctggtcttgaactcctgagctcaagggatctgcccacctcagccgcccaaag

SEQ ID NO: 770213 - DNA, 636 bp, Homo sapiens
attcttcacactaaatatttttgttgcattgaaaaatacagttatttttcctaaaaatatgtaatttatttaccatgtaataggtttattattttaatgaattgatatatttaatattaattttatattaacaaataygcatatattttatatgtaatcttatatataattaacatatattaacatttgatatttaatcaattaataaaacatttcccagttttaatttcccatacagtaaatagcaatagctctaaccccatgaacaaaaggtctttggcattctcaataattttttttttttgacacaagttctcactctgtcacccaggctggagtgcagtggcacactcatggctcactgtagcctcaacctccccaggctcgggtgatctcctgcctcagcctccagaatagctgggcccacaggtgtgtaccacaatgcctggctaatttttgtattttttgtagagacgcggttttgccatgttgcccaagctggtcttgaactcctgggctcaggtaatccactggcctttggcctcccaaagtgctgggattacaggcatgagccactgtgcgtgacctcaaaaatatttttttaatgtaaaagggtcctgagaccaaagagctttg

SEQ ID NO: 770214 - DNA, 615 bp, Homo sapiens
tgttaaagagttttggagttaaacttgctcccttgaatggggtggaggattgtactctgtctgttgtcctttcagcacaagatctacatatatgtaggctaaaacaatcaggggaacacacttgcacacatacgtgaacacacaggcacatacrcacatgtatacatgcactactatctagtgtcactgtcattcctttacaatttttgctaccaaaaaaagtagagatggctgagtgtggtggctcacacctgtaatcttagcactttgggaagccaagatgggtggatcactagaggccaggagttcgagaccagcctggccaacatgttgaaactctgtctctactaaaaatacaaaaaaattaactgggcatggtggtgcatgcctgtaatcccagctaatggggaggctgaggcaggagaatcacttgaacccaggaagcggaggttgcagtgacccgagatcacaccactgcactccagcctgggtgacagagcgagactccgtctcaaaagggggaaaaaagccaaagccagagaaaaatatcttttctctgctgcatttcaaggttctgaagaagatgcttttgtgaagcagtggtctgccctctgc

SEQ ID NO: 770215 - DNA, 615 bp, Homo sapiens
tgttaaagagttttggagttaaacttgctcccttgaatggggtggaggattgtactctgtctgttgtcctttcagcacaagatctacatatatgtaggctaaaacaatcaggggaacacacttgcacacatacgtgaacacacaggcacatacacacatgtatacatgcactactatctagtgtcactgtcattcctttacaatttttgctaccaaaaaaagtagagatggctgagtgtggtggctcacacctgtaatcttagcactttgggaagccaagatgggtggatcactagaggccaggagttcgagaccagcctggccaacatgttgaaactctgtctctactaaaaatacaaaaaaattaactgggcatggtggtgcatgcctgtaatcccagctaatggggaggctgaggcaggagaatcacttgaacccaggaagcggaggttgcagtgasccgagatcacaccactgcactccagcctgggtgacagagcgagactccgtctcaaaagggggaaaaaagccaaagccagagaaaaatatcttttctctgctgcatttcaaggttctgaagaagatgcttttgtgaagcagtggtctgccctctgc

SEQ ID NO: 770216 - DNA, 461 bp, Homo sapiens
aggtgtttcgaatttgaagtcaggcatatgagaacacgcccgactcatctctgttgctgtggtcgaatgttagggctgaaggggaccttatagaagagtcctctcttttcagagagggaaactgaatccagaaaggctgaygtttctcaaggccacagagctggccagtagcagagttggggactcgaggtgaacttgagttggctccactgtcccaggctggctccatgactctgccatgacgcctgtgggacacatgctattggaattgctttccctgggctcccttcacctagatgcaggggtgggtgcttctgaaataagccttgtgaggatgaggagattaaagactggacatggggggaccatttttttatcttaaactgaaactttcaaacaatgtatcagtctaaggccaccttggataggtttgggaaataactcccagagctactttctgt

SEQ ID NO: 770217 - DNA, 461 bp, Homo sapiens
aggtgtttcgaatttgaagtcaggcatatgagaacacgcccgactcatctctgttgctgtggtcgaatgttagggctgaaggggaccttatagaagagtcctctcttttcagagagggaaactgaatccagaaaggctgacgtttctcaaggccacagagctggccagtagcagagttggggactcgaggtgaacttgagttggctccactgtcccaggctggctccatgactctgccatgacgcctgtgggacacatgctattggaattgctttccctgggctcccytcacctagatgcaggggtgggtgcttctgaaataagccttgtgaggatgaggagattaaagactggacatggggggaccatttttttatcttaaactgaaactttcaaacaatgtatcagtctaaggccaccttggataggtttgggaaataactcccagagctactttctgt

SEQ ID NO: 770218 - DNA, 687 bp, Homo sapiens
ttatcaatgtctaatgcaaatctggtaaataaaaacaaaatcagaaatgaagagtgcctttgatgggttcattggcagtctagacataactgaggaaagaattagtaaacttgaagatatgccaatagaaattatccaagccaaaacataaagataaaaaggagtgaagcacatccaatatctgtgggacaacataaaatgctttaaaataaaatgtaattagagtcccagaagaagccakgcattgtggctcatgcctgtaatctcagcactttgggaggccaaggtcaaggcaggaggatcacttgaggccaggagttcaagaccagcctgggcagcatagcaagaccccatctctctctctctctctctctctctctctctctctctctatatatatatatatatatatgtataatacacacacacacacacacatatatacacacacacatatatatatatatattttttttttaatttaatcaggcatggtggtatgtgcctgtagtccgactcaggaggctgaggcaggaggatcatttgagccagaagtttgaggctacagttagcagctatgatcatgtcactgcactgaagcctgagtgatgagaccctgtctcaaaaaaaaaaaaaaaaaaagagttccaaagaaaaagagaaacaggttaaaaaaattaaatataa

SEQ ID NO: 770219 - DNA, 687 bp, Homo sapiens
ttatcaatgtctaatgcaaatctggtaaataaaaacaaaatcagaaatgaagagtgcctttgatgggttcattggcagtctagacataactgaggaaagaattagtaaacttgaagatatgccaatagaaattatccaagccaaaacataaagataaaaaggagtgaagcacatccaatatctgtgggacaacataaaatgctttaaaataaaatgtaattagagtcccagaagaagccatgcattgtggctcatgcctgtaatctcagcactttgggaggccaaggtcaaggcaggaggatcacttgaggccaggagttcaagaccagcctgggcagcatagcaagaccccatctctctctctctctctctctctctctctctctctctctatatatatatatatatatatgtataatacacacacacacacacacatatatacacacacacatatatatatatatattttttttttaatttaatcaggcatggtggtrtgtgcctgtagtccgactcaggaggctgaggcaggaggatcatttgagccagaagtttgaggctacagttagcagctatgatcatgtcactgcactgaagcctgagtgatgagaccctgtctcaaaaaaaaaaaaaaaaaaagagttccaaagaaaaagagaaacaggttaaaaaaattaaatataa

SEQ ID NO: 770220 - DNA, 594 bp, Homo sapiens
gtgatgagaccctgtctcaaaaaaaaaaaaaaaaaaagagttccaaagaaaaagagaaacaggttaaaaaaattaaatataatggctaagaattttccaaaattaatgaaagacaaaaagttgcagatctaagaagcccagagtcccaagaatacctctctccttaaaaaaaaaatgaatctagatacatcacaatcaaactgctgaaaactgaagataaaatatattgaagtcagtgacaaaaaaggaaacattacgtgcagagggataatacatatcacacaatgatacaaatcaaaaattaygtaaggcataagacaaggtactgacatctttaaaataccaagagaaaaaacctgacaactcagaattttatgtctggtaaaaatacctttaaaaaatgaaggtaaaataaagaccttcagacaaacaaaagctgagaatttattgcccataaacctgtgttacaagaaatataaaggaagttcttcaggcagaaggaagatatcaagtggaaattaggatacacacatacaaaaataaagaagctggaaatgaaataataaaggtaaatattaaattatatttcttact

SEQ ID NO: 770221 - DNA, 530 bp, Homo sapiens
aagacacgggctagtgtacgtacaacgcacagacaatacaagatccgcatagcagaacctgtagttcatgttgtccaccttccctctgatgaatctccttttgtctttccctctttggatacactaataactgtttttttttttttttttttttaractgagtattgctctgcagcccaggccggagtgcagtggcacgatattggctcactgcaacctccgcctcccaggttcaagagattcttatgcctcagcctcctgagtagctggaactacaggcatgcgccaccatgcctggataatttttgtatttttagtaaagatggggtctcaccatgttggccaggcttgtctcgaactcctcacctcaagtgatccacttgccttggcttcctaaggtgctgggattacaggagtgagccactgtgctcagcctgatatactaatatcttgtagagtgtctatagcaactttacacacaaatgggggcctgatttcacccaaaactattccctgatatttgattgaaa

SEQ ID NO: 770222 - DNA, 472 bp, Homo sapiens
aagcaaagcagaagccagcacatcacatggcaaaagaaaaagagagaggaggtcccagacttttaaacaaccagatctcacgtggactgagggagaactcacttatcagcaaggggatggggctaagtcattcatgagggatctgccccattattaccaaaacaccagtggtttgatgtaggtcttgatgcttgcttcacagaaagccaatcactgaaacaacagttattgccaaggaaggctttaatcagttgctgcagccaaggagatgggcgctcagtctcaaatccatctgcctgactaaaactaagagtttgtatagcaggggagaaaygtaacagtgtgtaagaaaacaaaaattagggaagggtcaaggacgcaatcatggtgaatgagggattcatgatgtggtgccatcatctggtgagtttcagttctttgatactttctttgagaggcctgaaggttcttt

SEQ ID NO: 770223 - DNA, 564 bp, Homo sapiens
aggatctgaagcgttttatctttgccgtgtacttgtggtggcagttgttctgtcactctttaagtagcccctgcgtgaggtaaaaattcacatgtgcagatgggtgcttgatgaaaggactctccttgccccatcctacctcccagagttaaccatggcckgcagtttgccacaggccttccaaagtgcgtaactaagcctgggacctcacaaataagtctcttccctaatggccacctgattttcatcagacttgccctggtttcctaagcctttgggctgataactgtgtttacagcttgttaaatatgtgcctcatttattctttcccggatccacattcattcttgggaagctctcagtggcatttgtggagaccacagcccagagccctcctggacaggatcaccgggcagactcttggccagagggcagaggacttctgtgtgtaaatgactctaattcccatgatattaatagattatattttcagggtctgtcttgagtggcccattctctgtaggggataatggtttttagaaaagaacttttctggatgtaaca

SEQ ID NO: 770224 - DNA, 616 bp, Homo sapiens
tgtggggtgaggtgctaggatcgcttgagcctgggaagcagagtttgcagtgagccaagactgccccactgtactccagcctgggtgacagaacgaccctgtttcaataaaaataagaaaagaaaaagaaacaagaaacaaaaggaagcactattcttactcctctgtarccaagtctatgtctttcagaaccttgtttatccagatataaaatacagttcatgttacttacagctaattaccgcaaagaactggaatgaatttttaccagttacttttaataataacaacaaaagaacaactataaccaatgataagcatatgcatattccatgactaaactgcaatcaacccatctggggttaatgttgtgttaacaaaatatagtgtaaagaaaaggaccatcaaagctaagggtctacgcaagcgttttaaggggatttaactttttctgactttttatattacatttgaatattgttctttcttttttcagcagtattattcctgaagacccaaactttaagaaaattgtaaggaggatgtagtgatttgagtccttcatttgtgttaaatgagaagttgggactgtttcttcccactgaaatgggatatc

SEQ ID NO: 770225 - DNA, 599 bp, Homo sapiens
ctataataaaacctaagacctttgctttttgtacaacactgagaaacctaattgcccatgtttatccatctgaattcctatttacacagaagaactacttgtctgcattcaaaatcatgtagagctttggttactaaagattctttcttgtaaaacaagatcagtggttagttttaaggaacatgactagaaagcattccaaaagtagaaaactgtcagaycatctgaactaacagcatacgaaagaagcagaagaggaatgaagaacttggacaagttttttagatctattttctgatatgtctagtattcctggttttatcgatactctagttagaagcaaggttttattatttaacagggaaatgtttccttttcccctagaaagaacgaatgccatcatctgatacctactttaaaacactcctttcccagatcttaattcatctaaatgtcccttggggacttcaaaaatcaatgctgctaaaactaagcttatcatttttttcccccaagtttatttctccccatctaccctggtgggtacagtctaaacttaggagacatcccagactccctactctgagggtcctctgact

SEQ ID NO: 770226 - DNA, 580 bp, Homo sapiens
gttcctggctgtcccacagagcctggaggcagtccatctcctttaaagggtctgtggattctcttggctttcctggtatgttcctgcagtagttcttggagcaaaagttcacgatgtgggcctccacacactgctctgtttgcctgagtggaagctgcaagttagtccttccttctatttgccattttcaggttcagggctcactcctcacttcttytaagttctccaattgcaaaagcacattcaatatttttaataaaaaacatatgctttaaatattatccaattaattactaacagtacccgactaaaatatgtaacctggaggaaaaagaaagacagtctgttggtagttcagtgctgtatgtatcccaagatgtgttttgatggccttttgtcaccaactgggacagcattgtgtcacttgagttctagatttgcgaaaatattgactggctgccgtgtgtgctcaggatcctgtagcatagcagtgaggaatgttcaatgatgttttcatcaacctgtatttagtgatcagtattggttacagggactgccactcaggaagggatataggtaa

SEQ ID NO: 770227 - DNA, 624 bp, Homo sapiens
aaaaagatgggcagaacatatttcataagaaatgaagtgtacatggctgttacatagaaggaaataagcatttgcatatatagtttgcatgcaatgggaataagacattgtgaaaaaaatgaaaatctaatggtaatgagggagagagagagagagatggcatgatttatgtaggcaaataattagttgctgaatgatccaaaaatgtatcaaaggggcataaagggatgaaaaaataagaagaaatcattatttgctaaaatgctgttctcattgatggctatactccatctaattccacatttaaaaatttaacatatgactttattaccttctcttactgttagaatataagctttataagggcaaagatctttcttttgcttgcagatgcrtttctagtatccatgagtgtgcctaaccttctatgaattaaataactttatattgaattaaggaatgcataaatatagggaaataaggagagaaattaatcagactaatataatttatatcaattaattttattgtgaaaggtaattaccaaatcaaaataaatactaagagaaattttggtgtgttgaaagatgatattaatgaccaaaaaaataaaaaaatagaaat

SEQ ID NO: 770228 - DNA, 624 bp, Homo sapiens
aaaaagatgggcagaacatatttcataagaaatgaagtgtacatggctgttacatagaaggaaataagcatttgcatatatagtttgcatgcaatgggaataagacattgtgaaaaaaatgaaaatctaatggtaatgagggagagagagagagagatggcatgatttatgtaggcaaataattagttgctgaatgatccaaaaatgtatcaaaggggcataaagggatgaaaaaataagaagaaatcattatttgctaaaatgctgttctcattgatggctatactccatctaattccacatttaaaaatttaacatatgactttattaccttctcttactgttagaatataagctttataagggcaaagatctttcttttgcttgcagatgcgtttctagtatccatgagtgtgcctaaccttctatgaattaaataactttatrttgaattaaggaatgcataaatatagggaaataaggagagaaattaatcagactaatataatttatatcaattaattttattgtgaaaggtaattaccaaatcaaaataaatactaagagaaattttggtgtgttgaaagatgatattaatgaccaaaaaaataaaaaaatagaaat

SEQ ID NO: 770229 - DNA, 412 bp, Homo sapiens
tatagtaaacggaaattttatcttcaatgtagaagactgagcagtagcccaggttcacatataatctatataagcttatttgctacatctgacttcatccagcattcttatgtcttatagatatcactcaaagcacactgacctacttccttttcttgatcacatcttggtaacttgcaytggctgtattctgtttaaaacgttcttcaggtttccacatggctttgcctcacattttcctcaattatctgttcaagtgctactttttagtgaaaaaaaatgtatatgttacataaaacagcaacccccaaaatgtcactacatacaaattctcattcatcatagcacttatcatcattttgtacgttatttgtttgcttacttacgtattctctagctcctttgagtaaga

SEQ ID NO: 770230 - DNA, 629 bp, Homo sapiens
gtcaggtataccgtttttttatttcgtagatgccctttatcaggttgagatcatccttatgttttttttttcatttttttttcttgtattttgaggatttctatcagaaatgggtataggttttgtcaaatcttttgtatctatttattgagatggtctyatagtcttgcttttaaaatttaatacagtgaattaattgattttataagggttaacccagcttggagaaaccacctttcggtaaccatgtgttgttatgtttggtattggtggagtcaatttgctacatttctatgtggaatttttatagttttttcatgagcaatactgtgttgtaagttttatttcctttagtgtcatgcttttatactattggtgtcagggtattcctgggcttatataataaatggagacataatttatgtgtctaactttctggaatagtttgtatgaaattgatattacttctttcttaaatgtttggttgaatttactagtgaggccatctgggcctaaagttctctttgtgaaaaagttttctatctactgaagatatgttgtttcttactgggcccttggttccactatatttttaagtcttaagaggttttttttttcagtccaatggt

SEQ ID NO: 770231 - DNA, 635 bp, Homo sapiens
ttaataattataaatgaataaagatatataaaatatggatataatatatacttggatacatatgtaaagtatatataatttgtacataagtagttgtatatgtattgttatacggatagcaaataaatggacactgcttagtatgttaggctgccatcaagcctattacactgaaactcctaatgaacctgataatatcatgagaaaaaaaaatagaaaaacatatttataacacagtaagatattctttaaatggtgctgattcagctattcatcgaaactaaaatgaaattaaagtttcagggaagctggggaatttaggcatctatgtctgttagactccctgaaaggactgtcaaatctactgaattttagtcccattttctgaagattaaaaacagaaaatagtaagagctagaatgaccttttcatgtcttgaatcttgaataatttcttttcactgctcactgtgatttmataataaaccaagctgaaagcaactctgaatagttatatttgtcagtctttgaaactatacggagctgagtggtgggagcagatgggcctgaatagtggctaagtgttattttttcccacctacaaattcacaaatcaaaatattttccccgagtgtg

SEQ ID NO: 770232 - DNA, 576 bp, Homo sapiens
taagagcgttgatagaagggaatggttttaataatagacaatcaaatctaagctcagtatcagtcctggaaagggctcagattgggctttcttgaatcaaatctcttcctctcattctctacctatgcccctagatattcaagctgcctgctcacccccaaacctgcttccctagtctcatcatttctcctcatttccttagctacaaaactagcccagcctcttaattaagcagtaggagtgatagaaggcaraaaaggctggtagccctccttgccaagatgtggagagaaactgcctaggaaaaattcaatatagaaaaaagatttcacagagagaataagagagcctgattttgaaagtattgtttgcacccctgagccagaaaagtatagggacggcccatccccttacagctcccagtggaatcaataaatacccctttttgctcaagctagttgaaattgtactttcttcacttgcacccagaacatgtctcactaatataaccttcaagaaattcccattctagtgaaggattgccaggaggcagaaaactgctcaacttattaaact

SEQ ID NO: 770233 - DNA, 557 bp, Homo sapiens
taatgtagaaaatgacatatttattgggcaatagttcaaaagaggagctcttaaaaaggactttttttctagacatgcattcaggattcctatgaagcaagggtggagctcaaaactcaactgctgaaaagtctaggggagatggaggaaaagaatagggtgtcattgaatatatgagggatgctttggatctattctctgagtttattaattccatcttttctttctgctcaagtaaaacttttctaagctgtaagcaccacattttagaaatttgagttaggcagaaagttattatttcatttatctttcagcatagttttgttataagactatataaagcacatatgagacaagccatgatrttatacatgatattgctggcagatctgagtagattaaaaatgactctagctactgagataatgagcttagagctgtggaagtctactctctgccattgttctgaaggacatgctagctgtctcaattattttttcatgtattaatagtattactttacttttatatatagaatgaaaactcctacactagac

SEQ ID NO: 770234 - DNA, 622 bp, Homo sapiens
tccaggctgaagtgcagtggcgcaatcttggcccactgcaagatccgcctcccgggttagcatgattctggtgcctcagcctcctgagtagccgagattacaggtacccgccatcatgccagactaattttcttatttttattagagacagggtttcaccatgttggccaggctggtctcaaactcctgacctcaagtaatccacctgccttggcctctcaaagtactgggattacaggcatgagccactgtgtytggctaaaggatgttgcctcaaggatcaggagctaaactggctatcagagctcctagagattatgcatttctaactcttaacattactgctattatgtttttagaagttgtagtgatgtaacctcaatgagtactcattttcccacaattttggcagtaaaagttagtcaacttctagattatttaatatcatccaatacattcttatatcataacactataaaatagcccactattgtttcttgtatcatgtgcagatatatatgtgtgtacacatatatgtatattacaacatttattcctttaatttggactttatatatgatgtgaaataaaggtctaattcttattgttcagaatggaaaac

SEQ ID NO: 770235 - DNA, 628 bp, Homo sapiens
tcatgtttcatggtatgcagagataataaactaaagttcacataaattccttgtagggaagcatcctagtcttttagttccctctgcagtgaaaagtttcctatgtccaaggtccacagactaggtttgtgggtggaatgagttctccctgccctccttttgaaaatagccatgcccattcacttacatattgtccactactgagccatagctgctttttgagctgcaattatagagttcagtagctgtgctacatagatcatatgacctgcaagcaaagcctataatgtatactatcttgctctttacagaaaaagtrtgctgacctctggcctattgctttgtacttacattcttgaaagaggccttaagatgctgtgtagcatctcctccctcccaggtgggatcaaatataaactataccacactgttcattatccagctaattggaagcatactgtcatcaaaaactttaccttggcacacaatgtgatcatgtggttattctgctaattcaataaagaactcgctgtttttaagaattaaaaaacttacaattaaatttaaaaacttagaatagatgcaggatttaccctgggtaaccttatctaaattgaggcacaaaaaa

SEQ ID NO: 770236 - DNA, 626 bp, Homo sapiens
ttagtctaatgaaattaatctgtaaatcaattctctccacttatatttttacatacctatctttctcttctaagagcagacgaatttattcttggactattttattggcaaataatgaatttcagtagttgttaaaatagttcttagaactctttcatcttccatctgctcttaaatggagagaggttaaaaatggagaaatctggtctggcgcagcagtagctcacgcctgtaatcccagcactttgggaggccgaggcaggcgggtcacctgaggtcaggagtttaagaccagcatggccaacatagtgaaaccccatctcaactaaaaataccaaaattatccaggcatggtggtgggtgcctgtaatcccagctattcgggagactgatgcaggaaaatcatttgaacccaggaggcggaagttgcrgtgagccaagatcgcatcattgcactccagcctgagttttgacaggagcgaaactcagtctcaaaaaataaaaaaaataaaaaaaaataagagagatctccaagtgaaatttttcatttatacagaactgaacttctgattaagaaggcactgatcgacattctacagctgttatgaaactacatgacaacatta

SEQ ID NO: 770237 - DNA, 627 bp, Homo sapiens
cagaaaggctcacattctgcggtattcctccattaaaggattttccatcttgagataagtaagggtaataccctaattcatttggataaaatatggcaatttttgacccactctgagtctctaaaggatttgatataatgttaaatacttgaagatttatatccacgttgaaggaaggcatacaatacattgttggggctgcccagaaaatgttgaaaggctggctcttgatcaccggaggcattgctggtttgagggctgcctgagttaataggataaagagtggtagcactcctaaccacgccacycatgggttacacatggcttgaggttttcagcattacagcagtctccttgaaaataataagcaaaatatcatacataatggagtcaaatgtctcttaagttttgtggtatacaatgaatagaccaaatattttaaaatatctttgaggcttattaatatctatgccaatttatagtgaaatgtgaaaaaaatatatactcaataaaaactataaaaagtttcacacatttgtcagctatgcaaactctagctgctagccattctggttttaatttcctatgattctgaatacgctaacccaaaccttcttgtactgacaa

SEQ ID NO: 770238 - DNA, 510 bp, Homo sapiens
tcaagcctgctctttttcacctctttcactgctactctccacaccaccatcacatcctgcttggattattgcaactctagagtctatttgactcagagcaaatggagtgatattatttaaatttcaagtttaaaaaatatgttgctacccttcttaaagtcctcctgtggctaccactgctatttgaatgaaatctgatgctacctccctccrtaagaccctacatgatttgtccagttattgtctctctctctccccaaacttctctcatatgtactctcccttcaagtcactctctctagtaagatggtctcctttctgtcccttaaactcaccaatcttattctggctttagaacttctgcagtagctatttcttcgttaaactgaatcttttcatcatttagaaaccattcataaactacttcctcagagaggcctttcctgaccatcatatgtaaagtatagctcttccccataatcagtaacggcctatcccattttactttcc

SEQ ID NO: 770239 - DNA, 510 bp, Homo sapiens
tcaagcctgctctttttcacctctttcactgctactctccacaccaccatcacatcctgcttggattattgcaactctagagtctatttgactcagagcaaatggagtgatattatttaaatttcaagtttaaaaaatatgttgctacccttcttaaagtcctcctgtggctaccactgctatttgaatgaaatctgatgctacctccctccataagaccctacatgatttgtccagttattgtctctctctctccccaaacttytctcatatgtactctcccttcaagtcactctctctagtaagatggtctcctttctgtcccttaaactcaccaatcttattctggctttagaacttctgcagtagctatttcttcgttaaactgaatcttttcatcatttagaaaccattcataaactacttcctcagagaggcctttcctgaccatcatatgtaaagtatagctcttccccataatcagtaacggcctatcccattttactttcc

SEQ ID NO: 770240 - DNA, 510 bp, Homo sapiens
tcaagcctgctctttttcacctctttcactgctactctccacaccaccatcacatcctgcttggattattgcaactctagagtctatttgactcagagcaaatggagtgatattatttaaatttcaagtttaaaaaatatgttgctacccttcttaaagtcctcctgtggctaccactgctatttgaatgaaatctgatgctacctccctccataagaccctacatgatttgtccagttattgtctctctctctccccaaacttctctcatatgtactctcccttcaagtcactctctctagtaagatggtctcctttctgtcccttaaactyaccaatcttattctggctttagaacttctgcagtagctatttcttcgttaaactgaatcttttcatcatttagaaaccattcataaactacttcctcagagaggcctttcctgaccatcatatgtaaagtatagctcttccccataatcagtaacggcctatcccattttactttcc

SEQ ID NO: 770241 - DNA, 482 bp, Homo sapiens
gctacctgaaattacattattggttttaaaatttcatattaatttatactagctcaatttgtactagttcaaacaggaataactaccgggtacttacatactttagggatagattttatctcacagaatgtttttacataatgtatatttttttacatggtattagctgttaacaattcaattttaccttggggtgtgtgcatgtgtgcatgcgcatrtacgtttgtgtgcattttctttacaggaaccaactcattgagtcagacctttactgtttgcttaattaaattcctcaagctcatgattcagaattcaagcaatatctcaatctagatgggaatttttaatttttcagagtgaactttcttcttcttaggcaatgctcattctttgttttcacctctccgtcaaatttcctgcttcttaatgaatttaattagtcagtcagtcaataattccatattcatccatccattcatcaa

SEQ ID NO: 770242 - DNA, 590 bp, Homo sapiens
aaaattgaatctttccattgcaagagcagagctttttgaagaagaaaaagagttctgaccttcaaaaagctaatagtctgaaatgttaagccagaaaggaagagagaatgcctgatgatgtgactatagttttctggcccaaaaagacactcatgttgaacagcatgtggaaggaagaagggaggaagaagaaaaggggagtcagagaatagtttagatgttggtggatttaaatggtttgccccttccctccaagccaagccctaaactagggaagaaattctagaaactctaaattcaagaatctcaaaaaaggtttataggtcctcaaagtagaggttgaagcctaggtaatcagcagtctcatggagaagtcccttgttccaacacagttttgcaacagtcaagtgaaaatggtagtaggacacgtctkcagagaggatttataatgataccctgagccttccacaatactggtgaggtagagagagcatctgaagtcctccatgcacaaaaagaagggtttatcatgaagctaaggaaattgaagcttcagagccctcatttgcataccccctttacaaagcccc

SEQ ID NO: 770243 - DNA, 540 bp, Homo sapiens
gtttggatccattgctggtgaactagtgtgagtctgggggagtgtgatgagcctcattttgccatattaccagggttggttttctgtttccttctcattcaggtaggctctgtcaaagggaaggtctatggttgaaggctgttgttcagattttttgtcccatggggtgttcccttgatgtagtactctctcccttttcctgtggatgtggcttcytgtgagccgaactgcagtgattgttgtctcttttctcagtctagccacccagtgagtctacctggctccaggctggtactgggagttgtctgcacagagtcctgtgatgtgaaccgtctatgggtctctcagccacagataccagcgcttgttctggtggaggtggtggaggatgcaatagactctttgagggtccttagctttggtggtttaatgctctatttttgtgctggttggcctctcaccaggaggtggtgctttccggagagcaccagccgtggtagtgtagagagggactggtggtgggcggggccctagaactcc

SEQ ID NO: 770244 - DNA, 540 bp, Homo sapiens
gtttggatccattgctggtgaactagtgtgagtctgggggagtgtgatgagcctcattttgccatattaccagggttggttttctgtttccttctcattcaggtaggctctgtcaaagggaaggtctatggttgaaggctgttgttcagattttttgtcccatggggtgttcccttgatgtagtactctctcccttttcctgtggatgtggcttcttgtgagccgaactgcagtgattgttgtctcttttctcagtctagccacccagtgagtctacctggctccaggctggtactgggagttgtctgcacagagtcctgtgatgtgaaccrtctatgggtctctcagccacagataccagcgcttgttctggtggaggtggtggaggatgcaatagactctttgagggtccttagctttggtggtttaatgctctatttttgtgctggttggcctctcaccaggaggtggtgctttccggagagcaccagccgtggtagtgtagagagggactggtggtgggcggggccctagaactcc

SEQ ID NO: 770245 - DNA, 515 bp, Homo sapiens
tgtcttgaatggtattgcttaggttttcttctagggcttttatggttttaggtcttacagttaggtctttaatccatcttgagttaatttatatataaggtgtaaggaggggatccagtttcagttttctgcatatggctagccagttatcccagcaccatttattgaatagagagtgctttctccattgcttttgtcacttttgtcaaagatcagatggttgtagrtgtcaggcatatttatgagctctctaatctgttccactgggctatgtgtctgttttggtaccagtaccatgctgttttggtttctgtagccttgtagtatagttttaagtcaggtagtgtgatgcctccagctttgctcttttttattgccttggctattcaggttctttttggtcccatatgaattttaaaatagtttcttaaaggttaatttcaatgtggaatctgaaaccatattagtgaacttttcatactctcttatattaaaattcattaatctaccttcaa

SEQ ID NO: 770246 - DNA, 548 bp, Homo sapiens
gcaagaggtgaccacttgaaagactaacaacagtaagttcaacagcagtaagtcccaggcacccaccttacaggacagtttaagcaactaaccacagctatttagtcttccccaaagcccccttgcggaggaggccccttgtctctttagaggctgaaacccgaggtcttttcaggttcctctgtggcccctcagtgcaaagatttgcctgggttytgaagcacggggctccctcttcctgtctggctctgacctccctcctgttcttcccagtgtggaaaaagtggctcagattccttcagcaagagccaacactgcctcctctgctaggtgtcccagggcagggggtccagccaactcagctgcagaggtgctgtgtttactctgggtcactgggtctctgggtcactcctgataacctcagaggagttctcccagtggatgagtttccactgtgtctgctccagatgttggcggctgggtgggtccccagccctgtgcaaatgtctgtgtaaaccacccacacgattggcttgagagggctggag

SEQ ID NO: 770247 - DNA, 548 bp, Homo sapiens
gcaagaggtgaccacttgaaagactaacaacagtaagttcaacagcagtaagtcccaggcacccaccttacaggacagtttaagcaactaaccacagctatttagtcttccccaaagcccccttgcggaggaggccccttgtctctttagaggctgaaacccgaggtcttttcaggttcctctgtggcccctcagtgcaaagatttgcctgggttctgaagcacggggctccctcttcctgtctggctctgacctccctcctgttcttcccagtgtggaaaaagtggctcagattccttcagcaagagccaacactgcctcctctgctaggtgtcccagggcagggggtccagccaactcagctgcagaggtgctgtgtttactytgggtcactgggtctctgggtcactcctgataacctcagaggagttctcccagtggatgagtttccactgtgtctgctccagatgttggcggctgggtgggtccccagccctgtgcaaatgtctgtgtaaaccacccacacgattggcttgagagggctggag

SEQ ID NO: 770248 - DNA, 627 bp, Homo sapiens
ctttttgccaaaacattgtaacaggcaccatgactataaatatatgccctcaagtttcttctggtctaataagaaaaaaaaatatcactgttcattaggactggcactcatttctaaacagaaagcctgtatcgaaagcaaatttagtgggaactgagatctgttgactgaattatggttcccctaaaaagacaagtgagtatagtatcctgttargtagaaaatagaaaaaatctagtccctgtagactgtttttcttctaggtctactctctagctccccaaatattaatctgatccggcactacaaaacactgcacgaagcactacaaaaacccacaccttcaaaggtgccaggtggtgaggcaaatgtgggtcaggtaaagagaacagactgaagtcaatagttctgaactggagctaaataaagccatgcaaacttgagcaagtcttttttttttttttactgtaaatcaacaaattacagttgtttatattcatggagtacaaagtgatgttttgatatatgtatacagtgtggaataattaaattaagctaattaatatatctatgacctcaaatacttaccatgttttgtgatgagaacatttgaaattcactctcata

SEQ ID NO: 770249 - DNA, 613 bp, Homo sapiens
gtggaggctctagaaccacaaatgtcagccacatatataaaagtttagtagtcacattaaaaaagtaaaaagaaacaaagttaattttaattttactagtatgtgttctttaacataatatagctaaaatattatcatttcaatatgtaaccaatgtaaaattatcaagattttttwaaaaatcatttttattatttaaaaaatttttcagcacatcacggttgcaaagtagatattttatattcttttttcatactgagcctttacattttatacttacagcacatctcagttcagactaggtacatttccagtgctctaaaccacatgtggccagtggctaccatactggacagagaagctctagatcctgccttctctagattccacggagaagctatgagcaggattctaagaagttagagctcagacctcagacatttcctagtgattctattggtttgttttaataaactttttactgacgtataacatgcatgcagagaacagcacaaaccatgagtgtgcaacttgaattttcacaaacacacctgtgtaatcagctctaagatgaagaaacagaaaattacccacagcccagaagagtccctca

SEQ ID NO: 770250 - DNA, 631 bp, Homo sapiens
actggtgatatcaatgggactctagatgttttcaaactgaatttgaactctcattttaggcttcgtattctgctttttccatttcattaatgacacaaacatgatccaaatccctgaaatactcattatagtgataacctacagatcacacttaaaacagttccagatttactgctggggaaggtcttatgattcatggcttacatcctgtccccaggtaaaatatcttataattttctcaaactgttggtgtactgattaatacataacctactgacatggaaaaggacacttacttctttctaaattatgaagttttactgagtgtaaacttcaygattctatgtgaatgtcctccattccacatagaacattttagcctatgtgttgtcatctgtaaccaatgaacgtaacctctgaattataccttccaatgaaaaaggacaactctgatatgaggagacccgcttctcctaaactttcttattaaaacatttcaagttgttgggctgggtgctgtggctcatgcctgtaatcccagcattttggaaggctgaggcgggcagatagcttgaggtcaggagttcaagatgagcctggccaacatggtgaaaccccatcaccactaaat

SEQ ID NO: 770251 - DNA, 621 bp, Homo sapiens
tggctattaagaataatgcttctatgaacatttgtgtacaagttcctgtgtaaacatatgtttttatttatcttgcatagatacctaggagtggaattgccacttttattttgagaaacttccaaactgtttttcaaagttttccatcagcagtgtgtgaaagtcccgatttctctgaattcttgctaacatttgtcattgtctgtcattttgattttagccatcctggaggatatgaagtattatctcattgcagttgtgatttktatttccctaatggttgatgatattgagcatcttttaatatggtaactggccacttgtatatctttttttttttttttttgagagaaatgtctatttcctttgcatttttaaaaattggattatttgtctttttattgttgtaagagttaaagaactgtatttgatttctggttacaaattccttatcagatatatgatttgcaaatattttctcccattctggggcttgtcctttcactttcttgacagtgtccttggaagcacaaaattgttcaattttgatgaagtataatttatttactttttcttttgttgcttgtgcttttggtcccttatgtagggagaccattgcct

SEQ ID NO: 770252 - DNA, 621 bp, Homo sapiens
tggctattaagaataatgcttctatgaacatttgtgtacaagttcctgtgtaaacatatgtttttatttatcttgcatagatacctaggagtggaattgccacttttattttgagaaacttccaaactgtttttcaaagttttccatcagcagtgtgtgaaagtcccgatttctctgaattcttgctaacatttgtcattgtctgtcattttgattttagccatcctggaggatatgaagtattatctcattgcagttgtgattttyatttccctaatggttgatgatattgagcatcttttaatatggtaactggccacttgtatatctttttttttttttttttgagagaaatgtctatttcctttgcatttttaaaaattggattatttgtctttttattgttgtaagagttaaagaactgtatttgatttctggttacaaattccttatcagatatatgatttgcaaatattttctcccattctggggcttgtcctttcactttcttgacagtgtccttggaagcacaaaattgttcaattttgatgaagtataatttatttactttttcttttgttgcttgtgcttttggtcccttatgtagggagaccattgcct

SEQ ID NO: 770253 - DNA, 522 bp, Homo sapiens
tattttttttttgaggcggagtctcactgtattgcccaggctggaatgcagtggtgtgatctcaactcactgcaacatccgcttctagggttcaagtgattctgccgctgctgcctcagcctccggagtagctggractacaggcatgcaccagcaatacccagctaatttttgtatttttagtagagatagggtttcaccatgttgggcaggctggtctctaactcctgacctcaagtgatcctcctacctcggcctcctaaagtgctgggattacaggcatgagacactgcacctggccaaatcttaaagctggagaataatcccttttgcctccatgtgcttcctcctggacacactggggcggggattgggccgccaaagcctcaggcaagcccacccctatggcattgctgggtgcagcccacatggctactcctacaggatggagtctggtgcctgcagctttccccagcaggtgctgcatactgcctgtgattctgtagctcttggtgatggttc

SEQ ID NO: 770254 - DNA, 516 bp, Homo sapiens
tattcgtaatagccaagctatggagtcaacttaactgtctattgatgggagaatgggtaaagaaaatgtgctatatatatacacaatgaaatactacttagtcttaaaaaggaagcaaattctgtcatttgtgacaacatggatgaacctggaggacactgttccaagtaaaataagccagcacagaaagacaaataccacacaatctcacttatatgtggaatcaaaaaaagttgaactcatagaaatggagagtaccagagtctgggggaagtgaggggtggaaggagacatgaatcagcaatsggagatgttggtcaaagggtatagtttcagttggacaggaggaataccttttggagatctactgcagggcatggtgattacagttattaggttgatgcaaaagtaattgcggtttcttcccatggcatatggaaatatgctgtatttacattattttttcagaacttgattaataatttgaaaagcagtaagatattaaaataaacctat

SEQ ID NO: 770255 - DNA, 609 bp, Homo sapiens
ttctaaaagaataattccattacatgttaacataaataacgtatttttatttttaaaaacctatgtttttcgaagcataaaatatgtagtgagaagagtggcattgttttccatttttgcaaatctctttaatgtctggcttgctagaagtcagctggaatttcatatctgcttctgcattcattgttttagttggaatatatgaacatctggcctcacacggatacgtagatttaaaaaggcagaggacggccgggcgtggtggctcaggcctgtaatcccagcactttgggaggccgaggcaggcagatcacgaggtcaggagatcgagaccatcctggctaacrtggtgaaaccccatctctactaaaaatacaaaaaattagctgggtgtggtggcacacacctgtagtcccagctactggggaggctgaggcaggagaatcacttgaacccgagaggcagaggttgcagtgagccaagatcgcaccactgtactccagcctgggtgacagagcgagactctgtctcaaaaaaaaaaaaaaaaaagaagcggggcgggggcaggaatattcccatagccttttcagataatggaagatactatac

SEQ ID NO: 770256 - DNA, 606 bp, Homo sapiens
aaaagaagaaagtgcaatggaaagaagtagggagggggtgcctgtggagtcaagcccaaactctagatcaaatggaggaaagggttgtcatcgtgcctgccaatcccaatcatttttacggcctttagaaggtactgggttgagaaggattccaaagccaagtctgggctccacaagataggcagccgtgattgattgataatgtccacttctgggcgtggacacagaagtgcgggcatgctgcctgcccagcttttttttggtgcctttcccaggagctgatcgctgtgcctctgattatgcttcttcctctgccatttgtgtccagtttctcccatttccctctgayggcttctagataactagtgccccctagtaaggtagtaagaaatattgtaaaaatgttacagcatctgtatcgcttgaaacttctttgaaatgtaaaatcttgggtctcaccacagataatactgacttggaaactctggggtgagctccagagagctgggttctgacggccctcccagtcaccctgatgcaggctgacattgagaaccactgtttgttaggagaattttgaggcatgggctttccgatggagaaggc

SEQ ID NO: 770257 - DNA, 545 bp, Homo sapiens
atgtgtgcctctgtgtctgtgtgtgagatcatgcctatgtctatgtgagtgcctgtgtgtgtgtgtgtgtgtgtgtctgtgtaggcatgtgtgcctctgtgtctgtgtgtgagatcatgcctgtgtctgtgagtgcctgtgtgtgtctgtgtaggcatgtgtgcctctgtatctgtgtgtgagatcatgcctgtgtctgtgtctgggagtgcgtgtgtgtgtgtgtgtctgtgtaggcatgtgtgcctctgtgtctgtgtgtgagatcatgtctgtgtctgtgtctgtgagtgcctgtgtgtgtgcgtctgtgtaggcatgtgtgcctctgtstgtgagatcatgcctgtgtctgtgtctgtgagtgcctgtgtgtgtgtgcatatgtttgtgtaggcatgtgtgcctctgtgtctgtgtgtgagatcatgcctatgtctatgtctgtgagtgcctgtgtgtgtgtgtgtgtgtctgtgtgtctgtgtaggcatgtgtgcctctgtgtgtgtgagatcatgtctgtgtctgtgtctgtgagtgcc

SEQ ID NO: 770258 - DNA, 621 bp, Homo sapiens
tgtgtttgtcgagtatgtctcttcattctgggatcctctgttctgtgaggggtggttgtaggcatggctccaatggggtaggccaggctgggggcagtcaggtggtctcctgccctcgcaacgccttgtgcatttgtggtatattatggtcaatgatctcctcctcagtgaagctagtcattagaagtgaatccatgagtctggccgtagctgtttgtaactgtaagtttcattgaaataaaggaaccctctggcaattataagacaggaggcagggccaggggcagggtgtggacatctcatgagccatattctatggcactgcttctcccacagcagtaaggctgagagcwaaggagtgataggcagggtgaagggtgaagggctggcctcactcagtcacttgaccatgggttgaggaattcaatagccctgggcactgaatcctcagaatagatgtgttgtctccaattaccagaagaaaaaaatacaacagactgatgcagtgactttagtgaatatgtagcctaatatataccacacattacaacatcacatttactgtgtatttttattcctatgaccattaagagaaattgagtcagcaaaactggatactga

SEQ ID NO: 770259 - DNA, 640 bp, Homo sapiens
cgggccccagacccacttccataccaagccagcccccacagctccagcctctagggttgcatccacagaaccaggctttagacccacttcagcacccgaccagcactagtgactccagactccaggttggctcatgtggttccaggctctaggccagcmcttacaacccctggttccaagctggtctatattgacttaggatccctgaggactcaaagcctaggataactcaatcaccaggctggttcccacagaacctggctctaggttcatctccatagacccagtctccaggcccataccaggggaccccagtgccaggccagctcctgtggattcagaatggagtcccacacctgtggatgcaagcccgaggctcatccatggggaccaaggctctagtcttgccctcacagttccaggcactgggctggctcctgtagacccaagttccaggctcattcatccactgacccagacacagccccctccagcatgaggacttcaatagcaagcctcactatggacctcattagatggccccacccaaaatctctgtagaagctgactggtgaaggactttacataacaaggcaataagtaaaaactggaaaagatgcctaatttttaaaatgcagac

SEQ ID NO: 770260 - DNA, 606 bp, Homo sapiens
aaagcctaggataactcaatcaccaggctggttcccacagaacctggctctaggttcatctccatagacccagtctccaggcccataccaggggaccccagtgccaggccagctcctgtggattcagaatggagtcccacacctgtggatgcaagcccgaggctcatccatggggaccaaggctctagtcttgccctcacagwtccaggcactgggctggctcctgtagacccaagttccaggctcattcatccactgacccagacacagccccctccagcatgaggacttcaatagcaagcctcactatggacctcattagatggccccacccaaaatctctgtagaagctgactggtgaaggactttacataacaaggcaataagtaaaaactggaaaagatgcctaatttttaaaatgcagacaccagtgcaaagccacaaggatcacaaataatcaggagaatatgacatgaccaaaggaacaaaatgaaacactagtaactgaccccatagaaatggagatctacaaacttcctgacaaagcatttaaaataataatcttaaagaagtgcagtgagctacaaagagcataaaaagataact

SEQ ID NO: 770261 - DNA, 590 bp, Homo sapiens
tttgtgagtttagaagaaaggatccacttttttctttatacgcatcaaaaatagaaatagagaaaagggccaggtagtagatcttcaggctagcaggccctctattctctgattcaactattcagctctgctgttgtctcatgatagcaaccacagaccatatgagaaagaatgagtgtggctgtgtttttatgacactttatttatgaaaagaagcaatgggttagatcgggcccatgggcacagtttgctgaccccgtcttagatgatcaattgcgtatttgcccttgaagcctgcccaggaagtgggcttatcctcttatcaatatctctgtgctaaccatgcacatacatgcagcttctaaatctttcacacctgtgctccgtactgacatgtctatagctaaggttgatattaggtttcatactttagattcttggttagacgcwaagccttggtatctcactttgcaaaagccaaacgtcatgaacgtttctaatggtatagagtgatgttaggatcttgattcaaccccaacattagctgtgcatccattccatatgctccatataaccccatgtccacagac

SEQ ID NO: 770262 - DNA, 596 bp, Homo sapiens
ggtgaggagctgtgttcctttggagaaggagaggcactctgatttttagagtttctggtttttctgctctgttttttcccccatctttgtggttttatctacctttggtcttttatgatagtgatgtacagttgggtttttggtgtggatgtcctttctgtttgttagttttccttctaacagtcaggaccctcagctgcaggtctgttgsagtttactggaggtccactccagaccctgtttgcctgggtatcagcagcgaaggctgcagaacagtagatattggtgaattgcaaatgctgctgcctgatcgttcctctggaagttttgtctcacaggagtacctggctttgtgaggtgtcagtccacccctactggggggtgccttccagttaggctactccggattcagggacccacttgaggaggcaggctgcccgttctcagatctcaagctgcgtgctgagagaaccactactctcttcaaagcagtcagacagggacatttaagtctgcagaggttattgctgtcttttgtttgtctgtgccctgtcccagaggtggagcctacagaggcaggcctccttgagctgtgg

SEQ ID NO: 770263 - DNA, 596 bp, Homo sapiens
ggtgaggagctgtgttcctttggagaaggagaggcactctgatttttagagtttctggtttttctgctctgttttttcccccatctttgtggttttatctacctttggtcttttatgatagtgatgtacagttgggtttttggtgtggatgtcctttctgtttgttagttttccttctaacagtcaggaccctcagctgcaggtctgttggagtttactggaggtccactccagaccctgtttgcctgggtatcagcagcgaaggctgcagaacagtagatattggtgaattgcaaatgctgctgcctgatcgttcctctggaagttttgtctcacaggagtacctggctttgtgaggtgtcagtccrcccctactggggggtgccttccagttaggctactccggattcagggacccacttgaggaggcaggctgcccgttctcagatctcaagctgcgtgctgagagaaccactactctcttcaaagcagtcagacagggacatttaagtctgcagaggttattgctgtcttttgtttgtctgtgccctgtcccagaggtggagcctacagaggcaggcctccttgagctgtgg

SEQ ID NO: 770264 - DNA, 596 bp, Homo sapiens
ggtgaggagctgtgttcctttggagaaggagaggcactctgatttttagagtttctggtttttctgctctgttttttcccccatctttgtggttttatctacctttggtcttttatgatagtgatgtacagttgggtttttggtgtggatgtcctttctgtttgttagttttccttctaacagtcaggaccctcagctgcaggtctgttggagtttactggaggtccactccagaccctgtttgcctgggtatcagcagcgaaggctgcagaacagtagatattggtgaattgcaaatgctgctgcctgatcgttcctctggaagttttgtctcacaggagtacctggctttgtgaggtgtcagtccacccctactggggggtgccttccagttaggctactccggrttcagggacccacttgaggaggcaggctgcccgttctcagatctcaagctgcgtgctgagagaaccactactctcttcaaagcagtcagacagggacatttaagtctgcagaggttattgctgtcttttgtttgtctgtgccctgtcccagaggtggagcctacagaggcaggcctccttgagctgtgg

SEQ ID NO: 770265 - DNA, 614 bp, Homo sapiens
ccatcctgcacccatataaaccctaggctccactggcagaggggcaaagcagtgcagcagaaaaggagagaagagaagcagcagcttgatgtcagtgagaagcagcttgacttcagagggacagcttgacagtaggacctcagagaagagtttgtctggggacattcccggctgaacgccaggggaagaccactttcccactccattccctttccagctccccatcccastgagagccactttcattggcaataaaatcttctgcatttaccatccttcaattcattcatgcaacctgactcctcctggatgctggacaaggtcccaggtgtgggtgcaaaaggctgtcacagtggccctccactgagctgtctaatacttaagccatccacggatagcaaaactaaaagggcatactgtaactccaggggccatgggcaactcctagacactgccacgggaccatatggagttctgctcctgctggttgcccagaagcactcatcctagcctctgcacctgctcacctgcatgcttcccctcccatgaggggttgagacctgtgggctgagtaaacaagccaaccccttcacaagactcatgaaggggtcaag

SEQ ID NO: 770266 - DNA, 614 bp, Homo sapiens
ccatcctgcacccatataaaccctaggctccactggcagaggggcaaagcagtgcagcagaaaaggagagaagagaagcagcagcttgatgtcagtgagaagcagcttgacttcagagggacagcttgacagtaggacctcagagaagagtttgtctggggacattcccggctgaacgccaggggaagaccactttcccactccattccctttccagctccccatcccagtgagagccactttcattggcaataaaatcttctgcatttaccatccttcaattcattcatgcaacctgactcctcctggatgctggacaaggtcccaggtgtgggtgcaaaaggctgtcacagtggccctccactgagctgtctaatacttaagccatccacggatagcaaaactaaaagggcatactgtaactccaggggycatgggcaactcctagacactgccacgggaccatatggagttctgctcctgctggttgcccagaagcactcatcctagcctctgcacctgctcacctgcatgcttcccctcccatgaggggttgagacctgtgggctgagtaaacaagccaaccccttcacaagactcatgaaggggtcaag

SEQ ID NO: 770267 - DNA, 614 bp, Homo sapiens
ccatcctgcacccatataaaccctaggctccactggcagaggggcaaagcagtgcagcagaaaaggagagaagagaagcagcagcttgatgtcagtgagaagcagcttgacttcagagggacagcttgacagtaggacctcagagaagagtttgtctggggacattcccggctgaacgccaggggaagaccactttcccactccattccctttccagctccccatcccagtgagagccactttcattggcaataaaatcttctgcatttaccatccttcaattcattcatgcaacctgactcctcctggatgctggacaaggtcccaggtgtgggtgcaaaaggctgtcacagtggccctccactgagctgtctaatacttaagccatccacggatagcaaaactaaaagggcatactgtaactccaggggccatgggyaactcctagacactgccacgggaccatatggagttctgctcctgctggttgcccagaagcactcatcctagcctctgcacctgctcacctgcatgcttcccctcccatgaggggttgagacctgtgggctgagtaaacaagccaaccccttcacaagactcatgaaggggtcaag

SEQ ID NO: 770268 - DNA, 628 bp, Homo sapiens
ttctgggaacgctttttgctgtaggcagcccttttggagatagagggaggttttgaaaaggagaggaaagttttatcccttccatcctctgaaagtgcgcatatccctggtggggatatcagggttttattctgtatataaaaacaaattttgtatctgttatcacatttctttaaaaagactagatagattttcactaaagccaggggacagtttgggttgggctgatttcaaataatgctgtgacacatacatgggggatgtcaaagagattaacccctgagaggtgtgactggaggagcccttggatggttcccaccctcagggatgatgagtggctgcaggctcccactgagtagcccrtgagtcctacctagaatctgctaaggtctgaatcagcatctgaaactggaccaagacaccgaggtttttaaggacttgcagtgaagctggaagaccattgatgaagggcttagctgaaaatgagctgactgtgacaatgggacttagaatgcacccacgggcttgggagtcgtgtgcacttgcttgcattcctgtgtgtgcacccatgtgtgtgtgcatgtgtggtggggtgcagtggcaggaagtagttcctagaaaaaaaaaa

SEQ ID NO: 770269 - DNA, 634 bp, Homo sapiens
gatacatactgtaaccaatttaatgtgtaattgattttgacttgattttcatgttgatgacttacctagttcatataatttaaaatatatgtttatattcatgggcgacatatatctaggaattatgtagaatttgaaaatgtttaaataattcattttacttamgagatacttaaacataaatatattaagtgaatagatctagtataaaatatttgatgcatcataataatcctttttttttaaataacaaaagtgttagactgaggtctaagagggtaactgacttacctaaagtaacacaacatgaggagccaggacttcatcttttaagtcctaggtttgtttccaaacttatctctccacgggtttttaatttgcaaaaatatctccatgtttttgttgtaactattgttcttaacagataaatacttgaaattctcttttgtagcaaaattgacaaacagtttttgaaagggtaacatggttactattaagttacatctttaaaaaattaatagactattttttagagcggtattaggtttataagaaaattgagtagaaagtacagggagtttccatagccttattctgccagtttcccttattattaacatcttgcattaattat

SEQ ID NO: 770270 - DNA, 597 bp, Homo sapiens
aaaatccaaacgagtcaataattgccttaaatacaagtggtctaatcataacaattaaaagactgaactcatcagaaggaatttgaaaaatataatcccactatatgttattaaaaagaaatctacttcaaatataatgaggtaagttaaaggtaaaggattaaaaatatataaaaatatatatactaggtaaacatgaatcaaaagaaagttgaatgtcatatgtgaatgtcagaaaaagcaaactttagagtacaaaaaattatcaggaagaaagaggtacattacagaataacaaaagggttcacaattaagacacaacaatcctaagtatatatgcacctaacagcaaagcatcaaaatgtatgaaacatttacctggagaaagagtaatagaactgaaagaagaagtagacagatccacaattccatytggaaacatctacattcctctttcataatcaataaaaatctctagtcttatctagtttcaacactaaattccaccacatttaaaggataattaatagcaattttacacaaatattccagaaaataaaggaaagggaaacacttcccaacttttcgtatgacatt

SEQ ID NO: 770271 - DNA, 572 bp, Homo sapiens
tctcattccaagatcaatcattggcagaactaagattaaaagccaagttttctgaatcaaaaattgctgctccctctactccagggcacctggctgtgctgcttggggtttagtctttcctaaactcttctcccatcttcctttcccttagttcctccaccagcatttgcttcttaatttcttctattgggcagtccatgcckccctgattggttctttcccagcaggaaaattcccaagtactcgcttgtgcctgtctctcgcagtggacgggagtagctggggttcagggtgagtgagagattcgaagggaggtgaactgtagggcacagtgagatagagccagatcccccagggagggcaaatacctggctgaggaatttggactttaatcctaaagtatctgggagccataaaatgtttctgggaggggagaaactcaaggtacttttgataaatgacatggacttggtccataggatctctagggagaggctttgcctaagaatcttggaaagataagtctttaagtctcttgaagataaaaggatctggtcaaatacaaacaacag

SEQ ID NO: 770272 - DNA, 583 bp, Homo sapiens
tgtcaaccgtgtgccagacacagttctaggtatttgaggtatgacagtgagtgaaaccaaaaacatccctgtccttaagaatctcattctagggacaggcagtaagcatgaaatgtaacaaataagtcagttgcagagggtgttagatgcatagactacaggaaagatagataaggggaagggaagcgggttactgggagagtgtgggtgttgggttgttcaggtrggcctcattgggaaggtggttgcagattagtgatctgaaggaggtgaggaagggacagaggaagctgtgggaacatctgagggaagagttccccagtcggagggaacattccaggcccaaaggtggaaagatgcctggagtgttggagaaaacatcatggaggttcccgtggttcagcagcagaaccagaggatggcagcagagccaggggcggggggcaccagagggccagcatcttcaggctgctggaaggacattggctttttttctgagtaagatgccagcagagaagtgatgggatcttgtgtttccaaaggatccctctggtggccatgctataaacagctgcagtgagcc

SEQ ID NO: 770273 - DNA, 583 bp, Homo sapiens
tgtcaaccgtgtgccagacacagttctaggtatttgaggtatgacagtgagtgaaaccaaaaacatccctgtccttaagaatctcattctagggacaggcagtaagcatgaaatgtaacaaataagtcagttgcagagggtgttagatgcatagactacaggaaagatagataaggggaagggaagcgggttactgggagagtgtgggtgttgggttgttcaggtaggcctcattgggaaggtggttgcagattagtgatctgaaggaggtgaggaagggacagaggaagctgtgggaacatctgagggaagagttccccagtcggagggaacattccaggcccaaaggtggaaagatgcctggagtgttggagaaaacatcatggaggttcccgtggttcagcagcagaaccagaggatggcagcagagccaggggcggggggcaycagagggccagcatcttcaggctgctggaaggacattggctttttttctgagtaagatgccagcagagaagtgatgggatcttgtgtttccaaaggatccctctggtggccatgctataaacagctgcagtgagcc

SEQ ID NO: 770274 - DNA, 601 bp, Homo sapiens
ccactcaccaaggctgacttggctacagtcactgataggtgcccaaaatgccagcagcagagatgaacattaggttcctgatatggtactattccctggggtgattagcctggtggcagaatggctacattggaccatttctgtcatggagagggcagtgttttcttcttactggaatagatacttattctagatatggttttaccttccctgcattcartgcctctgcaaaaactaccatccatggacttacagaatgccatatctattgccatggtaatgccacacagcattgtttttgatcagcgaactcacttcagagcaaatgaagtgcaacaataagctcaagctcatgtaatttgctggtcttactatgttccccaccattatgaagcagctggtttgacaggatgatggaatgaacttttgaagacaattacagcaccagctagctggcaatatcctgcataactgggggaaggttcactagcagagtgtttctcccacagctaggattcacaggtccagaaatcagggagtgaaaatgggagtgacaccactcactattacccatagttacctactagcaaaaatttgcttc

SEQ ID NO: 770275 - DNA, 579 bp, Homo sapiens
agggagttattgtgctggaaggggttatcgatactgactaccataaggaaatttggcctattacttcacagttaaggaagtgtatattagtaatacaggaagccccctagggtatcctcagtattaccatgtcctgtgattaaggtcaatggaaaactacaacaacccaattagaacaggactactgwtggcccagactcttcaggagtgatggtttgggtcaacccaccaagtcaataatcacagcctgctgaggtgcttgctgaaagcaaaggaaatatggaatgggtagtgggagaaaataatcataaataccagctataaccatgtggccagttacagaaataaggactgtaattgtcatgagtatttttccttattttgttatgaacatgtttgtgtgtttgtgtgtattacatacctttgttttcttccctctcttatccccttattatgtaacataagatgtgttgactttatgttatggcttttaagttgtggtatttcaacagaagagtaaacgtcactcaagaattttgcatcctcttctggaaaagtgttagtgcattttttgttgta

SEQ ID NO: 770276 - DNA, 579 bp, Homo sapiens
agggagttattgtgctggaaggggttatcgatactgactaccataaggaaatttggcctattacttcacagttaaggaagtgtatattagtaatacaggaagccccctagggtatcctcagtattaccatgtcctgtgattaaggtcaatggaaaactacaacaacccaattagaacaggactactgatggcccagactcttcaggagtgatggtttgggtcaacccaccaagtcaataatcacagcctgctgaggtgcttgctgaaagcaaaggaaatatggaatgggtagtgggagaaaataatyataaataccagctataaccatgtggccagttacagaaataaggactgtaattgtcatgagtatttttccttattttgttatgaacatgtttgtgtgtttgtgtgtattacatacctttgttttcttccctctcttatccccttattatgtaacataagatgtgttgactttatgttatggcttttaagttgtggtatttcaacagaagagtaaacgtcactcaagaattttgcatcctcttctggaaaagtgttagtgcattttttgttgta

SEQ ID NO: 770277 - DNA, 559 bp, Homo sapiens
ggatccatgaggacagggtccttctcacctcctattccctgactgtgcccttatctacctacatattcttcacttatgccttcccctcagtttctccaggagcctctgatatgtttttaaaatactgttttctctctagctttaaaaaacttttgcctcttttccctggaactgtatccttttttgttcccaccacccatcccatgtgttataggttcccaaaagagagagaaaggggaaaagaccagagggcaagaagttctctgtggttggggatgaagataaggtcactggatacagtgagttcagacaagtrgtcacttggagccagtcattcaggctcattcatctgtcacagatattaaatggatgtgacactcagtatgtatgacacacaaatttggtcccagagtttgggtatctcggccaaactcagggtcatacaagggcacagatgtggccatactagattgtggacctacatatatgcacaaccagactttcaaacttaggtattggtaggtacagcatttacagcttaccttcacgtaacatataa

SEQ ID NO: 770278 - DNA, 655 bp, Homo sapiens
attcaatctcttctggaagtcccttgatttttaggcaccacttccaaagcattgaagtgagtttgtacatctgagtgtattacactcataaatatgacccatgttgcattctttcagatatcccaatgctggatattaacttggcgtaactccatcttaaaaaaatcacagctcaattattacacatttaaagctgaagtcacaaggctttccctataacaggtgaaattctcttagacacacaagcacctaaaataccaaaagtgtagagattctgcttcaaaaaaataaaattcataagaagggttggatgtctaaacattttaatgctcagttccaaaacatctcagaattayaagaagacttcagcacagaagagtggttaggagcccaaactgtggaaccagcccctagcatttaaattctggtgtagccatctactagctgtgaggctttgatcacaccatggaccccctctgtgccttggtttccctgtctgtaaaatgggaacaataatggtatccacctcacaggcttgtgatgaggatcaaatgagttaatatatgtaaggcacttagaatagtacctggtaagtgctaatcagtatattttaaattattattattactgttgtcatgactatcattattcttat

SEQ ID NO: 770279 - DNA, 598 bp, Homo sapiens
ggggctgaaactcaaattgttatggcagccacacagttaatttaaaagaattaagcagatggggtgagaagagtaaagaactaggcagcacaggctttatttaaagggagctgttgttgctgcctcactccagccagttgttgtcaggactttgggccatattgttggattttctgatttttctacagatgccagaaagcactcttgtaagtagtaagagtggtcttcaaattccttggagatttgttcatttcatccattggactccactgagtgaaaggggaaggaagggagggaggccagtgtgtggaattcatttcattttctgggaacaccagctgattttgtcagcaaytgaaaagctatcaaacaataacatttcactgcagttgacttgggagggaggcaggcactcctgctctgtgaccatcaaaggatgacaggtcttgaccaaagcagcatcctcggtaaaaaaatgtatgccttgtccctccaagttcaaccctctcaaatattaaaatacaacaagagcctcctttgggggtcagtaagcctgaatctcatcatttatcccagagaaaataaaattatgtctaga

SEQ ID NO: 770280 - DNA, 572 bp, Homo sapiens
atatcggtctttcccaaggatagaaattcaccatctctcaggttgttcaaatgcagtgtggatgttcatgtagtggtaattaggcctcaaacactgaggcacaaggtataaggaagggcaggcaatatccttcattctttttttgagcacagaatgtctgtctttgaatgtgcatgacatatatcactacaatacattgatagatacacatacatatatatacaaaaaagttcacatcctagagaaatgagggcarctttgctgtaatgatcacaaaccaaatattttgcttaggacaaactttggggctaacagctggctgtaatttacaaaaatttaccatgtgctaactcttttctaatgctttatgtgtgttaactcatttaaatcccacgatcacctatgagttaggtactattattttaaaggtgaggaaactgaggcacagagagatatgacctacccaagattatactgttggtaggtggcagaaccaggattaaagcccaaattgtctggccaacatcctgtatgcttattaccacatgtagatgttcactacatatcaaagg

SEQ ID NO: 770281 - DNA, 605 bp, Homo sapiens
aggcttttcagttttacattagaggctactacttgtttttttttttttttctaattgtaaagcaggcaaaaatcatcacagaaaacagatctcaaaagaattgcacttagtgttgtgacctagttggtttcttcattctttgaaacattatttgatttttcctcccgtattagctgttatgtatgccggttacataaccttaatttttcatggaaaatatggatgtcatcaattaataggactacccctgctgttgttatggctggcttcttctagaatgttcccactggggaaactgaggcttaggtttgmtactgcaggatttgccattgtaatgttttccttttagtaacatcatcattatgaatataattcttgttctcatccagtagagagccttggttaccggcaacccagttcaagcctttgaatagatacatagggatcacctctctagtgtgaagatgaaaataatataatttgtttaccaccttgagttgtttaccacaggctgtgaaaaatatgttttgaatttaaaagtgtgaaaaacaagtgtgctagctatcaaaaaagctctcccctcaaagtaaacatgtttatagagc

SEQ ID NO: 770282 - DNA, 585 bp, Homo sapiens
cttctcctacctcctggcaggggctggcaatgtttgccattccttgacttgtaggagcgttgcctcgatctctgccttcatctccctgtggtggtctttctatgtgtttgtctatgtcccaatttcccctttttacagacaccaktcatattggattagggtcccaccccacttcagtatgacctcatcttaactaattacatctgcagcaatcatattccaagtaaggtcacattcggatccaccttctcttttcgctcagttcatatagttgaattcaggaaagttaaatgtgtaagtactgcggctcctgagaatattatggagtagaatgcaaaatctgtgggaatttgaaaggaaaaccatgggaaagagacatggcagtgtctctcttgactttacggtaggcccatcccagcttgagaccactgcattctctgtgtgcaaacatcagacacagatgtgcagtaggtgggcccaagtcatgggtcatatttctttttttcaatatgacatcagtgcatgattggcagaggctggcattggcccagaacggtctgagttatggtctcagtcttgaagctc

SEQ ID NO: 770283 - DNA, 618 bp, Homo sapiens
tgacgactgacaattaatgccaaggtattcacaaccttaatggtggactgcatagagctgtgggaattattctggtggtttttggatcaagtgtcctgtgagttttaggactaattggacccttttcaccaatgacatcatcaaggatatctacaggtggacagcagaactttataaattagaacttctaaaatagcgtctgccttctttacagtgtttactgtttccaattttacaacctcagacttcgcaggttctgagttcatggacaagacatttaaaaccaaagaaaatcctgctacttcacytttagagtcctcagcccatatacattggtaataccatcagcaataaataaaacaagcctaatctcttaaaaatcaacaggggtcaactccaagaatataatcctcaaagttgaatcatgaaagtttcttgttgcaataaaggctgactgccaaggcacttttttttcttggagatccattcagcagggttggaagaggagttggaaatgacagtggctacatgcatataaagcatttttgcagcttatccttgggtgactttgaggaagctactgtccgtggacttctacgagctttttcatcaagtcct

SEQ ID NO: 770284 - DNA, 554 bp, Homo sapiens
tgcctaagcagcttgttggaagctggaaataaagggggtgacatgttcttgcctggagctatgatataactgaaatggtgattctagttcatctgggctgactgaataggtgacagcattgaaacccactatctcgccatatgacagttttttaaaaaatcagagtatactcaacggtcactccaccccccccatgccttcttctaagggagcaccctcattgttcctggggcagtcagtaggagtcatggatcatggatttgaggatgtcagggagtgacagtttgtgtatggggaggagggatgatggagtacaccaagaagtcccaggaaatgcattatgttcaaacagcatttcctcrtgtaattagaagttagaactggctcctcatgtctcataagcatgcttcaccaaacagccagccaaaggccagccattttgtgctggaaatcaaagtataagcaatggcaactcattgagctggatacttctacatcttcacttgaagcttgttaggatcattgagttttgtggcttatagtgtcaactacct

SEQ ID NO: 770285 - DNA, 554 bp, Homo sapiens
tgcctaagcagcttgttggaagctggaaataaagggggtgacatgttcttgcctggagctatgatataactgaaatggtgattctagttcatctgggctgactgaataggtgacagcattgaaacccactatctcgccatatgacagttttttaaaaaatcagagtatactcaacggtcactccaccccccccatgccttcttctaagggagcaccctcattgttcctggggcagtcagtaggagtcatggatcatggatttgaggatgtcagggagtgacagtttgtgtatggggaggagggatgatggagtacaccaagaagtcccaggaaatgcattatgttcaaacagcatttcctcatgtaattagaagttagaactggctcctcatgtctcawaagcatgcttcaccaaacagccagccaaaggccagccattttgtgctggaaatcaaagtataagcaatggcaactcattgagctggatacttctacatcttcacttgaagcttgttaggatcattgagttttgtggcttatagtgtcaactacct

SEQ ID NO: 770286 - DNA, 632 bp, Homo sapiens
tgcattgacgttgttctctaagttcattttgatcagttatgtcatttgccgaagtggcaatcaaaatcctattttgtcttttaatagagtaagcagttgagatgagagcaataataatggctgtttaacaccagaaaaagccagagaatgattcttttctacctggatatgtacagaracctgcagaggattcatcctgcaagttcatatgcaattcattttcatacttttatttcatatttatttttattgtactcttctttactttggcaatcttagattaagtttccaattttccaaaattgcctgcggtgaactcctatccccagagattttttttttattagtctcttaagcaagttatacaattcaaatcacctctccctgtccacccatctgcttgtttttgcttttcttcctctctgctggattcagtgtagaaatcctctatgcctcctctctcccctccctgtccactgccctaaactctcccccaccgttctgtctatcctctctgtcagggtccagggggcccttctgttcacatggctctgggcccacctgtaccggccccatctgtcagcaaagagcctcagcatcccacaaacctggtggaggaaattctcctctga

SEQ ID NO: 770287 - DNA, 627 bp, Homo sapiens
cttggtgtggccgggacccgggagaaggagcagggctggtggggctgctgcagccggtgagtgtgtgctggcgctgggggctggaacctcctaggccagtctctgggcggtgccgcaggaccctgctcgctgcggctctgaggcggaaacaggggctggggccgagcgcgggctggragctttggtccctggagtgtcgcttccagtctggggccgaggcggtcgcctgtgtagacccgggatcctcaaatagaacgaatccgggaccctgcagaaatgaagggcatgtagtgtagaggtttttcctttttatttagaaaggaatgaaagaccgacagtgcacctgcttggatagtaagcacgtgacccaaaactttgttggggctctatgggcaggaataaagctgggtatttgacctcgcgcgaggacgagcgagaatgtcagaatgagggacttgagggaagactgaagagagaaagggagcatcttcttcagcattttctctccctcctggatgcaacccttcctgtacgtggtcattggcctggagatgtttactggagtactcctccaccggcagggttactggtgtcactgtgcacccagcccccacgagctgagtgatt

SEQ ID NO: 770288 - DNA, 576 bp, Homo sapiens
caaataagaaacacgatagttgaaaataatttttatagtaaataattgttttgggctgatttttcagtaaatccaaagtgacttaggttagaagttacactaaggaccaggggttggaatcagaatttagtttaagatttgaggaaaagggtaagggttagtttcagttttaggattagagctagaattgggttaggtgagaaagaaagttaaggttaaggctagagttgtctttaagggttagggttaggaccaggttaggtcagggttggattgggtttagattggggccagtgctggtgttagtgatagtgtcaggatggaggttaggtttggagtaagcgttgttgctgaagtgagttcaggctagcattaaattgtaagttctgaagctgatttggttrtggggtctttcccctgtatactaccagttgtgtctttagatggcacacaagtccaaataagtggtcatacttctttattcagggtctcagctgcctgtacacctgctgcctacatcttcttggcaacaaagttacctgccacaggctctgctgagcctagttcctggtcagt

SEQ ID NO: 770289 - DNA, 579 bp, Homo sapiens
ctaaactcattcattcattcattcaacagatacttattgattgtttctgtagttctgctgggtttgaggcttccactcactgcatgtagcaatgctgattttgtgagatcatgacttcatacatttagaatctgataaacccagccagctgaaggctttaaggcattgttggtatctttctcttgctccttcttcagatgtagcttccagtaagtacttcggaaagttaaacaaggatcatttccagtttcaccgcattatcctgggacactctgcacagaatatcttctttaatcaggacatattyaatcagcagatctaccactaaccactggctattgttctctctgataggagtatactgaagcatggaaaaacagaaatacagactttatttacctacttttgaaactccacagctcctgagttaactgtagcaatagaaaccacataggtgatgtaaaccattggatttttaagagcttccttggattttaattgaggatcatgagttatattcttgttcttcaactaagaccatgtgtgtggtgatacctgacatctctggcccttgatttt

SEQ ID NO: 770290 - DNA, 639 bp, Homo sapiens
tatatagtcacacaaatttcacttataccatctattgcctttaaaaagtttacattttctggccggatgcggtggctcacacctgtagtcccagcactttgggaggcctaggccagcagattgcttgaggtcaggagtttgagaccagcctagccaacacagcaaaatcccatctctactaaaaatacaaaaattagttgggcgtgttggtgcatgcctgtaatcccacctacttgggaggctgatgcactagaattacttgaacccgggaggcaaaggttgccatgagcagagatggtgccactgcactccagcctgggtgacrgggcaagactctgtcaaaaaaaaaaaatggtgattatcctagagacttagcatgagttcaggaataaaaatcacaactcctaatggtgacacatggggggaaagttgaaaaaacaggatttagcctgtgggaaagtagattctaggaacatggcgtctttctaaagaccattggaggggctactgtgtggaagagtagtgctgaatggtgaaagttaaagggatatacttttttgacttattctaaaatagaatttcatcagctgtctaaactgtagaaacctagtagtggctttgagtcagggcagctgtgat

SEQ ID NO: 770291 - DNA, 639 bp, Homo sapiens
tatatagtcacacaaatttcacttataccatctattgcctttaaaaagtttacattttctggccggatgcggtggctcacacctgtagtcccagcactttgggaggcctaggccagcagattgcttgaggtcaggagtttgagaccagcctagccaacacagcaaaatcccatctctactaaaaatacaaaaattagttgggcgtgttggtgcatgcctgtaatcccacctacttgggaggctgatgcactagaattacttgaacccgggaggcaaaggttgccatgagcagagatggtgccactgcactccagcctgggtgacggggcaagactctgtcaaaaaaaaaaaatggtgattatcctagagacttagcatgrgttcaggaataaaaatcacaactcctaatggtgacacatggggggaaagttgaaaaaacaggatttagcctgtgggaaagtagattctaggaacatggcgtctttctaaagaccattggaggggctactgtgtggaagagtagtgctgaatggtgaaagttaaagggatatacttttttgacttattctaaaatagaatttcatcagctgtctaaactgtagaaacctagtagtggctttgagtcagggcagctgtgat

SEQ ID NO: 770292 - DNA, 597 bp, Homo sapiens
tctgcctttctacttccaaatgtgtatttctacttcatgtaaaatgctatatatttaaccttaatttttgaccaagaaaagatgaattatttagaatagtaaaatatgtcctggtcacaagtccattataatgtaatttgtcatgttacttagttgtatagatttatgctcattttattacacagtcctatttactagtaatatgtccttttgagttagaataataaagattgtatatatgtctaagttttcatttrtagtttatttaatgcttttgtgttttcctttttatttcttgaacaaatcagagaccagaaatgagtggaatgctatcttaagccaaaaaaaactattataatttttatttagtactacttaaatgaagaaagataaaaaaagaaacaaaattccaattgataattatcccattcagacattagtgaatatgtcactcaatccaagtcgaccttcctcatcagaggtaagaaaatctttttatactaaaatataagaaagacctgcttatcactgtttttgaaaagttttataaaagcaaaaacatagattatataaagtattagatattgactccaccat

SEQ ID NO: 770293 - DNA, 645 bp, Homo sapiens
aagttctagtgtattagctatttttaaatattttccactatgtgaattaaagtctatacataactagggccttctcaacgtttgataaacagttataaagttaatgttatataaaagagactaaatagctgttgtatttggttaaaaagatgatctttatcacccagatgtgtagtcatatgctatattagctttctgagctatttgttaagttaaattggaactaacttctttctttccttccctcctttccttagcccttccttccttcctttctgtctctctggttccttccttctttccctctcctttctcttcctccctccctcccttcttccttcttttctttcttccttccttcttgtcttagatatgtggctttggaggagaaagaaaagtttcctgactcaatgttatcctacccaagcctcattaactaccctcataaaactagaaactcgaaatcagctctgcccaactgaaatatratgcaagccatatatataatttaaaatttttttcataaccacattagaaaagcaaaaagaaattagggaaattaattttaataatatattttatttaaataacatcaaaaatatttcagtatgtaataagtataaaaattactaatgaagtatttta

SEQ ID NO: 770294 - DNA, 656 bp, Homo sapiens
ctgaagagcccctggcccctgaatgatcagtagtgatacccagatactatgttgagggccttgggtgagcctctgagatttgctcgcttcaggtactagcatggccatagagggtagagtactcaggaagctcttggggtcccagattccaggaattgactgttagatggcatttctgatcctgtgcggggccataccagagtccactttcccgaaggatgagttccaggacaggtagcattcaccacaagctgacttaagagcccttgggtcttaaggaaacatgggcggtagtctggcagtaytctttgtggtctgagatggtggtggctatggggtgaggctcctctgcctttggaaaggtgagggaagagtgggaagaaccatatcttgtggtctaggtgccacctcagccacagtacaatagaacaccaggtagatatctaaggcttttgaccctagtccttaacttccagatggcacctttgaacccacccagggcctgaaagaccttgctgccctgaacaaaaggacactggcctgactggctttgccaccagctgattgtagagctccagggccttgagtgaacatatgcaggagccaaggccataggccttgggtgagacccaatggaatcttgggatgagatacca

SEQ ID NO: 770295 - DNA, 619 bp, Homo sapiens
tcccagattccaggaattgactgttagatggcatttctgatcctgtgcggggccataccagagtccactttcccgaaggatgagttccaggacaggtagcattcaccacaagctgacttaagagcccttgggtcttaaggaaacatgggcggtagtctggcagtattctttgtggtctgagatggtggtggctatggggtgaggctcctctgcctttggaaaggtgagggaagagtgggaagaaccayatcttgtggtctaggtgccacctcagccacagtacaatagaacaccaggtagatatctaaggcttttgaccctagtccttaacttccagatggcacctttgaacccacccagggcctgaaagaccttgctgccctgaacaaaaggacactggcctgactggctttgccaccagctgattgtagagctccagggccttgagtgaacatatgcaggagccaaggccataggccttgggtgagacccaatggaatcttgggatgagataccaatggaatccaagaaaagcaggagtcactatactcatacaaacaaaacagagtttaagacaaaaactataagaagagacaaagaaggtcactacataaagata

SEQ ID NO: 770296 - DNA, 619 bp, Homo sapiens
tcccagattccaggaattgactgttagatggcatttctgatcctgtgcggggccataccagagtccactttcccgaaggatgagttccaggacaggtagcattcaccacaagctgacttaagagcccttgggtcttaaggaaacatgggcggtagtctggcagtattctttgtggtctgagatggtggtggctatggggtgaggctcctctgcctttggaaaggtgagggaagagtgggaagaaccatatcttgtggtctaggtgccacctcagccacagtacaatagaacaccaggtagatatctaaggcttttgaccctagtccttaacttccagatggcacctttgaacccacccagggcctgaaagaccttgctgccctgaacaaaaggacactggcctgactggctttgccaccagctgattgtagagctccagggccttgagtgaacatatgcaggagccaaggcmataggccttgggtgagacccaatggaatcttgggatgagataccaatggaatccaagaaaagcaggagtcactatactcatacaaacaaaacagagtttaagacaaaaactataagaagagacaaagaaggtcactacataaagata

SEQ ID NO: 770297 - DNA, 606 bp, Homo sapiens
tctaccaaatgtttaaagaagaactaataccaacgctactcaagctattccaaaaaatacagaagggaatacttccaaactcatcctatgaggccagtattaccttgataccaaaaccaaagacacatcaataaaaagaaaactacaagccaatatccctgataaatattgaggcaaaaatcctcaacaaaatactagcaaactgaattcaacaataccttagaaagatcattcatcatgatcacatggcatttatccctgggatgcaaggatggttcaacatatgcaaatcaaccaatgtgatacatcacatcaacagaatgaaggataaaaaccatatgatcatgtcaattgatactgaaaaagcatttgatgaaattcaacatcmcttaatgatgaaaatccctaaaaatactgggggtagaaggattatacctcaacataataaaagccatatatgacagacccacagctagtatcatattgaatggcgaaaagtgaaagcctttcttctaagaactggaatacaacaagggtgcccactttcaccacttactcaaaaaagtactggaagtcctagctagagccattaaataagagaaagat

SEQ ID NO: 770298 - DNA, 590 bp, Homo sapiens
ttaggcatctttaaattgccaatgatatttttaagtcaaattttttaaaacatgcaaggtaccacctatatgcaagtcactgtgccaagggacacaatgtgcagataaacactgatgaaaccatggctttctctactgagggtttatagtctgatagagggaacattgtataaatgaattatgtactataatccaagacggaaagtgatcagagctatccaccttgatacagtgatatagtttggctgtgtccccacccaaatctcatcttgaattgtagctaccataatccccacgtgttgtgggaggtaattgaatcatgggggtgggtttttcccgtggtattctcatgatactgaataaatctcatgagatctgatggttttataaagggcagttcccctgcacacgctgccytgcctcctgacatgtaagatgtgcctttgcatctgcttcaccatccgccatgattgtgaggcctccccagccacgtggaactgtgagtccattaaacctctttttctttataaattacccagtctcaggaatttcttcatagcagtatgaaaatggactaatacaaagagctt

SEQ ID NO: 770299 - DNA, 564 bp, Homo sapiens
attttgcaagacactgcttaaaaaaaaaacaacacgcagctgggcacggtggctcacgcctgtaatcccatgtaatcccagcactttgggaggccgaggcaggcggatcatgaggtcaggagatcgagacaatcctggctaacatggtgaaaccctgtctctactaaaaaatacaaaaaagtagccgggcgtagtggtgggcacctgtagtcccagctactcaggaggctgaggcaggagaatggcgtgaacccgggaggcggagcttgcagtgagccgagatcacgccactgcactccagcytgggcgacagagcgagactcggtctcaaaaaaaaaaaaaaaaaaaaaaaaaaccacacacacacgcaccagaaccctgtgataaattgatagtggcttaactttcatcttaactcctttatttctgttccggcttgagtggtatttatcctttccatgtttcttatcccttgtaaaagagcaacggtgacgatttgggagggatcatgccctaagtgctccatggaaccatcagagcctgaacatgaaggcagaagagttt

SEQ ID NO: 770300 - DNA, 482 bp, Homo sapiens
tcatatgttcagggactcttaggaagattccatatcttggctattgggataatgcagcagtggacatggcagtacagatatctctttgacatactgatttcagtacctctggatatgtactgagaagtgggattgttggatcatatggtagttctatttttaatttgtttgtttgttttctgagacagagtctcactctcgcccaggttgcaatgcagtgggacaatctcggctcactgcagcctctgcctcccgggttcagacgattctcctgccacagcctcctragtagctgggattgcagatgcaagccaccacacctggctaacttttgtatttttaggagagacagggtttcatcatgttggccaggctgatcttgaactcctgatctcaagtgatccacctgcctcggcctcccaaagtgcttggattacaggtgcaagccactgtgcccggtctatttttaatttttgttagtg

SEQ ID NO: 770301 - DNA, 626 bp, Homo sapiens
gtggttactgaaggttggggtggctgtggcaatttcttaaaataacacagtgataaagtttgctgcactgattgacctcacctttcatgaaagttttctctatagcatgcagtactgtttgatagcattttatcacagtagaacatctttcaaaattggagtcaatcatctcaaaatctgatgctgctttatcaactaagtttatgtattattatattctaaatcctttgctgtcatttcaacagtgttcacagcatcttcaccaggagtagatgccatctcaggaaaccactttctttcatcatctgttaagcaattcctcatctattcaagttttatcatgagatggcagcaattcagttcaatcttcatgctcacttctgattctagttctgctgctgtttccaccacatctgcagtgacttcctccactgaagtcttgaacccctccaagwcatctgtgagggttggaatcaacttccagactcctgttaatgtctctatttttacctcctgtgaatcaaaaatgttcttaatggcatctagaatggtgaattccttccagaagatttcaattgactttactgaggtccactagaggaatcactgtctacggcggctgtagc

SEQ ID NO: 770302 - DNA, 612 bp, Homo sapiens
caactaatgggaagtctttagaaaaataaaatgagaatacagagtattacacattaaaggtttctactggtatggttaatcagaatccacttaaaccaccctatctacaggtcagtgcttatgtccattgataaaagtattcctttcagcagacatttactgaagagctactcagtgccagtattgtgtcagggctctgagaaatgtggaagacatgctgattgctttcagtaaacatctaatctaagtaaatacattttattatgtaaaaaatatatttgcgtctaaagagttaactgtcaatgtattttaagaaaccaaagaagagaaatcagtatgcttcctatagcagaatttctaatgggatatkataataatatttagaaaggaaaaaatgaagaagaactccagacagagtaaataccaagaaaacagggctccagagaaaaacacagaatctggctgatagttcatatggtcaggtaccatgagcctgatactgaactatataccttaagcataattatttatttcatttttcacaataacaatattatgtattattacagcattttaaatatgaataatcgagagctgaaataatttaaaata

SEQ ID NO: 770303 - DNA, 531 bp, Homo sapiens
ttcatttctgaaggatcccatgtcacctgaaacgtattaaatacatttgtatgttttcatcttgttaatcttttatttgatataaggacctcagccataaactttgtgatgaggggggaaaagatactactttttctttcctacaagggcctttgggagttaattaggtcatgagggtggagccctcttaagtaggattagtgcyctcttaataagagatgtgagagagaaaatctctctctttgccatgttagaatgcaacaagaaggtgtcaattcataaaccaggaagagaacctggtttttcatttggcctcttgtttataccatggtttatttataagtgtgttatttaatttccaaatatttgggaattttccatttatctttctgttatggatttctcatattaattccattgtgatcagagatcactctttgtatgaattgatttctgttaaatttattaagatttgccttgtgacccaaaatatggcataacttggtaaatgttccttgtggtcttaaatat

SEQ ID NO: 770304 - DNA, 615 bp, Homo sapiens
tttgctgtaatcccagacgatttcataggttgtgttactattatcattcagtgcaaaaaaggtttaatttctatcttcatttgattgttgactcaatgatcattcaggagcagattatttaatttccatgtatttgcatggttttgagggttcctttcggagtttctaattttatttcactgtggtctgagaragcacttgatataattttgattttcttaaatttattgagacttgttttgtggccaatcatatggtctactttgaagaatgttccatgtgctgatgaatataatgtgtatattctgcagctgttgggaagaatgttctgtaaatatctgttaagtccatttgttctagggtatagtttaagtctgttgtttctttgttgactttatgtcttgatgacgtgtctagtgttgtcagtggagtattcaagtcccccactactgttgtgttgccatctgtctcatttcttaggtctagtagtaattatttataaatttgggagctccagtgttaggtgcatatatatctaaaattgtgatattttccttttggactagtccttttattattatataatgcccctctttgtcttttttaattgtttaa

SEQ ID NO: 770305 - DNA, 612 bp, Homo sapiens
aggtaacagtttgtacagccaggcctttctgaccccaaatctcattctcttatctcaaatcctagaggagagtacggccatttaacttacgtgaattttgctatacacatttgcgggggtggtgggaaaggaaattttaagaacatgggccattcttctcatcatgatctatgccatggagtaaacgtggggcagagcctgaatctaaaaaggttgccttcactcctctcagttcctttgggcctctcatggccaatatgtctaggtgtccacatgatttccatacaacaaagttcctaaatgcaagccccctactttacttgggctcartcaaagaaacagtgatgtatctggtccaaccatggacattaaacaatcactcttcctgtatcatgcacattgatagacaagttaggaaattgttgaagatgatttttacaatatcaatgcagtccgtgttgtctttggaatgtactggccccaggaaggtgcaattatgcccagggcagcctccaggttaggaatggccagctggtctgtgggttaaagacccttgccttggcagccatctttgtgcccctttgtgcttggaatgccaagtatcttctgatt

SEQ ID NO: 770306 - DNA, 561 bp, Homo sapiens
aactgaccatcagtcagctctatgaaaattctttaggtcaggatacaaagatggaacagaaccagagaggtccttcttgcccttgcttatcataggagaagggttaaataacctcctggtacaaatacatataaactgtctttgtgtgtaaaggttctcttcctcagatctttgaacacgaatacattagctgacaatagtatcagtggtaactatrtttatggtacagcaataaaaacaatcataaccccaacgacagactggggagtcgactaacctcagacccccaaggtctgacaatcctacaataaatcctcaggtagatctgtcagcataatgatgacaggggcttatataagactgagctaaggtttcttctgggcttgcttccaatagcaaggaattgcggagaaactttgcccttggtaattaactcctaatttaataattatttgagtaaaaaaaggttaaaatatttgtatattgtaattttctattttcagaatctatcaacttgagtgaaaaaaaagaagtaacaatacacaattctaatgctcttag

SEQ ID NO: 770307 - DNA, 451 bp, Homo sapiens
tcagaggctgggggtgttagtaagcaaataaggaggtaatgtcaaagggtacaaagcctcgttagacatgaggtttttctctgagatttattgcatggtatggtgaatttacagtaaatattaatgtatcctagatttccaaatcactaagagtaaatttcatcagatgttctcaacacacacacacaaaatgataagtatttgaggtgatggatatcctaattcacttgatataattatttcatattgtgtttatawatcataatgtcactttgcaatccataaatatatacaactataatttgttaatttataattaaaaatgaaatttaaaaatatatttacacataaaaaagaaacagaagacttaaacaaaactgtagaacaattaagcccatgcagcacactcctccccacaacagcagaatacacattcttctcaaatggatgt

SEQ ID NO: 770308 - DNA, 540 bp, Homo sapiens
cagtcttaactttgtcaatgttacaaagtaaaaatatgattataattgtcattatttacatttgtcatgcctaaggctatatctacccaaagccacagaaaaatgtaatcaaccagatgttcgagtctttaaaaaggtcaatatatgactattaaaaagcacctggtgtttgtggaggttatttcaatctactcaaatgtttagcttcatctaaacacagtgtgtctcatctccctgggtagatgaacacagattgtctcacattctactatctctgaggtccaaaaggaccccatacctatgtaatactatatgttgttgacacctcaagatgaaaggaagttcacattaatgttaactaacagtagtatgctctgaaataatcttgattgccttgacgartcctaggaatgatggtcaaagacatagtcttaaagagattttctctttataggaattaatcagccatggaatacagtccatcaaagtttgaagcaaccccagtatcctggagcgacagtgtattgatgtactcagaaa

SEQ ID NO: 770309 - DNA, 394 bp, Homo sapiens
atttaggatcatttctcttcaacttgaagagttaccttcatcttttcttgtaaatcaggtctaatggtgatgaactctttcagtcttattgtttgtttgggaaagtatagatcactccttcattttgaaagtatagttttgctggttatagaaatcttggttgacaagatttcttttttttctttaagctttaactatatcatcwcactcctttttggcatgcattttttctgctgagacatccatttattgagagtcttctggagattcccctgtgtgcaacaagtcattttctcttgtgctttcaaaaattttgtttgtctatgacttttgacaatttaattataatatcttgatgtaggcccctttaggtttaatctacttggggttttgg

SEQ ID NO: 770310 - DNA, 557 bp, Homo sapiens
tctacaaacatatgctttcatgaaattttatttctcatgatacctttatgattaccttattgtatgctgattatattaataaagttagagattctgtgaagttttaagagattttctctcttttatttttatttttttctttaagttcttggaaagaacatgtacagaacattcaggtttgttacataggtacacatgtgccatggtggtttgctgcacctgtcaacccatcatctaggttttaagccacacatgcattaggtatttattctaatgctctccctcctcttgctccacaccccccgacagaccctggtgtgtgatgttccccaccatgcgatccatgtgttctcatwgttcaactcccatttatgaatgagaaaatgcagtgtttggttttctgttcctgtgttagtttgctgagaaccgtggcttccaacttcatccatgtccctgcaaaagacatgaactcattttttttatggctgcatagtattctatggtgtatacatgacacattttctttatccagtctatcattgatgggcatttggatt

SEQ ID NO: 770311 - DNA, 637 bp, Homo sapiens
cggtcccctctcccacgccgccccaaactggaccccggatccagcagccaccgcggctgcagcaggagcctcgctgcccccgtgtaaccgccgcctaatttaaagcggacacagcctgactgccaggagtggagcgcgagtcggcccagccaacgcgcatgccaagacacgagcagcttctcacgtcacagtgctacccaccattgtcttagaaactagtccccaaggcttggcaaagcaggagccctccgtggcagtgattgggtgtcgggctctgaggctccggcctgacctctccatagggtcaacgggaacgtctccggatgccaggagtggcaaagggccgaccaggatgaggaaaccccaggcggagtccgggggaagcagcacrgcatcccagcctcaggcctgcctggacggtgttggttggggtgagtctccccaaaagtcgtgcctctgtgatctgcaggccaggtccacctgcgtgcccctggcctgctctctcacccgggggtcgttctcgtggagagcagaacccgcagcctcaggggttgcctgggggtgtgtttcatgcctctgctgtatgactctgggtgtgtgtctgtctgtgtgtgtgtgtgtgtgtgtctgggtgtgt

SEQ ID NO: 770312 - DNA, 618 bp, Homo sapiens
attgggcttatcaggatgtaaccctatcataagttgaggaacatctgtactataattatgcaattataaagagattcattattttttccaggcaaaactttttttattgttgatttttctcttatatgtctgctgtattagtcagttttcaaattactataaagatactacctgagactgggtaatttataaataaaaatgatttacttgattcacagttctgcatggctggggaggcctcaggaaacatacaaccatgacaaaaggtaaaggagaagcaaggcacatcttacatggcagcaggagagagagcaggaaaaactgccattttcttttttttgagacagagtcttgctgtgtagcccagactgragtgcaatggtgtgatcttggctcactgcaacctccacctcccaggttcaagtgattcccctgtctcagcctcctgagtagctgagattacaggcgtgtgccactatacccagctatttttttttttttgtctttttagtagagatggggttttgccatgttggccagctggttttgaactcctgatctgaagtgatccacccacctcagcctccctaagtgctcggattacaggtgtgaaccatt

SEQ ID NO: 770313 - DNA, 576 bp, Homo sapiens
attttttgattcagcaggttggaaaaactctttgtagaatctataaagggatatttcagagcccattgaggcctactgtggaaaattgaatattctgcaataaaaactagaaacaagctatctgtgtgaatgctttgccatgtgtgggttcatcttacagaattaaacctttgtttggtttcagcaggttgaaaacattctcttaatagaatctacaaagggatgtttcaaagtacattgaaggctatactgaaaaacctaatagcagtgattaaaactagcagcaagctatctgtgaaaatgctttytgatatgtggatttgtctcacaaacttaaatctttgttttgattcagcaggttggcaacactctttttgtacaacctaggaggggaccttttggagctcactgaggcctatagtgaaaaaatgaatatttcaagataaaaactagaaacaagcaatatttgaaaatgcttggcagtgggtggattcatctcacagaggcaaacctttatattgattcagcacgttggaaacactctttttaaagagtctacaagaggacattttggag

SEQ ID NO: 770314 - DNA, 522 bp, Homo sapiens
gttctcatcatggtctctgcttctgtggatccctcagtggcttgagaggaaagcaaacctggtggtggcaacgagggcatctaatattttggattccattttggactcatgtttaaagtgcatatgggctatacaggtgggtgtatgagccgaggacaagagcagaggtctgggtttgggaccaacatcaccaaagatgatagccaacactgagtgactgctgaatttgtgctggrcactgtgccaaagagttctcaggcattaacccattcttttttttttttttttggcagagacaaagtctcactctgtcacccaggctggagtgcagtggtgcgatcttggctcactgcaacctccgtctcccaggttcaagcaattctcctgcctcagcctcccaagtagctgggcctacaggcatgcaccaccacactcagctagtatttttgtattttagtatagacggggtttcaccatgttggccagggtgtcttgatctcttgacctcatgatacgcctgct

SEQ ID NO: 770315 - DNA, 597 bp, Homo sapiens
tctgtggatccctcagtggcttgagaggaaagcaaacctggtggtggcaacgagggcatctaatattttggattccattttggactcatgtttaaagtgcatatgggctatacaggtgggtgtatgagccgaggacaagagcagaggtctgggtttgggaccaacatcaccaaagatgatagccaacactgagtgactgctgaatttgtgctgggcactgtgccaaagagttctcaggcattaacccattcttttttttttttttttkgcagagacaaagtctcactctgtcacccaggctggagtgcagtggtgcgatcttggctcactgcaacctccgtctcccaggttcaagcaattctcctgcctcagcctcccaagtagctgggcctacaggcatgcaccaccacactcagctagtatttttgtattttagtatagacggggtttcaccatgttggccagggtgtcttgatctcttgacctcatgatacgcctgcttcggcctcctaaagtgctgggattacaggcatgagccactgtgcctggctgcattaacccattctatcctcagactgatgctgtgaggctgctgtc

SEQ ID NO: 770316 - DNA, 491 bp, Homo sapiens
ttagtcagtggggctttctgcaaacactctcaccttcgtcaggctcttctgctgacatgcgggaggagttaagtacatgcagctcttatggttttcctccatctgtccttgtctcctgccaggttagaagctggtggagggtggagcccaggcggtaggctcctgtgttccttccctcacccagcccrtgcctcggctagaacagacacctgtgcaggcaagggcaagggtttgactttgcaaagatggctggaacgccttgccaaagggatttttctgcccactaacagccatggttagggcctgacctggtctgcccgactactttaggtggccacagtgttgttttcagcaacatgaggttaaataacggtaacctttgggtttctccttcacctcttctaaccccataacagagttctgttctgtaccagatttggaacaagtgagttgtataaatgatgagactgttcccttggccaacgagagcc

SEQ ID NO: 770317 - DNA, 543 bp, Homo sapiens
tgcaaccctgggaggaacatattgctttcccattttataaatgaagtaacagaggctctgagaggttctcagttcctcaaattaaacacctagtgagtgggggaaagttgggatttgaatccaggtgtgccttgttaaaaagtaattgtggtagggagactttgacctttttaaaggctatgtaatcagagattcttctttctgcattcagttaatgctgtcctttacagaagaattttctccttgtagattgatgatgtggaggagttatggcactagtgttactggtagtaacaacagtarcagctaatattcactgaacatttcttgtaaaccactgggaatgctttacacataataacttagttccttgtttcttaatccatgcagtgctgtgagggggaccattttacccaagttcacagatgaggacactgacacagaagttacataagttgcccagtgtgccatagtaagtggcagagccaggattcaagtccagacaggcagtttggctccagagtccaagttcctaattttatt

SEQ ID NO: 770318 - DNA, 350 bp, Homo sapiens
ggcgggaggaagggagaaaaaaggaaagaaagcaagaacgtgagaaagaaagaatatgagaaaagaaggaagaaaagggagggagaaaggaagggagggaggagggaaggaagaataagaggaaagaaagaaagaaggaaagaaggaaggaaggagaaaaaaagaaaaagaaagaaaggaaaaraaaaaagaaaagaaaaggaagaggaaaagaagaaaggaaggaagaaggcaagggaagggaagagaagacaaaggaagatggaaagaaggaaggaaaaccacaaatattagaaattctgtgtttgttagagaatatgccatactgttttttttttttttcacttgaa

SEQ ID NO: 770319 - DNA, 572 bp, Homo sapiens
tagagaatatgccatactgttttttttttttttcacttgaaaggaaagagtatctgccattgaagattggatgtcttgttggtgatattgttgttcttatcttccacatgattactgagtttgtgcctagtctttccattactaagacgaaagtgttgaagtctgcaaatataattttggatttttctagttcacctttgatttctttcatgttttacctcacgtatttggaggctctgttgttagctgcataccctaattagtaggatgtttacatcttcttgagaattgattattctattrtctctcatctctgatactatttcttgttccgaactctgttgtgtctaatatcaatgtagtccttccacagccttattttagtgtttccatgatatggctttctccatatcttgatgataacctatttatatctctatatatttggagcaagatataaaatttagacttgattttttaaagatttttcaaagatgtttcaagatggaattcttatttctttttgttctatttgacattctctgagttttctatatctgaagtttgatttt

SEQ ID NO: 770320 - DNA, 566 bp, Homo sapiens
gttgctggtgtttggctggaatttcacaccagtgggtctaatcctatgaggcactgtggaagtggggatccagactgtcgctgaccagcccattggattcagcccccttcctgggggtatgtacaaagttccaaccttccaccttgccagagttgcagtcagttttgcctggaagccaggygctggagtatgttaagctcctgagtctctgcgtgtgcctgagtggctactctgccaagactccaggcagctgtgtgtgtcagactgaaggccctgatggagtgggttcatgatggaatctccttaccagagggttgaaaacatctgtgggagaggcttggtttctctgagttgcacattcacttactgcttccctgggcgggggatgttcacctggctctgtgttgctcctgggtgagcttttatcctgtcttgcttttctttgttcttcatgggtcgagttgtttccttgattagtcccagtgtgactacctggatgtttcagttgaaggtgatgtatttacttgcccctttcattcctctctgtgagagccacacaccatagc

SEQ ID NO: 770321 - DNA, 589 bp, Homo sapiens
acacagccaaaccatatcaccttcatttattccttctcgtatgccattttctgcatgtatgctagagtttctgacctatatcatttaacttttctcacaaagaatatgtttggaaaaatattattttttaatttgcctaagtaagccttaatagttttcacgtttgaggagaatttcactggaaatggaattttagattggtcattttttttgttttgttttgttttgttttcagtcaacactttaaatatttcactgactctcttcttgctttcctggttttggaacagaaaggcaatataagttcatccttgctcctccataagtaaggtctgtttgtgctcccycaccttcccatcctaagcttctgccaatattttctctttgagtttgtttttatagtgtgagtatgacatggacagatgtagatttttgttacttttttttgttgttatttatcctgcttggggttttctgggcttcctgggtctgtggtttggtgtctgtcattaattttaattttggaaagtcttctggcattattacttcatgtatttcttctgttcctttctctttcttctcctatggt

SEQ ID NO: 770322 - DNA, 622 bp, Homo sapiens
gaagtagtggcaaagtcacagcacaaaaagatgtatacaaacggattagaggcgtcattgcagctttttttgaaaatgatcttccacatcaatcttttagcctcccttcaagtttctcttctttaagatgaagtttaggaagaacctactcatcccatccataagttttgtgtgacttcctactctcagagaatcttttattgttttcctttctggcattaattatatytatcagcaaatattttagaacttgtgtatgtattaatgcttatccagtataatcaagtcaactcagtgtctactgagctggcaatgctcaatatttttttaaatgaatgaatgattgaattctaccaatgggtgaggcatgtcagtctttagtggaacaaaaactgaacattttttaaagtaatgaaaattaataattaagcataaaatgtgtgtttttgtatgtgtgtgtggatgataagtagatttttacattttcaacattgtgttggttacacaattctattttcatgaagtaaaaccaattcattaacttcagaaaaggctgtattcagaaaagaggattaaataaaattaaaccatttgacgtaggttagggaatgtgtctttgaga

SEQ ID NO: 770323 - DNA, 574 bp, Homo sapiens
gatattttatcttttttctgttatattctgtcatttgtcatttgttaaagtttccaacaatatcaaagttatcttctttagacttgggctttttcttttagatttcaagacctttttagggaggcttattaaatctaaattgagtttgggtctgaatatttaacttcttaatataaactgtgggtgtgttgtttgatagtccttctaaattagatttcttcatcttggatattgctttcattttagagaatattttttagagcacaaattcatcctcttaytaatttaattggaatgcctatataattgcattctatccttgtggaagtgtgaaaaattgatacaagtgtattgctaaagtcacagaacagactcactgagaaaattgaaataaattaatctcatggtttatcgaatttattgcaaacacaccgtaagaatcaaggggaaagagaagaaggtagggttacacacttaggatagcatgcaagcagagtagaatgaccaagctacttgagtcttgttttatgcaatgtacatatatcctatctctttctgcttcatcaggttttcc

SEQ ID NO: 770324 - DNA, 620 bp, Homo sapiens
ctctcagggcatgccacccttccagaaccttcatgtgctcaccaacctagaaacttctatttttaaatgccctgaatatatatgccatacaaatgattgaaaacaacaacaacaaatcaactccatggcggtcaccatgttagatctgttgaaatgctacaacaggccaggcacggtggctcaggcctgtaatcccagcactttgggaggcagaggcgggcggatcacctgacatcaggtgttccagatcagtctgttaaacatcgggaatccctgtctccactaaaaatacaaaaattagccaggcatggtggcgcgctcctgtagtcccagctactcatgaggctgaggcagaagaatcatttaaactcaggtggcrgaagttgcagtcagctgaaatcgtgccactgaactccagcctgggcgacagagcaagactctgtctcagtacatgcatgcatacatacatacatacatacatacatacatacatacatacatactacaactatattagttgaaatgataataagttagttacacagaataaaagaggcatcttagtgatccgcctttgggaacagaaaacccagttttctgggggaaataaagcattctgt

SEQ ID NO: 770325 - DNA, 660 bp, Homo sapiens
  misc_feature 536: n = A,T,C or G
aatgttaaatatatatttagatttaacaactaagtggaagagtaaccacactttgaaaaattgttttggctaatgtattttgaaatgatatttggaaaacgtttgtgtggaggctgctataacaagataccataaactggatgaattaaacaacagaaayttatttctcataaatctgaaggttgggatgtccaagatcaaggtgccagcaggttctgagtttgatgagggcctgttttctggttatgttctcctatgctggtgagggacagagggagagaaagcaaggtctatggcatgtgtcttggaagggtactaatctaattatgagtcacaccctcatgacctaactacctcccaaacccccatgttagtatcccactgggggttagtgttttacatatgaattgtggtacattcaagcaatcattatggtcctactcagttggggatgctataacaagggtacataaactgggtttgcttatacataacagcaatttaatttctcagagttcttgtggctggaaatctangaatcagggtgctagcccgccttgatattttggtgacaactcccttccaggttgcagactgcctccttcttgttgtatcctcacataccagaaaacgggcgagagagctctgtagggtttcttt

SEQ ID NO: 770326 - DNA, 555 bp, Homo sapiens
tcataaaaaatcataagtaaaacataatactaaaagtatgactgttgatcaatgaaattgataagccttgagccctgctaaggaagaaaaagagtaaagacccaaattattaatatcagaattgaagaaagggctaacgaaactgatcctcacggacattaaaaggataataaagaaatattatgagcaactctctgccttacaatttgatagcttagatgaaataaatttttgaaagacaaaatctaccaaaactcacacaatgacatagagatcctctgaataaatgaacctatatatattttaaagaaactgaatcattaattaataaccttttcaaacagaaagtaycagtcccagaattgttcacttgggagttctatcaatcattaatgaaagaaatgataataattttctacaatcttctccatagaatagaagcagagacaacacttcataattatttctgtaaggccagtattactataattccaaacccagacaaagacattacaagaatagaaagctacagaccatatttctcatgaacataag

SEQ ID NO: 770327 - DNA, 539 bp, Homo sapiens
acatctattcaacattgtactgaagttctgcctaatgcaataagaaaagagtaaataaaagttaagtattatatacagtttaggaaagaaaaataaagctggctttgcttgcagatgacatgacagtctatataaaaaatcctgaagaatgcacaacaacaaaactgcttgaactaataagaaattatagcaaggttgtaggatgcaaggttagtatacaaagtcaattgctttyttaaattttagtaatgagcaattaaaattttcttaagacatttttttccaagtggtgttagactcgcagaaaaaaaatcagaaggaaatacagagatttcccatataaccctgtccccacacatgcatagcttactctattatccccactaggatggtacatcttctacaattgatatacctacattaacacatcataatcaccccatgtccatagttgaatttagagtttactcttggttttatagattctataggtgtggataccagcatttggtggtgttagtgttctaggttttggtacc

SEQ ID NO: 770328 - DNA, 539 bp, Homo sapiens
acatctattcaacattgtactgaagttctgcctaatgcaataagaaaagagtaaataaaagttaagtattatatacagtttaggaaagaaaaataaagctggctttgcttgcagatgacatgacagtctatataaaaaatcctgaagaatgcacaacaacaaaactgcttgaactaataagaaattatagcaaggttgtaggatgcaaggttagtatacaaagtcaattgctttcttaaattttagtaatgagcaattaaaattttyttaagacatttttttccaagtggtgttagactcgcagaaaaaaaatcagaaggaaatacagagatttcccatataaccctgtccccacacatgcatagcttactctattatccccactaggatggtacatcttctacaattgatatacctacattaacacatcataatcaccccatgtccatagttgaatttagagtttactcttggttttatagattctataggtgtggataccagcatttggtggtgttagtgttctaggttttggtacc

SEQ ID NO: 770329 - DNA, 601 bp, Homo sapiens
ttatacataatcttggcattaattttaagcacaatatttaatcatatttttctgaataattgttcctaaaattgtaatattaataatcattcttatagatataactctaccattgatatatttcatttttataaaagacattaaattgaatctagcctaaaagtgacattctatagactagagaaaggtggagtaacttaccaaagttctgtgaattatggaaatggaatactcagtcagagccatgtaaacgatactgagatatgttagaacactttgtggctttgcattgccgagtctgtcctgcagactctggccgagtgacagataaaagaagtacactgacacaggtacacamaggtattttgtctgacagtgtggctaggggaccacacggcttagcaccgcggacaaaagtgctgcccccataagctggccccgctcacatttatttagtacagacttaatgacaaaggcttggagtgaacacaatttgtgggtaataaacattgttgacccctcaagtagagagcagtcctgcacacgaatgatcaaaggttggtttctggagacaggagtaaacaaatttatctatataatt

SEQ ID NO: 770330 - DNA, 601 bp, Homo sapiens
ttatacataatcttggcattaattttaagcacaatatttaatcatatttttctgaataattgttcctaaaattgtaatattaataatcattcttatagatataactctaccattgatatatttcatttttataaaagacattaaattgaatctagcctaaaagtgacattctatagactagagaaaggtggagtaacttaccaaagttctgtgaattatggaaatggaatactcagtcagagccatgtaaacgatactgagatatgttagaacactttgtggctttgcattgccgagtctgtcctgcagactctggccgagtgacagataaaagaagtacactgacacaggtacacaaaggtattttgtctgacagtgtggctaggggaccrcacggcttagcaccgcggacaaaagtgctgcccccataagctggccccgctcacatttatttagtacagacttaatgacaaaggcttggagtgaacacaatttgtgggtaataaacattgttgacccctcaagtagagagcagtcctgcacacgaatgatcaaaggttggtttctggagacaggagtaaacaaatttatctatataatt

SEQ ID NO: 770331 - DNA, 613 bp, Homo sapiens
ttattttagagagacaatttaataactgcctaaccatcacctgatggttacctgacatttctggtggggaggctgtctcctgttttgttcatgtctgcctgaatatgtactgtaacattattactggtaagtaatatttaaaaacatatagatgcaaaaaatttcggctctagtattccattccattatatactcatgtgagagtgtaaaagtgtttacacaagaatattttgtaatactttattagtagaaattctataaataatgtgcccaagctaaatatayatattaatatagaaaacatcccctatatactcatacatatatttatgaagaaatatgagtccaaaataacgtggtatgtctgtattaacaggtaagaaaatatgttcaaatatgttcaagtgtaataagacaataaacaagttacaatgatgtaagtatagtatgtagttacttgtagtaattgatactaacattagttagttaacaatagttctactgagtaaatagaaaataccaggagtagctttcactgtttttttttttcttttgctttatcaactttattctctgacagatctggaggccaaatgtaaaatcgagttgttgg

SEQ ID NO: 770332 - DNA, 624 bp, Homo sapiens
atttttctcaagcatacaatatgtaataatcacatcagtgtaaatgggggtagttgtcacatcaggcattcatcatttctttgttacaaacattccaattgtacaccctcatttattctaaaaggtaaaacaaattattgttgactgtagtcaccctattgtgctatcaaatactacacctgactgattatacctaactatattattgtaaccatcaactatccccatttcctcctcccccaatacctttgccagcctttggtaaccatcattctactgtctatcttcaggagttcaattgtttaaatttttggcacccaccagtaattgaaaacatgtgaaatttgtctttatatgcctgacttcttgcagacatgattcaaagattcttctgtcatttttctaactgagcctttactcactagacctactgcacagtcgtcatttcgacatttccattcacatcttcaraaaaattctcttcaccttttccctatattgaatccttcatttactggatctcatatatatctttaattttgttggcttatttactcattttaaataccatcccatcccatggtttcctgttaaagagatcatagaagatatatcttttacaaa

SEQ ID NO: 770333 - DNA, 582 bp, Homo sapiens
agaacaatttaaatttaaacaaagtttcaaaaaatttccagatatatacaaaaacatggaaatgtgaccatatttgatagcagatgataagaaatgtttgtaaatttgttataggcatcataacggtttcctgcctatgactatgggtggttgttcttgtaaaagtgctgtcttttcaagatacatgctgaaataaatacagatgacatgatgtttgaaatctgcttcaaaatcatctgaggatgkaagaatggggggtgcaaagatgaaacaagaatgaccatgacttgttaggtgataaaagctggatgatacctacatggggcttattatactattctctttattttagcacatgtgaggtatttagccaggactagaggtgcccaccaccactcccagctaattttatatttccggtagagatgaggttttgccatgttggccagccctatctatctatctatctacctatctatctatctatctatctatctgtattatatataaatatatatttatatatatttttgctggggaattaaacattatattacatttgcttgagtcacaaaagatacc

SEQ ID NO: 770334 - DNA, 650 bp, Homo sapiens
ggtgaggagtatgaggggctgagaggagctcagtatttgactagaatactacccaaatctttcagctggataattcgatgttttaggggctgtgctgtgcattgtaggatgtttggcagcatccctaacttctactcactagataccagtagcataaccttctattggtgacaaccaaaatgtccccaggcattgtcacacatccccaggagatgtgggaggggctaaatcaccaccagttgggaagcactggacgggggtaggaatgtgacgtcagtcaggataggccagatatgccatagcaacaaccccatcatctcaatggctacaaagaagaccgtcatgaagtgacagaaggactctacttcacggatacttcacagattcacagtctacttcagagactctggctgatagagcagccaatgtatccaatatcatgaattgccatgccagagggaatagagtgctctgaaaggtctcaaaccagaaattaaatrctttatgccaacagttttgtatcacttgctctcacaacccactggccagaactagactcacgcaatacaaggagagctgagagtatagccctaccacatgcccagcagagacgagaaccagaaatacttggcaggcagcactaatggcca

SEQ ID NO: 770335 - DNA, 472 bp, Homo sapiens
tcttatgctgtaggtcacggaaaatacagttgacttttcttatatcaagttcacttcactcgtttgtgtgaactttttcagcattagagatcatgagccctgctctagatagggaaaggctaagtaactttccaaggccacagggaagtcagtgcctgacttgtcartacaatgcagcaggtccattctcatctgtgttaagttaaaaagagaacccggactgtccctgtgtccatgcggcatggtaggaagcacactcctgcccaccaaattctgcttggtacccaccaaccttgctgggtcctggatcttaagattgctgtccagaaacctaaattaatgcttaagctggattactgtatgagtctaacagaggggtgagggagagaacccacctgcctactcacagaatttcttaaaggtccatccacctgtacacaaaggaaaacacatgtcaacaatgtttcctttt

SEQ ID NO: 770336 - DNA, 582 bp, Homo sapiens
ccctttcttctaaaatcaattttagaagaaagtttaaagctccctgcctccaaaaaaaaaaaaaaaaaaaagattctcacctatgctgtgaaatgatatagcaaataagttatttggattatgatataaacaataacactggaaaatatatggtcatacttttgaagcatcacaattaaccttctttggtttattttacaaaacacattgaaaatccatctggctttatgctgtacattttaatcaccctgttcaattcaggaaccagcatcactttatcttcccctttccacagtttgggagaaggacttttccttagatcatgaaaactggattgcaacatttggctaggtattctaaggcagtattttccaaagggtgttctgttacaaagtcttcgagaagctctgcagtaagaaaatttgttagaytttgaccaactcaactatttattttttttcccccgagatgaggtcttgctgtcttgcccaggccggagtgcagtggtgtgatctcggctcactgcaacctccgcccctggatttaagcaattcccctgcctcagcctcctgagtagctggg

SEQ ID NO: 770337 - DNA, 611 bp, Homo sapiens
acaagtccttttgccatagctgccaaaaaaaaatcagacccaaattcaagccccgattttatgtttctcagactgagaaaacacaaaagccattgctcagatggtttggaaaacatttgcaaggtcagctcatttcatgatgtttgattccagtactggcacttggattacttgtgcatctttgagatgtcactgaataattatcaccacacttttaggatttattgagaatcaggctaggacgtatttcctcacctcacaaaagaaagctaggagaaaagcactatagacatctccattttacaagtaagaaaatagagtctgcaggagagtcagctgttcagcatcactcaggtagaaagtgcacagctggatgtagaagctaggctgccagattccasagcctgcactcttaatcctgtgctgcccagataacgctgactgctttgtattaagaacttacattctcccacttaattgggagcaaggcagattagaaaccctataaggtagatgctattcatgtgaccactttacagacatgaagactgaaacctgagaggctaataaatgtgtctgagatcataaagctgttagatgatagatataga

SEQ ID NO: 770338 - DNA, 512 bp, Homo sapiens
attgagtgtgctcatgtgctttgcactgtgctagaagccaggggcatagaaccctgtcctgtgagtttacattctggccagagacaaagcagccaacaaaacagataaaggagtgcatcgtacaggtgacaattgcttcgtggtgaagttttcatgttccaccctatttaaatattgcccccgcctgcttcctggtacttccaaatgccattttctgctttctttttctccatagcaaaaatcagatttgtgatrtacgtaggggatttgaaagatccggtgacaagacggacatgtggcaaagagaggcaaataagaatgatgtctgggtggctggcagttcctttaactaagccggggaagccttagaggaacagatgtgagggagaagagatcaagctgaggtttggacacatttgatctcagactcctggagaggagacgttccagtggaaatgtcaaggaggcaaaccaaagccttcatctctgcctcccagacagcccaatttcta

SEQ ID NO: 770339 - DNA, 512 bp, Homo sapiens
attgagtgtgctcatgtgctttgcactgtgctagaagccaggggcatagaaccctgtcctgtgagtttacattctggccagagacaaagcagccaacaaaacagataaaggagtgcatcgtacaggtgacaattgcttcgtggtgaagttttcatgttccaccctatttaaatattgcccccgcctgcttcctggtacttccaaatgccattttctgctttctttttctccatagcaaaaatcagatttgtgatatacgtaggggatttgaaagatccggtgacaagayggacatgtggcaaagagaggcaaataagaatgatgtctgggtggctggcagttcctttaactaagccggggaagccttagaggaacagatgtgagggagaagagatcaagctgaggtttggacacatttgatctcagactcctggagaggagacgttccagtggaaatgtcaaggaggcaaaccaaagccttcatctctgcctcccagacagcccaatttcta

SEQ ID NO: 770340 - DNA, 612 bp, Homo sapiens
aaaactattaactaatactaattagttaataaacaatgaaataattgtttactgaacagagagttagttaaataatcttgatggctaaattccaaaagccagatacatccatctctaccattatttttctgggactactgtaaaaaattaccacataytaggtggcttaaaacaacagaaacgtattctctcacttctctggaggatgaaagtatgaaatcaaggtgttagcagtgccaagctactgccagaggttctaaaattatcccttgcctcttccagcttttgatggttgtcagtattcctcatctcccatggcttgtggccacatcacccccatctctgcctctctcttcacattctttcttttctctttctgtatgctcctcttcgatctcttataaggatactcaatcttggatttaggggccactcaggtaattcagaattgtctcattttgagattcatagcttaattacatctgcaaagatcttttttccaaacaaagtcacgttcacaggtgccagggatttagacattaatgttcttttgtgagattgtctttcaaccaactattgacactatctgcttgagaattgaaatgccaatgg

SEQ ID NO: 770341 - DNA, 612 bp, Homo sapiens
aaaactattaactaatactaattagttaataaacaatgaaataattgtttactgaacagagagttagttaaataatcttgatggctaaattccaaaagccagatacatccatctctaccattatttttctgggactactgtaaaaaattaccacatattaggtggcttaaaacaacagaaacgtattctctcacttctctggaggatgaaagtatgaaatcaaggtgttagcagtgccaagctactgccagaggttctaaaattatcccktgcctcttccagcttttgatggttgtcagtattcctcatctcccatggcttgtggccacatcacccccatctctgcctctctcttcacattctttcttttctctttctgtatgctcctcttcgatctcttataaggatactcaatcttggatttaggggccactcaggtaattcagaattgtctcattttgagattcatagcttaattacatctgcaaagatcttttttccaaacaaagtcacgttcacaggtgccagggatttagacattaatgttcttttgtgagattgtctttcaaccaactattgacactatctgcttgagaattgaaatgccaatgg

SEQ ID NO: 770342 - DNA, 612 bp, Homo sapiens
aaaactattaactaatactaattagttaataaacaatgaaataattgtttactgaacagagagttagttaaataatcttgatggctaaattccaaaagccagatacatccatctctaccattatttttctgggactactgtaaaaaattaccacatattaggtggcttaaaacaacagaaacgtattctctcacttctctggaggatgaaagtatgaaatcaaggtgttagcagtgccaagctactgccagaggttctaaaattatcccttgcctcttccagcttttgatggttgtcagtattcctcatctcccatggcttgtggccacatcacycccatctctgcctctctcttcacattctttcttttctctttctgtatgctcctcttcgatctcttataaggatactcaatcttggatttaggggccactcaggtaattcagaattgtctcattttgagattcatagcttaattacatctgcaaagatcttttttccaaacaaagtcacgttcacaggtgccagggatttagacattaatgttcttttgtgagattgtctttcaaccaactattgacactatctgcttgagaattgaaatgccaatgg

SEQ ID NO: 770343 - DNA, 591 bp, Homo sapiens
cttttctgcaactggtgctggatagaaatttcttatcttgaagccattcaaataacagagaaaggggacatcttgatctttatttttccaatacgtttgcttgtttaaaataataaataacataaaatgcagcttttaattaatggttgatcaaaaataagtcccaaagctttagggcaattgtsaactaaatattgtcatttgatatttaaaaagctatgataaactatggtattaatttttaaatcgttcataacaaaagatcttaaattacttggcaaattttaaagatggtttgaagcctttgcttttaatctagtgatatttctgtaacactataatctgctatgaaaagatatagtctgtacttgtccatgccaggactgaattgcatctaaagagataactgaaaatccacctattgtgtttatgtataaatgggactattttcatctaccctattgaccttgtttaaaaaaatatatatcacagattgctattgaggcattttccaaagactagattttcattttcctgtaaatctcacaattctatttatacaagaaattccattattgtacatatcaatat

SEQ ID NO: 770344 - DNA, 627 bp, Homo sapiens
tttatttaaaatcaactcattaataatgtaaaaaaacttcttaggtcataggctgtactaaaacaggtctaaggctaaatgtgattgatgggctattgtttatctatctggtaggaaacacaagattaagttcaattgaaagactgaatgcagcaaagtatgatgtaacattcatttcatattcctcagctgatgaatctgaagtagggtgatcaaccatctaggcttgtccaggactggggtttttccagaatgttggcttctagtaataaatccaagaaagtccctgaccgatctggatgattggtcattgatatggtttggctgtttacccaccaaaatctcatcttgaattgtaatstccataatctccacgtgttgtgggagggagttggtgggaggtaattgaatcatgggggcagtttcccccatgctgttcttgtgatagtgagcgagtctcaggggatctgatggtttcctaagcatctggcatttcccctgctggaactcattctctctactgctgccctgtgaagaggtgacttcctccatgactgtaagtttcctgaggccttctcagccatgaagaatgtgagtcaattaagcctcttttctttataaattacc

SEQ ID NO: 770345 - DNA, 599 bp, Homo sapiens
tgaggctgtcctattcacggaaacattaaagttaaaaattgatacaaggaaagaaagtgaaacacaaagtaaagaaccaagaaacattatgcaaaccaaaatctaaaacttattttgaaattatctggctcaaattctcccatacccagcatagtttggcaacttgggctgaaagctccaagaagtcaagatattartaatattttatacaaataggaagaaaaagcctgaaggcttggaaaaatattatttttgaacttctacaaatttagcatacagaaatagaataaaatatagccacctagctccaaagagatagaaatatattgaaataaagttagaaaatgacagaaaaaaaatgagaggatatcggaaaatatctagccgtctctactatatctacaaaaaaacttgatttactgataattttaatgaataggaaaatatattagtataatgatgactgccaactagaggtattatttgctataataataataatcagttattgggtgtttaaaacatttaatgggagtaatgaaatgcgtggtatgtatccattaatcataataaagagaaccagaagtctatttttttta

SEQ ID NO: 770346 - DNA, 599 bp, Homo sapiens
tgaggctgtcctattcacggaaacattaaagttaaaaattgatacaaggaaagaaagtgaaacacaaagtaaagaaccaagaaacattatgcaaaccaaaatctaaaacttattttgaaattatctggctcaaattctcccatacccagcatagtttggcaacttgggctgaaagctccaagaagtcaagatattaataatattttatacaaataggaagaaaaagcctgaaggcttggaaaaatattatttttgaactkctacaaatttagcatacagaaatagaataaaatatagccacctagctccaaagagatagaaatatattgaaataaagttagaaaatgacagaaaaaaaatgagaggatatcggaaaatatctagccgtctctactatatctacaaaaaaacttgatttactgataattttaatgaataggaaaatatattagtataatgatgactgccaactagaggtattatttgctataataataataatcagttattgggtgtttaaaacatttaatgggagtaatgaaatgcgtggtatgtatccattaatcataataaagagaaccagaagtctatttttttta

SEQ ID NO: 770347 - DNA, 587 bp, Homo sapiens
agtatgacaatctatttttactattctcaaacccagagtttagtaggtagtgtttttcttaagaataggttgtatatcaatgacagactgcataaagaaatgtggtacatatatggattaaaaaaagtggtacatatacaccatgaaatactagrcggccataaaaaggaatgagttcacatctttgtagggacatggatgaagctggaagccatcatcctcagcaaactagcacaggaacagaaaaccaaacaccatatgttctcactcataaatgggagttggaacattgagcactcatggacgcagagaggggaacaattcacaccagggcctgttggggggtggagggtgaggggagagaacctagaggatgagtcagtaggtacagcaaaccaccatggcacacgtatacctatgtaacaaacctgcacattctgcacatgtatcctgttttgttttgttttagaagaaaaaaaaataggttgtttagactgttatgtgaaataataaaaggatgtcttacttacatctgcattaagtattcaccttccaccctagatacgcaattaaaaaactgtattcga

SEQ ID NO: 770348 - DNA, 587 bp, Homo sapiens
agtatgacaatctatttttactattctcaaacccagagtttagtaggtagtgtttttcttaagaataggttgtatatcaatgacagactgcataaagaaatgtggtacatatatggattaaaaaaagtggtacatatacaccatgaaatactagacggccataaaaaggaatgagttcacatctttgtagggacatggatgaagctggaagccatcatcctcagcaaactagcacaggaacagaaaaccaaacaccatatgttctcactcataaatgggagttggaacattgagcactcatggacrcagagaggggaacaattcacaccagggcctgttggggggtggagggtgaggggagagaacctagaggatgagtcagtaggtacagcaaaccaccatggcacacgtatacctatgtaacaaacctgcacattctgcacatgtatcctgttttgttttgttttagaagaaaaaaaaataggttgtttagactgttatgtgaaataataaaaggatgtcttacttacatctgcattaagtattcaccttccaccctagatacgcaattaaaaaactgtattcga

SEQ ID NO: 770349 - DNA, 656 bp, Homo sapiens
ttctcttctagtcttgtttgtacatatccagatcacgaagtagtttttttttttttttttttgagacagggtctcactcctgtcgttcaggtgggagtgcagtggcacgatgacagcttattgcagtcgtgacctcctgggctcaaacartcctcctgcctcacttttaaatttttcttttgtagagaagaggtctcactttgttgcccaggctggcctcgaactcccgggctcaagcagtccgcctcgcctcggcctcccaaagtgctgggattacaggcatgagccaccatgtccagcctcaataagtaatttttaatctgatgattgttcaatataaaattagctttctttactttcctaagtgtcattgtatttttaaatgttctcttttcaattctgtagtatttggggaagaaagtaaaatataatatatgaattacagggaatagaataaggtatttggaagcattttagctttagaaaatgagatgagacactactttttgccatagcgatggatttaaaacccctaaggatgagcatgactgaggcccaaggaattattccttccacttcactttctgctcctgagagctgcctggtttcctgtggtagagatgcttcattagtaaatgaagggctgtcacctcctt

SEQ ID NO: 770350 - DNA, 656 bp, Homo sapiens
ttctcttctagtcttgtttgtacatatccagatcacgaagtagtttttttttttttttttttgagacagggtctcactcctgtcgttcaggtgggagtgcagtggcacgatgacagcttattgcagtcgtgacctcctgggctcaaacaatcctcctgcctcacttttaaatttttcttttgtagagaagaggtctcactttgttgcccaggctggcctcgaactcccgggctcaagcagtccgcctcgcctcrgcctcccaaagtgctgggattacaggcatgagccaccatgtccagcctcaataagtaatttttaatctgatgattgttcaatataaaattagctttctttactttcctaagtgtcattgtatttttaaatgttctcttttcaattctgtagtatttggggaagaaagtaaaatataatatatgaattacagggaatagaataaggtatttggaagcattttagctttagaaaatgagatgagacactactttttgccatagcgatggatttaaaacccctaaggatgagcatgactgaggcccaaggaattattccttccacttcactttctgctcctgagagctgcctggtttcctgtggtagagatgcttcattagtaaatgaagggctgtcacctcctt

SEQ ID NO: 770351 - DNA, 574 bp, Homo sapiens
tgggtggccagtgtctcctcagcagccttctcccgcaggaagcagaactgtctgcaacgctgatggagtcacagtaaccttcaccccactgagctcaggatctgcagagccactaagaccctggagcaactgccttcagcatccaacagaagctgctaaaaggattatgggycaattcattttagacatttcttccagatgttcccatggaaagctagggtctaaatcagtggtcctcattcctggcagcacctgagtttcacctggggaactgttagaaagtgaaacttggacggcattcacattagtccagtctctgggtggggcttggacatcagcatttgtagaagctccctaggtggctttggtgcagccaggttggaaaccactgatccaactaatagaaatgctaggttgggatctcttccgaggcatctctttaggacaggctgtgcatgacagtcccatagtgtcagggttctaagatgctccaatggtttaggcactggtcttaattttcgttttttcgctctctttgagaccttaacaaactctatagggctgggcacaatgg

SEQ ID NO: 770352 - DNA, 406 bp, Homo sapiens
ttccttccagtgggttcgtggtcttgctgatttcaagaatgaagctgtggacctttgcagtgagtgttacagctctcaaaggtggcatggacccaaagagtgagcagcagcaagatttattatcgtgaagagcgaaagaacaaagcttccacagcatggaaggggacccaagcgggttgctgctgctggctgggggctggggttggggggtggcagccagctgttattcccttatttgtcccccacccatgtcctgctgaktggcccattttacagagtgctgattggtccattttacagagcactgattggtccattttacaaatctctagctagccacagagagctgattggtgcattttacaaacctctagctagctagagtgccaattggtgcgttttacaa

SEQ ID NO: 770353 - DNA, 648 bp, Homo sapiens
tttttttgaggttgttttgtttttaatgcttatggcccagtctctgagattcttattttattggtcagagtaggacccgggcctggttattttaaaagcttctaaggtgattctgatatgcagccagggttgagaaccaatrgattagacattgtaactcttcattaaagacacaaatttctttttcagtttatgacttctaattagctggctgacttttgactgaaatcaccaaatattaaatttgaatttttttcaaattggttatgctacaaaaagtcttgagcaaaacggataggcatcctgtatatgacagttttaagccagcctattaaaagcattatatatctatttaaaattgaaaccagtaatatttataaaaattcattatcacagttacagcttcctaaactattgaacaatcctatcctcgacaataaatctaacaatgagaagagatttgagaacagagctattttaatcatgcaaacagcaagctcagtttctgtttcaaattctttattatacatcatggttgcacaatttgaggctggttaaatacaattggttttcaaaatctctttgaatattttctggcttactacatgcaaatgaccatgaaaatatttggcattttaaaattctgaa

SEQ ID NO: 770354 - DNA, 606 bp, Homo sapiens
tgaatctgggcagaggaggctatgggtggaagggaaagccagagaggatgccgggaaggaggacaagctggggaggggcctggagcatggttggtggccagggaaggcctggacacacctgaggaaagattaagaagtttttttgtttgtttatttctgcttttgccacttaagaatatttccaaatgtatccctaagggctaataactctttttatatttatttatttatttattgagatgatctgtctcccaggccggagtgcagtggtgcaattttggctcactgcaacctctgcctcccaggttcaagcaattctcctgtctaarcctcccgagtaggtgggattacaggtgccggcaaccaagctgggctaatttttgtatttttattagagatgggtttcaccatattgatcaggctggtcttgaattcctgacctcaggtgatctgcttaccttggcctcccaaagtgatgggattacaggtgtgagccaccatgcctggccctttttttttttttttttttttagagaaggattctttttaaacacaacatcattaccacatctaaaaaattaacaataatttttcactaacgtcact

SEQ ID NO: 770355 - DNA, 552 bp, Homo sapiens
caataatcttcctttcatctgagattatggttaacagattatctacctgggatagaaatggatagtcctggcatgctggcatgggttactgcaggccggttctggggcagcgagtccatggggaaggggctgagtcaccacttcatgcagagggagttctgggggccctggtatgggaagcaagttagaggctgcccctattctgaggaccccagaatttaaacgagtccaggaatcacctgtaatgtgcacagagacttcagcgtctacacattggggctcacagagagatcyggaatgtgaggctgtgataggccacccgaggcagagccgggcagttggtggctttgattgtgtgtgtgaaagggtgtctagaatgatgcccaggtgggcagatggtcgggactgaggggtggaggggcagggtgggagggattttggtcatggggcttgtcgtgggtcattcctgagtccattttcctgcctcggccttcccgaggagggaactggatatagaggctgtgggctcaggactgagatcagggccaaaga

SEQ ID NO: 770356 - DNA, 677 bp, Homo sapiens
agtttcctcctctgtaaaatggggatccttacaggccactcacaatggtaatgagagtccacatttactgagcactcactacacaccagccactcttctcaagggctttccatgtggaattgcaccaaatccttacaacaaccctctgaggctggggctggtgctgtatccattctacagaggaggaacctgagacaaggaagggtgagggcttgccaaggccacaggggtaagggccgaggccaggatcagcaccccaatggcctgcctcaagcccaccctctttaccgccacatctaacgtcctccagccccaagtacaaggaaaatgcctgggaagcggctatggctgtgacccccagctcccrgtcccgaggctccacccaactccacagcccacgctaccctctggaaggccagcaggaaggccaggggacctcccccaagggagggagcggcctctccaaggcctggcccacaggaggcacagggagcattttgtaagagaggaccttgcaccaggctcctgactgtcttcccgtgccccttgcgttgctttcaccatcctcctgaccgctcccagggcgcagccaggcatggagtcagtactgcatctatcgccccacagtcctgtgaggtagggactgcagatacacccattttacaaatggagactga

SEQ ID NO: 770357 - DNA, 581 bp, Homo sapiens
ttttttttttttttttttttgagatggagtttcactcttattgcctaggcaggagtgcaatggcgcgaccttggctcactgcaacctccgcctcccaggttcaagcgattctcctgcctcagcctcctgagtagctgggattacaggtatgcgccaccacgcctggctaattttgtatttctagtagagacggggtttaaccatgtttgtcaggctggtctcgaactcctgactcaggtgatccacccgcttcaggctcccaaagtgctggcattacagaagtaagccaccgcgcctggccaacttttgtgtatacattcttgatacactttttcccctcagcactgggttttaggtcccatctggcagccccgaactgctgtgcagggctccacrgcacacatactctcccaaggggtggatacccaggctgcctcctctccccaccaccacaaagaacactgatcaacttcctcatgcatctctctttatggacctgtggaatattcccccgagctatgtatccatgagtggaactgctcagtcgtgggtatgcatgaacttaataagactgaagtgac

SEQ ID NO: 770358 - DNA, 558 bp, Homo sapiens
gtcacaggaagcccttcatgactctccacctacagggactctcttccacagcatgtctctacctcggacctgtttctttcatgacaccgagcccaccacttggtaatatttgtatatctgcgtgtcttcctcatgagacttagagctccttgagggtggggcaaatatctgatctatttctctaatgtctaatatgaggcagaccgagagtgggtttctgagtcagacacacagatcctcagatgacggactgggctagagaaatagggttgggcaggaaaagatgcytcaagtccagggacctattctgaatgtcccagggaggggcagggtgatggagtaagtgtagctgcccctcctgagaatcaggacaccacatcttaatgggccatttgatgagcactatggactgaggccccattcttggtactgttttccctgggaccccggggcagagaacaatatggaggtgaggggaggtggtggaactccactctgaagaagagacatggccctgacccagagaccttcagtctgaggaggatgagcatggctctg

SEQ ID NO: 770359 - DNA, 608 bp, Homo sapiens
aaagactagaacagcttctaatgggggaggtgggcatgaaaagacagaggaaaagggaaaggcactgatcccgggctggaggggagcatgaggtagtcatcagggatgatgcttcatggttggttgtggagggttcttggcggccaaagagtttccagtgactacgagggatcagaggcaaagaagccatctggaacctaaagagccttccttctcctgggcctcaggggccagagtaggggccctggctgagcagcagggaaaagggaaatggtgagatcccagagcccaggcccagcataggggaactkcatctccaggaggattctgaggagccagagggaggagaggtacagggaggactcctggaaggggcaggaaaatgcctaagccaggccagggggaggcaggagttggaggaaactaagttcctactgacttcgatcagtcaaagtgtgttcccaggcttggtgtggatagacagggaggccccttagccatcaggtgaaagagagtggataacacacctgacccagtgaggccctcgctcaaggcacccaacctcccatgctgtccacatccaatagtagatctaatcccagccacaa

SEQ ID NO: 770360 - DNA, 612 bp, Homo sapiens
tcagccccccaaagtgctgggttgccattttaaccatttttaaatgtataattctgtgggggaggggcttgtatattcacaatgttgtgtaaccatcctcactttctcattccaaaacatttccatcactccgaaaagaaaccccatacctgttagcagtgtctcccaactcctcaatctctccagcccctggcaaccactgatctactttctgtctctatggacttgccaattccgggcatttaatataaatggaagcatatagtaggtagtctttcakgtctggcttctctcacttagcacaacgtttccaaggctaatccatgttgcagcacgtatcagtacttcattctttttactactgatgagtattccattctgtggatagaccacattttgtttatccattcatcatttgatggacatttggattgtttctactttttggctattatgggtattgctgctatgaatattcgtgtacaagtttttgtggaaacatatgttttcaattttcttggatatataccttggagtggaattgttggatcatatggtacctctatatgtttaactttttgaagaactgccaaactgttttccacaatgact

SEQ ID NO: 770361 - DNA, 515 bp, Homo sapiens
ctctgtcttcattcaccaaaatctgcaagccacttttctcttttttcctttctttaaaaaaaaataaagaaagaaaaaacacttcatctattatttcagcaggcaatatggggggacctgccaagttgatagcaattcttggtgctaataaagtgtcaattaagattgattgtgctgccgagagctctgagaggctggtggtttatgcwaatgttttaaaagtctatttcatatgcctttatgttgagtcgtttcattaggtttattaagagcccaattgatacatttcttgttgactccaaatattcctgaggtgattaattctgaacatgggggtaattagtctgcagactttggaacacttcctcaggcgggcgctttcgaaaccagtgtacagggaatgtaatctccaaaagaattaagtacctttcttctaaaggaatggggaagaaaattaaccccagggaagaaaggatggctgtgatctcacggagagttaaatgagtgttaaactc

SEQ ID NO: 770362 - DNA, 658 bp, Homo sapiens
taagaatgttcttagtggcactatttataatatccaggatgtggatacaccaaaagtgctcattaacaggagaatggatgtgtgcatgcagtgtaatgttgtgcaacaatgagaatgaacaaactacaaaacaatgtgattggatgagcctcacaagtgtaatgttgaatttaaaaagtcattcaaacacatgatttcatttatccaaagttcaaaaacatgtaaaactcatagatggtgctagaaatcaggataagggttaccgaggggtaggtagtgatgggaagacgtcatagaagtggcttcaggggtgctggaaactttctttctaatctggattatatgattataagagatgtgttcactttgtgaaaatctrttgacttgtacccttaaaagttgtatacctttttgtatataaattatcctgcaattaaaactttgcttaaggtcaaactaaatttcataatccatgaatcccttaatcagccacatgtaaactgaaattccatggctaggagtggcatatgaaggtagataccaccattaatcttattgctctgtgaaacgccactcctccctcagcacacgttggcccttccatgtaccatgactacccaacatataacaggacaccaatatcaatccacatattaaa

SEQ ID NO: 770363 - DNA, 613 bp, Homo sapiens
tgttacatagctgaacatgtggtggtttgctgcacagatcatcccgtcacctaggtattaaagcccaccatccattagctattcttcctgatgctctctctccctgccacgcaacaggccccagtatgtgttgttccctgccatgtgtccatgtggcctcatcacgcagctcccacttataagtgagaacatgcgctgtttggttttctgttcctatgttagtttgctgaggataacgcctttccgttcaaaggatatgatcttgatccttttaatgactgcatagtattccttggtgtatacatactacattttctttatacaatctatcatcgatgggcatttgggttgattccatgtcgttgctattgtgagtctacaaggaccttgagcaaatctacaagacaacaaacaaccccattaaaaartgcgcgaaggacatgaacagacacttctcaaaagaagacgtacatgtgaccaacaaacatatgaaaaaaactcaacatcactgatcattagagaaatgcaaatcacacccacaatgagataccatctcacgccagtcagaatggagattattaaaaagtcaagaaacaacaggtgctggcagaga

SEQ ID NO: 770364 - DNA, 624 bp, Homo sapiens
acatcctcacctactcactcataggcaggaacacatacagagtcccatagtgttcccaacatgcctttgataatgccgttgtcttcccctcactctaaatacacagtagtgacctcttaggcaagtcaaccaacatccctcttggcaayatccaagagggaagctcctttccttactcactgtctcttcactacaaagctgtttccaacctcaaggagggacatggtgggggctgggcagcggggaggggagaaagtgccagggggctgcagtgcccaggaggtagaaggctttcccacccaaccccttccttctctcttcactcaggccccactggaggctccatctatcatttggaggcttagcctaggaggaggcaggggctgggagatggggaattagagcccagaggaaaggaaaataccccaggcttccattccaggttgattgagagcagttgattaatagataaacatataaataagtgggcctgcagccacagagttcctaaatcctaatcatttctgggaaacctttggaacagtggttctccaagcacagaacctggaccagcagctgcagcgtcactttggaactttttagaaatgcacattctcggcccca

SEQ ID NO: 770365 - DNA, 624 bp, Homo sapiens
acatcctcacctactcactcataggcaggaacacatacagagtcccatagtgttcccaacatgcctttgataatgccgttgtcttcccctcactctaaatacacagtagtgacctcttaggcaagtcaaccaacatccctcttggcaacatccaagagggaagctcctttcctyactcactgtctcttcactacaaagctgtttccaacctcaaggagggacatggtgggggctgggcagcggggaggggagaaagtgccagggggctgcagtgcccaggaggtagaaggctttcccacccaaccccttccttctctcttcactcaggccccactggaggctccatctatcatttggaggcttagcctaggaggaggcaggggctgggagatggggaattagagcccagaggaaaggaaaataccccaggcttccattccaggttgattgagagcagttgattaatagataaacatataaataagtgggcctgcagccacagagttcctaaatcctaatcatttctgggaaacctttggaacagtggttctccaagcacagaacctggaccagcagctgcagcgtcactttggaactttttagaaatgcacattctcggcccca

SEQ ID NO: 770366 - DNA, 622 bp, Homo sapiens
tatactgtccgaaaacttggtttttcatttaatgttaccaacctcttttcaggtcagttcttccggatctacctcatgctctgtgaccactccgcaggtgtttctaaccatgccttgactgatgggcacttaagctgtcctctctttccagctgtggtgcactctgctggaaaatcatccttggacacaactctgtcggccctgatgcccaagggtggccttgtcttctggggcttggctgcaaagcctttctagatttgggagaatgctaaagtgtggctcaatggtgatgtttcaacaggatgaagttccaggggtggaactgcttatcatgataaaaataaccgcttctagratgggcttcttggctatcaaatgctgttacaggttggggtcctcatcgcctcccgagaggtgaaagcatgcacggtgcccattttacagatgtggaggccacgaggatcctgcagtcagtgggacagagcgtccaggctctaaccctcctcggccacaggagagaagaggagtgggatggtcgcaggacgaggagggaaggtgtcatctggagttaatggcagatcttggatttgtagcttgcggttgcaagggcttctccagtctt

SEQ ID NO: 770367 - DNA, 622 bp, Homo sapiens
tatactgtccgaaaacttggtttttcatttaatgttaccaacctcttttcaggtcagttcttccggatctacctcatgctctgtgaccactccgcaggtgtttctaaccatgccttgactgatgggcacttaagctgtcctctctttccagctgtggtgcactctgctggaaaatcatccttggacacaactctgtcggccctgatgcccaagggtggccttgtcttctggggcttggctgcaaagcctttctagatttgggagaatgctaaagtgtggctcaatggtgatgtttcaacaggatgaagttccaggggtggaactgcttatcatgataaaaataaccgcttctaggatgggcttcttggctatcaaatgcygttacaggttggggtcctcatcgcctcccgagaggtgaaagcatgcacggtgcccattttacagatgtggaggccacgaggatcctgcagtcagtgggacagagcgtccaggctctaaccctcctcggccacaggagagaagaggagtgggatggtcgcaggacgaggagggaaggtgtcatctggagttaatggcagatcttggatttgtagcttgcggttgcaagggcttctccagtctt

SEQ ID NO: 770368 - DNA, 616 bp, Homo sapiens
gggacattttctgccaaccactcctatactcataactaaaagaaatgctaaatttcagttagggtttagtagaaataaatatgcaaaaattttctgctcaggttcatagactgcccttgaattccacccatgaaccttagatccggtattgatacctattaacaaactgccatctagaaagatagtactgatttatactccctcaacaggctataaaagtgtccatttccctcaggttgttacctagatcaggttttatcatttaaaaaagagggaaaggaaaggaaagttagaaagaaaaaggraaggaaggaaagaaatctctgccaatctgaaagagggggaaacacatataattgagaatttagctttatttagacattacgttacttttttttttaatttttttttttttgagacagagtctcgctctgtcgcccagcctgaagtgcagtggtgtgatttcagctcactgcaacctctgcctccggggtcaagcgactctcctatctcagcctcccgagtagctgggattacaggctcacgccaacacacctggctaatttttgtatttttaatagagatggggtttcaccatgctagccaggctggtctt

SEQ ID NO: 770369 - DNA, 397 bp, Homo sapiens
gggcacagagaggcaggttctctggatacttgctggtgggagtataatggattcaatgtctcaggaaaccaacatagcagcatgtgtttagagccttaacgaggtttttatcctttcacctaataatttctctctccagatctatcctaaggaaatagtcatgacactagacaaatatttctttacaaagtggtttactatagcattatttacaagagttaaaatgaaaaaatctaattgcctyataatcagtgatattcaaattagtcataataccttcatttaataaaataaagagctgtttgaattatgttttcccaggatatttaataatatggagaaatgctcccaatgcaatgttaagttcccaatatcataaaaatatccattgagagct

SEQ ID NO: 770370 - DNA, 551 bp, Homo sapiens
agttttggctggtctcagctggggtcattcatgagctcactctaatctgatggattgcctgggatgattggtccaaaatggcctcaagtgcaggagttcaagaccagcatggaaactatagtgagacctcgtctctacaaaaaaaaaaaatttttgccgggagcagtggctcacacctgtagtcccagcactttgggaggccaaggtgctcagatcacctgaggtcagagttcaagaccagactgaccaatgtggtgaaaccttgtctctactaaaaatacaaaaattagccaggtgtggtggtgcatgcctgtaatcccagctacttgggaggctgaggcaggagaatcacttgaacccaggaggyggaggttgcagtgagctgagattgtgccattgcactccagcgtgggcaacaacagcaaaactctgtctcaaaaaataaataaataaataaaaaataaaaattagccaggcattgtggtgtgtacctgtagtcccagctactcaggaggctgaggcatgagaatcacttgaacctgggaggcaga

SEQ ID NO: 770371 - DNA, 643 bp, Homo sapiens
gatctcctgtaatcaagggatcctcccacctcagtctctcaagtagctaggactacagatgcgcaccaccgcaacttgctaattaaaaaaaaaattggtaaagatggggtcttgccatgttgcccaggctggtcttgaactcctgggcccaagtgattctcctgcctcagcctcccaaagtattgggattacaggtgtgagccactatggctggcgtcaaaattctttaattaaattaaattaaattaattaattaacttattcatttrcttattttttgctagttagagtctttcttggaccaggcttcctagaaaactgagcatcaggcaaagcttaagtgctaacatttcatgagaggcccaattccaggtcagtgagagtaaggaaagagggaagtgggaagtgggaaaagggaatcgcctcaggagacgaggggaagcaaataaaagaagacatgttccagaactggccatggcttcaggaaaacacacagctagttgcttagtcacatgggttgtcttcagaggagccatagagaacacagcatcccagtacagcccattgaaggggaaaagggagaggaatgtattttctctctctctcctctctcctgtctcccactggtcagggttctcccatg

SEQ ID NO: 770372 - DNA, 611 bp, Homo sapiens
aatccctgtcctgttctgttccaatctgattactggtgcatgcagcccccagtcacgtaccccctgcttgctcaatcgatcatgaccctctcacacggacccccttagagttgtgagcccttaaaagggacaggaattgctcactcagggagctcggctcttgagacaggagtcttgctgatgctcctggctgaataaaccccttccttctttaactcggtgtctgaggggttttgtctgcagcttgtcctgctacactgtcttaaaaaaaaacaagcaaagaaaaccacggtagtgttttatttgataacttcatggattcataaatgtcttctaaatacctcccccccmaaaaaaaaaacacctgctccaggctgaataaacccctttcttctttaactcggtgtctgaggggttttgtctgcagcttgtcctgctacactgtctcaaaacaaaacaaacaaaaccacaatagtgttttatttgataacttcatggcttcataaatgtcttctaaatacccccccccaaaaaaacacctgcaaagaacatagatggcttatttattttattttattactattattttttgagacagagtctcagtctgt

SEQ ID NO: 770373 - DNA, 643 bp, Homo sapiens
ttacattgccagaagaaactcaaagggcattgtttgaatgccctattttttttttccaagagctggacacttgtcctaaagaagtagatcaaataataacaacgtttactctcattctctcttttatttttttttttgagatggagttttgctcttgttactcaggctggagtgcagtggttcaatcttactgcagcctccacctcccaggttcaagcaattctcctgcctcagcctccygagtagctggaggcaccaagtaggtgcttgctaccacgcccggctaattttttgtagttttagtagaggtagggtttcaccatgttggccagggtggtctcgatctcctgacctcaagtgatccccctgcctcagcctcctgaagtgctgggattacagacgtgagccaccgcgcccagccctgcctttgttttacttgatttttgtagaataattttggaagttttttttttttaaacatggaagaaatccatgatgagctttctagcaaagatatttggaaaataatggaagattttgaatgtgaatacttttgaaaactgctgggattggaatcagtttcaaagaaataaaaatataaacagtattacaattctggaattttttgtaaaatgggacttaa

SEQ ID NO: 770374 - DNA, 629 bp, Homo sapiens
agaaagaagtaagtctgtctttatttgcaaataacataattatctatgcagaaaatccaaaataataataacttttaaaaacctcctggctctagcaagcaactacagtaagattgcaagcttgaaggttaatatacaaaagtcaattgcttttctatatactagcaataaacaagtggaatttaaaattaaaaacacaataccatttacattagcatccaaaaaatgagatacttatgtataaatctarcaaaaacacgtacaagacctatatgaggataactacaaaactgtgattaaagatgtgagaagaactaaataaagaaagggataacccatgttcatggataggaagactcaatattttcaagatgtcatttcttcccaacttgatctatagactcaatgccatcccaatcagaacctcagcaaattatattgtggttatcgacaaactgattctaaactttatatggagaggcaaaaggccaagaatagccaatgcaatgttaaaggagaagaacaaagtatgaggactgacactacctgacttcaaggcttactgtaaagctacggcaatcaaaattgtgttatattggtgaaagaatgaacacatagatcaataagac

SEQ ID NO: 770375 - DNA, 451 bp, Homo sapiens
  misc_feature 1, 2, 3, 4, 5, 6, 7, 8, 9, 10, 11, 12, 13, 14, 15, 16, 17,18, 19, 20, 21, 22, 23, 24, 25, 26, 27, 28, 29, 30, 31,32, 33, 34, 35: n = A,T,C or G
nnnnnnnnnnnnnnnnnnnnnnnnnnnnnnnnnnntacttatgtttggaggctcacatttgtgcctgaagcccaattcagatgacagtaaaggatctgtatgtacagggcagtctgtccattaaggatgtataaagatctagctagggaggcattgcgatctggtctgtatgtttcactagctttcttaaaatgggatgacctccctgatggttctcctsccagccaagggatcagcaaatgcaacaattgaggagaacgcctttccccaagtttcgaggctccctttgctctcataatttccccagagctgttcacagcagccaaggtggaagacagcaatgggatctcctccactgaggatgaagcccagagccccagactgactgaccacccggggacagcctccagaatccaaagaggcagttgcagcagggaagacatggagctgg

SEQ ID NO: 770376 - DNA, 624 bp, Homo sapiens
attgttacaatgtcaattctcatttgctcattagtcagtgcactctcaatcaaaatcctaacagacttttcttgtagaaattgacaaggtgatcccaaaattcatatggaaattcaagggatctagaatagccaaatcaactatgaaaagatgaatagtattgcaggacttacactacctgattttaagacttataaagtgggccaggcatggcaactcatacctgtaatcccagcactttgggaggccaaggtgggagaattgcttgagcccaggagttcaagaccagcctggacaacatagcaagaccccgtcttcacaaacaaacaaacaaacaaaaattakcatggcttggtggcacacacttgtagtcccagctacccagcaggctgaggcaggagaattgcttgagtctgggaggtcgaggcttcagtgagctatgattgtgccctgcattccaacctgggtgacagagtgagactctgccttaaaaaaaagttactgtaatcaagatagtatggtattgatataaagataaacaaataggtcaatggaacagaatagatgattgagaatcagacttacaaatgtggaaaatttatttttgacaaggatccaaaggga

SEQ ID NO: 770377 - DNA, 629 bp, Homo sapiens
gcaattgctgctatccatgctgaactttgttttgatgggcctgttaacacccagttcatgataggcaactcaggtctcatgataacttggtaacctgaggtcaagcattcagtgtctaccaagacctgctggcaagccagatactgtttctcaaaaggagagtagtcctctgcagttgatgacatggctttgctccaaaacccttaaggtctgccctatgctttacccacagatgcccctctgagcttccatgtagcatctctatgtgcatatacacgtcaagcaccattggatctgctgggtcatacacccargtggcagagccacttgcatggcagcctggacctttttgttctgggccccactcaaaacaagcaactattcagttcgattggtaagtgggttgaagtggtacttcattggtatcactggtaaatggtacttcagtggtactttgacctgaaacatgagctactctctaaaatctgaagtgcccacaaggcactgtgcttccttctcaatagatgggagggccagatgctgtgacttgccctaccttttgaaagggatatctcaacatgccccagactaaagaacccctggaaaatgccactgcagtagcaggcccc

SEQ ID NO: 770378 - DNA, 584 bp, Homo sapiens
caacatactgaatagtgaaaagttgccacttattgctttaaggtgtggaagaagacaagaatgcccatttttacaacttttattcaacatagtactggaagtcctagccagagaaactatgtaaaaaatgaaataaaagaattggaaaggaggaagtcaaattttccctgtttgcaaatgacataatcttttttttttttttttttttttgagatgggtcttgctgtgtcacctaggctggagtgmattggcgctatctaggctcactgcaacctctgctgcccaggttcaagcgattctcctgcctcagcctcctgagtagatgggactacaggcacatgccaccacgcctggctaatttttttttatttttagtagagatggggtttcaccacgttggccaggatggtctcaatctcctgacctcgtgatccacctgccttggcctccaacagtgctgggattacagggacataatcttatatgtagaaaaacctaaaagcctcacagaaaagagccttagacctgacaaacaagtcagtaaagtcacaggttacaaaatcatatgcaaaaattagtatttt

SEQ ID NO: 770379 - DNA, 592 bp, Homo sapiens
tgagggagtatttctgtgggggcccattcattcactcatttactcaagcacatgctgagcctcaacattagaagctctggaagatacaaagaagaaaaagacaaagtctttgcatggaaaagctctcaggtaggtcggggagaaagacatattcacaaataacttcaatttaaggcaaggtgtgatcagaccatgactgaggagttcagaaaaggagagaaaattcccaactgcagtaaagttggaggaggtgaagcaggaagcagatgttaaaagctgaataaaattttaggccrggctcagtggctcatgcctgtaatcccaacacttcgggagtctgaggtgggtggatcacctgaggtcaagagttccagaccagcctggccaatatgctgaaaccccatctttaccaaaaacacacaaaaacttagccaggcatggtggcgggtgcccgtaatcccagctactcggaggctgaggtgggagaatcacttgaactcaggaggcagaggatgcagtgagctgagatcacagcactgcactccagcctgggcgacagagtcagactctgtctcaaaaaaaaaaaaaaaat

SEQ ID NO: 770380 - DNA, 528 bp, Homo sapiens
atatagtcctcatttccatctaagacgttatcagaatagcctttactctttatatttctgccagcattctgatcacaaccatttagataacttctgagaagactgaaatcctttctatagctctccctttcttttgtgtttatcctagtccatttcctgcttattataacaaaatgcctgaaactgggtaatttataaagaaaaaaatktatttattacagttatagagtctgaaaagtccaagatggagaggcgccatctggtgagggtcttcttcctgctgaggattttctgcagagtcccaaggcagtgcagggcttcacatggtgggagggctaagtgtattacattaggtctcgcttcctcttcttataaagccaccagttccactcccatgataacccattaatccattagcctattaaccctttaatccattcatccattaatcatctatttatgagtgcaaagccctcatcagccaatcacctcttaaaatttcacagcactgccacattggggattaaa

SEQ ID NO: 770381 - DNA, 582 bp, Homo sapiens
ctcactgcagactaaacccccaaggctcaagcaatcctcccacctcagcctcccaattagctgggactacaggtatgtgccaccatgctgagctaatcctttttacttttatttttattttttggtatttttttgtagagacagtatttcaccatgttgcccaagctggtctcaaactcctggacttaagctatctgcccrcctcaacctcccaaagtgctgggattacaggcatgagccaccacacccggtctgctttatttctatcctaggttaataaattccttaaagataggaggttctaagacagtgtgtcagctatttatatatataatagtggaaagggggataagacttccactaacttttcctttgtcatttctttctttcctagtcatttttttttttttttttttttttttggtgtgtgtgtgggggggcggggtgtgtcctttagtagggacattcatggagagagagatgagcaaaattatttgaaagttgttctgggaacctattctgagttcaccgtacaactgaccagagactccccatttctcccagagtgagaagttgcaccca

SEQ ID NO: 770382 - DNA, 625 bp, Homo sapiens
catgatcccaaaaacctatacaggaagtaggagcatcacaacaaccaaaatctagccagaatggggaaaatagattagatatcttattttgttcccaagatccactgcatagtcccagagctaaagtgagagcctttattcctggttacattcacttccctatgaatctctccaaaaaacctacaatagtgtgacagctagtagctatgcacagtctatcagcaatggctcagtgaacctctattcaaaatagtttgaagtaagaatatggagtaaggtagaaaaattatcttctctcctcccacagttctacaagatatatactgttgcactttagaaggcagaaagcaaaaaaaaaaaaaaaaaaaaaaaaaaaattaagagtattacacattctttatctgttttatgaaaatgttctaaccayagacaaaaattccaccaaaaacaatttttcaagttcacactaacattataaaaagctactagttgtttaattggttccattcacttaactaggcaaagttctattgatcttacagtaatatggtttataaaaacaaaagtgaacatttataacattggggaggtagaaaccaaatctggtctaacactgttacagata

SEQ ID NO: 770383 - DNA, 642 bp, Homo sapiens
aaacttgtcaaggacactataagaaaggaaaattacaaaccaatctctttcataagcagagctgcaaaaatcctaatcaaaatattagcaattgatacagtaataaaaaagagactatatacaaccaaatagggttttctccaggaatgcaaaggttacttagcattcaaattttttttcaatcaaagtaattcacctcaataagagaaaaattaaraaaaatcttataatcatcatgaaatgcagaaaaaacatttggccaaattcatcattcatgatgaaaatacttaacaaactaagaataaaaagaaacttgcttaatctggtagagtcattaaagaaaatctatagcatatatcatacctaacaataaattattgaaaatgttctccttaagactgggaaataaaaatgaccactatcaccttttatcttctttttcaagtgtgttagagaggtccttactagtgcagtaagacaaaaagacagaaggggagacagcaatatgtattattttcagattatacatagagaaaatacaaaataatctacataaaaacctttagagtgtgtgaaaaaaattcagtataaagcaattaattataatcctatataccaacaataaagtaattttttaaatga

SEQ ID NO: 770384 - DNA, 642 bp, Homo sapiens
aaacttgtcaaggacactataagaaaggaaaattacaaaccaatctctttcataagcagagctgcaaaaatcctaatcaaaatattagcaattgatacagtaataaaaaagagactatatacaaccaaatagggttttctccaggaatgcaaaggttacttagcattcaaattttttttcaatcaaagtaattcacctcaataagagaaaaattaagaaaaatcttataatcatcatgaaatgcaraaaaaacatttggccaaattcatcattcatgatgaaaatacttaacaaactaagaataaaaagaaacttgcttaatctggtagagtcattaaagaaaatctatagcatatatcatacctaacaataaattattgaaaatgttctccttaagactgggaaataaaaatgaccactatcaccttttatcttctttttcaagtgtgttagagaggtccttactagtgcagtaagacaaaaagacagaaggggagacagcaatatgtattattttcagattatacatagagaaaatacaaaataatctacataaaaacctttagagtgtgtgaaaaaaattcagtataaagcaattaattataatcctatataccaacaataaagtaattttttaaatga

SEQ ID NO: 770385 - DNA, 642 bp, Homo sapiens
aaacttgtcaaggacactataagaaaggaaaattacaaaccaatctctttcataagcagagctgcaaaaatcctaatcaaaatattagcaattgatacagtaataaaaaagagactatatacaaccaaatagggttttctccaggaatgcaaaggttacttagcattcaaattttttttcaatcaaagtaattcacctcaataagagaaaaattaagaaaaatcttataatcatcatgaaatgcagaaaaaacatttggccaaattcatcattcatgatgaaaatacttaacaaactaaraataaaaagaaacttgcttaatctggtagagtcattaaagaaaatctatagcatatatcatacctaacaataaattattgaaaatgttctccttaagactgggaaataaaaatgaccactatcaccttttatcttctttttcaagtgtgttagagaggtccttactagtgcagtaagacaaaaagacagaaggggagacagcaatatgtattattttcagattatacatagagaaaatacaaaataatctacataaaaacctttagagtgtgtgaaaaaaattcagtataaagcaattaattataatcctatataccaacaataaagtaattttttaaatga

SEQ ID NO: 770386 - DNA, 578 bp, Homo sapiens
gcaatctcatttcactgcagccttgacctccccagtgcaggtgatcctcccacctcagcctcctgagtagctgggactataggtgcacaccaccagatccatttattttttatttattcatttatttattttagtagagatgaggcttcacaatgttgcccaggctgatcttaaactcctgggtctcgcaatcagtccacctgggcctcccaaaatactcagattacaggcgtgagccaccatacctggccagccccataacctacttcttacagttaaataaaatcaccacatatatttatggcaaatcatatcagaaaccattttgacaaagaagctactaaaaamatttccttcctaaagtcacgttcaaatatgaatatcacaattcaatgattggtgaaaataaaaatgttcaaaaaattacgtaagtaaaagatgctctttaggagcatcaatcaactcaatggtgctagctcttagaaacttctaaaatttgttgaagaaatgagccacagtagcagataaactgaggctggacattgtctgtggatttcatttatccctggagcacttta

SEQ ID NO: 770387 - DNA, 578 bp, Homo sapiens
gcaatctcatttcactgcagccttgacctccccagtgcaggtgatcctcccacctcagcctcctgagtagctgggactataggtgcacaccaccagatccatttattttttatttattcatttatttattttagtagagatgaggcttcacaatgttgcccaggctgatcttaaactcctgggtctcgcaatcagtccacctgggcctcccaaaatactcagattacaggcgtgagccaccatacctggccagccccataacctacttcttacagttaaataaaatcaccacatatatttatggcaaatcatatcagaaaccattttgacaaagaagctactaaaaaaatttccttcctaaagtcacgttcaaatatgaatatcacaattcaatgatyggtgaaaataaaaatgttcaaaaaattacgtaagtaaaagatgctctttaggagcatcaatcaactcaatggtgctagctcttagaaacttctaaaatttgttgaagaaatgagccacagtagcagataaactgaggctggacattgtctgtggatttcatttatccctggagcacttta

SEQ ID NO: 770388 - DNA, 628 bp, Homo sapiens
aagattggtgataacaagaaacagttgatttgaccaatagacttaggttccacagacaaaataagaatcattgagagttagccaggggtcatagaaataattatctgctgactaagagtgaccagggaatgctagttttgaagatgaggaaaggatttgtcagaggtggtttatgtgtggttggattgaatctgaggaattaggacaagaggggcaatagtaacacttccattaatatgagggctgtgtgaagaacacttaccaacttgagggttttatgttagatttagtgatgtctaggtgtcatgacaaatgyaaatgcttatttctagaaagggaccagtggtaaaattatgatgggaatagacatggcctttttgaggatagacctttagaggtttcggagttgacttactctggataattatgcaatttagaatggtaaaggcaaagagaggaagggttttagcaaaatatgtatcctgattggtcaaaggactctgggagcacagtaccaaaagtctgtccagtagaggtcaatgggagacagtgtgactatatttgttagatagaatacattattttcaggggcagtatgaccatgattttaaataaaaatttcagacgt

SEQ ID NO: 770389 - DNA, 605 bp, Homo sapiens
attagggatatgttaagtaagtcatcaagagcccaccaaaattagattttgttagtgactgatgaacaggtatctaaagaaagtgaaatatttttaaatattattaaaagagaacacatagaacacaaaacaaatacaaagtaaagaaaaattacagaacttcagaaaactagttattacaaaaaaggaaaagcaaagctgagtaaagcatcgaataaagggtttaggagattgttgaaatttcatcgcaattttatgtgttgcacaaatttctgagaagaaaggccataatttaatagattctcaaaagagtctgtgacccaaagaggctaaggtccactccaccaagctttcctcaccattaccakagtaaccatctagtctggttcctcagttaccccgtctggattattatgataatgaccagactatttctccaagttcccaggattatctcaccttaatccacctgatcctcaaactctatggtccggctataatcaattactcagtaccccaagtattccagggaatttcaaacatttcttcaagcttttcagagacagtaaggtgaaggagttaaaagtatgaactcagaagccaga

SEQ ID NO: 770390 - DNA, 624 bp, Homo sapiens
ctgagttgtgagttaccagaaaaaagatcaagactaatgataggccaccattcaacaatgacctccatacagtaagacgtgctggctttctgcactgatcattgtctccagggagcaagttcaatttctacctattagatgaaactcaaaactcaataatgaaactaactcctcccacagcaggataatctgtaaaagctccccttttcaagccaatgtgttctaaggagtcattcatatagatttaatgatgtaactagccaccaaaatcacctgggagatctcactgaaataatcagtgatcaaaggcaaasggccaaattttgttatgaaagtcttattttgataagctctgactacatagaaatccacaatcactgacactgattaagcacatgcctataattagcgaggtcaattttcctcctagacatttacctcattttcatttaaattaatataattctttagccaaaatgtaagagaagaatgttagggaaacactattcactctaatagcaataatcaaacattttcatccttaaggtgtaacagcataacaatgtacctctttgttaagaaaactctcatgtcctttcctgagattttgtctggtatatattc

SEQ ID NO: 770391 - DNA, 598 bp, Homo sapiens
tttatcaaattttttatctttacaaccactttgtatgggagatgatattgtccttattcttaagaacttgaggcttagataggtataattacttgccagaagcaagatagagtctttctgttgcccatttttcttccatggctcctctttggatgaaattcaagcttcctagcctggatgacaagaccctgattatctatcccttgttaatcttttggggggtttttttgtatattttgtagagatctggtttcaccacgttgtgcaggctggtctcgaattcataggctcaagcgatctgcccacctccacctcccaaartgctaggattataggcgtgagccactgtgcctggcctgtcccttgttaatctttacagcgtcatatcttttcattccacacctaaacttcaagtttatagatctttcacttcctgtaatatgacatatgttgtttctactgtgagcaacattccctttcatgtcccactgttctgtgactaactcctcttcattcatcaagtttccgcttaagtaccacatcctccaggagacttcatcaagttcaccattgatgagcatgatgaatgagtccacca

SEQ ID NO: 770392 - DNA, 595 bp, Homo sapiens
ctttgatcattccattgctgtatcatccatctactttccttttaactaaccaggtaagactaatcttatttaacatgcaaaccacttctgttgttatatagaaaattttatgtagtatctatggcctggatgtcactaccaacaaagccaatgscagtttgagtatatctcagtaatgttatctgataaattccttttattttcatgtaaattacctattgtttcataaaaggctgctttgtgcttgtatatggccaattctcttgaaaggttagtacattttattgatgtacacatgtaagtattataatatttgaacaactacttagacatcaaagcagtttcagatgttcaagggtttttcttttattcttgggtaaagcaacaagggaaaagggtttaatataaaaattgtataagttgagaatgaggtctgattggttaaaaggttaggggactgtatgaagcacattaaaggttaatgttcagtttaagtttgtgtctgtctgaatctgtcttaaagattgtacaggtaaaaaaatagacatagcaaatgttttactgtttgtacaaagaataattagtctatatttaa

SEQ ID NO: 770393 - DNA, 641 bp, Homo sapiens
aatggatgaggcttaaccccttcagagatcatttccattttaaagctgtaaaaatgaagaaagggaatattgggaaagaaatggccagatcctgcatttttggtgaccccatatctgcttttctagagggccaagagatgaaaattattctggctgcataatttatagctatatggatttgaattgttgctttcctcttgcttctctctgacttgaccaagcacgtagctaggcctttgtgccgctgtgcacgagggaagcttcatgcagaaggaaggcggggagtaagtgtggtttgtggtgaactctttctmgtgatctttgttttcaagaatcctgagctcctctaggggtctgtactagagcagaaggcagggagaccagggcctttgagcacagtgctctagaaggaaactgctgcagtgtgagctcggtggactgtactccagttagagggtctcagctttgtcccaggctgtgaggggcacaggagtaacaaacctgaacctcagaggatacgtgggtctgaacatgaacacgtgtaaggcatataggtgggctggtcataggaggactgtccccatctaggctactctgggtgagtctctccctgcccaaagaacgttgaggaccctaaacta

SEQ ID NO: 770394 - DNA, 645 bp, Homo sapiens
gctaacacaatatttattctgcagtccataaatcaaggagtaattttgacttccaagtttaattgtttaagaaatagatttcataaggttatagctgtcatagacagtgattcctctgatgggtctaggcaaagtaaattgaaaacctttcaggaaagattcaccattctagatcccattgagaacattcatgattcatgagagggggtcaagtatcaacataacaggagcttgaaagaagttaattcgagctctcatggatgactttgaggggtttgagactccagtggggaaagtaacagcagatgtggtagaaatagcaaaagaactagaattagaagtgaagcctgatgatgtgactgcattgctaaaatttcatgataaaacattaacagatgagaagttgcttcttagggatgagcaaaaaagtagtttcstgagatgacatcaactcttggtgattatgtgaacattgttgaaatgacaacaaggaatttagaatattccataaacttatttgttaaagcagtgacaggatttgagaggattaactccaattttgaaaatttctactgtgagtataatgctatcaaccagtattgcatgctacagaaaaatatttcatgagaggaagagtcaatcgat

SEQ ID NO: 770395 - DNA, 589 bp, Homo sapiens
aatagtattttaaaattctactataatgctctaaatggatccaacaatttagccatgtaaaaaggggttggtgtttttattgtaaaactgatgagttgagcttgggtaagcctgctgtggaggatgtgtgccagccattgatgccatctatctgaattcttgtttttgggagttctccatgtattagaattactgtaagtattttatgaatgctgccattgttatgcttctgagatgggatagttcctttgaccccttcacaggactcatgaaggggtggctcatctactcagcccgcagctctgaaccccttataggagggggagcatggaggtgagcaggtgcgggaaccagggcaaatgaacgctggaactgactggtcactcctgtctggcattagcaggctctctgygggccctgtggcagcgtccatgtgtgttacaatggtcttttagctctgctgtctgagagggggtgtctgtgactcctggaaccccagagggcatgtgttacaatcagtgctgttttagcatttgccaaccacagacagctaagtgttaagcagctcagcgaagggtcggagtgacat

SEQ ID NO: 770396 - DNA, 575 bp, Homo sapiens
taacttttttactttataaactttttaaactttttgactcttttgtaataacacttagcttaaaacataaccacattgtacagctgtacaaaactattttctttatatcgttattctataacttctattttaaaatttatttttttttacttttaaactttttgaaaaaatgaagacacaaacacacacattagcctaggcctacacagggtcaggatcatcaatatcactgtcttccacctccacatcttgtcccctggaaggtcttcaggggcaacgacatgcatggagctgtcatctcttacagcaatgccttccggaatacctcctgaagggcttgcctgagactgtttcatggttaacctttttttctttttttaataaggacaaggggtaaactctaaaataatmataaaatgcacagtatattgtatataaaaagcaggaacatagtcaattattatagaatattatgtactgtacataattgtttatatgacagcagtgcagtaagtttgtttataccagccaattattatcaaatattatgtactgtacataattatttataggac

SEQ ID NO: 770397 - DNA, 600 bp, Homo sapiens
atgttccgtaaagtaaccaagaacactggattggaaaacactgaacaaattactcctgggggaatcacagtacaattagtttcttgcaagcctctggtcacaacggtctcattcaccaatcaatacataatcttgttttatgtgtgtttcaggttaaagacaccttatttaatacatactgttgattcattaacattgagctcatggccaagagcactgtagctcacgcctgagcaaagcttatctaacatacgtgttttctttctagggctcagtgcgtgcaacyttctgtgcttaggagcactcgacaacatttctgggagtagggggcgttttaaacagcaaaatcaccaatgagtagcacaaaaatgcaaaaaaatgtggcacttaatagactacaaatgagacatttgttcatagtatgagagctgaaacaggaaaacaatgtttccttgttcagctctaacggggtatgtgaatgtcaggcaggccaaatttttgcagctctgtttgtgttcacaaatgactgtgaaagcattggggttacaaataaattttagcaagtaggcaaattcacaagtaatgagaatctgtgtgtga

SEQ ID NO: 770398 - DNA, 525 bp, Homo sapiens
tatattgaaatgcaaagaaactagaatagcaaaaatgttttgaaaaatataaacaaagtttgagatacactactagattataagacttactgtaaaactaacagatattcaaggaagtgtgatattgacattacaatagacaaatacatgaatggaayagaatagagagcccaaaaatagacccatgtatacatggttgcttgactttttacaaagctaccaggggaactcaatgatgaaaggatagaatttttcaagaaacagatctggaacaattcgaatccaattgaaaaagaaaagcagaatgaaaaaaaaaagagtgtcaattcatacttcaaagcagatacaaaaattaactcaagattaatcataaacttaaatctaaaaccacaaactataacactgctctaagaaaatacaagggaaaatcttagtggccttgggttgggcatagatttcttagatacaacactaaaagtacaattcatagaataaaaataataataaattgggtttcactaaaaa

SEQ ID NO: 770399 - DNA, 607 bp, Homo sapiens
gcttctaccacatattgatatttgagcatttgaatccattgctaatgaattaattaatcaatttgttggtacattctccttataaatctatactgctcacaaataccctagaacacaaagaagtcatagcaaacatcctatatttgcttgtggtaataagatttttttggtgcagaagatttcctgcatatgatgttctgtgactacatattttaggtaaaaaagatcatctccctctataacaataaatttacatactgtgagaaagatgaaggtacaagtactatacaccgaaagctgctactgtgagttagactgccttgggaaatgcttcacctgttctatgatttactgaaaaggtgggctctttatagtgtattttcctytgggagattaaaccacatatacataataaaatcagcattaattgaaacataaccatcacacctcataatcaagattcatgagattgaattctccccgtgcatggaaatgatgcctgtgttcgtccactgtgaagttgacttgtttgcccaaacgctggatgagcactgaatgccaatgctgatcatctagcaggctgcccagggtgagattgaccagggtg

SEQ ID NO: 770400 - DNA, 625 bp, Homo sapiens
ctggatttatttcgtttttatcaggttgtcctgacaaaagctttggatccaaatgtaaaagtccacttggtggatttcagggatgtatgaggctcatttctatcagcggcaaagtggtagatctgatttcagttcagcaggggtcccttgggaacttcagtgaccttcagatagactcatgtggcatctcagacaggtaagggcaatctcacttcattttgacctgctttcaaactttggcatcagattaaaatttatgtataagatgaacaattattctttcctcttccccattcttatctgttccacaggaaatgaattatatttacattagaaataagaaaaaatgcaccctttgtttaaatgtcatattttaaatgacaacatttggaagacttggccatgttatgtatggccaygtatgtacacatgctaccagttcgccaaagataatgttgatgctgctataattttagacaagtatagatgtattaaaaatatgtcattaaactcaatatattaaggcacttgaacagtaaaattgatcatcaggtaccaataaatttgagactatgtagtcagttatcaaactggcatttgctaccctgacagcagaatattttcc

SEQ ID NO: 770401 - DNA, 619 bp, Homo sapiens
tataagcaaagtcaagtttgtgatttttaactctgtatcttggtatctgttctctgctaacataacaaactgttgttttgaaattgctgttttccaacatcagaggatcaacacatctttcttccaggaaggtaatttagatagaattttatccatgtaggtaatgtgtgtagaggcagttgcttaaaactaaagatgtatattcgtatttgatgtgcagagaacttgctagtggcagcagacaatacagagtttgtttctctgattttactcctcatcaaccwcctgtatccagtcggatttcactcctgtcagctcatgctgttgcatttatatttgattttccatagtttttgctatatatggttcataatattttttcgaaagaaaagttgtagatatgaaaaaaggagtgagaaattaaagataagtggtatttgggcagcaattataattaactttatagtctacatttttttcagatctcttaatttatatcccaaccttttcaacattttctgcccattttgaacatttgtaaacattttgagaacacttttaatttgctgtcatctacttcattcttattggcaaagtaagagataattttgaataaaaa

SEQ ID NO: 770402 - DNA, 621 bp, Homo sapiens
ttcacctcgtcaatttatccatacttaattgccccaaagccctgttgttatttcttcatccaaaataactcctgctgttccatcttgtggctttaaacatgctgaaaactgacaactccacatctcttcctgaatgtttaatgacatctcaaccttaatatgtcctaaaactgggctctttatatttctctacaactctgaccccagcagcaatctcccccatttcaattaatgccagttctttccctctaattgattagatcaaacaccttggtgttatttttgacttctccgttttgcaaactacaacaattcatcargaaattttactggttttcgtttaaactctacccacaccacaactctcaacattgcacccatggctcatgctaccataatttctcagctgggttggtgatatggtcccctaaatggtttccttgctttgagctttccctatttaatctcactaaaacctgagttagatcatatcactcgtcttctcaaaagtctctaatgttctccaatttcattcagattgaaaatggattttcaaaatctttcctgatctgaccaccaggtttctctctgacttctaccactctctttcttgcccactct

SEQ ID NO: 770403 - DNA, 521 bp, Homo sapiens
ataataatgaattgctgaagtacataagaaacccttaattatcaatgtcattgccaggttatgcagcaaggatgatttcaagccatctgtgggttctgtggctttttctgtgtctgtcagctcctacccaagctgacttaccacagcaattgctggtgacctgattccccctcagtgaatacctccatctcaaatcttcacatttacagcaagaatcgaggaaagaagagactcaaaaagattgtacgccctactctcatatcaattctccctgtktccgtaggtatagcttgctttatttacacaattcagaaatacaatctgccatggaattaagagctttgcaatagaaaatattcaaatatctttcagggagttgtgtcagatgtagtattcttgaaatgtgtcttctgccttttttcctgcagcatgtatttatggagagctttctgtgaataccgtggaagacacagtgatgcataaaaacaaagaacactttttgtttttttgaaagagcttat

SEQ ID NO: 770404 - DNA, 521 bp, Homo sapiens
ataataatgaattgctgaagtacataagaaacccttaattatcaatgtcattgccaggttatgcagcaaggatgatttcaagccatctgtgggttctgtggctttttctgtgtctgtcagctcctacccaagctgacttaccacagcaattgctggtgacctgattccccctcagtgaatacctccatctcaaatcttcacatttacagcaagaatcgaggaaagaagagactcaaaaagattgtacgccctactctcatatcaattctccctgttyccgtaggtatagcttgctttatttacacaattcagaaatacaatctgccatggaattaagagctttgcaatagaaaatattcaaatatctttcagggagttgtgtcagatgtagtattcttgaaatgtgtcttctgccttttttcctgcagcatgtatttatggagagctttctgtgaataccgtggaagacacagtgatgcataaaaacaaagaacactttttgtttttttgaaagagcttat

SEQ ID NO: 770405 - DNA, 567 bp, Homo sapiens
aaaagtcgaagagcatggcactaccttctgctttgcttctggtgacggtcatgtgctatgtcacaacatggcacggaagcagaaaggcgagtgggcatatacagaaagagaccaaacatggaggcaagtttgctttaaaataagttgccctcacagtaaatattccagtgctgcaagagtgagaactcactcctgcaagacagcattagtttgttcaacatggatatgcccccatggcataaacatctcccactaggccccacatccccaacatggctccactggcaatcaaatttcaacatgagattcaaagggaaaaaaactaaaattcaaaccatagaatcctgggactaaatgtgctcaaatggrttaaaacattgtgtgtgtgtgtatgtgtgtgtgtgtgtgtgtgtgtgtgtgtgtgtgtgtgtgtgtgtgatggtgcatgtttgcaattaagtatcagaagagcttctagcttaaactaaaagaagcattatgagtttaaataaaaacaatgttctgtggaatgctaggatcctacacagttagtgggctgctctctga

SEQ ID NO: 770406 - DNA, 660 bp, Homo sapiens
caggccaaaatccctgatgaacatcattgcaaaaatcctcattaaattctggcaaaccaaatccagcagcacatcaaaaagcttattcaccacgatcaagttggcttcatccttgggatgcaagcctggttcaacatatgcaaatcaataaatgaaattaatcacaaaaacagaactaaagacaaaaaccacattattatctcagtagacacagaaaaggccatcaataaactcaatatctttcrtgttaaaaagtctccataaactaggttttcctttttttttttttttttgagataaagtcttgctctgtcgcccaggctggagtgcagtggtgtgatcttggctctctgtcacctacgcctcccaagttcaagtggttctcctgcctcagccccctgagtagctgagattaaaggcacccactaccacacccagctaatttttgtatttttagtacagacagagtttcaccatgttggccaggctggtctcgaacttttggcctcaagtgatccacccaccttggcatcccaaagtgctggtattacaggcatgagccactgcacccagccaataaactaggtattaatggaacatacctcaaaataataagagccatttaggatgaacacacagccaatatcataccgaatgggc

SEQ ID NO: 770407 - DNA, 619 bp, Homo sapiens
aattatagtaaattaaaatgtccactcagtggtacatctgtaaagaagtgccattttttcacttgccctagttttcctgcaaagtgtctgtgagcaagtctagtagggcttagtacaccagaattgtcccaaccaaccttcctgcagaggaagtgcacatccctcaaactgaatactgatctccatgagtttattttcctctcttctgagaccatcctgctcccattggcctctttcagctgatgcctcaaagccatgattctcatattgagtartctgacattcctaaagcattgactcacctctccttgcttactgtcaccacctttcctcttgctcctcccttcatccaggtgctgtgttcttgatcaccttgtagacagtcatttcaagcttccagctttctccagccaatccattgacccctttcctaatggcacttctaattgcatgatgttcagtggattttttttctttctaattttaaaggacatgaaattggaaaggtgtaaagaaaattgctgcattttaaaataaacaaaaggctatcactaatttggagttcataacctttattttttttctatgtttatgatcagaaactttacaaaaaccattc

SEQ ID NO: 770408 - DNA, 589 bp, Homo sapiens
tttatatttctatttcttttcattaaattttaaaatatatatcttgaatgtctcatgataatgatgataatgaccacaaagcttactatggccaggcactgttctaagagttgagcatgcatgaattcattaagattcagaagcttctaacatccatttccaccactgttttacaaacaaacaaacacacaaacaaaacagagtccagaattttacccagcattgcactggaggcaggaatgaacccaggatttaaacccaggggtctggtccagagtctgcactcttrccagcacaccattagcccccttgtttctaccttaactcacttttcaccttctgctattaactacattttcctatcattagattgttaatactcacattgtcctgcacaacaaccaagttgttaaaagcttcgtccttagttgaaaacaaatagcatctgtattattatgactgcaaacatttttcacggctctgccaagtacagctttcatactcttttcttctcctctgggccccttgagggagatgattcctagcactataaaatctacttttccttatactgcattattgcttgaaa

SEQ ID NO: 770409 - DNA, 551 bp, Homo sapiens
cagacagtgagtcaacgtgtaaacaaaggctgagaaatgtgggcttagctcttaccacaactaaaaaggcctttattcatccatatgtttctaacctcagctcctcaccacccatcagaaatgatttaagataaataccagcccaagtaaatatttaaaacatagtctcagatcctaacgaagttttaagattttctaaaaatataatctacgcaagtttttaagcataccaactattttacttgaatatatccaaagaaaaggggatatgcactttgaaatctatgaaacttaaccattttttaaaaaatgaataataatttgcytcatgtaaagtagaaattacaatgaactcatgctacattatgaagctacttactgttgaatccatctttcccttttctagactgaaaagtaaaataaccttgcacttaaaccctgtctctatcaccttggacgagtcacttctgagccatagttttctcttctgcaaaatgggaataatatcaaaattataaattgttatataaatgactgatttatacaacatt

SEQ ID NO: 770410 - DNA, 566 bp, Homo sapiens
aaatgcaatgggagtaattggatcccaaggtgatagggaccaagtgacggcactcaaccgtcaaagacaagttgaatgcagttttcaaaatggtacctggtatgcacctactaaactggcaaatacctttttctccatttgtgttcataaggcccacctgaggcactctgccttcagctggcaaggcagaatcacaccctcactgtcttacatcagagatatatcaactcgccagctttatgtcacaatccagtttgcrggaatcttcactgcctttcccttccataagatttcatactgttctattgataaccttatgctgatcagacctcatgaccaagaagtagaaactactgtggacttatgggtaaggcgtttgcatatcagagcacgggagataatccaattaaaattcaagtgccttttaccttggtgaaatttctaagagtccaatggtgtggggcatgtcaagatattccttctaagatgaaggatatgttgtgtatctggctcgtcctacaaccaagaaagagataccatgcctagtgggcctatttgaattttgc

SEQ ID NO: 770411 - DNA, 566 bp, Homo sapiens
aaatgcaatgggagtaattggatcccaaggtgatagggaccaagtgacggcactcaaccgtcaaagacaagttgaatgcagttttcaaaatggtacctggtatgcacctactaaactggcaaatacctttttctccatttgtgttcataaggcccacctgaggcactctgccttcagctggcaaggcagaatcacaccctcactgtcttacatcagagatatatcaactcgccagctttatgtcacaatccagtttgcgggaatcttcaytgcctttcccttccataagatttcatactgttctattgataaccttatgctgatcagacctcatgaccaagaagtagaaactactgtggacttatgggtaaggcgtttgcatatcagagcacgggagataatccaattaaaattcaagtgccttttaccttggtgaaatttctaagagtccaatggtgtggggcatgtcaagatattccttctaagatgaaggatatgttgtgtatctggctcgtcctacaaccaagaaagagataccatgcctagtgggcctatttgaattttgc

SEQ ID NO: 770412 - DNA, 637 bp, Homo sapiens
agggaaggggcaggcaatggagaagtccacagaagctagtgagggatacagtggacctagacaccacagctcgttgatttctgtcttggggatggtgtttgaactgactcccgtagatggagaggggcaggttagacggagtgtggtggaaggaaggcagtgtgatctcgcttctgagccagcgtccatccacgcgtcyggtgtgaaccttctcagtagacagctaaagtcagctagcaccaaggcaagccctgaaggagagcgagggcatggtccctcgccagctggcctcccgagcagctgttagcagtgggggcagcaactggatcagaggagcagacccttcgcatggagcagcagtgcctgcatgggcattggcaggcagtgtcaggacggccaagaggtgcatggccaaggcgacctcggtcgtctgcagagggcatcttcagactggcctctgtgtcccctccaccaagcacacctcagcctccacatgctgccttgctgggacttggctgtcaattgccagatgatagacacgattccaacttcctctgaagagagagcagaaccattaataaaacatcaacactacaggaatccaaaggacccacaaaataaaataaaaattaaatta

SEQ ID NO: 770413 - DNA, 637 bp, Homo sapiens
agggaaggggcaggcaatggagaagtccacagaagctagtgagggatacagtggacctagacaccacagctcgttgatttctgtcttggggatggtgtttgaactgactcccgtagatggagaggggcaggttagacggagtgtggtggaaggaaggcagtgtgatctcgcttctgagccagcgtccatccacgcgtccggtgtgaaccttctcagtagacagctaaagtcagctagcaccaaggcaagccctgaaggagagcgagggcatggtccctcgccagctggcctcccgagcagctgttagcagtgggggcagcaactggatcagaggagcagacccttcgcatggagcagcagtgcctgcatgggcattggcaggcagtgtcaggacggccaagaggtgcatggccaaggcgacctcggtcrtctgcagagggcatcttcagactggcctctgtgtcccctccaccaagcacacctcagcctccacatgctgccttgctgggacttggctgtcaattgccagatgatagacacgattccaacttcctctgaagagagagcagaaccattaataaaacatcaacactacaggaatccaaaggacccacaaaataaaataaaaattaaatta

SEQ ID NO: 770414 - DNA, 628 bp, Homo sapiens
gaattggaaattaactatccccaaaccgagtctgtgtgtgctttacacttgctgtaggaaacggcagtgtcattgctagggagggggctggggcgagagggggtctcgccacctggggagggtgagatctgaaagagaaatgatagtaggtttagagacacgaattccttctccagaggcaaagctcatccctatgatgagctgagaagagctcctgccagatagggcagggactgctgggagcaggaactagtcccacagcattttaaagaaatataggactttctttgctagcaacctgcagctagttgacatcacacaaggttcctatcatctgaccttttgtttcctcatctgcggaaagagggaatttggctagatgacttcagaggtcttctgtgtatatagttaaggtttgtcttagtgtgtttyggttgttataacaaaataccataaactgggtagcttacaacagaaatttatttctcatatttccggaggctgaaacccactccccaggcatcaacagattgggtatctggcaagggcctacttcctggttcatagatggcattttgtcactattctcacatggcagatagggtgaggtgtctcatttgggcctttt

SEQ ID NO: 770415 - DNA, 589 bp, Homo sapiens
aagaattacagaggagtctttctttccgtacttcccttggcagagatgagacagacattggaaaaagcatatagggctacattattcatgcagatgagtctcacaattcaatggagctaattaggaaaatgatggagtaaattagcactttatgcaagtgtattaatattaataaaactgccattttaccctgaggttaaaacagaggaggagaaaaccacagccttgaccagtgagtcaactctcagcctggctgcttactggaatactgaccaccctcatccatcctgggtgatcttgttccttttctgtcatcaaagttgtcctaataaaaaaaagagaactatttcaaaggcgtggatgmgctgtccttgttttattgttgtggttacttgaaagcaaattctgcattttctttcttgttgagtcataactaacagcacattcttgtttacatggtaatttcaaatccataatcttatttaagttttgcaactaacttatgaggcaaagtgctgatattttccctatttataatttaataatttgtccacacataagaaatgataaccctctgagtggactatga

SEQ ID NO: 770416 - DNA, 606 bp, Homo sapiens
tctaccttgcacttctagaaatgactaggagtaatctttcttctctatatattgctttatcaaataataccttccttatagaggtgttaacaggattacattagatagcatctgtcaggtgtatgttctagtgtctgggctgctggtaggatgatgatgatgatgacaatgacaactgtcactattttttaaatattggttggttggtctgcatctgaatgggtccagagagggaagtgttttgacctgaaacaattcatcctgtatatgtttatyaatcatcaacagtgtacgaaatgctgtgatgaacacaggcagctgtacaacaccttgaaggagctcttcaccttcagacacattaaaaaaatattcaggactctcatgctgaagatgaaataagacaaaaccgtgccaacctcccccagatccccatctccgtccagcatgttttcacagctaagctcgacaccctggaccgcatttgttttctccacacctggggttccactcattcctcagctcaccactgcctcacttctgctgcctcagcagcaaaacaccttctgcaaaattcatcagtgccctccactgtggcagatcaaaagc

SEQ ID NO: 770417 - DNA, 656 bp, Homo sapiens
ttggtgcaagagatttagttttcagcctatcttggctttcaacctgtcttcttcattaagcttaatcatttccagagttttatttgaagcgaggaatgtgcaactcttcctttcatttgaacacttagaggcctttgtagggttattaattggcctaatttaaatatttttgtgtctcagggaacagggaggcctgaggagaaggagagagactggagaatggttggttggtagagcagtcagaacacacacatttatcgattaagtttcctgtcttacatgagcakagctcgtgctgccccaaaacaattaaaatagtaacatcaaagattactgatcactactagatataatgagaaagtttgaaatattgcaatagttaccaaaatgtggcacagagacagagtgagtacatgttgctggaaaaaatggtgccgatagacttgcttgatgcagggttgccacaaaccttcaatttgtaaaatacccagtatctgcaaaacacaatgaagcaaagcacaataaaacaaggtgtgcctgtacacacaatatatatgtatgtgtgtttgtttatttataaataaatatatatttaagtatatacatttatttatctctacctctgtcttgggatccatctctgtaaaatctcccct

SEQ ID NO: 770418 - DNA, 656 bp, Homo sapiens
ttggtgcaagagatttagttttcagcctatcttggctttcaacctgtcttcttcattaagcttaatcatttccagagttttatttgaagcgaggaatgtgcaactcttcctttcatttgaacacttagaggcctttgtagggttattaattggcctaatttaaatatttttgtgtctcagggaacagggaggcctgaggagaaggagagagactggagaatggttggttggtagagcagtcagaacacacacatttatcgattaagtttcctgtcttacatgagcatagctcgtgctgccccaaaacaattaaaatagtaacatcaaagattactgatcactactagatataatgagaaagtttgaaatattgcaatagttaccaaaatgtggcacagagacagagtgagtrcatgttgctggaaaaaatggtgccgatagacttgcttgatgcagggttgccacaaaccttcaatttgtaaaatacccagtatctgcaaaacacaatgaagcaaagcacaataaaacaaggtgtgcctgtacacacaatatatatgtatgtgtgtttgtttatttataaataaatatatatttaagtatatacatttatttatctctacctctgtcttgggatccatctctgtaaaatctcccct

SEQ ID NO: 770419 - DNA, 536 bp, Homo sapiens
ttgttagaggatgactgagattttttttttggtctttttacattgaacttactgaaatcatagtcatgccctctgcttagatcttttccaaatctgattcagcaaacctgattgatacctacagaattctggtactgcaaatcatggtgcttccaacaactttacacttgaaaagtgttatggtggtagtggggatgttgatggtgataatgaaagtgggccagccttatttgactgtttgcttagtaccaaggattttacctgtgtgaacyaccctcgtacatatttttttccttcttgttacggtgaatcaattatccatgttctatggaaagccaatcttttatgtgtgtactggatcccatcctgtacccatttaaggctattactctagcaattctttctttcccacattgacaattttccccccttcctctgctggattagtgtcatctgtatataggaataggcacactgtttcattgacatattaaggaaagtttttctgattccatatttttgtccagctatagctc

SEQ ID NO: 770420 - DNA, 621 bp, Homo sapiens
aatacaaagctgaaccaaactcacaggttagagccaagcccagccaatcctggataagccgagcagagccagagctaactcaaatacccgtgagcaataaaataaatatttttgttgtaagccactgagattttgaggttgtttgttagacagcaaakctaactaacaaattttgagtgttgactttccatccttaggcctgtggcctgtggtctcaagatggtttcaaactccagaaatcacatctccattcaaaggcaggaagttaggggtgtggggagggcagccagggcagagaaaaccctttttttgtaacactcttgctttttcatcaaagaacactgaaatttcccagaagcctgtatgctggcgttcccttacatttcatagaccagaactgtgtcacatggtcactgtagctattagggaggtttggaagtaaataccccgcaaaaaggaccacaactggttggaaaaaaggccttgcctgagatcaagggatatctgccctctgcctggcaaatcaagggattattggaaaagcatatataactatgctatctaccatacatgttatataacactgggcaaaagtcaaatagaataaggtggatttatacg

SEQ ID NO: 770421 - DNA, 621 bp, Homo sapiens
aatacaaagctgaaccaaactcacaggttagagccaagcccagccaatcctggataagccgagcagagccagagctaactcaaatacccgtgagcaataaaataaatatttttgttgtaagccactgagattttgaggttgtttgttagacagcaaagctaactaacaaattttgmgtgttgactttccatccttaggcctgtggcctgtggtctcaagatggtttcaaactccagaaatcacatctccattcaaaggcaggaagttaggggtgtggggagggcagccagggcagagaaaaccctttttttgtaacactcttgctttttcatcaaagaacactgaaatttcccagaagcctgtatgctggcgttcccttacatttcatagaccagaactgtgtcacatggtcactgtagctattagggaggtttggaagtaaataccccgcaaaaaggaccacaactggttggaaaaaaggccttgcctgagatcaagggatatctgccctctgcctggcaaatcaagggattattggaaaagcatatataactatgctatctaccatacatgttatataacactgggcaaaagtcaaatagaataaggtggatttatacg

SEQ ID NO: 770422 - DNA, 621 bp, Homo sapiens
aatacaaagctgaaccaaactcacaggttagagccaagcccagccaatcctggataagccgagcagagccagagctaactcaaatacccgtgagcaataaaataaatatttttgttgtaagccactgagattttgaggttgtttgttagacagcaaagctaactaacaaattttgagtgttgactttccatccttaggcctgtggcctgtggtctcaagatggtttcaaactccagaaatcacatctccattcaaaggcaggaagttaggggtgtggggagggcagccagggcagagaaaaccctttttttgtaacactcttgctttttsatcaaagaacactgaaatttcccagaagcctgtatgctggcgttcccttacatttcatagaccagaactgtgtcacatggtcactgtagctattagggaggtttggaagtaaataccccgcaaaaaggaccacaactggttggaaaaaaggccttgcctgagatcaagggatatctgccctctgcctggcaaatcaagggattattggaaaagcatatataactatgctatctaccatacatgttatataacactgggcaaaagtcaaatagaataaggtggatttatacg

SEQ ID NO: 770423 - DNA, 621 bp, Homo sapiens
aatacaaagctgaaccaaactcacaggttagagccaagcccagccaatcctggataagccgagcagagccagagctaactcaaatacccgtgagcaataaaataaatatttttgttgtaagccactgagattttgaggttgtttgttagacagcaaagctaactaacaaattttgagtgttgactttccatccttaggcctgtggcctgtggtctcaagatggtttcaaactccagaaatcacatctccattcaaaggcaggaagttaggggtgtggggagggcagccagggcagagaaaaccctttttttgtaacactcttgctttttcatcaaagaacactgaaatttcccagaagcctgtatgctggygttcccttacatttcatagaccagaactgtgtcacatggtcactgtagctattagggaggtttggaagtaaataccccgcaaaaaggaccacaactggttggaaaaaaggccttgcctgagatcaagggatatctgccctctgcctggcaaatcaagggattattggaaaagcatatataactatgctatctaccatacatgttatataacactgggcaaaagtcaaatagaataaggtggatttatacg

SEQ ID NO: 770424 - DNA, 597 bp, Homo sapiens
atcccagcactttgggaggccggggtgggcggatcccaaggtcaggagattgagatcattctgactaacacagtgaaacctcatctctactaaaaatacaaacattagccaggtgtggtgacatgcgcctgtagtcccagctactcaggaggctgaggcaggagaatcacttgaacccaggaggcagaggttgcagtgagccgagatcacaccactgcactccagcctggtgacagagcgagactctgtctcaaaaaaaaaaaaaagaaaaagaaaaagaaaagaaatacagaaaatgagcaaagcaaagtgtcaagagctgagaattggtttagtctggaaactgtttcttgtagtttctctagctgtgctttattacctaaactcaratcttgaggaatggggtggaggcttcattgttaattcagctaattcggaagtccaagttgcgaaaggagtttggtaacatcagaatgggtcagattgtctacacaaagggggaaggagtctagttgctgtcaatcttggtgacggctgaaggtcaggacttgagccccctaagctgtgggtgggtgggtccatcgggtgccccaagac

SEQ ID NO: 770425 - DNA, 597 bp, Homo sapiens
atcccagcactttgggaggccggggtgggcggatcccaaggtcaggagattgagatcattctgactaacacagtgaaacctcatctctactaaaaatacaaacattagccaggtgtggtgacatgcgcctgtagtcccagctactcaggaggctgaggcaggagaatcacttgaacccaggaggcagaggttgcagtgagccgagatcacaccactgcactccagcctggtgacagagcgagactctgtctcaaaaaaaaaaaaaagaaaaagaaaaagaaaagaaatacagaaaatgagcaaagcaaagtgtcaagagctgagaattggtttagtctggaaactgtttcttgtagtttctctagctgtgctttattacctaaactcaaatcttgaggaatggggtggaggcttcattgttaattcagctaattcggaagtccaagttgsgaaaggagtttggtaacatcagaatgggtcagattgtctacacaaagggggaaggagtctagttgctgtcaatcttggtgacggctgaaggtcaggacttgagccccctaagctgtgggtgggtgggtccatcgggtgccccaagac

SEQ ID NO: 770426 - DNA, 597 bp, Homo sapiens
atcccagcactttgggaggccggggtgggcggatcccaaggtcaggagattgagatcattctgactaacacagtgaaacctcatctctactaaaaatacaaacattagccaggtgtggtgacatgcgcctgtagtcccagctactcaggaggctgaggcaggagaatcacttgaacccaggaggcagaggttgcagtgagccgagatcacaccactgcactccagcctggtgacagagcgagactctgtctcaaaaaaaaaaaaaagaaaaagaaaaagaaaagaaatacagaaaatgagcaaagcaaagtgtcaagagctgagaattggtttagtctggaaactgtttcttgtagtttctctagctgtgctttattacctaaactcaaatcttgaggaatggggtggaggcttcattgttaattcagctaattcggaagtccaagttgcgaaaggagttyggtaacatcagaatgggtcagattgtctacacaaagggggaaggagtctagttgctgtcaatcttggtgacggctgaaggtcaggacttgagccccctaagctgtgggtgggtgggtccatcgggtgccccaagac

SEQ ID NO: 770427 - DNA, 647 bp, Homo sapiens
ttgttggtatagcaatgtgaactaagacataagttgagatctgagtgataagaagtagcaaatcatgttagttaggaggacagagtgcattgagcagaggcctcaactaacatgaagtaccaaaagtagaacgaagtttaaaaagtcccagtggggctaggaagaaggccagtgggcctagagtggggcgggtgagggcagaaggcaaggaggtatgtgtggagaagtggctgaccctggtttacatagctcggtcaggtgggggtaggatcaggaatcacaagtccaagggtttagcccagacagagatcccctgcttggggcttctggggcactgagtaagctgtggctttcagaatcaggtgactgtcagattcagggagtttttctcggtgtgctcaaggaccagagtttggtgatggagggcagacattgaggaggcaggaaccattaaaaaacagggtccagccctggaagaatagactagtagatattggaaaagttrgttaaggtctcaggtgaatgaagtgaaactccataacaagacagaacagagagacatgcttcttgtgaaggctgagtaggggcactgcaggtcttcactcacacaggcatctgggactcagttcagcccctgggatccatac

SEQ ID NO: 770428 - DNA, 617 bp, Homo sapiens
aatgtatgtaaaagagtaaaagagaaaataagcatcagcatagtaaaaggagatggagccaagacaggttaaaatccactaacgcatgccaagaatcttatactcttattagaagttggccacaaacttggctgtaagtccattcaaagaggaaaacattagtagttattcaatcagagtttccataaaataaaaacaatccagttacttgggagtagtcttagcaaatggcataatgtagtcttcaacaatatccttactgccaaggccgagaggggatttttatggagctgtttcttttaaagtctgcctatataagccgagggtattgtgccaaactgcaagtcaggaaaagcaattctaccagggccctggggagatacattcttggtacatagctcttcatctggcttaagctaggagtsgaattcagagactgtagacaaaaggatggtttgcatattcttcaggaaaatctccatgctggctctctttacaatatctatagatctatacctactatattaagtagcagagttctggctccagcaatgtggttatttgaactaaactggactccatcccttctagaaacatttaaagtatcacagaaaatt

SEQ ID NO: 770429 - DNA, 646 bp, Homo sapiens
caggatcccaggcatagctcagccacggcctctgcccaggccctcactaggctgcagtccacctgctgacctgggctggcttctcatcagaggctcaactaggaaaggatctgcatctcagcaccccccaggttactggcagagctcacctccctgcagctgcaggagtctcggcagctcactcctgcacagtgcgcagctgacggaggcgtcaagagagctggtgaagcgcggccccgatagyattcccctgccttgcgtatgctattggctgcatgcaggtcacgttcctgctcactctccagggcacaagctccaggagttaggagagtggaggcagcgtcaagtccctctgataccctccccagcccagcttaaggagggaaacactacagatatcatggaactctcttgaccttgttgtcccctttgcccgcctccagaagtagccaggacttcattttcccatgcatgttgttatacttttactctatatgtataaatccttaacgcattattctgcatgtgtgtacgttttcaataaatggtgtcacaatgatgctttcaatgactggtttgtgctgctcactgccatgctggggctgctcctccatgctcacgtatggagtcggtttcttcattctca

SEQ ID NO: 770430 - DNA, 646 bp, Homo sapiens
caggatcccaggcatagctcagccacggcctctgcccaggccctcactaggctgcagtccacctgctgacctgggctggcttctcatcagaggctcaactaggaaaggatctgcatctcagcaccccccaggttactggcagagctcacctccctgcagctgcaggagtctcggcagctcactcctgcacagtgcgcagctgacggaggcgtcaagagagctggtgaagcgcggccccgatagcattcccctgcyttgcgtatgctattggctgcatgcaggtcacgttcctgctcactctccagggcacaagctccaggagttaggagagtggaggcagcgtcaagtccctctgataccctccccagcccagcttaaggagggaaacactacagatatcatggaactctcttgaccttgttgtcccctttgcccgcctccagaagtagccaggacttcattttcccatgcatgttgttatacttttactctatatgtataaatccttaacgcattattctgcatgtgtgtacgttttcaataaatggtgtcacaatgatgctttcaatgactggtttgtgctgctcactgccatgctggggctgctcctccatgctcacgtatggagtcggtttcttcattctca

SEQ ID NO: 770431 - DNA, 623 bp, Homo sapiens
agctggggactggtgaggatgtagttggggacagaggccttaggggccagagtgagggaggactgagttcaggatgttgacagtgacctgctttccctgctgcccagatggaaccccggaacctggccctggtctttgggcggacactggtgaggacgtctgaggacaacatgacagacatggtgacccacatgcctgacckctacaagatcgtggagacactgatccagcacgtaagcccctgttccggggggtcacccggcagcccctgggcccaggccatgttcctctgagcccctcactcttgctcagcctggcggggtgtgccccaggaagggctcggcagctttagagcatgctgctagggtggtatatactcctccaaagccatgggctgcatttcaaggcaaggcaggaatggatcctggaatccttgctgccctgggatgttgtgtccccagcaggagagtcaagaggcccccgagcgtccaagatgcctgggaaaggcagaagaggaggaagggcagggaaggtgctacaggtggagggcggaaggggcagcttcagaaggtggcccctggagaggtgtcctggcagacacgagcagacgggggccaaggtct

SEQ ID NO: 770432 - DNA, 623 bp, Homo sapiens
agctggggactggtgaggatgtagttggggacagaggccttaggggccagagtgagggaggactgagttcaggatgttgacagtgacctgctttccctgctgcccagatggaaccccggaacctggccctggtctttgggcggacactggtgaggacgtctgaggacaacatgacagacatggtgacccacatgcctgaccgctacaagatcgtggagacactgatccagcacgtaagcccctgttccggggggtcacccggcagcccctgggcccaggccatgttcctctgagcccctcactcttgctcagcctggcggggtgtgccccaggaagggctcggcagctttagagcatgctgctagggtggtatataytcctccaaagccatgggctgcatttcaaggcaaggcaggaatggatcctggaatccttgctgccctgggatgttgtgtccccagcaggagagtcaagaggcccccgagcgtccaagatgcctgggaaaggcagaagaggaggaagggcagggaaggtgctacaggtggagggcggaaggggcagcttcagaaggtggcccctggagaggtgtcctggcagacacgagcagacgggggccaaggtct

SEQ ID NO: 770433 - DNA, 628 bp, Homo sapiens
cgtggagacactgatccagcacgtaagcccctgttccggggggtcacccggcagcccctgggcccaggccatgttcctctgagcccctcactcttgctcagcctggcggggtgtgccccaggaagggctcggcagctttagagcatgctgctagggtggtatatactcctccaaagccatgggctgcatttcaaggcaaggcaggaatggatcctggaatccttgctgccctgggatgttgtgtccccagcaggagagtcaagaggcccccgagcgtccaagatgcctgggaaaggcagaagaggaggaagggcagggaaggtgctacaggtggagggcrgaaggggcagcttcagaaggtggcccctggagaggtgtcctggcagacacgagcagacgggggccaaggtctggcctgacatcaggaggccccggctctagtgactttccctgctggccccactgaggttttggggaggtagtggtgatgtccatggtaacaaggggtggattgggcaaggcacagggccttggcctgaggcaggatcctgcaccagtgcttggcatgtactgggctggccacctcccttctcatggcttcctggatgccaacagccctggtcctgta

SEQ ID NO: 770434 - DNA, 628 bp, Homo sapiens
cgtggagacactgatccagcacgtaagcccctgttccggggggtcacccggcagcccctgggcccaggccatgttcctctgagcccctcactcttgctcagcctggcggggtgtgccccaggaagggctcggcagctttagagcatgctgctagggtggtatatactcctccaaagccatgggctgcatttcaaggcaaggcaggaatggatcctggaatccttgctgccctgggatgttgtgtccccagcaggagagtcaagaggcccccgagcgtccaagatgcctgggaaaggcagaagaggaggaagggcagggaaggtgctacaggtggagggcggaaggggcagcttcagaaggtggcccctggagaggtgtcctggcagacacgagcagacgggggccaaggtctggcctgacatcaggaggccccggctctagtgactttccctgctggccccactgaggttttggggaggtagwggtgatgtccatggtaacaaggggtggattgggcaaggcacagggccttggcctgaggcaggatcctgcaccagtgcttggcatgtactgggctggccacctcccttctcatggcttcctggatgccaacagccctggtcctgta

SEQ ID NO: 770435 - DNA, 621 bp, Homo sapiens
tctaacgtgtgagccacatgaagggtccttgtgagggtggctggctccccctgctggggggcctgaccctcagctcctgggggccctgagccatgttcagggacaggagctgtccccttcctgctcactggccagttctggaggaccaggcctccactcccttgctggccaaaacccgatgtcacttgttcctttggtgccgtggcctggacgttagaggasagtcttcaagtcagcctcaggcccttggtccacccaggccgtgggcaccctctctgtgctccctcccagccccagcctctttcagagacacggactgtcaggcagaggagggaaagggacagtgacttgtccccgcagcctcagccccagcatgggagctgcatgcagccttggtgaccaactccctcactcatttaccagccggagacactgaggcctgggagtgcggttgacttgtcctaggtcatgccgctggtttagcctcagagaggtgcccttgtcaccacctcactgtcacattaaaattctccctggagggctctgctgtctcctactctgaatgtccctgtccccctccagcagttctgtgatgagcagggctcacagctcaggatccac

SEQ ID NO: 770436 - DNA, 586 bp, Homo sapiens
aaccagagagaacctccgtgacccctctcatctgagcacacaaggaactctgcttctgccctgacagatcacacctgtgacacggggcaggacaacgacaatcaagtctagtgtcctcattcatatattgaccaatctagctcratccttctatctctgaaaggccctctcctccactgaattgcatgaacatacctttgggtgtggggcattacagctttgttatttgatattagtttagtgaattacataataaataatctgcctccatggacgctggcaacaggagaatcatcagaagctgggtgagtcatataatcaggacaaaactgtgctctcttcttcggacctggaaagagtgggctgaccttgtgtggggcaacagaggggaggagacagaccaaacatccagaaccaggtgagcacctcacttaccaggtagtctctgggccttttgtttgaacacatgcagaaggacctgtgctcaccttcagggaaatggtgaacttggagaaaagatcacagtgaccaataattttttacttatcgagaaaaaagtgtcataggtctctatgcatcagtatgc

SEQ ID NO: 770437 - DNA, 644 bp, Homo sapiens
ctatgaaggtaataattgcggtgtttatttcatgtctactacactctccttctgctttagtccctgttgtacacaagaccaaaaaacagactgaaagaaaatttttaaaaattcctttgaataagctttaaactccttgtgtctaacttaacaaaatattttaagttacataaatctccaaattactaatggaaataagagtcactacagcctatcagtttatataacataagcaagtcagaatgtaaagaaaataatagtttttaagctacaaacatagaaagrggtttggatttaaaaagtgggttttgatttaatcctggatgtaacatatagaacaaaagtgcatgcatttagttaatatatcccattttagacagaataattacattttaattatgacatttaaaacaagatcacattttagagactcaaatgtctcatgttggaattgggtaaatggaggttatttctaggcaggaggagaaccccagatggccagctttgaaacaaatacaaaataatatgggaataaaactttaaacatcttttgtggttcaaattttatgaagctataaatttgagaacaagtcttataaattcatgaaattatgcatgcaatccaaaattgtcttcatagtcag

SEQ ID NO: 770438 - DNA, 557 bp, Homo sapiens
gaataaactaactaataattggtattagttctattgactttacatatataaaaaggaaaatgtaatcagaagtgtgggataatactactttacaccttgtccctttgctataaaagatagaataggaatctagagtaaaaaaaaaaaataaaataaataaagatattagtgaaaataagaaattactttttcagcaaactgtgcaagactagttctagccaaaggyggaataattttttacttatatattgcctctaagagtgggcttctatgttataattatttatttcataaataatcatgataatctgttataatctgtttacccacacacacaacacatagattttcaccttacattgtctaatctggagttaaatgaaaatataaaatgcttaattcacttttctataacgttaaagactttcaattattatctgtttaagagaagtaaatctaattattgaaaatctttttcattctttttcttttcagattattttatttcactgaggtttcatgggtcttctttctgatataatcatattctggtcttt

SEQ ID NO: 770439 - DNA, 600 bp, Homo sapiens
gtcctctagtatatatcttaagcaaagagataaatctagcttaaaccatggccctttagttttttttcttagatttcagattttttttttagatttcagatttttcttagatttccacatgataatactgtgagacttcaacaccccactgacagtatcagacaggtcctcaaggtagaaactaacatatttagaacctgaactcaacacttgacctaatagacaactacagaactctccatccaaaaacaacagaatatacattcctctcatctgcacgtggcacatactctaaaattgaccacacaattagacataaaacaatcctcagcacattcaaataagctgaaataatgccaccacrctcttggaccacagcacaataaaaatagaaatcaatactaagaaaattgctcaaaaccacacaattacatggaaattaaacaacgtgttcctaaataactttgggtaaacagtgaaattaaggcagaaatcaaaaaattgtttgaaattaatgaaaacaaagatacaacataccagaatctctgggacacagctaaagcagtgttaagagggtaatttacagtgctaaatgcccac

SEQ ID NO: 770440 - DNA, 580 bp, Homo sapiens
aaagccccttagaaagactgtccttatatcttctcttcatggttccttcacaaggttcttgacctgatgtaagtaaagaatgtcactttctgacatacacaggaaccttaagatatttttgaaccttgagaagataggaattaatccaattcatgttataatcatagtttaattacaaatccttggcttggcttcctagccttgaggcttttaaaagtctaatctgagattccttataaagaagttccaagaaagcaaacttaaaaagagcttatatagcaagtcactactcttgttgtactttatgcaaataatcagaccaagtataatgaaactacaagtattttacacagaaattttttycaactgtgttttgcctttggtggaaatcgggtattggaggaaaaaatatgtttcaaaagaaaactatagtatacaagttactagatttcaccttgcccattgtttttgattttttattattttcccacaatttagacagaatccttaattatttcctggctacaaatctctaaacgaatgctttcatttttaaaaaatctttcttagaataactgaa

SEQ ID NO: 770441 - DNA, 579 bp, Homo sapiens
cggcaaacctgtcagccgtcactgtctaacctctccatggctcacgtccttgaagccatccgccatttccagcttccttctttctgctgttccagttgaccaggctcaagctctgaggtcactgtagagtgactgakgttttgcaaggcttttctgcctggcaaacatggacagcacaccattctcctaggagctagagagatgaagacaacagtctccgccctccagcagccacagtaaatggatgattaccttagtgagttgacagctatgacatacaactcccaggagatggataaagggagatgtgattaagtcttatgtgggggagtcaaagggggaggtgacacctgagcaaggttttgtaggttgtgtaggagttcagcaggcagactaacagaagaaaggcactctgggggagggagcagtgattgtaatgtggaggtgtgacacagtgcgggggtttggcctacacaggtataaacacacctcaagagtaggcagggccacctttactcctcagaccacagtgactggtggcccctggggatgtagaaagtgctggccttgctgcggtgc

SEQ ID NO: 770442 - DNA, 626 bp, Homo sapiens
actggcatccaatgaccctcccacccccaacatagtctggtggggtccgggtccataggagtcagagggaggaagacactcctagaaagtcaggggaagagcatcctgaccggggtgcccttttctggggggaatgtgttaagatggccaatgaaataaggcatgggccaaaagaactgcagtgatgggcagagatactggggtgcccagtgccccagtggagcatcttgttttctgggaatgctcgccgcctgggcatggcttaggtaaggggtgggaagragggttgcatcatgtggccagggaaaagagccacagacatcctttctctataaacctggtccttgccccctccctactccatggctgggtgttctgggttgccaccttcaagcatgcttttttttttttgaaggtctcactctgtcacccagactgcagtgcagtggcacgatctcggctcactgcaacctccacctcccaggctcaagtgatctgcctatcttagcttcccgagtagctgggactacaggtgtatgccactatgtccagctaatttttttgtatttttggtagagaccgggttttgccatgctgcctaggctggtctcgaacttctgagctca

SEQ ID NO: 770443 - DNA, 626 bp, Homo sapiens
actggcatccaatgaccctcccacccccaacatagtctggtggggtccgggtccataggagtcagagggaggaagacactcctagaaagtcaggggaagagcatcctgaccggggtgcccttttctggggggaatgtgttaagatggccaatgaaataaggcatgggccaaaagaactgcagtgatgggcagagatactggggtgcccagtgccccagtggagcatcttgttttctgggaatgctcgccgcctgggcatggcttaggtaaggggtgggaaggagggttgcatcatgtggccagggaaaagagccacagacatcctttctctataaacctggtccttgcccsctccctactccatggctgggtgttctgggttgccaccttcaagcatgcttttttttttttgaaggtctcactctgtcacccagactgcagtgcagtggcacgatctcggctcactgcaacctccacctcccaggctcaagtgatctgcctatcttagcttcccgagtagctgggactacaggtgtatgccactatgtccagctaatttttttgtatttttggtagagaccgggttttgccatgctgcctaggctggtctcgaacttctgagctca

SEQ ID NO: 770444 - DNA, 486 bp, Homo sapiens
actcactggctataaattgcggatcctaggacctcatcttcaggttgactaaattttctagagcagctcacactttacttacatttactcatttaccacaaagcatattttaaaggatacagatgaacagacaggtgaagaaattcatagggcaaggtatgggggaaggggtgcagagcttccatgctctctctggatgcacccctccaggaacctccacatttcagctatccagaagttccctagctttgtccttctgagtttttgtgggagttttattacataggcaatgattgattacatcattacccattggtggtcagctyaaccttcagcctctctcccctccccagaggtgaaggattaggggttaggggctggggctgaaagtcccaaccttccaatcatgccttggcctttccagtgaccagcccccatcctgaaataacctaggggctcccagctaccattagccaacaaaagata

SEQ ID NO: 770445 - DNA, 642 bp, Homo sapiens; identical to SEQ ID NO: 769253

SEQ ID NO: 770446 - DNA, 642 bp, Homo sapiens
agaaaaaaaaaaaccttgagtaggtatttaaaagtactctgctaaacatatttgtgaagaaatatatttaaatcatattttacattttcctctagagtcatgttttcaaaagactctatggtagcacttttcagaaaatcttaaaatacattttttatcataagctagtatacacatttataggtgtgtatataagtttcaacacttagactgacttgctgattgccctatgtgctgatattgtctattccatttatttttaaattctatttttagcccactgtagtaatttcataagctactcatgggtcataacagaagtttgaaaaacactgcttcaaagcacaattacttgcaaacctattcccacgttttggaattggtataaattccttaaatgtcaagccaataaatacgtcttaatgatacttactgtgccaggtgctgtgaataagacaaaaggcacaaatgatatcatctctgggcccaaaggcttggtgcagtggcctgaatacagtaaacakgtaataactgttgtctatttttattgttgttattcttattaaggagacatcaagagttcacatatttatatcatgactagtacaaaggtcttcatgaacatttcccgatttattaatc

SEQ ID NO: 770447 - DNA, 634 bp, Homo sapiens
ctgcctaggctggagtgcagtggcatgatcttggctcactgcaacctcaacctcctgggttcaaccaatcctgccacagcctcccaaatagttgggactacaggcatgtgccatcatgcccagctaactttgaaattttttgtagggacaggatctctctatgttgcccaggctggtgttgaactcctgggatcaagtgaacctccagcctttgccttccaaagtgctgggattacaggcatgagccaccgtgcctgacttcacatcttggctcagccacttttgtgaccctgttattaacctcttatgccttagtttctttatctgtaaaaagagaataataatacctgccttacratattgctgggaagatgaaataagtgcaattatataaaacacttagagttatttctggtacagactaattgccccatgtcagttgttgttaacagtaggataaattcagtcttctcattttgcatataaggaagtcacattgctaatgagtggcagagccagcactggaaccctgattcccagctgggccacacagatagtccatagacatactcaaacaatgtgtcagtcttggagatagttatttgcctaataataacatttttgattgtttgat

SEQ ID NO: 770448 - DNA, 589 bp, Homo sapiens
attgtttggaatagtttcagaaggaatggtaccagctcctctttgtatttctggtagaattcagctgtgaagaactcattcctggcagtattcatcacctgctaactaaagagcccttgggccttcaacaactagcaacaataccaaggwtgtatgtcctgggccttgggttagacttgttggcttcaggtgaggctcagtacattcccagctttggtggctaaggtgagagatgcttcctgcttgagaaaagtgagagaaaattaaagagaactttgtcttgcacagtaggtaccagctctgccaaggggggggggggtagggcatgaagtgagctatgggtgccctgattctaggccttggctttagcatttttggagctgcaattggccagaaaaacaaaaaacccaatgaccagaagggtgagtaccaagccaggcagtattcactaaaagctgatccaagaacccttaggacttaagcgtacatctgcaacagcctggaagtactccctgtggagtacacaccatttcggtacatgaatgcagtgcataataatcacaacatagaaaaaggggtatcaatatcc

SEQ ID NO: 770449 - DNA, 589 bp, Homo sapiens
attgtttggaatagtttcagaaggaatggtaccagctcctctttgtatttctggtagaattcagctgtgaagaactcattcctggcagtattcatcacctgctaactaaagagcccttgggccttcaacaactagcaacaataccaaggatgtatgtcctgggccttgggttagacttgttggcttcaggtgaggctcagtacattcccagctttggtggctaaggtgagagatgcttcctgcttgagaaaagtgagagaaaattaaagagaactttgtcttgcacagtaggtaccagctctgccaaggggggggggggtagggcatgaagtgagctatgggtgccctgattctaggccttggctttagcatttttggagctgcaattggccagaaaaacaaaaaacccaatgaccagaagggtgagtaccargccaggcagtattcactaaaagctgatccaagaacccttaggacttaagcgtacatctgcaacagcctggaagtactccctgtggagtacacaccatttcggtacatgaatgcagtgcataataatcacaacatagaaaaaggggtatcaatatcc

SEQ ID NO: 770450 - DNA, 556 bp, Homo sapiens
gaagaggaggggagggggcttaaaatttaatttttatttatcaatggtaattaccctgatctgatcactatacattacatatatcaaaatgtcatgatgtatcccatgaatatgtacaattactatttgtcaattaaaaataatattgaaaaaattcagtagaggtaaaataaaaaaaatrctgtcttcagaatcaaatctgaattactatggttagcaatccacatttttttgctcaggggaattataataattaatataatattttaaacaaatccttctggaggtaaataattgatttaagaggataaaaccaattaagagatattaaactagtatcagtgagaagtaaggagtacctggcataaggcaatgacagtaagaataaagaggatttttttgtatgtttttctagttttacctaaaaaaataatgcttcagaaattttctctggagataaaactgtttctatgttatttaaagagaatgtccaaatgagtctggccttatatattacagctatttggaggaagacttatttttgtctactcaaagt

SEQ ID NO: 770451 - DNA, 553 bp, Homo sapiens
aaattatgactaagaaattcactaaaaagcatataattacatggaaactgaataatctgctcctgaattacttttgggtaattatgtggtttggctctgtgttcccacccaaatctcatataaaactgtaattcctaatgatagagaaggggcctggtgagaggtgactgaatcmtggggatgagcttaccacctgctgttctaataatagagtctggcaaaaatccagttgtttaaaagtgtgtggcacctcccccttcactctctctcttcctcttgttccagccatgtaggatgtgccagcttcccctttgccttctgccatgattgtaagtttcttgaggcctctccagccgtgctttctgtatggccaccagaaccatgaggcaattaaaccttttttctttataacttacacagtctcagctagttctttatagcagtgtgagaatacactaatacaggtaaataatgaaattaaggcagaaatcaagaaattctttgaaactaatgagaacaaagatacgatataccaggatctctgggacacagc

SEQ ID NO: 770452 - DNA, 498 bp, Homo sapiens
gttcattttcttttctttctttttttttgagagtctcgccttgtcacccaggctgtagttcctctctgttccattggtctatatatctgttttggtaccagtaccatgctgtttttgttactttagccttgtagtatagtttatagcattgtagtatagattgcaatggcacgatctcggctcactgcaagctctgcctcccaggttcaaatgattctcctgcctcagtctcctgagagctgggattacaggcgtctgcaccacgcccagctaatatttgcattttttyagtagagacaggttttaccatgttggccaggctgatctcgagctcctgactgtgtgatctgcctgcctcagcctcccaaagtgctggaattacaggtgtgagcactgcgcctggcctcgtagttcattttctttgttgtataatgcattgtatgactagatcacagtttatttatcctttatgctgatgaacaaacatgtgggttgttt

SEQ ID NO: 770453 - DNA, 564 bp, Homo sapiens
gtctcgctctgtcatccaggctggagtgcagtggcgcgatttcggctcactgcaagctccgcctcccgggttcacgccattctcctgcctcagcctccccagtagctgggactacaggcgcccgccatcacgcctggctaatttttttttgtatttttagtagagatggggtttcaccgtgttagccaggatggtctcgatctcctgacctcgtgatccrccgcctcggcctcccaaaatgctgggattacagttatgagccatcgcgcccggcctctctagctatctttagaattttttccttcatgttgactttggacagtctgatgacaatatactttgataagatttatcttgcaaagaatcttccagatgttctttgaacctgttgtatctggatgtctaatttctatctagaccaaaaatattttcctgaatgattttatcaaatacattttccaaggtttttactttttattattatccctgagtaatggctattgctcatagatttcgttgctttatataatttcatatttcctggctgcatttttaaaaaattct

SEQ ID NO: 770454 - DNA, 513 bp, Homo sapiens
ttagtgtcagtgggttgggtggcactggggcgagagacctcaggagtcaggagggatgagatcatcaagaaggggagacacctgcgttcaaaatcctcactctgtaaacatattagaccagtctttctagttctaagtttgtacgattatcagatttatttattttgagatggagtctcactctgtygcccaggctggagtgcagtagtggtgcgatctcggctcactgcaacctctgcctcccgggttcaagtgattctcctgcctcagcctcctgagtagctgggattacaggcgcatgccaccacgcctggctaatttttgtatttttagtagagacggggtttcaccatgttggtcaggctggtctcgaactcctgacctcgtgatccacccgcctcggcctctcaaaatgctgagattacaagtgtgagccaccatgcccggctgattatcaaatttatttactgatctactaatcatcatggtacaagtaattcaaaatgaaaatat

SEQ ID NO: 770455 - DNA, 619 bp, Homo sapiens
gtaagtgatgttgccaaaaatttgtcatatgaattaaattagtatcaccttcactacttcttaacagtaatctctatgattttcttaacagaactttcctttaggaatgatgtttttgtttgttggtttggtttagcaattgtcagsagtcaaaagagatgaaatcattcaacaaaaattattattcttgctgtccttactacaacatatctggttttagtatagtctatcatgagccaaaaataccatttctttttttttcttttttacataagaagatttagaagagacaaaaataccatttctaatgccacattttttttcttaacagaaacgtataagcaaggaaaaggaggcttcatatacaccaatattttgatttgttcctctgttttaccccttggattttttattcaggacaatgtgccataagattgaaaatgggcaagaagaatagctttcttttttaaaatgagtgaagggtcaatgtgtaagcggaggtgggaaagaagaataacaatgctatttctacaatagacatattcttgggcagatcaattttggaaaagaaacatatggatgttgaggacctgaaagaaattactgtaaaactatctat

SEQ ID NO: 770456 - DNA, 546 bp, Homo sapiens
gatcctagatccccaaaagagagggaaatacgacaggagaagatagtgcagtgcttttaccatgcatttcattgtaagacagcccaaagccaatcagcccattttatactcagcccatcccccatgggagtctcatctctcagtgagggttggagatgtttccatatcttccaggtggccaagaacatacttctctaatcaaaacwtcaaagagccaagtatccccccataactgccattagccatccccaaaagtaatttcctacctagttattacacaccaaatttctctcataatgcgaagtaatttctgatacccacaaaagtcaaaactgtcacctaatgcaatgcaaaacagaatagagccttagattttgaaagggatctattctctttcaattcctgggcttctgtgaggaaaacagagctttatcccagaatagggtctgtggtgcctcctctgcttttccccaggagtcccaggctgttagaatttatcttaaattctctcatgtgggcatcaagagtggcaagaagacaaaatgg

SEQ ID NO: 770457 - DNA, 625 bp, Homo sapiens
ccaaggaaaaaaaacttttttcaggaaaacacaattcaagaagaggaaaaagataaagtcctcttaaatacatatagcttggatatttctttttaattaagctgattttaaccatagagatcttttttaaaaaaataaataaatcctttaaaatttcttattaccagactctagccaggacagccgatatttctggcttttgatttctaccacaggtaactttctacatgaaattaataagttttagctaaggttataacttaaccatggacatataaggtgtctcaaagagatgataagcagtttctcttttttttttttttttttttttttttggcaagatttacaatctccccaagggtagtttaccaagggtagtttagagaaaggaaaatccaagacaggaaatcagaagctatccatgggggaaaaaccctcaataaatagcaaaattacayaaataacaaaccagaaaggaaactttccagaagccaagaattgaacccaggccaccactgtcaaaaaaaaaagcttcagctactgagctacacagcattgagcagtttctattgctcttcccagaagaagtctagagcagccaatttcaagcttgcaaaggctctta

SEQ ID NO: 770458 - DNA, 641 bp, Homo sapiens
attgtttctgtatcttggctattgtaaataaggctgcagtgaacatgggaatgcagatatctctcttcaggatcctgattttgtttcccagaagtggtattgctggatcatagggtagttctatttttaattttttgaagaaccttcatactactgtttcccatagtggctgtaccaatttacattcccaccaagagtgtacaagtgttcccctttctccacatcctcaccaacacttgtcatcccytatctttttttataacagccatgctaacaagtgtaggatgatctctcattatggttttgatttacatttctctgatgattagtggtgctgaacactttttcatgtatttcttctttagaaaaatatctattcagatcctttacctattttcaaatcagattttttgtgttttcttgctattgagttgtgtgagttccttatatattttggatatcagccccttatcagatatggtttgcaaatattttctcccattcggtaagttaccttttcattttgttgtttcctttgatgtacagagccttttagtttgatgtggtacaacttgtttatttttattttgtttgcctatgcttttcgtgtcatatctgaaaaatcattgccaaggccaatg

SEQ ID NO: 770459 - DNA, 641 bp, Homo sapiens
attgtttctgtatcttggctattgtaaataaggctgcagtgaacatgggaatgcagatatctctcttcaggatcctgattttgtttcccagaagtggtattgctggatcatagggtagttctatttttaattttttgaagaaccttcatactactgtttcccatagtggctgtaccaatttacattcccaccaagagtgtacaagtgttcccctttctccacatcctcaccaacacttgtcatcccttatctttttttataacagccatgctaacaagtgtaggatgatctctcattatggttttgatttacatttctctgatgattagtggtgctgaacactttttcatgtatttcttctttagaaaaatatctattcagatcctttacctattttcaaatcagattttttgtgttttcttgctattgagttgtgtgagttccttatatattttggatatcagccccttatcagatatggtttgcaaatattttctcccattyggtaagttaccttttcattttgttgtttcctttgatgtacagagccttttagtttgatgtggtacaacttgtttatttttattttgtttgcctatgcttttcgtgtcatatctgaaaaatcattgccaaggccaatg

SEQ ID NO: 770460 - DNA, 644 bp, Homo sapiens
  misc_feature 633: n = A,T,C or G
tgtctttttcctgatactggaggaaagatttcaacttttctccactaagtatgatgtcagatgtgggcttgtaatatatggcctttattatgttgaggtacattctttcaatatgtaatttgttgagtttttctcatgaaaagatgttgaattttataaaatgtcttctctgcatatatcaagatgatcatacagtttttgtcctctagcctataaatgtggtgtattatatyatttatttgcatatattaagtcatccttgcatcactgggataaatcccagttgatcatggtgaatgatccttttaataggctgttgaattttgtttgctggtatttggttgaggagtcttgcatctatgcttatcagagatattggcctgtaattttcttttcttgtattgttcttctctggtgttggtatcagggtaatactggccttgtaaaatgagctgggaagtacactctccttttaattttttttgaaagattttgagaaagatcagcattagttatttgttaaatgtttcagtcttggtaggtcgtatgtgtctaggaaaacttcatcataatgattatataatattttatcacaggagttctctagcatatatgtaggcatttgctgacatntagtttactcc

SEQ ID NO: 770461 - DNA, 561 bp, Homo sapiens
  misc_feature 382: n = A,T,C or G
agtcatccttgcatcactgggataaatcccagttgatcatggtgaatgatccttttaataggctgttgaattttgtttgctggtatttggttgaggagtcttgcatctatgcttatcagagatattggcctgtaattttcttttcttgtattgttcttctctggtgttggtatcagggtaatactggccttgtaaaatgagctgggaagtacactctccttttaattttttttgaaagattttgagaaagatcagcattagttmtttgttaaatgtttcagtcttggtaggtcgtatgtgtctaggaaaacttcatcataatgattatataatattttatcacaggagttctctagcatatatgtaggcatttgctgacatntagtttactcctccaaatattcttatatgagggtctaattttatcttagatcaaatttctaaaagtgaaattactgtgataaagatcaagactctatttaaaattcttattacaaagagccaaattggttttcagaaagttagaaacactttgttttctggctagcattatgtgagaat

SEQ ID NO: 770462 - DNA, 563 bp, Homo sapiens
atttctaattctgtcttatctttgctaatttattaaatacttcaaggaaataaaacagatgttttaatttacattatttcgttttttataatgatgttgtgcagatctttatagatgaaagtcacaagtaatttaacacttatgtatgtggcaatttttttcagttttttaatttagctacatggtaggatttgttagatagggaagtatcacaatatttatgtagttataaaaatctatattattctttaaaattttcagagaattttactcttaaaattttcattcttatttcagaaaatacttacatatctttcttttacatatgcttaaaaattttgttaatgagatttaactttttatttcatctccaaattatttagctgtattatgtatgytgagactttattatgttatcaaatattttcttgttagcatttttagtaacccttaaaaatatattattatttattgtaattgcttgaccatatactgacttcttatacatatagtaatgaagagtttttctgagctagctctctagttccagtagtctctcaagg

SEQ ID NO: 770463 - DNA, 661 bp, Homo sapiens
catgcatcacaaacaagtttctcagaaatcttcggtctagtttttatgtgaagatattcactgtttcaacaaaggcctcaaaccacttcgaaatatccattgcacattctagaataagactgtttccaaactgctcaatcaaaagaaatgttcaaattttgagatgaatgcactcattacagagaagtttctcagaaagattctgtctagtttttatgtgaagatatttcccttttaacaataggcctcaaaccactcagaaatatccccttggagattctagaaaaagactgtttccaaactgctgaatcaaaagaaagtttcagctctgtaggatgaatgcatgcatgacaaagaagtttctcagaaagcttctgtctagttttaatgtgaggatatttccttttttaccataggcctcaataccctgagatatatacctttgcarattctagaaaaagactgttaccaaactgctcaattaaatgaaagtttcaagtctgtgagatgaatgcacaaatgacaaagaagtttcccagaaggcttctgtctagtttttatgtgaagatatttcctttttcatcataagcctcaaagtgacctcaaatgtccctttgcagattctacaaaaagactgtttccaaacttctcaataaaaagg

SEQ ID NO: 770464 - DNA, 580 bp, Homo sapiens
cacaatcaaaagaaagtttccactctgagggatgaataaatatatgacaaacaagtttctcagaaagcttctgtctggtttttattggaagatattccctttctcaccataggcctgaaaccgctcagaaatagccctttgtagaccttaaatacgactgtttacaaactgctcaataaaaagaaaggtcagctctgtgagatgaatgtccttattacaaagaagtatctcagaaagtttctgtctagtttttatgtgaagatatttcctttttcaycgtaggccttaaaccgctcagaaatatccccttagacattctagaaaaagactgtttccaaactgctcaatcaaatgaaaggtttaactctgtgagatgaatgcacacatcacaaagaagtttctcagaaagcttctgtctagtttttatgtgaagatattcccttttgagctacaggaattaaagcattacaaatatccatttgcagatactacaaaaagagtgtttccaaattgctcaatcaaaagaaaggttcaatgctttgagttgaatgcacagatcacaaagaagtttctgagaatc

SEQ ID NO: 770465 - DNA, 593 bp, Homo sapiens
tgtttccaacatgctcaatcaaaagaaagtttcaactctgtgagatgaaagaacacatcacaaagaagtttctaagaaagattctgtttagttttaatgtgaaggtatttccttttcaaccataggtctaaaatcactccaaaaatccatttgcatattctacaaaaagagtgtttccaaactgctcaatcaaaagaaagtttcaagtctgtgagatgaatgcacacctcacgaagaagtttctcagaatgtttctgtcttgtttttatgtgaagatatttcttttttcaccataggcattaaaccactcagaaatatccctctgcmgatactccaaaagactgtttccaaactgttccatcaaaagaaaggttcagcactgtgagaacaatgcacacatcacagagaagtttctcagaatgcttctgtcttctttttatgtgaagatattttctttttcaacatcagcctcaatcgctccaattaccctttggcagattcttccaagagactgtttccaacctgctcaagcaaaaatgagtttcaactctgtgagacgaattgaagcaacagaaggaagtttctcagaattc

SEQ ID NO: 770466 - DNA, 593 bp, Homo sapiens
tgtttccaacatgctcaatcaaaagaaagtttcaactctgtgagatgaaagaacacatcacaaagaagtttctaagaaagattctgtttagttttaatgtgaaggtatttccttttcaaccataggtctaaaatcactccaaaaatccatttgcatattctacaaaaagagtgtttccaaactgctcaatcaaaagaaagtttcaagtctgtgagatgaatgcacacctcacgaagaagtttctcagaatgtttctgtcttgtttttatgtgaagatatttcttttttcaccataggcattaaaccactcagaaatatccctctgcagatactccaaaagactgtttccaaactgttccatcaaaagaaaggttcagcactgtgagaacaatgcacacatcacagagaagtttctcagaatgcttctgtcttctttttatgtgaagatatttyctttttcaacatcagcctcaatcgctccaattaccctttggcagattcttccaagagactgtttccaacctgctcaagcaaaaatgagtttcaactctgtgagacgaattgaagcaacagaaggaagtttctcagaattc

SEQ ID NO: 770467 - DNA, 592 bp, Homo sapiens
atcaaaagaaatcttcaacagtgtgagatgcatgcacacatcacaaagaagtttctcagaatgcttctatctagtttttatgtgaagatatttcctttttcactacatgcctccatgtgctccaaatataaatttgcacatacttcaaaaaggctgtttagaaactgctcaatcaaaagaaaggttcaactctgtgagatgaaagcacacatcacaaagaagttcctcwgaatgcttctgcctagcttttatgggaagatatttcctttttcaccataggcctcaaagtgctccaaatatccctttgcagattctacaaaacgactgtttccaaactgctcaatcaaaagaaaatttctaacctgtgagatgaaagcacacatcacaaagaaattcatcagaaagtttctgtctagttttcatgtgaagatatttcgtatttccccagaggcctcaatgggctcacaaatatccctttgcggattctacaaagtgactgtttccaaactgctcaatcaaaggaatggttcaactctgtgtgatgaatgcacacatcacaaataagtttctcagaatgcttctgtctagtttt

SEQ ID NO: 770468 - DNA, 592 bp, Homo sapiens
atcaaaagaaatcttcaacagtgtgagatgcatgcacacatcacaaagaagtttctcagaatgcttctatctagtttttatgtgaagatatttcctttttcactacatgcctccatgtgctccaaatataaatttgcacatacttcaaaaaggctgtttagaaactgctcaatcaaaagaaaggttcaactctgtgagatgaaagcacacatcacaaagaagttcctctgaatgcttctgcctagcttttatgggaagatatttcctttttcaccataggcctcaaagtgctccaaatatccctttgcagattctacaaaacgactgtttccaaactgctcaatcaaaagaaaatttctaacctgtgagatgaaagcacacatcacaaagaaattcatcagaaagtttctgtctagttttyatgtgaagatatttcgtatttccccagaggcctcaatgggctcacaaatatccctttgcggattctacaaagtgactgtttccaaactgctcaatcaaaggaatggttcaactctgtgtgatgaatgcacacatcacaaataagtttctcagaatgcttctgtctagtttt

SEQ ID NO: 770469 - DNA, 592 bp, Homo sapiens
atcaaaagaaatcttcaacagtgtgagatgcatgcacacatcacaaagaagtttctcagaatgcttctatctagtttttatgtgaagatatttcctttttcactacatgcctccatgtgctccaaatataaatttgcacatacttcaaaaaggctgtttagaaactgctcaatcaaaagaaaggttcaactctgtgagatgaaagcacacatcacaaagaagttcctctgaatgcttctgcctagcttttatgggaagatatttcctttttcaccataggcctcaaagtgctccaaatatccctttgcagattctacaaaacgactgtttccaaactgctcaatcaaaagaaaatttctaacctgtgagatgaaagcacacatcacaaagaaattcatcagaaagtttctgtctagttttcatgtgaagatatttcgtatttccccagaggyctcaatgggctcacaaatatccctttgcggattctacaaagtgactgtttccaaactgctcaatcaaaggaatggttcaactctgtgtgatgaatgcacacatcacaaataagtttctcagaatgcttctgtctagtttt

SEQ ID NO: 770470 - DNA, 591 bp, Homo sapiens
agctctcaaaaatatccctttgcagattctacaagaacagagtttccaatctgctcaatgaaaagagtcgtttacatctatgagatgaatgcacacatcacaaagcagtttctcagaaaccttctgtctggttttattgcgaagatatttcgtttttcaccataggcctcaaagggctcagaaatatcccttttcagattctacaaaaagactgattccaaactgctcaatcagaagaaagttcaaatctgtgagatgaatgcacacatcacaaagaagtttctcagaaagcttctgtctagttttaatgtgaagagatttccttcttcaccataggcctgaaagtgctcacaaatatccctttgcagattttacaaaaagacggtttccaaactgctcaatcaaaagaaaggttcaactctgtgagawgcaatcacacatcacaaagaagatactcagaaagcttctgtctagtttttatgtgaagatatttcctttttaaacataggcatcaaagtgctcacaaatatccccttacagacactacaaaaagacggtttccaaacttctcaatcaaaagaaaggttcaaa

SEQ ID NO: 770471 - DNA, 615 bp, Homo sapiens
ctttggattcagtagttttgaaacactgttgtggaattgtctgcaaagggatatttggagcttaatgaaatgaaaggaatgaaaccgtacttcccaggaagagaactagaagaaagctatctgagaaatggctttgtgatgtgtacattcatctctcagagttaaacatttcttttcatttagcagtttggaaacactgtttttctgcaaagttatatttgggagcacattgggtcctrtggtgaaaaaggaaatatcttcagataaaaacaaggaatgagctttctgagaaactcctttgtgaagtgtgcattcatctcacagaattaagcctttttttcattcagcaatttggaaacactgtttatgtagaaaatatgcagtgatatctggagcacattaaggcctatggtgaaaaaggaaataacttcagattaaaactagaaagaagctttctgagaaacttctttgagatatgtgcattcacctcacagagctttccctggatacagcagtttggaaacactattgtagaatctgcaaagggatatttgggagctcattgaggcccacgatgaaaaagtgaacattccaggattaaaactagaaggaagc

SEQ ID NO: 770472 - DNA, 615 bp, Homo sapiens
ctttggattcagtagttttgaaacactgttgtggaattgtctgcaaagggatatttggagcttaatgaaatgaaaggaatgaaaccgtacttcccaggaagagaactagaagaaagctatctgagaaatggctttgtgatgtgtacattcatctctcagagttaaacatttcttttcatttagcagtttggaaacactgtttttctgcaaagttatatttgggagcacattgggtcctatggtgaaaaaggaaatatcttcagataaaaacaaggratgagctttctgagaaactcctttgtgaagtgtgcattcatctcacagaattaagcctttttttcattcagcaatttggaaacactgtttatgtagaaaatatgcagtgatatctggagcacattaaggcctatggtgaaaaaggaaataacttcagattaaaactagaaagaagctttctgagaaacttctttgagatatgtgcattcacctcacagagctttccctggatacagcagtttggaaacactattgtagaatctgcaaagggatatttgggagctcattgaggcccacgatgaaaaagtgaacattccaggattaaaactagaaggaagc

SEQ ID NO: 770473 - DNA, 630 bp, Homo sapiens
gcaatgccttgccctgcttcagctcacgcatggtgcatgcacccactgacctgcacccactgtctggcactccctagtgagatgaacccggtacctcagatggaaatgcagaaatcacccgtcttctgcatcgcttatgctgggagctgtagaccrgagctgttcctatttggccatcttggctcctcccccacttctgactagtttttatgtgaagacatttcctttttcaccataggcctgaaagtactcaaaaatatccctttgcagattctacaaaaagactgcttccaaactccttaatcaaaagaaattttcaactctgtgagaagaatgcacacatcacaaaacagtttttcagaaatcttctgtctaatttttatgtgaagatatgtcatttttcaccatagtcattaaactgctcacaaatatccctttgcagatactacaaaaagaccatttccaaactgctcagtcaaaagaaagtttcagttctctgagatgaatgcacacatcacaaagaagtttctctgaaagcttatgcttagtatttatataaagttatttcctttttcaccataggcctcaagtggctcacaaatatcccattgtagtttccacaaaaggact

SEQ ID NO: 770474 - DNA, 630 bp, Homo sapiens
gcaatgccttgccctgcttcagctcacgcatggtgcatgcacccactgacctgcacccactgtctggcactccctagtgagatgaacccggtacctcagatggaaatgcagaaatcacccgtcttctgcatcgcttatgctgggagctgtagaccagagctgttcctatttggccatcttggctcctcccccacttctgactagtttttatgtgaagacatttcctttttcaccataggcctgaaagtactcaaaaatatccctttgcagattctacaaaaagactgcttccaaactccttaatcaaaagaaattttcaactctgtgagaagaatgcacacatcacaaaacagtttttcagaaakcttctgtctaatttttatgtgaagatatgtcatttttcaccatagtcattaaactgctcacaaatatccctttgcagatactacaaaaagaccatttccaaactgctcagtcaaaagaaagtttcagttctctgagatgaatgcacacatcacaaagaagtttctctgaaagcttatgcttagtatttatataaagttatttcctttttcaccataggcctcaagtggctcacaaatatcccattgtagtttccacaaaaggact

SEQ ID NO: 770475 - DNA, 453 bp, Homo sapiens
gttcaccatagtcctcaaagggctcacaaatatccctttgcagattctgcaaaaagactgtttccaaaatgctcaatcaaaagaatgtttcaactctgggggttgaatgcacacatcacaaagcagtctctcataaagattctgtctagtttttatgggaagatatttcctttttcaccataggccccaaagtgctcagaaatgtccctttgcagattcttgaaggacagaatttccaaactgctcaatgaaaggaaaygtttacttctctgagatgaatggaaacaacacaaaacagtttctcaaagagcttcattctagcttttatgtgaaaatatttcctttttcaccgtagtcctcaaagtgctcaaaaatatccctttgaagattctagaaggacagaatttccaaactgctcaatgaaaggaaatgtttatttctctgagatgaatg

SEQ ID NO: 770476 - DNA, 453 bp, Homo sapiens
gttcaccatagtcctcaaagggctcacaaatatccctttgcagattctgcaaaaagactgtttccaaaatgctcaatcaaaagaatgtttcaactctgggggttgaatgcacacatcacaaagcagtctctcataaagattctgtctagtttttatgggaagatatttcctttttcaccataggccccaaagtgctcagaaatgtccctttgcagattcttgaaggacagaatttccaaactgctcaatgaaaggaaacstttacttctctgagatgaatggaaacaacacaaaacagtttctcaaagagcttcattctagcttttatgtgaaaatatttcctttttcaccgtagtcctcaaagtgctcaaaaatatccctttgaagattctagaaggacagaatttccaaactgctcaatgaaaggaaatgtttatttctctgagatgaatg

SEQ ID NO: 770477 - DNA, 530 bp, Homo sapiens
ctgagaaacttctttgtgatgtgtgcattcatctcacagagttgaaccattcttttgattgagcagtttggaaacagtcttttcgtagaatcagcaaaaggaatttggggagaggttaaaggccagtggagaaaaagtaaatatcttcacataaaaactagaaagaagttttgtgaggaaccactttgtgatgtgtacattctcctcacagagttgaaccattcttttgattaagccrtttggaatccatctttttgtagaatctgcagagggacatttctgagtgctttgaggcctatggtcaaaaaggaaatatcttcacaaaaactaaagagaagctttctgagaaactgctttgtgatgtgtgcattcatttcacagagttgagccattcttttcattgagcagtctggaaccactcctttttagaaccggctaaagtatattacggagcattttgagacctatggtgaaaaaagaaatatgttcatacgaaaactagacagaagcttcctgagaaacttatttgt

SEQ ID NO: 770478 - DNA, 530 bp, Homo sapiens
ctgagaaacttctttgtgatgtgtgcattcatctcacagagttgaaccattcttttgattgagcagtttggaaacagtcttttcgtagaatcagcaaaaggaatttggggagaggttaaaggccagtggagaaaaagtaaatatcttcacataaaaactagaaagaagttttgtgaggaaccactttgtgatgtgtacattctcctcacagagttgaaccattcttttgattaagccgtttggaatccatctttttgtagaatctgcagagggacatttstgagtgctttgaggcctatggtcaaaaaggaaatatcttcacaaaaactaaagagaagctttctgagaaactgctttgtgatgtgtgcattcatttcacagagttgagccattcttttcattgagcagtctggaaccactcctttttagaaccggctaaagtatattacggagcattttgagacctatggtgaaaaaagaaatatgttcatacgaaaactagacagaagcttcctgagaaacttatttgt

SEQ ID NO: 770479 - DNA, 542 bp, Homo sapiens
gattgagcagtttggaaactgtcgttttgtagaatctgcaaaggcatatttgtgtgcgcttgaggcctacagtgaaaaaatgatatatcttcacataaaaactagaaagaaattgtctgtgaaactgctttgtgatgygtgtattcatctcacagagttgaaccacgcttttgattgagcagtttggaacagtctttttgtagaatctgcaaagggatatttgggagtgctttttggcctatgatgaaaaaggaaacatcttcacataaaaactagaaagaaggtttctgagacacttctttctgatgtgtgcattcatctcacagaggtaaatgtttcttttcattaagcagtttggaaactctgttctttcagaatctacaaggggatatttgtgagtgttttgaggcctttgttgaaaaatgaaatatcttcacataaaaactaaccagtagctttctgagaaacttctttgtgatgtgtgcattcatcccacagaggtaaacgtatcttgtcattgagctgtttggaaactctaatct

SEQ ID NO: 770480 - DNA, 640 bp, Homo sapiens
ttgattgagcagtttggaaactgtcgttttgtagaatctgcaaaggcatatttgtgtgcgcttgaggcctacagtgaaaaaatgatatatcttcacataaaaactagaaagaaattgtctgtgaaactgctttgtgatgcgtgtattcatctcacagagttgaaccacgcttttgattgagcagtttggaacagtctttttgtagaatctgcaaagggatatttgggagtgctttttggcctatgatgaaaaaggaaacatcttcacataaaaactagaaagaaggtttctgagacacttctttctgatgtgtgcattcatctcacagaggtaaatgtttcttttcattaagcagtttggaaactctgttcttycagaatctacaaggggatatttgtgagtgttttgaggcctttgttgaaaaatgaaatatcttcacataaaaactaaccagtagctttctgagaaacttctttgtgatgtgtgcattcatcccacagaggtaaacgtatcttgtcattgagctgtttggaaactctaatcttccagaatctgcaaagggatatttgtgagcactttgagacctttggttaaaaaggaaatatcttcacttaaaaactagacagaagctttctgagaa

SEQ ID NO: 770481 - DNA, 542 bp, Homo sapiens
gattgagcagtttggaaactgtcgttttgtagaatctgcaaaggcatatttgtgtgcgcttgaggcctacagtgaaaaaatgatatatcttcacataaaaactagaaagaaattgtctgtgaaactgctttgtgatgcgtgtattcatctcacagagttgaaccacgcttttgattgagcagtttggaacagtctttttgtagaatctgcaaagggatatttgggagtgctttttggcctatgatgaaaaaggaaacatcttcacataaaaactagaaagaaggtttctgagacacttctttctgatgtgtgcattcatctcacagaggtaaatgtttcttttcattaagcagtttggaaactctgttctttcagaatctacaaggggatatttgygagtgttttgaggcctttgttgaaaaatgaaatatcttcacataaaaactaaccagtagctttctgagaaacttctttgtgatgtgtgcattcatcccacagaggtaaacgtatcttgtcattgagctgtttggaaactctaatct

SEQ ID NO: 770482 - DNA, 640 bp, Homo sapiens
ttgattgagcagtttggaaactgtcgttttgtagaatctgcaaaggcatatttgtgtgcgcttgaggcctacagtgaaaaaatgatatatcttcacataaaaactagaaagaaattgtctgtgaaactgctttgtgatgcgtgtattcatctcacagagttgaaccacgcttttgattgagcagtttggaacagtctttttgtagaatctgcaaagggatatttgggagtgctttttggcctatgatgaaaaaggaaacatcttcacataaaaactagaaagaaggtttctgagacacttctttctgatgtgtgcattcatctcacagaggtaaatgtttcttttcattaagcagtttggaaactctgttctttcagaatctacaaggggatatttgtgagtgttttgaggcctttgttgaaaaaygaaatatcttcacataaaaactaaccagtagctttctgagaaacttctttgtgatgtgtgcattcatcccacagaggtaaacgtatcttgtcattgagctgtttggaaactctaatcttccagaatctgcaaagggatatttgtgagcactttgagacctttggttaaaaaggaaatatcttcacttaaaaactagacagaagctttctgagaa

SEQ ID NO: 770483 - DNA, 615 bp, Homo sapiens
gaaacactctttttgtataatctgcacatggatatttggaacatttcagggccaacggtggaaaaggaaatatcttcacataaaaactacacagaagcattctcagaaacttctttttgttgtgtccattcaactcacagagttgaacctttcttttggtagaccagttttgaaacactctctttgtagaatctgcaagtggatatttggagtgctttgaggcctacggtggtaaaggraatatcttcacataaaaagtagacagaagcattctcagaatcttctctgtgatgtgtgcattcaactcactgagttgaaactttcggttgatagaggagttttgaaacactctttttgtggaatctgcaagtgaatattaagagtgctttgaggcctacggtggaaaagaaaatatcttcacataaaaactacagagaagcattctcagaaacttctttgtgatgtgtgccttgaactcacagagttgaacttttcttttggtagagcagttttgaaacactgtctttgtagaatctgcaagtggatatttggagcactttgaggcctatggtttaaaaggaaatatcttcatataaaaaacagacagaagcattc

SEQ ID NO: 770484 - DNA, 615 bp, Homo sapiens
gaaacactctttttgtataatctgcacatggatatttggaacatttcagggccaacggtggaaaaggaaatatcttcacataaaaactacacagaagcattctcagaaacttctttttgttgtgtccattcaactcacagagttgaacctttcttttggtagaccagttttgaaacactctctttgtagaatctgcaagtggatatttggagtgctttgaggcctacggtggtaaagggaatatcttcacataaaaagtagacagaagcattctcagaatcttctctgtgatgtgtgcattcaactcactgagttgaaactttcggttgatagaggagktttgaaacactctttttgtggaatctgcaagtgaatattaagagtgctttgaggcctacggtggaaaagaaaatatcttcacataaaaactacagagaagcattctcagaaacttctttgtgatgtgtgccttgaactcacagagttgaacttttcttttggtagagcagttttgaaacactgtctttgtagaatctgcaagtggatatttggagcactttgaggcctatggtttaaaaggaaatatcttcatataaaaaacagacagaagcattc

SEQ ID NO: 770485 - DNA, 617 bp, Homo sapiens
tggggggcctgctcccaacacagaagttctgggggtggggcccagcaatctgtggttttttgttttttgagacagggtctcgctctgtcacccaggctggagtgcagtggtgctgtgtccggaattggtgggttcttggtctcactgacttcaagaatgaagccgcggaccctcacrgtgagtgttacagcccttaaggtggcacgtctggagtttgttccttctgatgttcggatgtgtttggagtttcttccttctggtgggttcgtggactccctggctcaggagtgaagctgcagacctttgcggtgagtgttacagctcttaaggcagtgcgtctggaattgttcgttcctcccagtgggctcgtggtctcgctggcttcaggagtaaagctgcagaccttcacagtgagtgttacagctcataaaagcagtgtggacccaaagagtgagcggtagcaagatttattgcaaagagcaaaagaacaaagcttccacagtgtggaagggcacccaagcaggttgccactgctggctcaggcagcctgcttttattctcttatctggccccacccacatcctgctgattggtagagccgagtggtctgttttgac

SEQ ID NO: 770486 - DNA, 621 bp, Homo sapiens
taggtggagctgtgtgggaacattcaggtccctggggttaagtctcatgcctagccctggctggagggttttgatgaatggatcttttttttttctttaatagtgtagaaattgtattttgcctcatattcttgggttatccatattagtctgcagctgttggtcttcctaaaccatgactgagtaggtcatcctctgttcaccactggtgatttcttaccatctggtgatttctggataatgctgagcccctgagcttggacatcaggctctacagcagggctgggctccatacttccygggccctgccctggccagctgccctgaggtcactgaacacctggggtgagaatagatcttacccacccctgctccctgtgttttttcaaactcccctccttcctggctctggagtgagctcctgggtgcggggtagtggcttgagctccatgcaggtttggtgccttgctcatactgagaagctcagtaagcccacatcaaccatttgtctttctctagccaagagtcaaatagatccacgtttaaatcccagctctgccttttattagctgttggactagttgtttaaacctctctgcctcagtttcttcatctaatatc

SEQ ID NO: 770487 - DNA, 564 bp, Homo sapiens
atgagtagagatgaggctgttgataaggaagatgatgacaatgatgacgatgatgattccttaggtgaactctggtctgcttttatccagtgcgtgatttttattagatatccctcaagcaatggcacaattctccacagactttcagaaaacataattatcctctaaaacgaagatctacactgccattagcaccatcagctcacccaaatatagggacatcagcttgttagctgaagtgaccttgggctctgggatcttcaagcactgagcagatgaaggaaggaaggagtgatgttcagtctggacagccatgcccagctggcaagggaacctcggagaatgggagtgctccaggtggaggactcygcgggcagcagccccgggccagcagtgagaccctggctcgcttacctcccaaagcctccatttcctaatttctaaaatgggaaaattgctcctgccctgcttacttcacagagtgctgggccacagaggagaacctgtgtagaatgaatggccatgaacgaagatagtgctccttatttattaaaaaacaattcc

SEQ ID NO: 770488 - DNA, 564 bp, Homo sapiens
atgagtagagatgaggctgttgataaggaagatgatgacaatgatgacgatgatgattccttaggtgaactctggtctgcttttatccagtgcgtgatttttattagatatccctcaagcaatggcacaattctccacagactttcagaaaacataattatcctctaaaacgaagatctacactgccattagcaccatcagctcacccaaatatagggacatcagcttgttagctgaagtgaccttgggctctgggatcttcaagcactgagcagatgaaggaaggaaggagtgatgttcagtctggacagccatgcccagctggcaagggaacctcggagaatgggagtgctccaggtggaggactctgcgggcagcagcccygggccagcagtgagaccctggctcgcttacctcccaaagcctccatttcctaatttctaaaatgggaaaattgctcctgccctgcttacttcacagagtgctgggccacagaggagaacctgtgtagaatgaatggccatgaacgaagatagtgctccttatttattaaaaaacaattcc

SEQ ID NO: 770489 - DNA, 668 bp, Homo sapiens
catgccaccggcagcccctggctccacacacaaaacactgaactcctcttgctccccagtatcctctcctcctttgcccttgatgacccaccaagtgcagtcattggttcagcatctatttaataatgttcttctaggtgcagagcccaggacaggagcccagttctctagatgagaaactcagaattcaccattgcttctcccaggggtcatcagccttgagtgaatctatggctctaatgaatggccctggtgccatcctggaaggcaggctagcaggcagaatcataaaactcagttatgacccaggcttgaggaacgttctctactgagaatgtagacttcagagcagcccagcttggcgcaaatcatgctgtttgtcacatttagtgtgtaggtggcctttagcaagttacttaatccttcttagtctatttcctttctgtaaaataggactaataaccatactgtggaggccacagcaactccatcttggatgctgatcctccatattgacttccgattaacccagtttcgggaaagcctctaagatttctccttyatctactgtttactgtaagtcctgcccttaggcaaattgcttctgaagcacatatacccctttcctctggtatttaatccctgggactagggggtcgtggtgcagg

SEQ ID NO: 770490 - DNA, 501 bp, Homo sapiens
gtgtctgctgagaagtctgctcttagtgtaatggggtttcctttattggtgactagatgcttttctcttgctgatattagatttttcttcttcatattgactttacacactcagatgactacatgttgtataaagtcaattttgcaatgtattttccgggtgatcttggacctcttgtatctagatatctaaatctcttgctagactagggaaatttttgtcaattcttttcctaaataagctttctaaactttttttcttctttgggagtactgaagatttgtaagtgatatggtttggctgtgtccccacccaaatctcatcttgaattgtaatctccaygatcatcatgtatctagggagagatctggtaggaggtgattagatcatggggacaatttcccccatgctgttcttgtcatagtgagtgagttcccacaagatctgatggtttcataaggggcttttctcacttcgctcctcattcttctctctcctgcc

SEQ ID NO: 770491 - DNA, 542 bp, Homo sapiens
aatcattaaaaagtcaagaaacaacagatgttggtgaggatgtggagaaataggaatgtttttacactgttggtgggaatttaaattagttcaaccattgtggaagacagtgtggcaattcctcaaagatctagaaccagaaataccatttgacccagcaatcccattactgggaatataccgaaaggattataaatcattctacyataaagacacatgcacacgtaggtttattgcagcactatttacaatagcaaagccttggaaccaacccaaatgcccatcaacgatagactggataaagaaaatgtggcacatatacaccatggaatattatgcagccataaaaagaaagagttcatgtcctttgcagggacatggatgaagctagaaaccatcattctcggcaaactaacacagtaacagaaaaccaaacactgcatgttctcactcataagtgggagttgaacaatgataacacatggacacagagaggggaacaccacacactggggcctgtcaggggttgtggggctagggga

SEQ ID NO: 770492 - DNA, 619 bp, Homo sapiens
tttcagttgggtaaagattttactgtttttattttttgtggggaggagaaaaagtacgaattttttctaccttctcatttaatcagtttcaagttaccctaccaaatcctagtaccagtcttcccatccctggaggctaaaaaggaaactccattcaaaactgattgtgggtgagtcaatatagcacttaatgttttaatagcacatgtgtgcaaaaacttgttttaatttttctaatgaatggagcaattgtttaataatttataaattatgcarcttctctaaagttaagataaatagtccactataaattttttaaaagcaatacagagaaaaaagggacaatacatagaaaaaagggacaatacatgcttcctctagatttttaattcttgcctacaaataaagctatgaacaataatttcaattctagccctcagtcattcagacctctattccctttgaatgctaggcaagcaggagaacgaagctacagctagaaagaggtcaaaaaagaaacaaagcaaacagtggaggaatggcaatcagggaaccaagagccagactaagaaatctaatctggatttctagaaaatacccaaagtttcccagacccaca

SEQ ID NO: 770493 - DNA, 713 bp, Homo sapiens
actttaaggccagttggttggggaccttaattccatctgcaaccttactttccctatgccatgtaacctaacctgttcacagattccagggatttggatgtggacatcctttgggaggagcaggaagagacattattctaccaacaacgccctgctttaaaacttcacaatggctttcccctacactggaataaaatccctctcccaccaaggtctaggaggctgatacgatctgtggccccctgcaccatgcctgacctcttggatatcgccccacctctctcaagatgctacagtcatattggtattctgtttctagratactgaaagctcagtccactagaatacatttgactctgcccgagaggctctctcccttgctagattcttctctgattaggtctttgaatgccctcatgtgagtacaaacccccatccatccacatccccagtctctatgacatcaccctggttcatccttcaaagcacttatcactgcctgacatcaccgtacttattgacgttttcacttacttcttatctgtctctcatctctacggtgtaagctccatgaggtcaggcaccttccccgtctttgctctactctatctccagggcctagaacatggcctgacacatagcaggtgctcaattaactattgtagaataaattcttactactgagaggctatcttcaggccatgatgttgtag

SEQ ID NO: 770494 - DNA, 566 bp, Homo sapiens
taataaatattaaatgaattaatagatgccaccatgcatttgtgcattggatccaggtttttattgactctcctttcatttatatttcttttttactgttttatttattttttaaagttttatgcaaagcatattcattacagtactatttataatagtcaaacaaaatatatatcaaaaaatatgggaagattaaattgtggtagatttatacttaaagtcataaaatatgcatataaaactattgaaaaaataccagaaaattcgactgtgattatctctggactgtggcrttataagtgcttcttattatttatttttcagctttattaaggtataattggcaaatattttttatatttacagtatataacatgatgtttgatatatgtatacattgtaaaatacttactacaatcaagctaataaacatatacattacttcacatagttattattttcatgtgtgtgctgagaagttatgatttctctcttagcaaatttgaaagatacaatacaatatcattaattatagccaccatgctgcacattagatctccagaact

SEQ ID NO: 770495 - DNA, 566 bp, Homo sapiens
taataaatattaaatgaattaatagatgccaccatgcatttgtgcattggatccaggtttttattgactctcctttcatttatatttcttttttactgttttatttattttttaaagttttatgcaaagcatattcattacagtactatttataatagtcaaacaaaatatatatcaaaaaatatgggaagattaaattgtggtagatttatacttaaagtcataaaatatgcatataaaactattgaaaaaataccagaaaattcgactgtgattatctctggactgtggcattataagtgcttcttattatttatttttcagctttattaaggtataattggcaaatattttttatatttacagtatataacatgatgtttgatataygtatacattgtaaaatacttactacaatcaagctaataaacatatacattacttcacatagttattattttcatgtgtgtgctgagaagttatgatttctctcttagcaaatttgaaagatacaatacaatatcattaattatagccaccatgctgcacattagatctccagaact

SEQ ID NO: 770496 - DNA, 560 bp, Homo sapiens
ggtattttctctgtgtctgcagcttatcttttcacttaatgtttatgttatcttcttcatatcaagttttaaatgctgacaaaataaaatctgtcaaattttccttagggcctcaagctcttacgatgatcaaaatgaccaatctttagtgacttttgtaactatacactacccatctgactccagattatatgcttttaaccacttcactattcttgtttgaaacttgagaatagggtagtagttaaaagcatcaaatctggagccagattatgtaggtttaaatcctggggcaccctcatctgactagctctacgacatkaaatgagttactcaactttcctgtgtacagtttcttgtttatcagttgagtaaatataattaaagagattagattagggcctggcacacaataagtgctaaataaacatttgttattatttgttccctccaaacatgtctgtttctctaagtagatgtttttgtataaattccaacaatgtgatgtttatatcaagattttattccatttttctcatttattaataactgtaagtgag

SEQ ID NO: 770497 - DNA, 560 bp, Homo sapiens
ggtattttctctgtgtctgcagcttatcttttcacttaatgtttatgttatcttcttcatatcaagttttaaatgctgacaaaataaaatctgtcaaattttccttagggcctcaagctcttacgatgatcaaaatgaccaatctttagtgacttttgtaactatacactacccatctgactccagattatatgcttttaaccacttcactattcttgtttgaaacttgagaatagggtagtagttaaaagcatcaaatctggagccagattatgtaggtttaaatcctggggcaccctcatctgactagctctacgacatgaaatgagttactcaactttcctgtgtacagtttcttgtttatcagttgartaaatataattaaagagattagattagggcctggcacacaataagtgctaaataaacatttgttattatttgttccctccaaacatgtctgtttctctaagtagatgtttttgtataaattccaacaatgtgatgtttatatcaagattttattccatttttctcatttattaataactgtaagtgag

SEQ ID NO: 770498 - DNA, 624 bp, Homo sapiens
gtagtaggatataaataattcccatatgcttattgttccaatgatggaacactaggtgtaaatgggttttaaggacctcttgaaagacaggtctagtggtaacaaattcccttagcatttgcttttctaaaaaggkttttatttctcctttgcttatgaagcttagtttgactgaatatgaacttcctggttggaatttcttttcttcaaggattaagcatgctgaatataggcctgtagtctcttccagattctagggtttctgctgaaaggtccactattagcctgatgggattccctttgtagatgacctgccccttctctctagatgcctatagtactatttctttggcatttgccttggagaatgataattatgtgtcttggggatagtcatcttgtatagtatgtcacaggggtctctgaatttcctgtatctgaatgtcaacctctttacagagattggggaaatttttgtggacaatatcctcaaatatgttttccaaggcattctctctttccctctctttcagggatgccaatgagtcatagatttggtctctttacataatcccatatttctcagaggttttctccttttttgtctttttcctttatttttat

SEQ ID NO: 770499 - DNA, 606 bp, Homo sapiens
aaatgtggtttcctggatgggatcctggaacagaaaaaggacattagggaaaaactaagaaaacgtgaatcaactattgtattagttcattttctgttgcttatagcagaatacctgaaactagataacttataaagaaaagtagttgtttycttacagttatggagtctgagaagtcaaaggtcaaggggcagcatctggtgagggccttcttgctggtggggactctgcagagtacagaggtggttcagggtatcctataacgagggggctgagtaagctagctcgggtctttcttcctcttcttataaagccaccagtcccactcccatgatatcccagcaatccattaattcatgaatggattaacccattcatgagtgcagagaccacatagacccaatcacctcttaaaggcctcacctctcaatactgccagattgggggttaagtttcagcatgaattttggaggcaacagatactcaagccacagcaactatagacttttagttattataataaagatgtatcaatatattgataactttttttttttgagatggacctcagggtccatgcacatgctgtttctccccaacaatatc

SEQ ID NO: 770500 - DNA, 543 bp, Homo sapiens
tgggagtgacttctctcatcaatggacacactgctttgtgctcggtttcctcccatacctctctgtcttttctaatggaattcctttgcatgcagcagcctagcacctcttactagatcatgtgtccagctgaactttacttaacagccaaacacacagttattttcacaacaatattttcaggctgtgtattaagcctatttcacagctgtgatcacaggtattaaagaacagatgtattgatttgcggggcacccatttttcattgtatttgatgtccttgtccacaaggcggaatggcaagaggcttagaaatctaaccatgtaccggttatgttgtrtttgctttgagcctatatcctcattgaaaacagctgctgaactcagagttattatgaagactcctggagagaaagcagaatggaataaatgggaagagcacaggctttggagtttagagagagctggtgagaatgccatctctgtctcccaccagctgtaggatatggggcaagttattttacctctctaagcttcatcttc

SEQ ID NO: 770501 - DNA, 591 bp, Homo sapiens
ttgaaaatctttccacttttcttttcatagacttgcgagcatttatgaggttttataaactaaccagtgtatcattcacaacacttccattgcactgtccctcattccaagtcttatttacatataggatgatttttatcctttgccaaaggacctgtaaatccagctctttgatatttccaaactccagtcgaacttggtggtgtacgtgaaggaaaccacagcccacggaaaagatgagatctgctttgattatggatcttctgtgaaaactcagcaagcatttcacttataaagagtcaggcaagtcagattcaagtgttcacactggcaagtaaaaaacagcactttgggtaccattcacctgtctccaggaaaataccacctgcctggctttgaggcatgggagagggctgrgaaattagagaactcggcagcttttgaaacaccagcctggacttgggagaagcagataatttcctggctgtctggaggaaacctgatccttccagaaagtccgttaatggaatgagggcagaaccagatggagtctggttatgtggctgatgcctggtgaacgctcagagcccg

SEQ ID NO: 770502 - DNA, 632 bp, Homo sapiens
cactgcttcgaatagtccaggggtgctgggctcacctgtggctaagagcaacagaccctgctattgtttaggttgtcctgtagatgttactaggtcaaagatagggtttaaaattttctaaagggataaaatattcagtgactatgtgagtcatgtggtttaacttttgcaactatttgtaagaaaatagagtgaaaactggggcagagtttgtccattaatcaccagccttttttgttgttgttcttgttgytgctgagacaaaatcttgctctgtcacccagcctggagtgccgtggtgcgatctcgctcaatgcacctccaccacctggggttcaagcaattctcctgcctcagtctcccaagtagctgggattacaaccctactacttagtgcctaccaccatgcccggctaattttttgtacttttagtagagacagggttttgccatgttggccaggctggtgtcaaactcctgacctcgggtaatccacctgccttagccttccaaagtgctgggattgcaagtgcgagccacagcacccagccttcagctttttcttatgttttgcctcagcatgagaggaggctgcatggaccccagctgcaagggcagcgagctgcagagga

SEQ ID NO: 770503 - DNA, 632 bp, Homo sapiens
cactgcttcgaatagtccaggggtgctgggctcacctgtggctaagagcaacagaccctgctattgtttaggttgtcctgtagatgttactaggtcaaagatagggtttaaaattttctaaagggataaaatattcagtgactatgtgagtcatgtggtttaacttttgcaactatttgtaagaaaatagagtgaaaactggggcagagtttgtccattaatcaccagccttttttgttgttgttcttgttgctgctgagacaaaatcttgctctgtcacccagcctggagtgccktggtgcgatctcgctcaatgcacctccaccacctggggttcaagcaattctcctgcctcagtctcccaagtagctgggattacaaccctactacttagtgcctaccaccatgcccggctaattttttgtacttttagtagagacagggttttgccatgttggccaggctggtgtcaaactcctgacctcgggtaatccacctgccttagccttccaaagtgctgggattgcaagtgcgagccacagcacccagccttcagctttttcttatgttttgcctcagcatgagaggaggctgcatggaccccagctgcaagggcagcgagctgcagagga

SEQ ID NO: 770504 - DNA, 613 bp, Homo sapiens
gcaggattgggggctgtgtcctccctctgctgcttttctgatttcatgaacttttcgagaggagctatagtcaagcagttgaccttctctgcctgaatgcagctgaactggatgggagggtatctgtgagacgcgcttgcactgcagctgaggagcccgtgaacgtgggcaccctgcccaggccacccgcccgaggccacaacccccgcgcgctgacccgacactgcgtgcccactggcctccaacagaagcccaaagcagctcttagtgtgcaagttactatcacataaaatctctttcatttgtagaaatgggccctgttgccccagcctgtctttctggttctgtgaacgactcaggcrccccagttagcacagatgcgttttttcctcttttccctactgtgtgacctcagataacccttagggttcatagaattaccgtagcccttatcatcagtgtcacacgtgagcgtcctcctctgcacagtgggagtgacatgtatttcccagaacccgtgtgggagccgacactgccatccttgtgaagtgcctgccaaacgctgcttggtgtgaggcagacacttaacccaggacaggatgctgagcagcca

SEQ ID NO: 770505 - DNA, 649 bp, Homo sapiens
agaaagattttcagcctctctcaaatgtggatgacatgcatcatccagaaaagcatcaggtgcagatatgctgcatcccagctgtgtccgacgccaggtccttgttccatgtaagtttccatgaggaaatcgactcttttttttttttaatctacatgtttatttgaggaagacagaagggaagggaagccagcgcctcctttccttgttctgataatgcacttaggaggcagcgtgcaagcagcagggagccctcccctttctttacagaagagggctagaaatggccactccatgcatggaaggatgccccgtgtcgttagtcagagggaggcatgtgaggtaccactccctgcaagaagggtaggtgtgtggagaaagtggcatgctyatacccaactgcaggtgcaaccactttggaaaacagcttggagtttcttataaaaatcaagcaaacaactaccattcaacccagcaattccgccctaaggtatttacacagagagatgaaaacatatgtgcacacacaggcttgtgcaggaatattaatagcagatttctttacaatagcctcaatctggaaaccgagaaaacactcatcgaggagcgggagacaccaactagggtgtattttacaacaactcatcta

SEQ ID NO: 770506 - DNA, 649 bp, Homo sapiens
agaaagattttcagcctctctcaaatgtggatgacatgcatcatccagaaaagcatcaggtgcagatatgctgcatcccagctgtgtccgacgccaggtccttgttccatgtaagtttccatgaggaaatcgactcttttttttttttaatctacatgtttatttgaggaagacagaagggaagggaagccagcgcctcctttccttgttctgataatgcacttaggaggcagcgtgcaagcagcagggagccctcccctttctttacagaagagggctagaaatggccactccatgcatggaaggatgccccgtgtcgttagtcagagggaggcatgtgaggtaccactccctgcaagaagggtaggtgtgtggagaaagtggcatgctcatacccaactgcaggtgcaaccactttggaaaacagcttggagtttcttataaaaatcaagcaaacaactaccaytcaacccagcaattccgccctaaggtatttacacagagagatgaaaacatatgtgcacacacaggcttgtgcaggaatattaatagcagatttctttacaatagcctcaatctggaaaccgagaaaacactcatcgaggagcgggagacaccaactagggtgtattttacaacaactcatcta

SEQ ID NO: 770507 - DNA, 600 bp, Homo sapiens
ctcaaatcaattaagggtgtttagtatcctgatgacaagaaaacagccccaagatcaagaaggcattctcagaaagactcatcagctctcattccaaagaaaaaaggatgtaaagtcattattgctaaggatataaaaatcttcaaatgccattctaatatgatattttgacagatatttgttttcatgaaaagtcatgaagtccacaagagaaacagattggaaaatgattaaatggacacagtgtttcagagtgaagctcctgggaccacgttccctgaatgatgatgttgtccgttgcaatgtgtggttcaggcagaagctccyggtgctgtcttgccccatccagaaccttgaagcctatcctggcaggagacttctcccttgccagtgagccctggggcagaatgcagaggggctgctgcaacattagcaatggaaccaagaaaagagtgtaagaaaagactgtggttgagatttcccagagcagcagtttccattttttttctttattgaattgcaattaccatattgatccatgatgttatcacagtcatcagtaatccattaccctttatccagcacttttagaattttcag

SEQ ID NO: 770508 - DNA, 661 bp, Homo sapiens
aggtaattgaatcttgggggccagtctttcctgtgctattctcatgatagtgaataagtctcaagagatctgatgggtttatcaggcgtttccacttttgcttcttcctcatttttatcttgtcaccaccatgtaaaaagtgcctttcacctcccaccatgattatgaggcatccccagccatgtggaactgtaagtccagttaaacctctttttgttcccagtttcaggtatgtctttatcagcagcatgaaaacaaactgatatagtaaattggtaccagcagagtgaagtgatgctgaaaaaatactcgaaaatgtggaagcaacttgggaactgggtaacagggagagcctggaacagtttggaggrctcagaagaagacaggaaaatgtgggaaagtttggaacttcctagagactcgttgaatggctttgacaaaattgctgatagtgatatgaacaataaggcccaggctgaggtggtctcagatggagatgaggaacttgttgggaactggaacaaaggtgactcttgttatgttttagtgaacagactggcggcattttgcccctgccctagagaaacatggaactttgaacttgaaagagatgatttagggtatctggcggtagaaatttctaagcagtaaagtattcaaa

SEQ ID NO: 770509 - DNA, 651 bp, Homo sapiens
tcctttctcttgagtttcaagatataaccttggggcaaactgcagaagccttttttcttagccttaaaatagagtccacatccctccctttctcgccgtatatgctcccttcacatctatctaactgtatgttagtattaactgtgtgtcttcttagaagttccagtggctaatcttgagacagaccaagcctgaaactgcaagtttcagagatgacttcaaggtggctgatgaacagcccggccattgttgagatgatgccagcctgcactcctggtgaactgggacccaagacagccaccaaagcgaggcacagcgacattgtactcagcccagtccctcacgctttccttaccaagtttttccttcttaaaaacccgtgccttccccctaaaaatcgaagcagttactttggatgggaatctggctacttcttctgtgctagttttggttaataaatttgctttctttccaccagacctcgctyttgttacttggactcagcctgtggcaggcttccagacctgctttgtttggttacaataacgttagatctatttgccacagtctgcatcccatcctgggatcaatatccaggttaattttccaaatttgcgtacggcaaagttcactattcgtgtatatgatgct

SEQ ID NO: 770510 - DNA, 468 bp, Homo sapiens
aagccctctgagtttatcctaaacacccgtggagttgggaagacaggatcaaggcaggtagggtggtgtcacagatactcggataacatgtactttccaaacacacattgtcatctctctggcttcatctcctccatactcacttcatttccagatgtggccagatgctggcggggtyccactgccattcagccttccttggagggccacagcaaagcagttttagcaaagtgctggcaccaaaggctccctggtttctcgggggtataggggacccttcattctttcaaaggcatcagcaatctctagtgagctgtgaggctgggattcttcctgggatctctggatagaaaggaaagttcagagaagccctgcaggaccatccagggccttggtagagaatgcagcaccagcccctgtgctcagcccacacagcaggtgctgacggtgaagcccaggatgctccaa

SEQ ID NO: 770511 - DNA, 607 bp, Homo sapiens
cccattctattggtcaacctcgagatctgatttgtcaaaaagaggctggcaccttcctcttttctctttcttcttctcaccatgtgatgcctgctccccttcaccttccaccatgagtggaagctcctgaggcctcaccacaagcagaggctggcaccatgcttcytgtacaatctgcagaaccgtaagaaattataaccgttataaattataaaacctcaggtatccctttgtagcaaagggattaagacaatgacgcctaaataattatgtaatatgtttctgtgttcctcttatgtaaactgcttttaagattttctttctgcagcaatctgattaatatgtgaccccgtgttgtttccttcatatttcttctgctggaagtttgttcatcttcttgaatctattggtttatagttcttaacaaatttcaaaaatttttactattcttcaaataatttttctacacccccttctctgttctctgtgtgtaggacgattacatttgttttggaccactggatattctctcacaagtcctgatgctctgctcattttttccatctttcctgtgtgcttcattttgtttaggttttattgttatatc

SEQ ID NO: 770512 - DNA, 607 bp, Homo sapiens
cccattctattggtcaacctcgagatctgatttgtcaaaaagaggctggcaccttcctcttttctctttcttcttctcaccatgtgatgcctgctccccttcaccttccaccatgagtggaagctcctgaggcctcaccacaagcagaggctggcaccatgcttcctgtacaatctgcagaaccgtaagaaattataaccgttataaattataaaacctcaggtatccctttgtagcaaagggattaagacaatgacgcctaaataattatgtaatatgtttctgtgttcctcttatgtaaactgcttttaagattttctttctgcagcaatctgattaatatgtgaccccgtgttgtttccttcatatttcttctgctggaagtttgttcatcttcttgaatctattggtttatagttcttaacaaatttcaaaaatttttamtattcttcaaataatttttctacacccccttctctgttctctgtgtgtaggacgattacatttgttttggaccactggatattctctcacaagtcctgatgctctgctcattttttccatctttcctgtgtgcttcattttgtttaggttttattgttatatc

SEQ ID NO: 770513 - DNA, 558 bp, Homo sapiens
tgagattttgattgaccagttgaagcttttttaaaagtcattttttcctttagatcactgacaatacttgcaactaccaactccacagtcattatcattatcattgtcactatctcaaattctggaaatactgcataaggcatayataaccttatatgtttatgccatcccaattcacataggggataatcttggtcattgtgatgttataaaatgccaactggtcttgataccaactggccaacaagcgattcaactccagcatcccatctgaaggctctgctccccacactgtagtacctctggtgtccaatggcttactgtggattctccaacagaaaatctggacacaaaatattcatgtataaatattttttgagaagtgtagataacagtgataaggaagtgagaaagtgaggcaaagaagagaaggtagccagtaacaagattgctattaaaccagcaatcataaggagaactgaaacttcactccaagggcaaactctagaaaaagatgcaaactcatgcatcagagttatctgtcctgatagttttaat

SEQ ID NO: 770514 - DNA, 609 bp, Homo sapiens
ccagcatcccaacaagatggagaacttaatgaacagcttaaaatatgggccatggaataaaactacctgagttcaaatttgacttgccaaaataactaatgcaatcttggataactaatttagcttctctgggactggatttcgctatcgcaaaatggagataataatagaattcatctcaagtagtgatttgaaggattaatacatacacataatatatgtacaggtttaaaataaggaatgaagctaatatgcacttaatttttattataattatgttaaatactaaataatttataaagtatggctacgtatattatagaaagtaatattttttacaacactatgaactaaatgcaaacaattgtttatgatttttcgaaatacrgtagttgcactcttgcatttgcctaatattaccatatttagagaacattttaatggaagtactgttcttaagaaactataaaatcttaagttgataaatgattttcttctactgcatcactacaaacaatcatagtcagtcagattataaacagcgtttatcctttttaagtgtgttagccaaagcttggtctttgataataacaaatgtacaaatcaaca

SEQ ID NO: 770515 - DNA, 571 bp, Homo sapiens
atctttttggattgactaaactctacatttccttcaatctacaacttaaaactgtgttaatcatgttcaaatatagttaagtgtcccttagcctgcttcctcaatactgtgatcttatttctaccattgtgttctcacagtgtattatatttttcatatagttatttgtttccagagataccagagagcttgctttctctctctctctccagataaggacatggcaaaaaggcagctgcctattaagaccagaagagaccctgaacctgaccatgcagacaccctggtcttaaacttggattgtcagctaccagaacaataagaaaataactttctgttgtggccgggcacagtgcctcacgcctgtaatcccagcactttgggaggctgaggcrggtggatcaggaggtcagagatcgagaccatcctggctaatgcagtgaaaccccacctctactgaaaatacaaaaaattagccaggcatggtggtgggcacctgtagtcccagctactcgggaggctgaggcaggagaatggtgcaaacccaggaggtggagcttgtagtgacccg

SEQ ID NO: 770516 - DNA, 574 bp, Homo sapiens
gtttgatagtaagaaataattattctgacttctttgcaaaaagagaagtttgagatctgttaatttatgtgtttccagcttaatactgtacaggaaaattgttgtgtctaagcaaatatcaaagaatatgtagaattttttaaattttgtttttactagcaagtgagaaaaaggkgacttggaggagaagagcagataattaacaaatttaggtttcagttcaaatatgtttgacccacactacccaaaacacggtagggtaaggattattaaaatattataaataaataaatctgccatatgaataagcattatttattgacaaaagattatatacaattatctctaaaagataaaatgattcagaaaaatatggtcttcctttcaggggacttgatttattattttggccctgataagtagattaatttagtcaaagttactagcctttctgcagattagtatttttactagcctaatggcagttaagtgacacaaagacagggacatctttttcttgagtcacaacagtatcttcagtgcctcgcactgaagtgctaaatatctgatgaaa

SEQ ID NO: 770517 - DNA, 586 bp, Homo sapiens
aaataattattctgacttctttgcaaaaagagaagtttgagatctgttaatttatgtgtttccagcttaatactgtacaggaaaattgttgtgtctaagcaaatatcaaagaatatgtagaattttttaaattttgtttttactagcaagtgagaaaaaggggacttggaggagaagagcagataattaacaaatttaggtttcagttcaaatatgtttgacccacactacccaaaacacggtagggtaaggattattaaaatattataaataaataaatctgccatatgaataagcattatttattgacaaaagattatatacaattatctstaaaagataaaatgattcagaaaaatatggtcttcctttcaggggacttgatttattattttggccctgataagtagattaatttagtcaaagttactagcctttctgcagattagtatttttactagcctaatggcagttaagtgacacaaagacagggacatctttttcttgagtcacaacagtatcttcagtgcctcgcactgaagtgctaaatatctgatgaaagtgggaaatacctgataactattta

SEQ ID NO: 770518 - DNA, 599 bp, Homo sapiens
cctctgaggtgccagtctgaaatgagagtaatggaattgagaggatggaaggctgacagtggtaaataagttgtgtgatatgaagactgggagtcaatctagtaactgtatccctaacctggtttcaactgaagtactaaactcctaattgtgttttacaggatatgaatgattatcctcctgtctttagtaaacraatatacaaagggatggtggctccggatgcagtcaagggtacacctatcacaacagtttatgctgaagatgcagaccctcctgtaagtagaaggcattgattaatattctgaactgtactgagaaaaatccttaacactcataaatgaccgaatcacaagacagcaaaagtagtctctgtaaatttcaccctatttattcatacattttatgttcttttacttatttcatccacaggtacagagcatatttcagatgactattattgaacctagacaaagaatatgctttttgtttttctagaatgcacaatgtactaattactaatttatctaacaatgataaatatatatgaattgtctccatttgtaagcttcacttaatctggatatgttttaaattta

SEQ ID NO: 770519 - DNA, 599 bp, Homo sapiens
cctctgaggtgccagtctgaaatgagagtaatggaattgagaggatggaaggctgacagtggtaaataagttgtgtgatatgaagactgggagtcaatctagtaactgtatccctaacctggtttcaactgaagtactaaactcctaattgtgttttacaggatatgaatgattatcctcctgtctttagtaaacgaatatacaaagggatggtggctccggatgcagtcaagggtacacctatcacaacagtttatgctgaagatgcagaccctcctgtaagtagaaggcattgattaatattctgaactgtactgagaaaaatccttaacactcataaatgaccgaatcacaagacagcaaaagtagtctctgtaaatttcaccctatttattcatacattttatgttcttttacttatttcatccacaggtacagagcatatttcaratgactattattgaacctagacaaagaatatgctttttgtttttctagaatgcacaatgtactaattactaatttatctaacaatgataaatatatatgaattgtctccatttgtaagcttcacttaatctggatatgttttaaattta

SEQ ID NO: 770520 - DNA, 544 bp, Homo sapiens
gctctaatacttcctgctgtgcacgttgctgccacaaatactactgcatgttcctccccctctggggttctgattctctctaccagaccacagcccatacccgcaataggagcaaacggttatcatactaagcgttgtaatggtttatgaaattacttattcaagaagaaaatcaggaaggaagaagtcaggaagcatacayatatttatgacactaaagagatgcaaacattcaaagtctctacagcagattttcaagccatactttggatcacaaaatcaatttttggtgttaatattatctcttgttaatgaaatcaagtagtatataagagaacagaacataacaaaatagaaaattctatcaatgctattgattctattaataaaatattaatacgtgaaaattaataccatgtataaacatttggttactggttctaggagatagacagctgagatagatgagaaagaaggaagaaggaaggaagataggcaaggtatccaagttcatagagtcaaatatatcttcatatcaccagat

SEQ ID NO: 770521 - DNA, 588 bp, Homo sapiens
tccttaaaggacaaaagagaaagaaaaaaaaaaaaacagcaggcggaactcttcatgtaaccactgagaaagtcctgtgctttttttacttcttcctccctcttccctgtttttaacacctggaatgaccaatatgttttgacaacatgttggcaagttccttatgcagtttgacacttaatataaggtgtttgtatagttcagtttctacagataggatattgacacagctatttaagattgtaaaaaatacttgctttarggctatttaccactaaatgttttgggaaatgtgcttttcaaaggtaaacgtaactcgacccttaaaggtatgaaataacacattccttgtaaaatttatttatttaaacacagttgttaagtttatgaagttgacatttggcacaccgtcagactttcctaatacaaaaaattcatgtagccaaaggaacttagagatgaaccttatctgagctagtaattagtgaccctatattctatgccttaaattcttaacactgtcttcacaatctacaagattaagcaggatccaacttaggtttccctctccatcctcctgaaaaaaaa

SEQ ID NO: 770522 - DNA, 516 bp, Homo sapiens
tctaaaatccaggggggaagttaaatcttaaagctcccaaatgatcttctttcactccatatcatatccaggtctcactgatgctagaagtgtgctgccatggccttggacagcactacccttatggctttgcagtgtatagccccctcttggctgctttcatggctggcattgaatgcctgtagcttttccaggcacacacagcaaactgtcagtggatttaccattctggggactggaggacagtggctctcttctcacagctccactaggcagtgcaccagtggggactctgtgtgggggctcccaycacacatttctcttctgtacttccctagcagaggttctccatgagaattctgcccctgcagcacacctctgcctggacatccaggcatttccatacatcctctgaaatctaggcagaggttcctaaacttcaattactgtcttctctacacccgctggaccaacaccacatggaagctgcctaggattgagaattgcatcttctga

SEQ ID NO: 770523 - DNA, 578 bp, Homo sapiens
agctcagggattgtaaatgcaccaatcagcaccctgtcaaaacggaccaatcggctgtctgtaaaatggaccaatcagcaggatgtgggtggggccagataatagaataaaagcaggctacctgagccagcagtggcaactggctctggtcccggtgtggaagygttcttctttcactctttgcaataaatcttgctgctgctcattctttaggtccacactgcctttatgagctgtaacactcaccgcgaaggtctgcagcttcactcctgagccagtgagaccacttaacccaccagaaggaagaaactccagacacatccgaacatcagaaggaacaaactctggacacgccgcctttaagaactgttaacactcactgtgagggtccgtggcttcattcttgaagtcagtgagaccaagaacccaccaattctggacacactagtccctgctcgaaagccacctaaccagtgaggacccccatgacagccctggataaatagtatccctcctgccttcctgacacttcctaatccctctgactgctttagttttcttcataactcaaatcatct

SEQ ID NO: 770524 - DNA, 644 bp, Homo sapiens
atccaggtcactaggtaccttttgtaccttccacattacttctggtgactgtcgctaaactttctaccactatataatgagactcttttttcctcaaatttccaataagattttcctcatttcttctgagccctcaccaacawcctcttctaagttaaaaattcaacaaacagtctgattaaggcaatttagattttcaccaatgctctctttaaaggccttcatccatccaggtgctgcccacttcctctcccacattttagatttttgttatggtatatcccatttttagtgccaaactgtattttttttattgctgcctaaaaaattattcctaaacatagtatattaaaacaaaaaaaattatcttacattatcaagtcaggaacctgagaacagcttatctgggtgattctgcctcagcatctctcacaatgctgcaggtaagctactggtcagagtggcaatcatttcaaagcttaacacgcctagaaaatctcgctaaatttactcatatagttattggtagccctcagttcctcactgactcctggctggagggtgaattccttgctgacttccccagagggctgctgctgacattgctgtctattttccccagagctcccctgtctgctatatag

SEQ ID NO: 770525 - DNA, 644 bp, Homo sapiens
atccaggtcactaggtaccttttgtaccttccacattacttctggtgactgtcgctaaactttctaccactatataatgagactcttttttcctcaaatttccaataagattttcctcatttcttctgagccctcaccaacaacctcttctaagttaaaaattcaacaaacagtctgattaaggcaatttagattttcrccaatgctctctttaaaggccttcatccatccaggtgctgcccacttcctctcccacattttagatttttgttatggtatatcccatttttagtgccaaactgtattttttttattgctgcctaaaaaattattcctaaacatagtatattaaaacaaaaaaaattatcttacattatcaagtcaggaacctgagaacagcttatctgggtgattctgcctcagcatctctcacaatgctgcaggtaagctactggtcagagtggcaatcatttcaaagcttaacacgcctagaaaatctcgctaaatttactcatatagttattggtagccctcagttcctcactgactcctggctggagggtgaattccttgctgacttccccagagggctgctgctgacattgctgtctattttccccagagctcccctgtctgctatatag

SEQ ID NO: 770526 - DNA, 637 bp, Homo sapiens
catttcttaattttatctgaaatttatgtctttctctctattattaactgctcttggtatagtctaaacatttttttggctacagtttttgctgaaattttttgctatttttcttgatgtcagaataatttttattgatttcatcactcatctttattgcctttgttrtatatttcattaatgttttatcaaaattcccttccagttcttttgaaataaatttaaagatgacaagagctatccattacatggatctaattcaggactgtaatttatcatttgttttactgaaacattccaaaatatttttccaaattgcagttaaaatggcacatttaaactttttaaataaacttttttgtaccttatttgtgttttatcttctgaatctttgaaaatgtgtgtttgaatccttaaaatattgctctatttgtgatccaagattgaacagttttatatgggcaaggggtctcattttttagattatttaaagaaaactctatattggagtgacatcaccaagatggtaaaatagaaggtaacccattgatatcccccaacaacaagaattctgcacctatccacagttagtcatcctgcagaagccccaagactcaggtgggagcttgtgaaaccc

SEQ ID NO: 770527 - DNA, 457 bp, Homo sapiens
tctttgactaaactatgaggctgctccattttttatcttagcaacttatcatttttcccagggtcaatgactacttgcaaaaaacagtaagtctatattcgccccaggaaaagatctgatctgaataccagaataccacgggcacatgtagagatatgggtctcctgtttatagttgatatttctacattaagatgaaacagctgccaattcaaaactgcagccctccagcaaagccccacggcattataaaaaagcatatactcttggcmctttccagctgtcagcctcactgctcacctttcgtcttgcattttattatagatattttgaccaggattttataatgtggagcaggagaggaattcacccgttccctgtcataaaacaccatctccactgagaaaacagggaaattggagcagaagcttggtgtctgaaaatatgattttgcctgg

SEQ ID NO: 770528 - DNA, 590 bp, Homo sapiens
ctgtcttccagaatttcaatgacctctctactttgttgggcctctcacttcccatctttaatgcactttaaacaccatcaatttcatggcaaatttctttcatccttatttggcaacgggagacatgttagctgggcaggatgcattggacctgtcatctttaactagaagccactaaatatctactgaaattgttcatttttcacctttaccaccactggcctagrccaagacattttcacttctgcgtcaatcttcttgcactgctttttcttctttccattctctgcttcctggaagttagttacagtttttttcttttttcttgtttttaatatatacctgaccatgttgcagcagtacttaaaacccactctgtaagatcacccaggaccacttttcaattactttgttttagtgatactgggtgattttcagtttctggaaggaaccacattccctgccagctctgatcatcacactacggtttgtctctgcctggacgctacaagaaagtatgtaatgacctcgctgtgtaggccagaaagagtctaaaggattgctggggttaagcaattgaagaagggttg

SEQ ID NO: 770529 - DNA, 632 bp, Homo sapiens
gagagctggtgtgtgagtggtataaagacatcatctgataatttagcaatttgtaattcatttgggtcatactgagttacttcaatatttcttaaaagcatgtacaactaactgcagggcccccttttgttgccttcacttgggaagacatggcaataaggtaaaaggatacaacataccatgctcactttctgtcttccagaatttcaatgacctctctactttgttgggcctctcacttcccatctttaatgcactttaaacaccatcaatttcatggcaaatttctttcatccttatttggcaacgggagacatgttagctgggcaggatgcattggacctgtcatctttaactagaagccactaaatatctactgaaattgttcatttttcacctttaccaccactggcctagaccaagacattttcacttctgcgtcaatcttcttgcactgctttttcttctttccattctctgcytcctggaagttagttacagtttttttcttttttcttgtttttaatatatacctgaccatgttgcagcagtacttaaaacccactctgtaagatcacccaggaccacttttcaattactttgttttagtgatactgggtgattttcagttt

SEQ ID NO: 770530 - DNA, 613 bp, Homo sapiens
tttggtattggacatcatagcctccagaactgtaagaaataaatttctgttgtttataagctacctagtttatggcatttttagataacagcctgaacagactaagacagttactttattgatgactcagatttacagaattatcttctggaatttgctaaatgttttagttataacttgtatccactctgactctgtctttaccttaagatagtstgatcctcccagcatccaataaatgtaagccatgttcactctgaagatggtaataggagttgacttggaatgtctgtttctgactgcctcttgttcttatcacttgccttctggcttctgaatctggcctcaaagtcatatttgtgatttgggggttgtccttaggatttggcatttgaacatagtctcaccagattttgattctgggctacctttcatgatctttagctcacacttatgctcctttctttttttgcattacgatgtatgttcatctctccaataaatatcctggttgggtctaactttatttgacggtaaaaagaagactgaatttagcccaggttatacagaggatacctgtagatatcctacagaataccatagaaaaaataaa

SEQ ID NO: 770531 - DNA, 634 bp, Homo sapiens
aatcaaaatatacaacagatacacaaaacataaaaagcaataaattcatcacaccactaatgaaaattgccttcactaaaaggaagacaggaaggaagaaaagaagaaagagaaaatcataaaaaaaaaacagaaaaaaaatagcaggagtaagtccttatttatcaataataacattacatgtaaatggattaaactctccaataaaaaagacatggagtagaagaatagattttaaaaaacccacaatgatctgttgcctataaaaaacatacttcccctataaagataaacacagacagaaataagaaataaaaaaagatacttcatgccaatggaaaccaaaaaaaagagtaagagttgctatacttatatgagacaaagtagacttcaagatgaaaactgtaagaagaaacaaagaargtgattatataatgataaagaggtcaattcagcaagaggatatagcaattgtaagtttatatgtaccaaacactggagcactgagatataaattgcaaatattcttagccctaaagagagagacagacctcaatacaataatagctggacacttcaacacctcacttttagtattggacagatcttccaggcagaaaatcaacaaagaaaa

SEQ ID NO: 770532 - DNA, 487 bp, Homo sapiens
gctcatataataatattacagctatataataaatgtttcatggtatttcattatatcaaaatatttttagaatataagaagtgctaattactctatttaacatgatagctcagaaattagaaatatcaacattgttcaaataataagataataactattaagtatttaatttgtgccagggttccaagagcttaacttgcattggagcatttaatcctcagtgggagatttatcatccycattttgcaaatgaggaaacacttacagagagtttaagcaacttgcctaacataatacaactactaagtggtggaaccaggatttaaactccaggcagtttgatctagagaccatactcttaaccattattaagatcagtctatgaaatatgaaaaccatcaatttaatctcacagagtcacttctttgagacatatgtcaagttttaatatatattaagggcaactttgaaaagaaggcagtgttga

SEQ ID NO: 770533 - DNA, 566 bp, Homo sapiens
ctttaattagtttatcatcatgcttaaactggatatggagattcaaaaggaactaaggtagaaccaagcacagccaaatgaagataccctgtcataattttacaacttctgagacatcataattttacaacaaaacattggagatattttctggaccaaatcacagagaagtaaacccaaacagagcctggcagtcttcctcagctgtggagagaggtcagatttgcaagagtgggatagctggatttgtgaggcactgtcccagagaggagggagctacacagaggaagaattttagaaatcaccacagaaatccccatgagtcttttgggaccaaaagcaaacattaaaataagaataggcacacgaaaggcaggagtgcaaatacacttaacgataatcagtaatgactgtagtccctcagctacatgcttatcrgtttttgtttagtattgactgttttctgtacattaaagggtgaaagaaaaagaaacattaaaaatgtgctgggtaccttctatgtgcaaaactttgaatgacagatttgattttacctttcaaagaat

SEQ ID NO: 770534 - DNA, 648 bp, Homo sapiens
tttatttcaaaatgcgattcagggtgtgttaggaaggaaaatgcaaatgaaaccttccagtacataccagggctgatgagaaacttgctaattatgcccatgttatctgagtgtttgttttgtatttcactttgtaagattgtcttctctcggtcgttattattttacacctggctgcctacattgatagttttgtcccaattatgyacttctagattgcttataaacaggtcaggatgattcctcactcataaatttgataggcttctgtgtaagctttctatcatagtttcaaagttggtatctgatgtggatggcatttactgccagctggaggcaatagttgctaattgcagagaagtatcaaatgctaaatgtctgaaatgttaaaactctagaaccgagagtatggcagtggctataatgatacctaatgtgactgtgacttttcccctcgttcctgccaaatatgtgggtgtcaatgtaacgtcatgttatacagccttatttggaagacaggggaggtgaaacaatcagttatgctgatgatgttacatggtctaggcaaacagagcacaacagcactttctgcagagatggaaacgttctgtatttgcattattcagtatggaagcaataactacatgt

SEQ ID NO: 770535 - DNA, 587 bp, Homo sapiens
gcttgaaatgcagctaatgcaaacaaagttaaatatcttgttttaattcagttaaatgtaaattgtcacatgtggtcaactgtagtggacagcaaaagtttgtacaattagaacctcaaaagaataagtcaatcagctggttatttgaactccagaatgccaactagtcttttcacattttttacatttaattatgttttatctgcacaattacctgaacaattatgtaggcatatcttcagattctgaacagcgtcggttaagaaatacacactgtcctgcctttaaagattattacccccttcttgatgaggttctcgcyccccacctcccaaccccagcagctcccagtccccttcctttgctttttctagcctatagtgcttttctctgtctgccaacactctatctatggatttattgtctgtgttgccctcatgagaatgatgctccctgagggcagggatttttgtctgcttttcccactgcctaatcccagattcataatgagcacccagtggacgctcagaaaacacttgctgaatgaatgcatgcatgcatgcgtcagcattttcttcccttctcag

SEQ ID NO: 770536 - DNA, 634 bp, Homo sapiens
tattagttagggacccacttcattatgaatgacatagtcactatgaagacctgacctctctggcttctggaagaatgttgaacatgcagaccaaggaaaagccaccatcccagagctcacattccagggatccgaagaaacacatcagagtaatggctagcccagatggtgataggagagaaacagagaagagggtggacaggaaggactttctgaagaggcgacatttaagccgatgactaagtatgaggaggatccagtctggtaaacagtggaaggcagaggttccagagagaagagctggcatatgccaaggccttgaggtgggaaacaccctcgaaatatttacagagtggaagtagctcccaatgcctatgacttcactagcccccaatttggaacaaccattatggctgctgaatgctgtaggactgtgaataagcaaagaagtgtttgaaatgagkttataaaggtaggtagggccatgcaaaccaggtgaggagtttaggtgtaattctaggtgcaagaggaagccactagaaagttttgaagcatgaagagtacctgtattacggttctctaaagggacagaactaataggatagatgtatatataagggggagtttataaagg

SEQ ID NO: 770537 - DNA, 518 bp, Homo sapiens
actggagacatgttgcatggccccaaatccagctttgccacccattactggctgagtttactttggacaagttatttcacatctttttttttttttttttttttttttttttttgagacggtgtcttgttctgctcattctgttgcccaggctggagtgcagtggcacaatctcagctcgctgcaacctctccctcccggkttcaagcgattctcctgcctcaggttcctgagtagctaggattacaggcatgcaccaccacgcccggctaatttttgtatttttagaagagatgggatttcactatgttggccaggctggccttgaattcctgacttcaagtgatctgcctgcctgagtctcccaaagtgctgggattacaggcgcgagccaccaagcccagactatttcacatctctgaacctcagtttccttacttataaatggggattataatacttttttttagggatatggagcttagaggagaataatggtggtaaaatgcttagtgcagt

SEQ ID NO: 770538 - DNA, 608 bp, Homo sapiens
caggccttccaatgacaccatcagctttcctgggtcccagcctccacagtcacatgagccagtaccttatgagaaaccacgtgcatgctattggttctgtttctctggaggaccctgactaacacactgcatcagaacacccaaygcagggcctgctcccaggaagccctcatggcggcggctgctgctgctgctgctgctgctgctgctgcctctggggtagctgtcatgatctccctgttacactgtagcatggcatcaccaggtagtggtgatctcagaagggggactgctgcttgtcaggaccatggataaagctgggggctctgaagtcaggtgcctgagttaaaaatccaggctccctgacccactcaatgtgtgcatttggagatgtctggacttttctatgtttcagtttctttttctataaaatgaagataaataataagaaaacctcacagagttgtagtgagcaggcccattcctgacatctgcagggctgaagaagcagaacacaaaaggggttctcaagtgcatgatctacctatccctactccagatacccctccactctgatacccaccccaccccagttgtccacctcttgg

SEQ ID NO: 770539 - DNA, 591 bp, Homo sapiens
tgacaacatgctttgtctatccttacctcatgcagtcttacgcctccacactctcctcattctatattcaacctctgtaaattatttacctacattgttttctcagacccctgtgcccttgcagggactgtattccctgccaggcaatatgctattttctctgcctggttaactcttttttttttttttgtgaaggagtcttgctctgccacccaggctggagtacagtggcacaatcttggcttactgcaacctctgtctcctggattcaagcaattcttccccctcagcctcccgagtagcacggactacaggtgcacaccaccacaccgggctaattttgtagttttagtagagatgaggtttcaccacgttggttggccaggctggtctcaaactcctgaccttargtgatctgcctgccttggcctcccaaagtgctggaattacaggcatgagccaccgcatccagccttcctggttaacttctacttatcctttatccctcaagccccagttcacatatcaacctccatctgtgcctgggccatgcaggcagagtccagtgatctcttcgctaaatataattgt

SEQ ID NO: 770540 - DNA, 629 bp, Homo sapiens
aggaatgaattacttcctttaagctgacctcatttatattccatacccaaagccagtcttactacaactgcaattgagcctaatccaattacgacaatttttatttcaaaatataacatgatcccccgaacttgagaaccaaatgtatttcaaggttcacaaaaaatgcaagatttctattygcatgaaaaaattaggcaagattatttgtgggctggattggagggctggattctgagagttagaaaaatggaaataccattccactctgtctctcagcaacaacctcagcctgaggggtgagatgtcctccttatctaggcagagaagttctggccttgaccatcgcctccaaatatcttcatttatatatttgtctttactctcaccttttacaagccccacctcttctgcatgcagcatcttaatgtcttcatgttagggaagttttatggttctttcaccaaccttttcttgttcttcttgtcacctttggtcacgtcttttcatcttctttcaaggctagtttgagactgagcaccctccacccttttccccattggaaaacagtctgagaagagacacacaagatgtccatgactccttacggttggttcgacctgagtctt

SEQ ID NO: 770541 - DNA, 629 bp, Homo sapiens
aggaatgaattacttcctttaagctgacctcatttatattccatacccaaagccagtcttactacaactgcaattgagcctaatccaattacgacaatttttatttcaaaatataacatgatcccccgaacttgagaaccaaatgtatttcaaggttcacaaaaaatgcaagatttctattcgcatgaaaaaattagkcaagattatttgtgggctggattggagggctggattctgagagttagaaaaatggaaataccattccactctgtctctcagcaacaacctcagcctgaggggtgagatgtcctccttatctaggcagagaagttctggccttgaccatcgcctccaaatatcttcatttatatatttgtctttactctcaccttttacaagccccacctcttctgcatgcagcatcttaatgtcttcatgttagggaagttttatggttctttcaccaaccttttcttgttcttcttgtcacctttggtcacgtcttttcatcttctttcaaggctagtttgagactgagcaccctccacccttttccccattggaaaacagtctgagaagagacacacaagatgtccatgactccttacggttggttcgacctgagtctt

SEQ ID NO: 770542 - DNA, 567 bp, Homo sapiens
gccttgcctccctcacttgccagcctctccaatcataaaggaacttcaagcagagaatgggagaagttgtggccagtgtgaccccaactctcattccaaggccctcttcatcaccagcaccttctcctttcctcaacccacctcgcctctgaacaatgagtcccagttttgcagtaccagagattgaggggcagggcagttagatgcgtctctgcaagtttcctgagatggtgatggcaggtggcagggcaggacccaggtatcctgcctcctgggyctgggctgtgcctaagaggaaaagaaggacattattaaaccccagggccaatccctgagcctaagtagccctgtgccactgcggatgtggcagcaccttttgaggcaagtagggataggatcttttaaaaataagagaacttctgatctcccttaagttggccagagagcccagaccactttccctcctcagtggacatgggacttgaaatgcaaacccgccttcggcactgggatcagcagtaacactggcgagtcttccgaagactgggtggttggctgcgttcccca

SEQ ID NO: 770543 - DNA, 620 bp, Homo sapiens
ctgcatggaggaggtgatataaaagcagagagagccacgtgaaggatggctagggggcttggggtcgagcagaaagaagtttaagtataaaatccctgagaggaggagaacttgaaaggtttggcaaagaggaaggtcagtgtgtcaggagaaggccgaggggtgaagaagaggggagccaggttagaaggactggcagaggacactgacctgagagctgaccaaggcgaggactttggggggtcaggggcttggcaaatatgatcgactcagtatggccgttcatactgttgccttttccaggccacttctcctgctgggggcagtgaggagcctgcyagccctgctgctttggaaagcccagaggaccaagaaactgaggctgcaggggaaaggtggggagaggagaggcaagcagcagcaaactgctggaacgcctgcaaatgggctgctccgaaggctctggggccttggttctgctctgcacagagctggctgtcctggctgacatctgttgtgacctcttccaaagtgacttcgccccatctctctcagaacgagcctggacagtgggtgtgaataagcccagtaatcctcgatgaggaagccccgtgtccacg

SEQ ID NO: 770544 - DNA, 557 bp, Homo sapiens
aaagcattaaaatatctcccataataaggagaaaaatcaggcaaataaaattgaccaaaactgacacagaagttagaattagcggacattagttaatatttaataattagtatggacatattttaaaagttaagtagtgatatgcaatagaaaaaatgatccaaattgaacttctaagtctcatagtacaatatgtgagataaaaaatacactgcataagatcaatggtatattagatactgcagaagaaaggattagtgacttgaagacatagcaatagaatctatctgagctgaaatacacagaaaaaaggcaacaagaacaaaaacaaacagagcatcagtgaactgcgggacaactttatgtgrcctcttatatgtagagtactcaaaggagaggagagagaagtatggataaaaactttgaaaagtaatggctaaaatatttcccaaatttgataaaaactataaacccacggattcaagaaattccacaaaattgaagcacaggaaacatgaagaaatccataacaaggcagatcataatcaaactactca

SEQ ID NO: 770545 - DNA, 553 bp, Homo sapiens
tggggagggagcggctgtccgatgcattgcaggacatttaagcagcatccctggcctctactcactagatgccagtagagacttcctctagttgtgacaaccaaaacatgtttccagatatttccaaatatcccttggggaagggtggggtgggcaacattaaccccagttgagaacyactgctgtagagtgacaaagcatcctgactctcaccatcccatctgaacagtgcaaacattctggcagagtgtttaaataagaatcattttccttttttaaacagcatgttctgacgttcagagagattgggtgagcatcactaggtcaaatagcagttgagtagaggagctgagtgcagaagcccagccacaggctaattttggtatgactctaacccctctttcagtaatgggcctctgctggagtttgagtgtttgaggtcccactgaaactcatgttgaaatctgtcattgtgatggtactgggaggtggaagctgtaagaagtttatctccatgctcatgaatggactaatattgctattgtgggagtgg

SEQ ID NO: 770546 - DNA, 596 bp, Homo sapiens
acaatctgccttcaggtaatactaaaccacttcatttattatgaactttgcaatagtatactagcatttctctcttcccagcctttgtgctattaatgacatatgttgtccttatatattataaagcccataatatattgttatcatatttgtttgaacattcatctttcaaagagatttacttaatgtataaactatcctatctgcttacctatgtagtgaccatttctagtgccctttctgtcttttgtacccccacagtttcattcggcatcatttccttccatctgaaggactttcttttttgagagagaactctcttttttgagagcaattcttctgagagactctgctggtaaagcattttagttttyttctattgaaagtagtttttggccttcacctattttgatgttttcatggcacatctttgcccatctttttacttgcaatctctttatttccccttcattcctgaaacatacttttataagacacaaaatttacaacagacagttattttctttcagtactgaacttgaaaaatattgtgtcactttttttctggcctccgtggttttaggtgagatacccat

SEQ ID NO: 770547 - DNA, 610 bp, Homo sapiens
gtcacccaggctggagtgcagtggtgcagtcatggctcactgctggctcgacttcccaggctcaattgatcctcccacctcagcctccccagtagctgggaccacaggcatgtgccaccataccctgctaatttttgtattttttgtaaaggtggggttttgtcatgttgcccaggctggatgtgaagttattaagtctctcaaaaaagtgttstgcttatatagtatgtttagtcatatggtattgttgttttgtaggcaaaaatactcaaataccaccaacttaggttcaacttagaacctaatacaattttcagaagacatttttagttataagtttgaaaagtcataagcaaggccattctttcactatgtcttgatctaaagatatattcgtatctaaggatgtgtaaagggacagctgtattcacagcgtcattcattattgaaacaaccaaaaaagacagaaacatactgtgcccaacccagaggaactagctaaataaattaaggtacattcatgcattgaaatggttggtggccattacacatgtattttttaggaatatgggttgccctgaaataattttattacaagaagttaagtctg

SEQ ID NO: 770548 - DNA, 610 bp, Homo sapiens
gtcacccaggctggagtgcagtggtgcagtcatggctcactgctggctcgacttcccaggctcaattgatcctcccacctcagcctccccagtagctgggaccacaggcatgtgccaccataccctgctaatttttgtattttttgtaaaggtggggttttgtcatgttgcccaggctggatgtgaagttattaagtctctcaaaaaagtgttctgcttatatagtatgtttagtcatatgrtattgttgttttgtaggcaaaaatactcaaataccaccaacttaggttcaacttagaacctaatacaattttcagaagacatttttagttataagtttgaaaagtcataagcaaggccattctttcactatgtcttgatctaaagatatattcgtatctaaggatgtgtaaagggacagctgtattcacagcgtcattcattattgaaacaaccaaaaaagacagaaacatactgtgcccaacccagaggaactagctaaataaattaaggtacattcatgcattgaaatggttggtggccattacacatgtattttttaggaatatgggttgccctgaaataattttattacaagaagttaagtctg

SEQ ID NO: 770549 - DNA, 610 bp, Homo sapiens
gtcacccaggctggagtgcagtggtgcagtcatggctcactgctggctcgacttcccaggctcaattgatcctcccacctcagcctccccagtagctgggaccacaggcatgtgccaccataccctgctaatttttgtattttttgtaaaggtggggttttgtcatgttgcccaggctggatgtgaagttattaagtctctcaaaaaagtgttctgcttatatagtatgtttagtcatatggtattgttgttttgtaggcaaaaatactcaaataccaccaacttaggttcaacttagaacctaatacaattttcagaagacatttttagttataagtttgaaaagtcataagcaaggccattctttcactatgtcttgatctaaagatatatycgtatctaaggatgtgtaaagggacagctgtattcacagcgtcattcattattgaaacaaccaaaaaagacagaaacatactgtgcccaacccagaggaactagctaaataaattaaggtacattcatgcattgaaatggttggtggccattacacatgtattttttaggaatatgggttgccctgaaataattttattacaagaagttaagtctg

SEQ ID NO: 770550 - DNA, 543 bp, Homo sapiens
aaagcaatactctcttttcttgattatcagatattccacaccttcactttggcattttttaaattacaaaacatcttataattgaggaataaatttcactatagttgtcattttcatcacacctgtgaatgtgaccataagtagcgagtgtttattcaaacacttgacaccttagttgtgtttattaccattagtagcactataaggggttggctttgtggctggaatgaggatggtagcttgtcttttaaaattctttaraaagatcatagtatgagaagcattaaaattaaaagatgtatatgcagagtactgccttcttatattacttaaagggagtaaaagttacctaatttttcagaagagataaaaaatatttccaacctgatgaaggttgttcagatcaaatcatagagcttgcagttcggtggggaacgcagaagataaaaaaggaacatggccatggtggaattactggttgggttagctgctgtgaagacaattaagggggctgtatagggaacaagtggtggaagggtccac

SEQ ID NO: 770551 - DNA, 607 bp, Homo sapiens
aacaagtcctcagggtggacagggctgtgcagctggasccctgtgctctgtgtgcaggccccagcctgaggaggagctgagcaggagattccttcgtcaggctccatccagcgggaagcagcgaaatcctctgatttacatcaagaggctggtctcctggccaagccttgccacggagggctatgcctttgtgtagtctcttttctccaagagggtgccctttttctgtataaacgcagtgcccaacctgcagatagtgctgaggtagggattgcaatgaagaaacgggctctagagggcaaatgagttgcatgaaaccattgcatgtctcagctggagtctgagcacggatctgtctggctttccattcttcccccatctttacggagctctttattcatcgtgtgtgtaagattgtttcctccactgtggctcctaggactttggataagtctattttcaaagggctaaaattagcgtttctgatacttagtccatgattttcccttgcttggatatttgtccttataattaactgagtattttctttgcttccttcaatggcagcattcctggttggattcagcttcccccaaaggttagcccc

SEQ ID NO: 770552 - DNA, 503 bp, Homo sapiens
ttagaaactatatagggaaaatttgtgatgataatatctcctgtttatagagcatctatgaaccatgagaccctagggattattctattcctttttcaattaatgactccttcctttcttgttccaggtgagctttgctgttctttaagttaggcactctctgtatccaagcattgtcctattcattctctaaacaagtcctcagggtggacagggctgtgcagctggagccctgtgctctgtgtgcaggccccagcctgaggaggagctgagcaggagattccttcgtcaggctccatccagcgggaagcagcgaaatcctctgatttacatcaagaggctggtctcctggccaarccttgccacggagggctatgcctttgtgtagtctcttttctccaagagggtgccctttttctgtataaacgcagtgcccaacctgcagatagtgctgaggtagggattgcaatgaagaaacgggctctagagggcaaatgagttgc

SEQ ID NO: 770553 - DNA, 637 bp, Homo sapiens
tgttactttctaaaatccctcttcaaatgtagcaggagaaactgaatatataatcctttagttgtcaggctctttaatacacaacaattacgagcttgagctttggagttaaacattcaggattgaattctgagtccaccacttgataactgcctacctctaggcaatctcctttagctatctaaatcttggtttcctacggacaataatgctrtttaactaaaaggattgttgtcagccttcacacagtgcttggcacacggtaagtgctcaataaatattagcaatgtgagctatcattagtattttatcattataattggcaatcatacttctgacaaactataacgtacaaaccatttcatttttattttcttcctctaggagctatataacagccaataaacactttataggtacattattctagtctgtgaacaagtgtgaattacacatttgaatagggtgaatttagaggaagctgttatcttccctgacattattccagtaacggaagccacttcattgtgagaggaagagtctgcagaggtgaagaaatgttgtttgggttcttttgttaagtcacttcttcaaaagtgatggtaagtgttacagtcaccaaggtgactgtaaaaaa

SEQ ID NO: 770554 - DNA, 746 bp, Homo sapiens
atgcatagtctctcaagtaatgaacttgcttcgtaggtgaccaggaagcaataagctggggaaaatagagctgagatttgctgctgagtgttgcacagcaagaagatcatgttcaaataaacacaccaaaaaggatttgctctgtctgatttgaaytgtaaggtcctttgttgttctaaatttcaatttaattccacaacatttattgaacacctaaaacttgcaagtatcaaaatcaaatctaataaaggcatgggatttctggggtaagagcttaaggcatgtaatactgacagagtaaccaattccaacacataatcactgttatagctccacattccacctgactcactccatacaagcaatgttggatgttaccattgtcataagtgattgaactagtccaacttgaagcactgatttgcagagtgtctttatattgttgtggtcttttcaccaaaattctatgggcttttctttgatactaccgttttcaacccgtgtgcacacatgcttcccagatagtctaccgtcctctctttctttgtgttcatgacgatgtgaacactggcatctgtttagtggcagtcctggctgtccttcaagctagcacagcactgttgaacaaaactttgccagcattacacctcctttccagaatcaccattcatccagtgatggctgccttctaacatccagttcctctgttcccccaaatcctttagtctgagtaccatgggttgata

SEQ ID NO: 770555 - DNA, 606 bp, Homo sapiens
ttccacctgactcactccatacaagcaatgttggatgttaccattgtcataagtgattgaactagtccaacttgaagcactgatttgcagagtgtctttatattgttgtggtcttttcaccaaaattctatgggcttttctttgatactaccgttttcaacccgtgtgcacacatgcttcccagatagtctacygtcctctctttctttgtgttcatgacgatgtgaacactggcatctgtttagtggcagtcctggctgtccttcaagctagcacagcactgttgaacaaaactttgccagcattacacctcctttccagaatcaccattcatccagtgatggctgccttctaacatccagttcctctgttcccccaaatcctttagtctgagtaccatgggttgatattgacaaatgccttccctcactctggtgcaagctactgccatctgttgccagccaaagctttttaagtggcttcctggccacccaccatgctaccctctcatccactgcctacattgcagccattgtgacctttctgaagtgaatatctgatgaagttgctcatttacttaaaatcctaatggcttcctattgctgt

SEQ ID NO: 770556 - DNA, 567 bp, Homo sapiens
tttgtgctgacctatctcatcctgtgacttagaatgccttaaccatctgggaatgcagcccagtaagtttcagcctcatttccagctcctgtttaagatggagttgctctggttcacacgcctctgatactagaatgcctaggacccggttctcaacagagaagcacggtggcctgagagtcaatgaaacaatggccacagcaggctgacagcccttcctcatctgcatgcgggtagaggatagcaggctcccagcagccacctcagggtttctggcccttatcccagccctaattttaactatatttcttaactttttgggtaattatgggaaaaagtggttaagtggcascttgtgaaagcctgtttctggtttactcaaaataatacaatgagtaacaggcagagactagaacagaaaatgtgacacaataaagatgagtggtacatcatgctgtcaaaaacagaaaaagaggcgagaaaagaaaggtctgctccttggcccatgatagtcaaggactgttccctacaatgttatcacagcttctggttctgactggagctact

SEQ ID NO: 770557 - DNA, 574 bp, Homo sapiens
aaggctctaggctgggcgtggtggctcacacctgtaatcccagcacttcgggaggccgaggcaggtggaacacttgaggtcaggagttcaagaccagcctggccaacatggtgaatatcctgtctctactaaaaatacaaaaattagctgggtgtggtggtgcgcacctgtaatcccagccactcaggaggctgaggcaggagaatcacttgaacccaggaagcagaggttgcagtgagccgcgattgtatcactgcactccagcctgaaccacagagcacgactctatctcaaaaataaaataagactcgctttatttctttttagcatttattattatctgatgtcacctgatattaatttgtttattaccygtttcctgcgtgtgaatataaactccaggaaggcagagaacttgtcttaattccccagttcttggactatagcctagcacatagtaggtgctaacaaacatttgtcgaggtggtggttacttattataatggagcaaaggagtaagaataaattaggggattcaaagagaaaatcatatttgatcaatgaccaaaacttc

SEQ ID NO: 770558 - DNA, 574 bp, Homo sapiens
aaggctctaggctgggcgtggtggctcacacctgtaatcccagcacttcgggaggccgaggcaggtggaacacttgaggtcaggagttcaagaccagcctggccaacatggtgaatatcctgtctctactaaaaatacaaaaattagctgggtgtggtggtgcgcacctgtaatcccagccactcaggaggctgaggcaggagaatcacttgaacccaggaagcagaggttgcagtgagccgcgattgtatcactgcactccagcctgaaccacagagcacgactctatctcaaaaataaaataagactcgctttatttctttttagcatttattattatctgatgtcacctgatattaatttgtttattacctgtttcctgygtgtgaatataaactccaggaaggcagagaacttgtcttaattccccagttcttggactatagcctagcacatagtaggtgctaacaaacatttgtcgaggtggtggttacttattataatggagcaaaggagtaagaataaattaggggattcaaagagaaaatcatatttgatcaatgaccaaaacttc

SEQ ID NO: 770559 - DNA, 605 bp, Homo sapiens
ctaactggccacactcagctctgaggcaatggctggtaggagcagtctcacactcaccttgtaactctgcactgacaacgcagccagccctatggtttgtgacatcgaatatgagaaaagggacctccaagtgactcgaaaatcaggatgttccataaaaatcctcaattattctttccaagaagaggaaaaagtaataggcaaagagaagaacatcagtggcggaatgagagcttagmattttgctgttttggaaagtgatatctcttcttataatttgtctataaaaatgattagctttgggtcataggcccctttaatgatctgctgaaagctttggataccagaaaaacatagtagacataaaattctgctgcttcccattccctgacctcaagtcaagacacttcgatttagatgtctgtgaagaacccttctaaaactagcaagcctaatattttcagttacaaaatttgatcagaatgagttccatgagaagccttcattggccaacaaatggaaaaacaaggggtttagcctgagaaagtaaagaaaagagactacagttcaattttatggatgttttatttcagacttaaattcaa

SEQ ID NO: 770560 - DNA, 626 bp, Homo sapiens
cagaagtaaaatatattgtgagcatatatcatcagcatctttctgctcttaaatagtaagtgatatttctgacttgaattcaataaccttcaaggtatccatgagaattaagacagaaagaggttgaggcaatggatataagccayacagcaaactcctcatgggagcacgaactcagctcagtttttctgacacccagccgcctcctctcatggctatgtagtgagtgacattgtatgcaagagtgaggcattggcttcaaggaggaccatgtgcattaaatattagctgtgtggcctttgccacagtctccctgggcttcagtctcaccatctgcaaatgataacagtacctatcttggagggttattatgagaatttagatgaggtaacacgtgtaatgttcttaccctagtgcctggcaggtaattaaggatgccacttaacaaatgacagtgattatcagatgagacatccatctgcttagctgacatctccacttgaacctcaatcttagcctgtccaaaagtgaactcttcattttctccatcaaatgtgttcccccagtcttccttctttcaataagcagcaactccattctttcttttgttcaggtcagaaattgtg

SEQ ID NO: 770561 - DNA, 596 bp, Homo sapiens
atgcatgtattcattgcagcactattcacagtagcaaagatatggaatcaacctaaatgcccatcaataaagaaaatgtggtacatatacaccttggaatactatgccgccacagaaaagaatcaatccttttgtgaagactataggtggtggtgtgtattcttctcttttttttttttgagatggagtctcactctgttgcccaggctggagtgcagtggcrcgatctcggctcactgcaagctccaattcccgggttcacgccattctcctgcgtcagcctctcgagtagctgggactacaggcgcccaccaccacacctggctaattttttgtatttttagtagagacggggtttcaccgtgtcagccaggatgttctcgatctcctgacttcgtgatccgcccgcctcggcatcccaaagtgctgggattacaggcgtgagccgccgcgcccggccctgtgttcttcatctggaggcacataacagctggctgcctctctttttgtgatgttagtagctgttccattgatacttatagctgagacccattaattcactgggggttgaactgtctccgctttagaggaacttg

SEQ ID NO: 770562 - DNA, 648 bp, Homo sapiens
tagctccttagggctcatgaaccggataagaagatgaaccttctttctttgtgggctttccatgaaccttcagcaacttgttctctttcttctgactgtgcaagtcagcagaaacagaaaaagtatcaccttccctccattttctcacacacatgtgtgcatgcattcattcacctatccattcaacaaaacttcactgaatgccttcatgttccaggcatggtggcagttactggggatacaacacgactgtcactgtcatctttgttctcatgggctcactgaagacgatagaagtgactaggatgctcacacataaaaccagataggatgaaaagaagtagatttagggttctcctgacagtttcatatttaattgtggaaataatataatgttatctgcaagcatccagtaaataatattttatagttcaagaaaaatacaasatattaaaatgggaaaagagagcaataaaggatgaaaattgtcttaatgacaaaattttgtcagttgttgctggcatttgtattattcaccatttgttccatttgttactatagatggcccactttaaatgccttacatatcatttagaataatcaagttaaaatgtaaaagaacagcttttactttaaagtttctgctgc

SEQ ID NO: 770563 - DNA, 588 bp, Homo sapiens
ctcttacaaaaaatacatttaattctccttacataccttgcatgtaaacctatttttttcagtaggctcaattacatattacagtgttaactcatagcaacttttacttttggtaaaaaccttggtgagtaagggattttaattatgtactaggtgtggagcctaggacccagatagaaatgcagataaggtatgacttattccagcatcgaactccatgtgtcccaggccttagctagctgtaaagccagcaagctgtacagtgaaaagtcatagtgkcagcttatgaagcaccttcaaattatacaacatttctggcataaattccttttaataaattatttcacaacttacacagaccatgtacgacatgtttagactttctgacttgcttaaacatccctctttttaaacaaccagtcattttactttaggacaataatttaccatacaacatcctctcttatataaaatctcttttctttataaccttctttacatagctagggggcatggttaattccatatatccccaggccttatttagaatttaatgtctccaaaataaattgaacaattttcaaaagt

SEQ ID NO: 770564 - DNA, 619 bp, Homo sapiens
ccccagtgcttctcagattttggtgagcatcaacatcacctagcaggcttgctaaaacagatagctggcccccactcccagagtttctgattcaataggtctggggcagggcccaagaatttgcatttctaagaagctcccgaggtgatgctgatgctacaggtccaggaacacactttgagaaccactcctctacccagcattaggagagtggttctcaaatcagaatcacttgtggtaaggccgggcatggtggctcacgcctgtaatcccagtactttgggaggccgaggcaggcggattacctggggtcaggagtttgagaccagcctggccaacatggtgaagccccgtctctactaaaaatgmaaagttagccgggcgtggtggcgggcgcctgtaatcctagctactctggaagctgaggcaggagaatcacttgaacccgggaggcggaggttgcagtgagccgagattgtgcctttgcacgatcgtgccattgcagcctgggcgacaaaagtgaaactctgtctcaaaaaaaaaaaaaaaaatccattcttggttttgccatagatattctgattcaacagacctggaattggatccaggaatctgtatt

SEQ ID NO: 770565 - DNA, 619 bp, Homo sapiens
ccccagtgcttctcagattttggtgagcatcaacatcacctagcaggcttgctaaaacagatagctggcccccactcccagagtttctgattcaataggtctggggcagggcccaagaatttgcatttctaagaagctcccgaggtgatgctgatgctacaggtccaggaacacactttgagaaccactcctctacccagcattaggagagtggttctcaaatcagaatcacttgtggtaaggccgggcatggtggctcacgcctgtaatcccagtactttgggaggccgaggcaggcggattacctggggtcaggagtttgagaccagcctggccaacatggtgaagccccgtctctactaaaaatgcaaarttagccgggcgtggtggcgggcgcctgtaatcctagctactctggaagctgaggcaggagaatcacttgaacccgggaggcggaggttgcagtgagccgagattgtgcctttgcacgatcgtgccattgcagcctgggcgacaaaagtgaaactctgtctcaaaaaaaaaaaaaaaaatccattcttggttttgccatagatattctgattcaacagacctggaattggatccaggaatctgtatt

SEQ ID NO: 770566 - DNA, 619 bp, Homo sapiens
ccccagtgcttctcagattttggtgagcatcaacatcacctagcaggcttgctaaaacagatagctggcccccactcccagagtttctgattcaataggtctggggcagggcccaagaatttgcatttctaagaagctcccgaggtgatgctgatgctacaggtccaggaacacactttgagaaccactcctctacccagcattaggagagtggttctcaaatcagaatcacttgtggtaaggccgggcatggtggctcacgcctgtaatcccagtactttgggaggccgaggcaggcggattacctggggtcaggagtttgagaccagcctggccaacatggtgaagccccgtctctactaaaaatgcaaagttagccgggcgtggtggcgggcgcctgtaatcctagctactctrgaagctgaggcaggagaatcacttgaacccgggaggcggaggttgcagtgagccgagattgtgcctttgcacgatcgtgccattgcagcctgggcgacaaaagtgaaactctgtctcaaaaaaaaaaaaaaaaatccattcttggttttgccatagatattctgattcaacagacctggaattggatccaggaatctgtatt

SEQ ID NO: 770567 - DNA, 633 bp, Homo sapiens
aaaaactatggaatcattcctgacccatcccttccctgttgatcttaccttttaagaataggtaacttctatttaacatcattaagcattcctgcgcatcgaatgttctgcaccaaaacacgaatcagcagcctatttcacattatttcaagtgagaaaaatacaatgagctacatcaaaacaaaagtccccaactaaatttctaaaggactaaagcatacctaaaatacagcaaaagttgttagattttgaaatctttcatggtaaataatatttatccaaaatatgcagggaaaaatgtacaataaaaattagacaattctctaatacatacttaccaagtgagttggacacttgaggcttggcaaatgttgagaaggaaaaagggtaaaagattaaagttatctttgtcacttactttagaaggtggtggtactgacaatttgggtaatgaatggscaatttcaggcaaattatcaaactcagaggaactggtagagattctctgtcatttgggtatttgtagagacatttgaaaagtcaaaacttgaaaaacagatttgatatgtttagataaaaaatgcaaaatcgatttttatttacatttccattattttttgaacaaagctataa

SEQ ID NO: 770568 - DNA, 620 bp, Homo sapiens
caaacccaatcatatcaataattacattaagtgtaaatgaactaaacacttcaactaaaatcagagatcttttcagactggattttaaaaagcaagtacctgtttgctacaagagatattctctaaatcgatatttctcacatacctctgtatgtatagtactctgtaatgcatttatatctcaaaaaaggtgtaataatcttatcacttgaagaagtttaaatccagttaggagttggataaggggaaaatattgtatagaaacacataaagcagttaaactaaccagatttttcttgaatgcaagacastgagctggttttgctgtttacactaattctcttctttctctgagagtggaaatagcatcctatttgtattgatccatctgtagtaaaatttattgatcttcttatatttttgctttgccttcttagattatttccttctagttaaaattactttcatttaactttcttattagcttcctattttaaactttctattatgtttacaacgtgccagttaggtgttttttaggcataatctgctattctgtcattacaatcctataacaatatataatttagagggtatgttccagtgtctttcttatttgt

SEQ ID NO: 770569 - DNA, 600 bp, Homo sapiens
aagaaaatcaagaaagacagaggttcacaaatggaaaaggttattcaccaagtagctcttcagccacaaataatccatattttgatgatttcatattttacagtcccccaaataataccttaaagtgcttcactttttatccacatcctcataaatcactcttgcctcaaactgcaaaaagggaaaggggaaaacacatcagttgtttttctaaatctttgcttatttttctggcctgtgagagactggaggaacttttctggacatcttttacaaggcataagagacagtgtagcaaagtggttagaagtccagactttgagccagactgcttgggctctcaccagctatggcactgtagtcgtagcaggmtggagaaaattccttaacttccttgtatcccagttccttcatctctaaaataaagagaataacggtatctacttcacagagctgacaggagaattaaattagttaatactttgttgtagaaagacaatagtactcaaaatctgaagtggaaaagttgaatgtattctatcctgaagtaagatctatgctggtcaggcataggctcgttgagcaaagcaaacggttgaa

SEQ ID NO: 770570 - DNA, 614 bp, Homo sapiens
acaaaccttgagctagatacagagtgctgattggtgtgtttacaatccattagctagacataaagattctccaagtccccaccagactcaggagcccagctggcttcacccagtggatcccacactgggccgcaagtggagctgcctgccagtcccgcgccatgcgcctgcactcctcagcccttgggtggtcratgggactgggtgccctggagcaggtggcggcgctcattggggaggctcgggcagggcaggagcccacggcgggggcggggaggctcagacatagcaggctgcaggtccggagccctgccccgcagggaggcagctaaggccgggcgagaaattgagcacagcagctgctggcccaggtgctaagcctctcactgcccgtgccggcggggcggcggggccggggggctggcgggcagctccgagtgcggggccgcccgtgcccacacccacccggaacttgccctggcccgcaagcaccacgcgcagccccggttccgcctgcgcatccccctccatacctcccccgccacacctcccgcaagctgagggagctggcttcagccttggccagcccagaaaggggctcccacagtgcagcg

SEQ ID NO: 770571 - DNA, 614 bp, Homo sapiens
acaaaccttgagctagatacagagtgctgattggtgtgtttacaatccattagctagacataaagattctccaagtccccaccagactcaggagcccagctggcttcacccagtggatcccacactgggccgcaagtggagctgcctgccagtcccgcgccatgcgcctgcactcctcagcccttgggtggtcgatgggactgggtgccctggagcaggtggcggcgctcattggggaggctcgggcagggcaggagcccacggcgggggcggggaggctcagacatagcaggctgcaggtccggagccctgccccgcagggaggcagctaaggccgggcgagaaattgagcacagcagctgctggcccaggtgctaagcctctcactgcccgtgccggcggggyggcggggccggggggctggcgggcagctccgagtgcggggccgcccgtgcccacacccacccggaacttgccctggcccgcaagcaccacgcgcagccccggttccgcctgcgcatccccctccatacctcccccgccacacctcccgcaagctgagggagctggcttcagccttggccagcccagaaaggggctcccacagtgcagcg

SEQ ID NO: 770572 - DNA, 615 bp, Homo sapiens
ggccaaaattttaggcgcgattcatgagggtgattcctcagaagagattccagaaatccaacagtcaagagcagaatagctgttttgctttcttcttaagaaaaatgttaaggccaggcacggtggttcacgcctgtaatcccaacactctgggagcccaaggcgggcggatcacaaggtcaggagttcgagaccagcctggccaacatagtgaaactccgtctctactaaaaatacaaaaaaaattagccgggcgtggtggtgggcgcctgtaatcccagctactcaggaggctaaggcaggagaattgcttgaatccaggaggcagagcttgcagtamgccgagatcgtgccattgcactccagcccaggtgacagtgtgagacaccgtctcatttaaaaaaaaaaaaaaagttagtatgctatattcagtattggtataaatagtcctgagtagctagtgagccaccatactcagccattattacaagtgattctataaaattggaatcacgtcacatttagctagaacttaagtcacgtaacatggaagatccaaattgtcaaccaaagacctaaaaaatggtatgacagaaaaaaaagaaagaaaaggaa

SEQ ID NO: 770573 - DNA, 552 bp, Homo sapiens
atttatttacttttgagatggagtcttgctctgtcacccaggctggcgcattctcggctcactgcaacctccgcctccaaggttcaagcgattcccctgcctcagtcccccgagtagctgggattacaggcagcgccaccatgcctggctaatttttgtgtttttagtagagacggggtttcactgtgttgcccaggctggtcttgaactcctgaccttaggtgatccacccgcctcagcctcccaaagtgctgggattgcaggcgtgagccaccacgcctggcctataatttttaaaaaatacgtagtaaattatgtaaaagcaggcaaccctcaatcattaaactttcaaggaaaatgctwtcagttgggaggctatgaatgtttggaggtggggatatattggaactctattttctgctcaattttgctatgaacacaaaactgctttaaaaataaagtctattttaaaataccttaaaaatgatgttggcatttaaagttaaacctcagatcagataataaatcatgtagttgttgaattatcattat

SEQ ID NO: 770574 - DNA, 645 bp, Homo sapiens
ctccttgtcaaattacattaatagttaaacttaatcaaaaggagatggtctgtgttcattgaaaaatagctattaaagttccctttacagtaaacccagctccactgaatccaatcattgaaagagactttatttccatttcagaacatatatacagcctcgagctaaggaaacctgtgctctgcaaatcaggattcttgtgaaactacrttttcagcaaattggtaactaggcggtaaaatggtatgagaagaaataaagaaaaagcatatttgtgatgcggaaattattttttaaaggatgagtttttaagataaggttgcagcatcagctgtgtctgcacatattccgtgcagtggtcagtggaatctattacacacatacctcaagcaaacatgtcacttttcctcaatcagatggatatttctaacaatctgccttttcttgccttgaaatttgaggcagtttctgatcttcacttctttacagcccttttgccatcttccatttgcagaaatataaaagtgaaaacaaaattcaaaactcacagaaaaaatataacttacactaacctatgtctgttattgcttctagtttaagcgcatttccacgtgtagccttacaacactatgttttgtaccagta

SEQ ID NO: 770575 - DNA, 553 bp, Homo sapiens
gatcttattgttctttgcgagccacaatatgtttacatttgaaaattaattaccaacttgaaaattatgagttttgcatgaaattctagatttttaggttcttaaaatgtaaccaagtaccccatttttctttttcttttttcttttgttttttaagatggagttttgctcttgttgcccaggctggagcacagtggcacgatctcagctcactgcaacctccacctcccgggttcaagcgattctyctgcctcagcctcccgagtagttgggattacaggcgcctgctgccacacccagctaatttttgtatttttagtagagacagggtttcaccatgttggccagcctgctctcgaactcctgacctcatgatccgtcggccttggcctcccgaagtgctgggattacaggcgtgagccaccgccccggcccccagttctccctatttttctacgggtggtttaattatatttttccctctcactctcttttctcctttccctggctctctgctttctgcttagctctgctgaaatgcaaatataatctc

SEQ ID NO: 770576 - DNA, 653 bp, Homo sapiens
tagatagcctcatctagtttcagatgagagagagcaatgaaagtttctgcttttttaaaaaacaaacaaacaaaaaaaacctggcttgtcttgaaactaggagaatcaggtattctacccctttttggcatgacttaaacttactaccagtgtaaagccttaactcgttctcagatacaaacaagctcttaagagcaaaggctgcctgagcagcttattgcacggaggaagcaggagaagagaaaagattatgtgaatatcatgcaagtagtaaygaagaataaaaacaggaaagtattaatcgaagatgtgattttccctatgtaatcaagaattttgtcatgcttactccatgaggcaggtaagtacggaggaaggtaacagtgaccagaagattccctttagtaaacatctcctcagggatctgtgaagtcaggaatctcagctcctgttacaaatcgaaggccattaattaccatggtgtctgaagttgtcaatagcccacccctttaattcccacataatcacttcaattattgtgctcattttatgtagttattgcttgtctcctcccacagaatgtaagacccatgacagaagagaccatatccatctttttagaaaagtccttgacctataatactcattcaaaa

SEQ ID NO: 770577 - DNA, 468 bp, Homo sapiens
gatttcctccatggcttttgcttttccccattcacctgtgcttatgtaatcacagcctggagttttcaggaataaagcgactagttatcactgctggttacacgggttggtcccaacctgaattctgtactaccctttcaatgagagacgcaggtatgggagaagggacttgacaggagacggaggtttacttttctcctaggaccttttgtttgttttcagaaattaaaaaaaaaaaaacacaataaccacaatcatataagatgtttaaatycaatatatgagcatgccattattttcattgatctttgaaacggattcagtacattcctatgaagcaatgcaacacaatttgggatgagaatttctccaagtgagattcacattatcattatggctgtcaaggatttagaaattaggttgtttgctgattactcttcaatcattcactcaacaaaaaggtatgct

SEQ ID NO: 770578 - DNA, 536 bp, Homo sapiens
tgtagtgattacacaaaagaatgtatgtaattcacctagcatagggctgtgtatgtaatatctgttcaataaatattagttttctttcttcgcccttaccttctctagaagtttctctgattatattagtccagaatgttgatattgttcatctggcaatmaattacagattatcttgaagtatttcatagaagcatttttttttttttttttttgagatggagtcttgctctgtggccgaggctggagtgcagtggcatgatctcggctcactgcaagctccgcctcccaggttcatgccattctcctgcctcagcctccagagtagctgggactaccggtgtgtgccgtcatgtctggctaattttttgtatttttagtagagacggggtttcaccatgttagccaggatggtctcaatctcctgaccttgtgatctgcccacctctgcctcccaaactgctgggattacaggtgtgagccaccacacctggcccagaagcatttttattattacttagcttgcagtgttacta

SEQ ID NO: 770579 - DNA, 601 bp, Homo sapiens
tcaatagtgcttcctcctgttgcttctgtgaaagggtgacatccatgaccaggtggcatgacatctgctgattctgccagatcactggaagaattgcatcctttaaatgagaagcaacatgatccaggaagaagaattacaggaatatasatgagagaaaagttgctgagagatgagaagtgattaggaaagcataatggcaaagtttttagaatgtggagcttgagggaaagttacaactcaattctccaaaagttaagtgaccttagataaattacttgatctctctgggccttggttttggaattccccttctgtaaaaatgaataggataatacctacagaaaaacacttatgtgggctattatacatatatttttaaaatcgaataaaaattcagaaattcaaacatatcaacctatttgacctaagtaaactgctatttccaaacacaaagccaagagttgtttcatctcagacacttctggttaaaaattgactggaagggagcaggtagcataatctaacaaaatataggacaggttaggagacaatactcagagtttctccttttagttggtttgtttctattgtgattggg

SEQ ID NO: 770580 - DNA, 654 bp, Homo sapiens
tgtgaccccaacataggcaactgaaacaatatctatattgggcggatggaaggagaggtgaagttatataagagaattaaaccatccactaaaatctgaggatatttacaaataatatatttaaaaatgaaaacaagaaaaagaacactgtgggtatattattagagataagatacaagaagaaactagtgtttaaagttgttgcctggggccagactgtagggtgggccaggggaatgcaatgttttattacgtaccttttagtagtatttgatttctaaaatgtgaacatgaattgctttgataaaaataaattttatatattcttaaattgtccctgggatatgcaatcatgtgaagttatggtgtgaggaggcctcagggcttkgcagttgaatggagagacagctctagtttagtcagtggttttctgttgtccatcctgccctttaaggcttgtcctccttcctaggtctccctttttggtgtccgttcttggcaaccagttcaaatgagaatgtgttttaatttgcaggtgaagacatttagagaaattttaaaaaaacaagagtcagcaatgagctgtcatttttgtcttcagctaatttctgtcatggccccatgtttttggaagaaaaggtggagggaaaaaaa

SEQ ID NO: 770581 - DNA, 492 bp, Homo sapiens
tgactactgggtacataatgaaacgaaggcagaaataaagatgttatttgaaaccaataagaacaaagacacaacataccagaatctctgggacacatttaaagcagtgtgtagagggaaatttatagcactaaatgcccacaagagaaagcaggaaagatctaaaattgacaccctaacatcacaatggaaagaactagagaagagcaaacacattcaaaagctagcagaaggcaagaaataactaagatcagagcagaactgaaggagayagagacacaaaaaactttcaaaaattgacaaatgggatctaattaaactaaagagcttctgcacagcaaaagaagcaaccatcagagtgaacaggcaacctacagaatgggagaaaatttttgcaatctactcatctgacaaagggctaatatccagaatctacaaagaactcaaacaaatctacaggaaaaagacaaacaaccccatcaaaaagtgggc

SEQ ID NO: 770582 - DNA, 597 bp, Homo sapiens
gtgtgtgtctgtgtgtatgtgtgttacacaagggtggagattagtggttgggagggctgtatctatgtgaggtatgggggtggtggggtgagttatgtgcatggattgtgaaaatacttaaagccagtctgaataaataaggtaatttcataacaggttttctaattactgacttaggttttgactccttgataattctgcctccatagctataatccaaggtccttygtgaattggcctttcctctcattccatacgatcttctacactccccagattgctggaactaagagtatgtgctgtcagatccgactgtctgggttcaaatacatgctcatttgcaagctatgtggcactgtgcaacccagttaacttcaccaactctcagtttcctcataaataacatagaaataatatctacatcatgggactgtggattctattagataattgcgtatgatgtgtcttaagtgctcaatatggtcagctgtgcaactcaaatttattttaattcagtaaatatttatttgaaagttttctgtgcaataggtatagactgttctcctttcaatttgcatatgagacattgtattagtt

SEQ ID NO: 770583 - DNA, 553 bp, Homo sapiens
cagttttctgcatatggctagccagttttcccaacaccatttattaaatggggaatatttctccattgcttatttttgtcaggcttgccaaaaatcagatggctgtagatgtgtggtgttatttctgaggcctgtgttctgttccattggtctatacatctgttttgatgccagtaccatgctgttttggttactgtagccttgtagtatagtttgaagtcagctagcatgatgcctccagctttgttctttttgtttagaattgtcttggctatgcgggctcttttttggttccgtatgaaatttacagtagttttttctaattctgtgaaraaaatcaatggtagcttgatggggatagcattgaatctataagttactttgggctgtatggccattttcacgatattgattcttcctatccactagcatggaatgtttttccatttgtttgtgccctctcttatttccttgagcaatggttcgtagttctccttgaagaggtccttcacagcccttgtaagttgtattcctaggtattttattctcttta

SEQ ID NO: 770584 - DNA, 649 bp, Homo sapiens
tagtttcttttgctgtgcagaagctccttaggttaattagattctacttgtcaatttttgcttttgttgcgattgcttttggtgtctttgtcatgaaatctttgcctgttcaacatccaggatggcattgcctaggttgtcgtccagggtttttatagttttgggttttaacatttaagtttttaatgtatcttgacttgattgttgtatatggtgtaaggaaagggtccagcttcaatcttctccatattgctagccagttatyggagcaccatttattgaatagagagtcttttccttatcacttgttctgtcaggtttgtcaaagatcatacatgtgtggccttatttctggcctctgtactctgtttcattggtctatgtgcctgtttttgtatcagtaccatgctgttttgtttactgtaaccccagagtatagtttgaggttgggtaatgtgatgcctccagctttgttctttttgcttaggattgccttggctattcaggctctttttgggttccatatgaattttaaaatagatttttctagttctgtgaagaactagtttgacaggaatagcagtgaatctgtaaattgctttgggcggtgtggccatttaatcatattgatttttttctatctattagc

SEQ ID NO: 770585 - DNA, 522 bp, Homo sapiens
gccattcctgattggtctctttccctctcctcagacctacctattctttgagacacaatactgaaattaggccaattaataaccctgtaatggcctctaagtgctcaggtgaaaggaggcctcccatgtctgttactttagatgaaaactagaaatgattaagcttagtgaaaaaagcatggctaaagctaagacaggccaaaagctagacctcttgtgccaaayagccaagctgtgaatgcaaaggaaaagttcctgaagaaaattaaaagcccatttctgtgaacggatgaatgataagaaagcagaacagccttactgctgatggtaatgctattgcgcacttagcagactacagtagagtgtaaacataacttctgtatgcactggaaaaccaaaaaattcatctgacagctttgtgatattcactttattgtggtagtctggaaccactcccacaacatttctgaagtatgcctctaatgctaaacaaatactcatgaaggaatctaccatagccat

SEQ ID NO: 770586 - DNA, 522 bp, Homo sapiens
gccattcctgattggtctctttccctctcctcagacctacctattctttgagacacaatactgaaattaggccaattaataaccctgtaatggcctctaagtgctcaggtgaaaggaggcctcccatgtctgttactttagatgaaaactagaaatgattaagcttagtgaaaaaagcatggctaaagctaagacaggccaaaagctagacctcttgtgccaaatagccaagctgtgaatgcaaaggaaaagttcctgaagaaaattaaaagcccatttctgtgaacggatgaatgataagaaagcagaacagccttactgctgatggtaatgctattgcrcacttagcagactacagtagagtgtaaacataacttctgtatgcactggaaaaccaaaaaattcatctgacagctttgtgatattcactttattgtggtagtctggaaccactcccacaacatttctgaagtatgcctctaatgctaaacaaatactcatgaaggaatctaccatagccat

SEQ ID NO: 770587 - DNA, 580 bp, Homo sapiens
tagtgacctcacgggataactatggggatgaaatgcgctcctgcctgcatggttcttagatgaggcctggctggggtccgaccttcccctcttgtgggtgtggtcactccagtcccaaccactgctgcccctgctcgctgcgcatccctgagggtctccatcacttccgggcctgggccttcccgcaggagttgccgaattgatcttgcggtctccaggcttccttcctttccagatcactcactgcaagggtcctcccgctcagagccgtccattgctcctcggtgctttccagaccctttaaacaccctggcggagccttgctcggcccttctgggtccacttggtagccgagggtccgagctgacctcatgctttccgcactgtcgggcagcgttgtcatcagcsgtactctccgcctgggaaccctcccgcgtctcttctccctgtactctggagtgccccttacagccaacttaaaggcacctccctgcagatcgtcccttgattccctccgatgcagttttctctcctcctcccgagtttccaaagcattgtatcttgtagcaggttccttttg

SEQ ID NO: 770588 - DNA, 423 bp, Homo sapiens
actaatggagtcgagagaagggctcagaacagttatcctaatcctggaatggctatttaagtaccactttgtgcctgagacattcggagcaatttgctaatcccagcccagcactcaccaccaggcccctttgtggtggtcggtgccacacactagtgtctctgtttctcagatgcaggcatgaggacactgaaaacaagtgaatwttcaaaactccgcaggaaaactatctcgatggagcctggaaattcaagcctcccgatttgccagttcatcctacagatgctttttaaccaaatctgagaaacacagtggttctaatgaaaggctgtttctatggcagattccataaagagaaaagaacaaaggcagtgatggaacaagttcccttcaacgaatcactcaacacagcaaggttgacat

SEQ ID NO: 770589 - DNA, 614 bp, Homo sapiens
atgagacaaaatagaatttaaggcaaaaaggattaccaaaataaagagggttaaaaatggtaaaagttttaattcatcaggaaggtataaaaattctaaattcatatggccttattaatgtgatcctaaaatatataaagcaaaaatgggcaaaactataatgagagaaaaatcatagagggaggttttyttaaaaaaaattaatgtacttgatttactagaccagttttaggtttacagcaaaattgagtagaaagtacaaaatgttccttgtccccacacatgtacagcctccccgattattgacatcctcctccacagtggtacatttgttacaattgatctacattgatacatcattatcacccaaagtctgtagttgacattagagctcagtcttcgtgttgtacattctgtggctttccccaaatgtatgatgacgtgtccaccatcatacagaatagtttgactcccctaaaaattttctgcctagtcatccctccccactattccttggcaacccctaatcttattactgttttcatagatttgtctttttcagaatgtcatataattggaatcatacagcatgtgacctttcagattggcttctt

SEQ ID NO: 770590 - DNA, 580 bp, Homo sapiens
atgcctccgccagagtagctggccaagatgcacccacacaggactgcgagcgtcttagactgctctctgagttggaatttagggcctgaattagtcaagcatcaaatgaagaaataatgagatgcaaactctccacatactatcttcacagctttaaaataaaacaaaatgtaatggcctttaaaaggaaatgtaggttagacaggattgcaagttaactacagttattttataacattaaagtaataaaaggtattttttgacctggttttacaaaggctatttcttcacacacatacacacacacactckaatacctacccatctccacacacatcccctcatatatacacactcacacacactcacacgcacacccactcacactcacacacatccacacacgcatacatacacccactcacacaccccacacacatgctcacgcccacacacatgcacactcacgcacacacccacatacacacacgcactcacacatgcacacacgcatacatacacccactcacacaccccacacacatgctcacgcccacacatgcacactcacgtgcacaca

SEQ ID NO: 770591 - DNA, 502 bp, Homo sapiens
ctgctgccttgtctggacctggtttgagcctggcacaactctgggctctgtagggagtacagagaaaccccaactccaacacacacacacacacacacacacacacacacacacacacagctcagggcacaggtagacacggagccacatagccacaggaggacatcaacacacatacactgagtacgtactgtagaccaggckctgaggcactagcagaatttggataagtagagaagaaggtggcagaaacacataacctgcatttcaagggtaatacaagatctagctgcctagctggagggggacatcttcattcattcattcgttgtaccaatatttatcaggcactcttctaagggatacagctgaagagatctggggccatagaaaggtgggcttccaccccaggtgagcactttaatgggcctgtggagccccagcaagttgctgagccgtggactggcaggagcagtgcccaagtctgggctgcacctgagca

SEQ ID NO: 770592 - DNA, 496 bp, Homo sapiens
tgagccattgtattccagtattcttttcccagtattctgtagtgctattcctctacttctcctttgaatcagctttatcttcttactggttccctcattcaggagttaaacaaattttgacatgtgttcaacctatatttgaatgagagttatgcttttactctattttttttgaaattatactttgacagcttacgtgtgccccggaaatagggaactcactacctatcaaggaacttggggatcttagaacagctcctaaaacaggcttagggcttcttccttattctcatagctgcaccctctgtccctggttctccctttgagaaaasctcaggaagtgagccgaacccctaattcccacagcagctcatcaaatttggtaatttcctatcgctttgcactctagactacatattttgtgttcagaaaaagaagtcattaaataaataataaaaattgagatctaaattttacttccatgagttgaagaaga

SEQ ID NO: 770593 - DNA, 721 bp, Homo sapiens
aaggctactctgctgaaatgaaggatccagtgaatgtggcatacatacgtttacgatcttttcactccagaacattgatagccagtccagtaccttccaaacagatcagaagggtctaccctggggaatccaagcagaataagatgaaagatataaagatactgaccaagaaaatgacccagccagaccccctctataaagtccagagtctggccgtcccacacaattacacagagcttctgatcagagtttagtaccttgttattaaataaggtcaaacagcaaagaatcgtcagccataygaagaaaacctctacccagaaagacaagacaaaacagagaatttttttaaagtaacttggaaaaaacagactatgcagggagatgaaatatttttaaaaattatatcaacacaatcctcagaaagtaagagaagggactccatctatgcagtaagaaaaagtagtatgaaatgtaataattagaaaacaaaatacaaattcaaattattataatagaaatcaaaaactcgatagaggcattcaaagaaaaaaaattaagataccatccccctccccatctaaagactataaaaatacaaagagatagaaaataagaaagaatgagaattttataattctttagaatctaaaaaaagaacaatgaaaaggcaagagagaaaatgatcaaagaaataattatgaaaatgacccaggattga

SEQ ID NO: 770594 - DNA, 721 bp, Homo sapiens
aaggctactctgctgaaatgaaggatccagtgaatgtggcatacatacgtttacgatcttttcactccagaacattgatagccagtccagtaccttccaaacagatcagaagggtctaccctggggaatccaagcagaataagatgaaagatataaagatactgaccaagaaaatgacccagccagaccccctctataaagtccagagtctggccgtcccacacaattacacagagcttctgatcagagtttagtaccttgttattaaataaggtcaaacagcaaagaatcgtcagccatacgaagaaaacctctacccagaaagacaagacaaaacagagaatttttttaaagtaacttggaaaaaacagactatgcagggagatgaaatatttttaaaaattatatcaacacaatcctcagaaagtaagagaagggactccatctatgcagtaagaaaaagtagtatgaaatgtaataattagaaaacaaaatacaaattcaaattattataatagaaatcaaaaactcgatagaggcattcaaagaaaaaaaattaagataycatccccctccccatctaaagactataaaaatacaaagagatagaaaataagaaagaatgagaattttataattctttagaatctaaaaaaagaacaatgaaaaggcaagagagaaaatgatcaaagaaataattatgaaaatgacccaggattga

SEQ ID NO: 770595 - DNA, 640 bp, Homo sapiens
catacagaagaacgaatgtggggtttagaatcagaagctgtgggtttgtctaccggatctgccacttactggctatgtgcccacttaacctttgtgaacctcaatttcctcatctgtatgatggagacattgatgctagtgacctctccaggccgctgtgggggctgaatcagacaaggaaggtragaacaggaggaatggcctagcgatggtgcacatgactggagatgatttctgtagaggtggagccactcatccctgcgagagggtgttcctcacagctctgactccccttgccatttcctagaaagcaggaaatgagggtggcatctcccaacgtgtgttcagatgttatcagctgttgagcagaaataatggaactctgtggtcaaacaagattgggattggttgtttcaaacaatgttcaatggtgttttgctgcaggacttgtcagagtctttgatatgctaatggctaccttgttgggccatggagatctaaaatagtgtatgctcaactgtttattgagttatctcttggggtgagatgatgcatctggaaggggctggtgtgtgcaaagtccacttttggaaaagctgctctagagagagctattggatccaccatgggctataagcac

SEQ ID NO: 770596 - DNA, 668 bp, Homo sapiens
acaactataaaactgagactccatccccagccctatggatccaggcccaggtccactgttgcccaggccctcggtttgacactgacttgagaaccttcacttctctggcctcagttatgccttctgttatctgggaatagagcagcctaactgtgtgtatccccatccccctgggcatggtgaagatgaaataatgcagaatgtagagctgctaagagcactcactttggagtcagggagacctgagttcaagtctaggcttccttgccatatggaagcctctctgagcctcaattttccacatctgcccaattcacaaagtcattytgaagttcatctcaggtgatataagcaaactggctagtaggcactcaagaaaccctactccccgggattgggtacatggcaggggccaggagagacgtgacaattggtgatgaggggtggatttgtggtcaggactggctatataatttggggggcccagtacaaaatgaaaacgcaggacctttgttgagcaagtattcagaagttcaaggcagtggtggcagggcattaaaacaagctcaggacccttctgagaccagggccctgtgcgactgcatgggtcacaggccagaaagccggccctgcctctgggatatctagggtggctcaaatccagttca

SEQ ID NO: 770597 - DNA, 626 bp, Homo sapiens
atcactggtttcctgctctctatttcccactacattaaggataccttatttgttttggtctctgaagtacctagcacacagcctggtatataaatatttaataactaattggaagactaataggaagattgaatagatgaataaaaaattacaataaagaataaaagaaaaaaagaaacaagacctcagagtcttagaatccaaccattaggcacattgtttttttttttttgagacggaatcgctctgttgcccaagctggagtgcagtggcgcaatctctggtcactgcaagctccgcctcctgggttcacgccattctcctgcctcagcctcccaagtagctgggactacaggcgcccrccaccacgcccagctaatttttttgtatttttactagagacagggtttcaccatgtaagccagggtggtctcaatctcctgacttcgtgatccacccacctcggcctcccaaagtgttggaattacaggcgtgagccaccacgcctggccaggcacattattatttaacttgacttctgaagagagaaaaggaaaactgaataagtgatgagaagaggtgtgactttgtgtgtgatattaaccagttaatgaagctccacgttg

SEQ ID NO: 770598 - DNA, 551 bp, Homo sapiens
taatcattatgcctgacgtttattaagcacctactatgcgccaagcggtttctggtattaatttactggacctgcacagctgctctgcaaatcagcgcatgccaccccctgcttcaaactctccaacacctggatacaatccccaagtcctccccctatccatatggccctgtgtgatccagccctggaccctgcctgcctctccaagctgctctcccctctcccctcctcagagactgtgctacaaacacactgccctccctgctcgctgccccagccacagggcctcyacactggctgttcccctgcctggacacccttcccctagatatctgcataactcacttcctcacctccttcgggccttagctcagacatcagagaggtcttccctgatcactccatcattagctcatccctcccacccccaccatcaatcactttctactacattcttctcatagcatcttcagactccattctgaaattgagtgtgtgaacctgtctctcgcaccagctcctcaagggctgggatctttgttctctgctgt

SEQ ID NO: 770599 - DNA, 628 bp, Homo sapiens
agcatatacgaatagaaacagagagagtatttaggaagtttactgcaatcttctagtctagagaagatagaaaaatagtgttggaaatgatgagaaactatcagattctatatacatgttgaaaattgagtcaacagaattcactaataaattgattgtggagtttaagggaattaggtattgaatacaacccyttggtttttggatttgtcagctggatgaatggcagtactctctactaatggagaagactgggggagaaaaaaatttttgtgggaatgataaatgaaaatcaagagttctcttttgaacatgtcaaatttaaagtctatatcagatatccaagtggagatgctaaggaggtagtaaacacacacacacacacacacacacacacagacagagagagacaaagaggtcagattggaaataatatttggaagtcatcagcataaagatggtatctaaagccaggagtctgcaggagctcacctagtgatttaatagaaaaaaagagatgagaaaaggattgaaaagaagccagtgagtcatgaagtcaagtacttgaaggggagcaaccaacaataacaacaataaaaaaattaataaataactttcagtaaggagg

SEQ ID NO: 770600 - DNA, 628 bp, Homo sapiens
agcatatacgaatagaaacagagagagtatttaggaagtttactgcaatcttctagtctagagaagatagaaaaatagtgttggaaatgatgagaaactatcagattctatatacatgttgaaaattgagtcaacagaattcactaataaattgattgtggagtttaagggaattaggtattgaatacaaccccttggtttttggatttgtcagctggatgaatggcagtactctctactaatggagaagactgggggagaaaaaaatttttgtgggaatgataaatgaaaatcaagagttctcttttgaacatgtcaaatttaaagtctatatcagatatccaagtggagatgctaaggaggtagtaaacacacacacacacacacacacacacacagacagagagagacaaagaggtcagattggaaataatatttggaagtcatcagcataaagatggtatctaaagccaggagtctgcaggagctcacytagtgatttaatagaaaaaaagagatgagaaaaggattgaaaagaagccagtgagtcatgaagtcaagtacttgaaggggagcaaccaacaataacaacaataaaaaaattaataaataactttcagtaaggagg

SEQ ID NO: 770601 - DNA, 590 bp, Homo sapiens
taaataaaggaatattggttatatgtgacccacacagatactcaggccaaactgggttggggtgagaacacccacaaaagaaactcaaagatagaagtgtccttggaatcaagtttgaggagacatgacaagaatggatatttcccagtggattccatgaacactctagccctgaaacagtgagaaaaccagaaaagacctaagggatatgagagtataatttcaatgagagaggacaagctgtggaatgaattagaaaaagaaactgaagtaggatrgttcaggaaattaaatcctagggcacagagaaattctcagagcaattctagaatgtacactgtaaagaatactactcttttttgtaaagaatactactttttttcctccctaataatgaaaaaaatgagatatagaaaaagtaagaaatttgcctgtgtttcaatctcaggtcttggtatttctaaaggttaagcttctaaacactactctatttccttgtgtccctttttttggcaagtaaatgagtaaagattatactgtttgttcaatcaagttattgtccaagaaattaactggaattcagctattta

SEQ ID NO: 770602 - DNA, 644 bp, Homo sapiens
tactgtttatatcttccttatgttcatacaaaaagatataaaacccaaaactgattactgatttttagcacatgatccataatgctatcttataaaaaggagtaaaaatgtaattaatttgaactaaatttgttcaataatagcccaaccacaatacatgttaatttattataatctaggaacccgtaatttatatacactgaggtaattgctactgtttctctaaccaaatcaataaaccgtcctccactgttaggcctatgtcctggaaactaatcaactggagttacgtgttagtctgtttctttctatgtttatttgaatatctggtgcatataaagatgacatggttacaaaktttcccatttgagatatcaatagctagaactgtttttttcttttatcttacagtcaagctttgagcattattttctaggttctttacaactcttgtattagttaacaaataaaaagaatccagtaaaatgcctgagacattgaaggtgctcaataaatgttatttacccaactaaccttacaagcaattttaatttaccttaatgttttctcaaattttcccattattatccttgtcttattaaaaatataaaaaatcacaagtgcctttattttcttttaaaatt

SEQ ID NO: 770603 - DNA, 574 bp, Homo sapiens
ggccagagctttttttttttttcttttaagtggatgatatatgatacaaatattgttcttaatcaaaagtatattagcaatctaccacaactgcagagttacaaggaagcagtacagcatgtttggagaggattattttcacaagaaacacgtattcatttctctgtctgcctttatcaacatgtatttatcaaaatatggaagcttgtccatgggccrcattttaattactcataggttgcctgaagacagctgcagtctaggaaggaagagagattgaaaagaataaggtgcttttaaaatttggccataattgtaactagaggactctgttggctttattccaaaactctaaggagctgtcttcccctagttttttttcctatcactgacgtttccccatgcagcacttacactggctctcattgacttaatcagctgttattatgtatatttttattttttctttagtaatattttcataataaaattgtataaattcatcagaggagatttggaacatacacctatacaaaaagagaaagaagaatgtcttgaatcctactataaaggc

SEQ ID NO: 770604 - DNA, 600 bp, Homo sapiens
gctttattccaaaactctaaggagctgtcttcccctagttttttttcctatcactgacgtttccccatgcagcacttacactggctctcattgacttaatcagctgttattatgtatatttttattttttctttagtaatattttcataataaaattgtataaattcatcagaggagatttggaacatacacctatacaaaaagagaaagaagaatgtcttgaatcctactataaaggcattaccttttggaagttctagaaatactatgcatgttatttttaacamaacagaaatcatgtgaaatatgctattttgtaaatgaccttctttgcttaactatataccataacattctttttattaaataaaatatccataatgccatctttggctgtggagtgtgtcatcataaagatgcaccacaaataccccttgttgttatatccaacaatgattatacatacatattttttctcattttttattaaaaagaaaaaaatgaagggaattaagagtcctgggggaaaaactgggctgcagtgaggcatgaagctcaggtctttattatacattccttgtcctatttgcatatgtatat

SEQ ID NO: 770605 - DNA, 600 bp, Homo sapiens
gctttattccaaaactctaaggagctgtcttcccctagttttttttcctatcactgacgtttccccatgcagcacttacactggctctcattgacttaatcagctgttattatgtatatttttattttttctttagtaatattttcataataaaattgtataaattcatcagaggagatttggaacatacacctatacaaaaagagaaagaagaatgtcttgaatcctactataaaggcattaccttttggaagttctagaaatactatgcatgttatttttaacaaaacagaaatcatgtgaaatatgctattttgtaaatgaccttctttgcttaactatataccataacattctttttattaaataaaatatccataatgccatctttggctgtggagtgtgtcatcataaagatgcaccacaaawaccccttgttgttatatccaacaatgattatacatacatattttttctcattttttattaaaaagaaaaaaatgaagggaattaagagtcctgggggaaaaactgggctgcagtgaggcatgaagctcaggtctttattatacattccttgtcctatttgcatatgtatat

SEQ ID NO: 770606 - DNA, 616 bp, Homo sapiens
tctctaatatctccaacttaccacatttcaagcatatgaaaattgaaaacaaaacaacatatggagagaagatttttgtggaattgtcaaccggtctccaggagcacagagcaaccatttcttaagcagtcttatccctggtatttctcagttcaagtgggaagactttcaaataatttagtattgcattaggtaatatatttgaggactaagatgataaatcggctataatattcctttaaagtattaaaggttcaaggaaaaaaaagatattaaagacagatgccagtcagggagcacattcagggaagagagggaggaggcaggatgtccctctgccttcgctgctccctgaaacacagtgctgtcytgaagagcccccacggtgtcctccttcggcccccatcctgctgcatccctccccctcctcccaggactgaaaacaaattgttttgggctacaataccccgggctgtgccttgacctgcatggtacagtgacactgtgcggcttgaatttttacatacagctgcataaagcaattttcatgtaaatttctaggtaaatcagcctgcagttggtctattacagggacacatacacaaaaaccgttaag

SEQ ID NO: 770607 - DNA, 610 bp, Homo sapiens
aaggaataaactactgacacataatatgactctgaaaataattatgctgagtcaaagaagtgatatataaaagaataaatacggcatgtttccatttactttaaagtctacaaaatgcaaactaatctacattgacataaagcagatcattcatttactaggagcagaatgaacttcaaaggggcaacaggaaatgtacgctggttttggaaattattggcattgtgatggtagcagtggtttcacagtgaatacacttatcaaagtactttgaattgtacaatttacatgaatgaagtttattgcacataaattayatcttaataattgataaaaatattcttctgcagcaatactgggaaatatttattaccagatattaaaatattataaatgaactataaagaaaatggtatgttttgatgcctgcataaatgaacaggtggacagaacaattacaaaacccagaaagagtctacaattccaaatagaaatttggcttatataaaaatgacatctgaaatatcagtgggaaaaaagtcgagcttttaataaatgatgttaggatcatggatcaccatatggaataacataaaatttgatctttctt

SEQ ID NO: 770608 - DNA, 501 bp, Homo sapiens
ttatgcttttataaatggcattgttttctacattttaatttgcaattatcttgtgttagtattaacatatgaattataattaatctataattgatcttatattctctaactaaatagttagatgttatagtagctttttcctagattctataggaatttctatgtagatactcatattgtctgggaataaagtgagttttacttcttcctttccaatttgaaaacmttttctctatttttcttgtcatattgtgcagatgagtagccttcaatctaatattgaataaaagttgtgagaacaaacatacctgtctttttttttcaaatcttaaagtgaaagtattcactctttcactgttaagtataatgccagctatatgtttattcacaggtatactccatcagactaagtttatttctttctggtttgtttagagatgataacagtgatgaatgtgatattttgccaaatttctgtcatcattgattgagatgtgcatc

SEQ ID NO: 770609 - DNA, 601 bp, Homo sapiens
tagttatgtcccctcttattcttgattttagtaatttgagtcttttttccttttttggtcaatctagctaaagatttgttaatattgatctttctgaagaactgatttttgtaatcattgatttttatagtgtttttctatcccctagttcatttctttccattctaatcttaattatttcttttcttctctttgctttaggtttagtttgctctcccccacccccacccccctcagtttcttaaggtgttcatttgagatatttctgtctttaaaaaaatattagtctttctctctaaacagtgctttagctgtattcataagtattggtatgttatctgtaatccatctacaattattttccaattttctttaagatttcctttttaattcattggttatgtaggartttcatgtttgggaatttctaacatttccttttgttattaatttctaattctatttggttggacaatatacttcatataattaaaattattttgtttattttttaaattaagtttaattttattttaagttctgggatacatgtgcaggacatgcaggattgttgcataggtaaacaaacatgtgccatggt

SEQ ID NO: 770610 - DNA, 514 bp, Homo sapiens
agcaaaagctggttgtgcaacgtctgctgcctgggctgcaccaacctcgggcaaattagccatcattaatccccagatctgaccagcatacacagagccactaatcaagacagctggggggttgggggaggtggctgagaaggacagtccctttaagattgctaaatggcatcccaggttaaaaaataaaacacacacacaagcacaaattgcagtcttcctcttccagaacactttcactccctctgcctgrcgaggacaggctgtgtctgttggtgctcctcgttaggagattgctaaaatagcagtgcgactttctggaagtgtcacactgctctatgcaagcctggcatcctgcagttataaatagctggttgcgtggagagtgagaacacggtattgtgctgtcgtggtgagctggctagccatgaagcccagaaaaaccacagtaattgggggcctgcttgagaaaggggaacagcacctgacttgggtgggggagcacaggcagctc

SEQ ID NO: 770611 - DNA, 640 bp, Homo sapiens
tgtttttgcctaatggaggaaggtgcttttcagtgttatcttgtaggaaattgagaccatggtttatagtgaaactatgcctttaacccgctgaagtaaaaatgcaggtgctcttaattctaactacataggagggggttccagaatcccttaagaatcttcytaaaaaaaaattaatttggcagtgagttacaaagcaatagatggataattctaaggaatctcaggctctgtgtccactattcaagtatttaattgccttgtctcaactcctgccagttataaagggtcaatatcagtggtaactttataacttacatcgaggattacatgtaaaattcataggacagtgtcggaacatataaaagcataataatagttatcagttggcagtggtagtcataatagtagtagtagcaaatggtaccactcttactcatttgccatggcagttccagaataggtttatctggtatttggtttcctacccagaggttctaacatcatgacccctggtagtgattatgactttggggaaggggtgttaggggaggaggagcatctcctttttatacatcccatggtttttccactcagccctctttgctaggaggccatcctagattaaaattccgtcctg

SEQ ID NO: 770612 - DNA, 505 bp, Homo sapiens
ttcacatacgaatgctatttagttctcacaatccatgaattaaggggcattgtccccattttattaatgaagaagccaaggcttcagagtagttaggcagtgtgttcccaaggtgaggccatcagttactggcaaggacaagaagtgtcatcagaatctggcctcctgactttgaattcttccccttgcacacctttaatcaatggacaggagaggacagtcagtcctccgtatttgtgggttctgcctctgtatattctaccaattgcagatccaraatatttggaaactttttccacaaggttttaaaaaagcaaacacgcttgaatctatggcactaagtactacattgaattccttggaactgatgtgcaggcattgcattaggtattaaatctagagatgatttaaagtatacaggaagatgtacataggttatatgcaaatactatgccattttatatcagggacttgagcatcttcaacttattattattattttttt

SEQ ID NO: 770613 - DNA, 620 bp, Homo sapiens
gcggtatggtgtgaatcctgacccaaaagccagctcttaacggaaggaacttagtggcctctttctctggggccaagtcgctgtcttcggtcctgaagtctcgtccctgttccaccactccgcgactggcggaagttcccctagcgagagccccgcaggcctgcgggrtctgccaaacccggctctctaagcttcacctgcttggagaaggacgtttcccccttgtccgctttcttggggtccgggactggccctcttgaagtagcctgggacgtcccagccccttctcgatctggccctgctcatgcccaaggccctcgcgttttgcaggcccaggctcggggctccagggcctgcggccgggcaaggtcgcgcctccacaccgtttccccgcccgggtgccggctccgggtctccagcctaaaggccctggggaccgctgacctcctgctctctgttccagggaggctgtccggtggacaagacgcacagaaaccagtgcagggcgtgtcggctgaagaagtgtttggaagtcaacatgaacaaagacggtaatcagtgcatccctttattccaatgttgattgagtagtaagtaaattatatgtacagaaaatacat

SEQ ID NO: 770614 - DNA, 626 bp, Homo sapiens
agatttacataatcctacaggcttatgctgaaataaaactgtctattaatagtctaacaccttttttggacaatctttaaaatgcaaaactattttctggtgtcttcccaacttgtccaatcctaagaaacacactcaagtgacgccaactagagaatctcatgcaactgatctagggtggaatctgaaaatcagtattttcaaatgaytctcaagtgcatccagggtcaagaactgctgccctaggagttcgagaccagcctggccaacatggtgaaaccctgtctctactaaaaatacaaaaattagccgggcatggtggcacacgcctgtaatcccagctactcgggaggctgaggtgggagaatcgcttgagcccgggaggcggaggttgcagtgagccaaggttgttccagtgcactccagcctggctgaaagagcgaataactgctgccctagagttaataaatgtgaaagagggtaggaacttgggaatttgtacaatcaccaagtaattctggtttagcttagctgggacagatatgggcgataatattttacctctttaagggtagtgatttggaataatactgtgagaatggagtgtaaagtcattataagtaaaa

SEQ ID NO: 770615 - DNA, 626 bp, Homo sapiens
agatttacataatcctacaggcttatgctgaaataaaactgtctattaatagtctaacaccttttttggacaatctttaaaatgcaaaactattttctggtgtcttcccaacttgtccaatcctaagaaacacactcaagtgacgccaactagagaatctcatgcaactgatctagggtggaatctgaaaatcagtattttcaaatgactctcaagtgcatccagggtcaagaactgctgccctaggagttcgagaccagcctggccaacatggtgaaaccctgtctctactaaaaatacaaaaattagccgggcatggtggcacacgcctgtaatcccagctactcgggaggctgaggygggagaatcgcttgagcccgggaggcggaggttgcagtgagccaaggttgttccagtgcactccagcctggctgaaagagcgaataactgctgccctagagttaataaatgtgaaagagggtaggaacttgggaatttgtacaatcaccaagtaattctggtttagcttagctgggacagatatgggcgataatattttacctctttaagggtagtgatttggaataatactgtgagaatggagtgtaaagtcattataagtaaaa

SEQ ID NO: 770616 - DNA, 603 bp, Homo sapiens
tatcatcctatgagtctgaaagaggagctaggaaacagggtgagcctccaaagccatgctggccactgcctgtgtaggcgaccacccagtcatggccctgagccctgccccgacagtctcagacacacaggcatagggcaggggaggcagaactgagaccaagagccttgcaaaataaagtggttttttttagcagaagtcatgctacatccttacattaacactgtaagctacagtctattaatttgatccttaagaagtaaacaggctgggcacagtggctcatgcctataatccyaggtattttggaggctgaagcaggaggatcacttgagaccaggagttcaagaccagcctgggcaacacagggagaccctgtctctacaaaaaaaaaatttttagttagctgagcatggtggtgcatgcctgtagtcccagctactcaggaggctgaggtgggagggttgcttgagcccaggaggtcgagactgtagtgagccatgtttgtgccactgcactccaatctgggtgacagagcaagaccctgtttcaaaaaataataataatgaataaagtaaacagagggtttttagggcagtaaaa

SEQ ID NO: 770617 - DNA, 618 bp, Homo sapiens
ctcttcagcttgaggagctggcctgtgggagtcacttccccaaggacagggcactggccaggcagagggtagagatgggtggctcagcaactccaagccattcctggagctttgactgcccggagcccaggctcatgagaaacagccccttccccatacctggaagactgggacccctccttggggtggtgaggaggcggggctctccgcaggcccctcccccatcggcaagagtgcccacagcccctccgctgcctggggtcccactgaggccaggggcggggagcgccaccttggacacttccgtgcttgccctgcagggaccgctccagggccccggagcacagcgccccctggagaggctgtgcccggacctgaggcgccggcgtgtcaggtaaaggggtcccccttcccgccagttccctccacagccaaggaaggggcggggaagggccccggccctcgctgcccaaggggygcctccagccttgcctgggtgcggccctgggggccgcggggatctgtgggcctcaggggtctggggcactccattcttggggaaggtaggggaggggagacggctccagggtctctggagaagttgtggggtatcctgat

SEQ ID NO: 770618 - DNA, 617 bp, Homo sapiens
tagggatccttctttattgagaaatttcatgctttatttgcatgttaatgttttcacctcttttcaattaaaggctctgtttcctattgaagttttaggcaatatcaagtaggattttttttttgaacaaagaaaaattattggctttgaaatcatactatttctgaagttaagtttaaaagctgacctgcttgtgtcatattargattctttcaatcttaggagagtgagaacaatggaattcttgaacttttcccattctttcttctggctgtgctctcgatgagctctatggacttgaccaagtcacctacccaatttacatctctgttctcattcaccttttgttttatgcatgcttagttttcatattttgacatcgctgtggcatgatcgctttgagcgcaatatttaaaaatcaaaggggccaaggctttcaatcattagacttgttttaaaaggcaaagaaactattgaaaaccagagttgcatttcatgcattttatgcatgcctctaacttacattagaggctaacttatcatgtttatttctggtttatgaaggtagattttgtaagaactattctgttctggtttttactttttattcttactaa

SEQ ID NO: 770619 - DNA, 491 bp, Homo sapiens
tcagccaaaaggtgtaaattaaggattgaacataaccacgaagcaattggctgacaacaaaaaaggggggaaaaagacttttaacagaaagagctactgcaacttaaattgttctcacattttaaatgtgttaacaatatctatytttatttgtaagccaactttgtgttgcaactctgctgagtttcatcttttaagcctcttttgcctctctgagccagttttatcttcgtatttgaggctttacattcaggtgacttctttcattgcatttcaagggttctctaacccaaaaaaaagatggaagcagcacacgacaatcctttggggtgagtaaagaaaaatattagaatttctatttccattttctctaaatataatatgagtctacatttgatatatggattttcacaggcattcttgttcagtaactatatcagaggatccatatctcatacagtgagcaaaatatcctgaaagaagcatgcatg

SEQ ID NO: 770620 - DNA, 602 bp, Homo sapiens
actccctatctccatgaattcagctgtttttatttttagatctgacaaatgagtaagaacatatgatgtttgtctttctgtgcctggcttatttcccttaacatgatgacctcagttccatctatgttgttgcaaatggcaggatcttattctttcgtatggccaaatagtactccattgtgtatatgtaccacattttgttatccattcatttgttgatggacacttaggttccttccaaatcttggctactgtgaacagtgctacaataaacatggaagttcaggtatctcttggatatactgatttcctttyttttttggtgtatacccaacagtcggattgctggatcatatggtagctcaatttttagttttttgaggaacctccaaactattctccatagtggttatactaatttacattcccaccaacagtgtatgtgatttccttttctccacatcctcgccaacatttgttattgcctgtcttttggataaaagccattttaactggggtgagatgatatcccatcgtagttttgatttgcatttctctgttgaccagtgatattgagcaccttttcatatgcctttttgcca

SEQ ID NO: 770621 - DNA, 595 bp, Homo sapiens
atgaccaagtcgaatttacaccagggatgcaagaatggttcaacatatgcaaatcaattaatgtgatacattatatcaacagaatgaagaacaaaatccatgtgagcattttaactgatgctgaaaaagcatttgataaaaattcaacatcccttcacgataaaaatactcaaacaacttggtatagaaggaacattcctaaacatartaaaagccatatatgaccgaccaacagctagtatcatactggatggggaaaaactgaaagccttcctctaagatctggaacacaacaggaatgctcactttcaccacagttattcgacatagtactggaagtcctaactagagcaatcagacaacagaaagaaatgaatggcatccaaattggaaaggaagaagtcaaaataaccttgtttggagatgatatcatcttatatttggaaaaacctaaagactctacaaaaatactatgagaaccaataatgcagtaaagttgcaggatacaaaatcaacatacaaaaatcagtagcatttctatatgccatcagtgaacaatccaggaaataaatcaaaaaagttatcccatttacaa

SEQ ID NO: 770622 - DNA, 591 bp, Homo sapiens
gaggttggaagaattggagggctcagaagaagacaggaagatgagggaaagtttataacttcttagagacttgttgcattgttttgaccaaaatgctgatagtgatgtggaaaataaagtccaggctgagttggtctcagatggagatgaagaacttcttaggaactgaagcaaaggtcacttttgttatgtattagcaaagaggttggaagaattctgcccctactcaagagatctgtggaactttgaacttaagagagatgatttagtgtatctggmagaagaaatttctaagcagaaaagcattcaaaatgtgccctggctgcttttaccagtgtatgcttatatatgtgagcaaaaagaagatctgaaactggaacttacatttaaaaggaaagcagaacgtaaaagtttggaaatgtgcagcctggccatgtggtagaaaagaaaaacccattttcaggggaggaattcaagctggctacagaaatttgcataagaggagcctaatgataacagccaagacaatggggaaaatgcctcaaaggcatttcagagacctttgcagcagctcctgccatcacaggtgtg

SEQ ID NO: 770623 - DNA, 633 bp, Homo sapiens
aagaattacattttatctacaggcaatcataagccatgtctgttatgcagcataggctttccattctctatacatctaggtcatagagtttttccattgataaatctggatgtttatataccaacagtactttcttacaacatattccagtatatagtgtccagcttcacccactttttaaagtggccctgaaacaattttattcatcttattggagtgttgctgtaggggaagagtagaagctaagaagagtttgagttcaacaccattatatccaaatcctgaccttactactggaatgtaagctccttgaaagtggagatcttgtctgtcttgttcacagttgtgttcccagccccagaggtagtctcagggccaataycaagtatgctctcaaatatttgctgggaaaatttactagctggataaaaggcaagttactttaatctctttaatcttcctttgtccttacaaatgaaagagactaatagtacttaaccttgcagtgttattataaggattaaagttgataaatatatgatcatgagaacaattgctagcacataacggtcactctgaaaatagtagctgatatatcagctgcattgtttgattattgttggctcaattaaa

SEQ ID NO: 770624 - DNA, 586 bp, Homo sapiens
atgtccctcattttgacattgatgttttctcatgattagactagagttataaattttaggaaagaataccatagaggtgaaatgcctttttaatcacaacacatcaggcagtacatggtatccacatgacactactccaaatactaatactggtcacttgggtaaagtagtgtttgccagtttcctccactgtaaagttactattttcccctttccatactttattaattggaagcatgtcactaagtgcagcccacactcactcaataaatactactttatttmttttgttgctcaattgttctagctttggccattgggacttctttcaggttggctcctttatctgtttgacatacccctttcctttactttttgagcactttcttactttctgttgcaagatattataggcttatgcagtttccttgccccagtcctagaataagccctttctccaagaagcatagtaccttttctttgagatttatgtagaaccaagatctgaatgctgagactgctcactgctattggggtgtcattccttctaggctctctcagtggacagagctaggttacatatata

SEQ ID NO: 770625 - DNA, 559 bp, Homo sapiens
agtagcactgactttggagttagactccctgggcttaaatttcagtagtagcactttctacacaatttatttgccatttctgtctcttacatgcctcctttgtagaataaggaaaataatacttacccagttgatgactgctctactaaaggtagtcatgacaagctaygcatttgcaaaatacaaggttactgactcaactggagttaaagaagctctaaagaaaaaagaccgatgctcaaattattattattagtattgattattgagttaatattaactttaaagtacttagcacattatgaatgcagtgttaaatattatttttattactattaatattgctgtttccccagtgctaggaagtactagagatggggagagatattaatggctgatttgtgcaggacctgcaccaccttattgccaagtctggattccagagccccacaggaccctttgtgtccacagtgctgacacagtattatgcagaaagtaggaataaaatgcacttattgcttaaatttattatggcccaaagcaataaataccaagtata

SEQ ID NO: 770626 - DNA, 610 bp, Homo sapiens
tcaaatacatgttctcacttataagtgggagtgaaataatatatacacatggacatagaatgtagaataatagtcattggagagttggaaaagcggaaggggataagggaagagaaattacttaatgggtacaatgtacagtatttggttgatggttacactaaaaatccagacttcaccattatgcaatatatccatgtaacaaaacttcccttgtaccatttaaatttatacacacacacacacacacacacacacacacayatataaagctttgtagcattttatattggaacagaaatgattttcacacactgtgaacaaaattaattgataaaaatcttcgtatttgtggtagtaactaaaaaaaaagcagtgtaattcatagaataccaaactgatgtttaactttaatcatttttagcagggggaaagcaggttacaacattgtggttagtcctttcaaaagacagacaaagtctagagtggatatgaggctaccctagcttccaattggaaaaagaaaaaaatcactttcctggaactcaattccactttttgcttctcctccaaacttcacttctcagtttatattactcattactggtaa

SEQ ID NO: 770627 - DNA, 649 bp, Homo sapiens
aagacaggctttttgaaaacattgtcaaaggagaaaaatttaaaaataataaaaaacaatgaagcatgcctacaagatctagaaaataacctcaaaagggcaaatctaagggccgggtgtggcggctcacacctgtaatcccagcactttgggaggccgagacgggcggatcatgggttcaggagattgagaccatcctggctaacatggtgaaaccccgtctctactaaaaatacaaaaaattagccaggcatggtggtgggcacctgtagtcccagctacctgggaggctgaggcagragaatggcgtgaaaccgggaggtggagcttgcagtgagccaagatcatgccactgcactccagcctgggtgacagagtgagattctgtctcaaaaaaaaaaaaaaaaaggcaaatctaaaagctattggccttaaagagaagtcagagagaaatataggggtagagaatttattgaaagagataataacaagatcttctcaaatctaaagaaaagtatcaatattcaagtacaagaaggtaatagaacatgaatcagatttaacctaaagaaaaccacctcaaggcatttaataatcaaaactcccaaaggtcaaggataataaaaggatcctaaaagcagcaagagaa

SEQ ID NO: 770628 - DNA, 562 bp, Homo sapiens
atgattgtctatgtagaaaaaagatggcgcaaaaaaaaaactctccacaaagccctggaactactaagtgattatagcaaggttgcagaatgcaaagttaatgaaaaattcaatcactttcccatttactgacaataaacaagtggaatttcaactaaaacaatgcaatatcatttactttaggacccctaaaaatgaaatacttcgttagaaatctaaaaaaatatgttcaagacctatatgaggaagactagaaacctctgatgaaaaaaacaagaccaactgaataaatggagagacatttcatgttcatggataggagaactcaacattgtcaagatgtcagttctttacaacttgatctataaattcaacataatcccaatcaaaatccaaataagttgttttgtggatatccaacamacttattctaaagtttatatggagaggcaaaagccccagaattaccaacataatattgaaggagagcaaatttggagaactgacattatgtaagtttaagacctactataagctacagtaaccaagacagtgtggtatt

SEQ ID NO: 770629 - DNA, 342 bp, Homo sapiens
agactctgtctcaaaaaaaaaaaaaaagcccaccttagaataattgtgtttgttgttatatgtcttataaaacaaattgtgtacagaatgatgtaataaccctttcataagtataaacttactgacacttttttttataaaatcacaaattcaaagacctgatactactacaactaataaatgatgaaatttcttcagcgcttttyggttagaataatattatattatatccctttaaaatactactaaaagtggactccagattataataagactctgatcaagataaaatacacaaagtttcaactgttttctttgctgtataagaaaactgtggttcat

SEQ ID NO: 770630 - DNA, 558 bp, Homo sapiens
gcaacttaaaacaacaatgagataccactacacacctattagaatggccaaaatccacaactctgacaacaccaaatgctgaatctgtattagtcagggttttgcagagaaacagaaccaatagatataaaagaagatttactatatggacttggctcacacgattatggaggctgagaagtccctcctctgtcatctgcaggctggagactcaggaaagctggtggtgtaatttactctgagtttgaaggcctgagaacaaggggaactattgatgtaaatcccagtctgaaaatgatatgagatgtcctagatgcagcagtgaggaaggtaaaaaagaggaggcagggagcaaattcctccctyctccacctttgttctgtttaggcccttaatggattgattgattgctgttgtggatgacagccacaatggggagggcaatcaactaaatccatggatagtcaaatggtaatctcatctggaaacaccctgacagacacactcagaaacaatgtttcatccaggtgcctctaaacccactcaaattgacacata

SEQ ID NO: 770631 - DNA, 612 bp, Homo sapiens
atatagtagatgtttatcaaaatgtttttagatgcagaattactgtaacagtttgcctgtctaaattgccaagctttttgataaagctggcagtgtgaatgacaagccgcaaacccaaggttagactgcagagtcggtttctctttggctttctctccttttaagcrtccctttcatgtgtagccaagtgaaagtctccaagtgaaatgtaagctctgtggatccttgggggccttggcctgatgagaggatacagaagaaaagcagcagtttggaaagcctgcagaaggcttggagggcagagggcccagtgatgacatgactctcagacctttcgaaggagatgaatgagagggcagtgcctccatgggctccagacatattttatccacagagtagtcctaggctatcaaaccaattgttttggctttatctttcagatgttgcaaaaggaaaatgtgttcttttattgcttttccaagtcgtttaaccgtttatccttaatcatctgcagtctgtgtgggaataagtctttcaaagatcactgaactttgcttgatttaaaatcagagtagaattcattttatttaatgtgggaagccttctttttag

SEQ ID NO: 770632 - DNA, 550 bp, Homo sapiens
  misc_feature 1, 2, 3, 4, 5, 6, 7, 8, 9, 10, 11: n = A,T,C or G
nnnnnnnnnnncagaagatgtttttgtcacaagatagaatctctgggaaaaaaaaaacttggcttaaaatctaagtgccataaagagagggatattgtctttcttgctaccatatccccagtgcccagaatagtgcctggtacataataagtgctccacaaataactgttaaagatgtgaagaaaggaatacaatttgaatcaacaggtaaaaacccaagagatgtttcagattgctggagaatctcacgcagagagactggaatgacrtggactaggttaagcccaagattgggcacaaaaggactgagggagaagaaactccacagtgcagggaagaaagcaaatcaactggaccacaaaccaaacagatgtgtccatcattattcattcagcaaacatttattgaatgcttattatgtgctaggcactattctaattgctaagatacagtagtgaatgacattgacaaaatcccttgtccttacagcttacattacattacatgggagacaggcaataaataagatatatgaatgaaacatgtatta

SEQ ID NO: 770633 - DNA, 612 bp, Homo sapiens
gtagcctgagtatatagtgtttataaagcctacaatagtgtatagtgtttataaagcctgcaatagtgtatagtaatgtcctacgccttcatattcacccaccactcactcaaagcaactttcaatcttagaagcgccattcatgattagtgccctaaacgggtgtaccattttaaatcttttatgscatatttttactgtaccttttctatgtttagatacacaaattcttatcattgtgttacagttgcccacagtattcaaaacagtaacatgctgtacaggtttgtggcctaggagcaataggcaataccatatagtctagatgtgtgataggctattccatctaggtttatgttaagtacactctatgatgtttccacaatgatgaaattggctcaggacacctttcttgggaccagtctctgttgttatgcaacacatgacgtacatctccttccctagcatgcctctttgtatagtacccttagtcagatccatcccaagttagacattgttgaggctgagcaaatgttaaaaatggaaaggatgcaataaaaccgttcctgcattgactttgcaatgtattagatcaatctacagaatgaaagt

SEQ ID NO: 770634 - DNA, 615 bp, Homo sapiens
ttctgtttcaacaaggtatcaaagagaaggtaatctccaaatagggatattgtctcttattcatcgaatctaatagtgctggtccataagcaagcacccaataaatacatgttaaatgaatgaactattataatttgaatcaattatgtatattatgtatcttttggctaaaacaaaatgctctatttttaaaggtcaacttttagtgattytccccagagtatggttttctttgtctcttattcaacatgaaacttgaaggttataagaggcagtataatatgtaggtccaaacattgacattatatcataagagacagatgatgggcattccgaactcataaatttttctattatttgaaagtatgaaagcctttttctcatttatatttctgatgctgtatctgaaataaatttttttcctagttcaggtaatagtagataacagggaccaatctcagggatataattaagactgctttggttttaccctgattccaactgttcagaacaaaatataatttacttctctgaaaaactaatgaaatttaggtgagttttccttctaaaatatgtaggatattatcttctgttcataagcccatccacttagcc

SEQ ID NO: 770635 - DNA, 599 bp, Homo sapiens
tactatacagcaatacaaagaaattaactactgatatatgcacaacatggatgaatctcaaaaaacatcatgctaactgaaagaagacaggcataaaaagactacatattgtatgattccattaatataaaatttctagaaaagcaaaacagagacagaatcagtgattgcctggagccggcagtggaagcagaggctgactataaagaggcccaaggaaactttttgtactcgtgagtgttctaaagctggaatgtagtggcagttacataactgtatacacttactaaactccttgaattgcatactttaaraagttgaattttattatatatagattgtacctcaatgaatttgttttaaaagaaaaatcactgaaagaaaaaagttgtagtatgaatgtaacttctattcacttttgtgtatccctggggaaaaaaaaccacacacgaccatagacacctgccgcatttaaaggtttgacatttccttcagtatctttcagagcaagtttagtcttcatctctcaatcacagaaactttgtgagaatctttaaaaattcttggggtaaaagtaaaatgcaacatgttccataaga

SEQ ID NO: 770636 - DNA, 600 bp, Homo sapiens
gaaagtgaaaagacaatccatagaatgggagaaaatatttgcaaatcatatatttggtaagagtctactatgcagattatataagggactcttacaactcaagaataagaagataaatagtctaatgaaaaactgggcaaaggatttgaatagacattcctcccaagaagatatctgaatggccaaaaggcacgtgaaaatatgttaacattagtagtcatggagaaatgcaaatcacaccacctcacgtgagataccacttcacaaccactagcaaaaagacagacaataacaagtattggttaagatatgtaaaaactgtaaccctcaggcattactcttgggaatgtaaaatggtgcacattctttacattgagttaccrtgtgacccagcaattccactcttggttatatgtatatccaagataattggaaacatatccatacaaaaacatattcattaatgtttatagcagcattagtcatagtagccaaaaagtagaaacaacccaaatgcctaccaaataattaataatggattaacacaatatggtgtatccatatgctgaagattattcagccataaacagaagtgaaata

SEQ ID NO: 770637 - DNA, 569 bp, Homo sapiens
aaaaaatttatctgatgcaaaaataaataataataagatatatcaaattattattgtagatatttcaggtgtacaacttgacgatttgctctattcattgggaaacgaccatcagaatcaatataattaacatttctattacctaagataaataccttttttatttgtgtgataacttaraatctattctattgacacattttaagtataccacacagtattgttacctctagtcaccttgctatatattagatcccagaactcacagattttggatatttgatcatcagttgatgtactccttgacccacatctgaatcaactatttttggtttatttcagtaagtgcaatggatctatgaatttataatttaatagatttatatgatcaatctattaaacttatcatttatatgatgactgagtttcttgctctcagtagaataacaaaaaaaattgtgtacgttttcgtttgcatacaatatcttcagagcaacctctaaattgtaagaaataaattctactaatgaaaacggtatacatacttgctgaaaaaaagataagacatg

SEQ ID NO: 770638 - DNA, 606 bp, Homo sapiens
acaaaagatttatgagacaatggattgtttctgatccatctttttataatcagttgaaaataactaaaggattaaacaatttaatagaatgtgaatatctgtaatgaaaatggtaataaataagaaaattcattgttataatattatgtatatataacttaattagcataatagatgtgttatactgtatcactcttcttttctarcgctttgttgcaatagtttgaaactggtaaaaagtaaggactccagaactctgttgtctaagttccgccccccgtccatcacttaagagctataagaactcagtcatgttactcagcctctgtgttttaggtgtaaatggaggatatattggcaataactacttcacaatgttttatgaaaattatctctctgtgatctcaacacattctgctcaaagaaaaacttgttcatgtccaaatttagctatttcctccaagaatgttcttctggacctaaagtgtgacctccaaagctcagttaagtgtactcctctctgtggtcatcacaatatcatttatcttataaggcatttatcagattaaattgcaattccctagcaaactgagaggttgaggaaag

SEQ ID NO: 770639 - DNA, 608 bp, Homo sapiens
ctaaaattggagaggaggatccctttacgtatgccagtcttacccaccagtgttctggggattaaaggtggctactttgactgatatcaaatgatattgtttatatactatgagtcatgctggaattaatgaaatattcatagataacttgttaatagtgcagagtctatctggacacaatgtttattcaagtgataaggaaattgatctgatcaacataagagttgtaagatattcacagttatactcttttttttttttttttttttttttttgagacggagtctcgctttgtcgcccaggctggagtgcagtggcgcgatctctgctyactgcaagctccgccttccaggttcacgccattctcctgcctcagcctctagagtagctgggactacaggcgcccgccactacgcccggctaattttttgtattttttagtagagacggggtttcactgtgttagccaggatggtctcgatctcctgacctcgtgatccgcccgcctcggcctcccagagtgctgtgattacaggcgtgaaccaccgtgcccaacccacagagttgtactcttattagaacacaaatctattcatctgatcagctta

SEQ ID NO: 770640 - DNA, 572 bp, Homo sapiens
agcatcaagctatcagggatccaccccataagtcaaacacctcccaccatacctcaccttcagcattggggattaaaattcaacatgagactcgggcaggaacaaataaccaagttgtatttagatatttatccacccctgccccctcccaaatatcatgtccttctcacattgtaaaatataatcatgccttcccaacwgtcccctaaagtcttaactcatttcagaattaactcaaaagtccaaagtctcatctgagataaggcaagtcccttccacctatgtgtctgtaaaatcagaaacaagttatttacttctaagatacaatgaaagtatcagaactgggtaaacactacaattccaaaagggagaaatcagccaaatgaaaggggctacaatccccatgcaaattcaaaacccagcaaggaagtcattaaatcttaaagctccaaaataatctcctttgactccagggtacaatgctgtaagggttggacttccaaggtctgggaaaactccactgctgtagctttaccgggtttatccccagaggttgctctcatgggctggag

SEQ ID NO: 770641 - DNA, 551 bp, Homo sapiens
gaactaatttacactcccaccgagagtcaagacccatcgatgtgctgtattcaggagacccacctcatgtgcaaagacacacataggctcaaaataaagggatggaggaatatttaccaagcaaatggaaagcaaaagaaaagcaggggttgcaatcctagtctctgataaaacagactttaaaccaaaaaagatgaaaagacacaaagatgggctttacaaaatggtaaagggatcaatgcaacaagaagagctaactatcctaaatatatatgcacccaatacaggagcactcagattcataaagcaagtttttagagacctacaaagagayttagactcccacacgataatagcaggagagtttaacaccctactgtcaatattagacagatcaatgagacagaaaattaacaaggacattcagggcttgaactcagctctggaccaagaggacctaattgacatctacagaactctccacctcaaatccacataatatacattcttctcagcaccacattgcacttattctaaaattgaccacctaa

SEQ ID NO: 770642 - DNA, 621 bp, Homo sapiens
attcttcctacacatcctacagaatcgtgagccaattaactttcttttctttataaattacccaacataaggtatttatttatagcaatgcaagaacagcctaaaacaaggtatcataacatttgtgcatcctggaaatttgagccaacatagctgacctggaatgtcagggagatgtacaatatacttggcatgaaattattttattggatcaagccattgagatatttgggatgtctattaatgcagcaaaacccatcctatwctacctatttcttctacacctgtgaaatatttatggtggtttttagaatatatttggatatacttgaatgttccctatcaaataatacatatttaagtattccaatgggtgaaatttggaaatctctgagtattatggatttccaaaccaatatagttatttgaagtatgtagaataatatatgagcatggcagtaatatgctaaataatttaggaagtctctcatagtgtttaaaatgcacatacaaagtatttttatcttcaaatgtttagtttcatgaatatactagtagcattacacgaaagaaaatatagtgattagataagacgtagttattcattttttttcttattta

SEQ ID NO: 770643 - DNA, 618 bp, Homo sapiens
aggctgctctcgtacataccagctgaatattagccctctaaacaacctttaacaaaatcaacaaaatattatgtgaacacagaataatgtaaaccccctctcagcacaaaagaaaaaaagtcagatttgaaatgawtgttttccttcaagcaaggaattagcattagttaatagaaaactgatgctaacttctttaataataacattttaggttggacaatgtgaaatggccatttttaaagcaaaagatggttaaaaactggcaatttcaaatgattcaacctctatattcttaagtatggtactgtaaattgccagtatatatacaatattccaacctgtagagctaaacacagaacctgtatattaactaatatacagctaaacacagaacctgtattttaactaatgggcttgaaactagtcaataagacaaaaacttgattttactgaattatataagtcagttgatggtgctatgttttcctggaatttgatataaaaattgatttagagcccactaaaaatgtaattatttatgtttgtcaaaatttgtgaaatatgcttagatgattatttaaagcccaaacctgaatgagagaaaatctaactaaactt

SEQ ID NO: 770644 - DNA, 659 bp, Homo sapiens
aaaccagcaatgttcacctccctaaactatcactcaccataaagagattccataacgctttctggttaccatccaacttggtgtcattgggtttggatgcaaaccagagataaattaacctgtttgttcaaaacagttttttcagggtgctttccagaatttatttctggtcagtgttgctttccctttcacacttccacaaacactgagcgtgttcccaggaatgtattaaggattttaatttacattatctggtcatttttaaccatattctcttcttctccgtcatttgatcttttgttayatagcactgattctaaaagtttagtgtgcatgaaaactactgaggagcttgtaaagatttacattcctaggttgtacccccaaagtatgattcaggaaatctggaatggggcccaggaatctatagacttagcaatgtcccaagtgattctaagtcagaggttctgtgggatgaccctgtgagaaacaatgcaagagtgaatgaacgggggaggaacctctttatccaaagcaaaagggacctggtagtcaatgttttgcttcaatgaagaaatgcctaaaactatataccttttctgaaacagaaagcatctttcatggtctaataaccataaacttttagaattcctacccag

SEQ ID NO: 770645 - DNA, 591 bp, Homo sapiens
tgaaaactactgaggagcttgtaaagatttacattcctaggttgtacccccaaagtatgattcaggaaatctggaatggggcccaggaatctatagacttagcaatgtcccaagtgattctaagtcagaggttctgtgggatgaccctgtgagaaacaatgcaagagtgaatgaacgggggaggaacctctttatccaaagcaaaagggacctggtagtcaatgttttgcttcaatgaagaaatgcctaaaactatataccttttctgaaacagaaagcatctttcatggtctaataaycataaacttttagaattcctacccaggcctttgtctcaaattctcctattactaaccctattccctgccatgccctccctactctgcgcccggcttttttggcctctcccgactgagggcattcacccaggcctgacccttggctttgtgttcttagcaaatactttactcttaaaggatgacccgttccccttacttcaactattatttgttcatttactcataacaactcataacagccaattatgagcacccgctgagttgtagatgcaggagctacaacatgaacagt

SEQ ID NO: 770646 - DNA, 652 bp, Homo sapiens
aaccgcctcgctgcaggtgacttcttctcctctaaatagtccaaaaaaggttccaactgcccgtgcagcagcccaactaaaggtctttttcctttactccccctgatctggctccttctttgaggaaaagatcgtagaacatgctttcaaattactttcatgttaatattataccctgccattcatacgacagaaacgtgtaggcacaacataggttatgctatttcctttaaaattcacacagcgataatctacagagggcagattatgtcctgggtttaggtgaatagggaggaaaatacttagctggctcagtgaagattaagatctgtctttttcagtactagaaacacaggaaggaaggaaactcccttttttattttaaggatttccctttttgaaataaggagattaccattaaggtttctcttccccagacctccaagacccaycaaaatttctggaaattgtgagttgtcacactattctgcttttgcttattcaaagaaaactcatttaaggcctctttgggtgttgttttcttagaatgcaaaatgaatgattctttgaacaactcaagaaacttagatcagaatgatactcatgtcttaaaattttagctttaattttaaatatgggggtatgtgtgcaa

SEQ ID NO: 770647 - DNA, 600 bp, Homo sapiens
atgggtcgagtatcattattctgcatattgctagccagttaccccaacaccatttattgaatagggagtccttcccccattgcttgtttttgtcagccttgcaatatcaggtggttttaagtgtaaggctttattctgggttttctattctgttccattggtctatatgtctgcttktgtaccagtaccatgctgttttggataatatagccttatagtttgaagcctctggctttgccttttgcttagatttgcttaggctattgaggccctcttttggtttcatatgacttctagaatacttttttctaattctgtgaagaatgacattggtagtttgatagaaatagcactgaatctgtcaattgctttgggcagtatggccatttgaatgatactgattcttccaatccatgagcatggaatgtttttccatttaattgtgttatctctgatttctttctgcagtgttttatagttcttgtagagatctttcacatcctttgttagctgtattcctagttatttcattttccttgtcgctaccataaatgggattctgttcttgatttaactctcagcctggacattattggtgta

SEQ ID NO: 770648 - DNA, 562 bp, Homo sapiens
acttgatcctatttgaggagaagcaaagatatctgtgactcatgaagagcatgaaggtggtggagggacttgataattaggaaatcaaaatgggcaagaataatgtgtgcctacaaatgggacatgaatttgaaggaaatttaagttaaatttgctgccacacatgatgatcaggttcagtaataaagaattgtatttaaatcttgattcattaaacttttttgagagtcctaaacaatttttattaccaacacatagagacttctttctagagaaaaatcaagtaccaggtgccaaataacagatttacatgagaatttttagggacaacacattgtaatttgtagcgcaatcatagccaatttgaaccaaaaaaaaaaaaaatcgtgtatrcatttatgttgtttcttactatttacctttcaatcctttgcactgactccaatgaattgacatcagaaatctgtgctggagtcaacaatgaaaggggatgtcataatatatattggagatgggaggaattcaggtttgtgaaattcagtttcagaattattcatgggaa

SEQ ID NO: 770649 - DNA, 634 bp, Homo sapiens
ctttaaccactccagcagcggttctatggacagagctttgatctctccctgaaatggagctcctggtgggaggggcagctgccacctttgcagtttggtcaactcagccattccaacctgctggctttggagaatacaggtggtctggaggaggaaggatcccccacagtgcagcacacctgctctaccccaaagcagccagactgcttttttggatgggtccctgatcccatgcctcctgactgggtgagaatgcscaacaggggtctccagccacctcttgcaggtatgtgcgggctggatacaggtcagtatccccctgggatggagcttccaaaggaaggagctggctgccatctttgctgtttctcagccttcactggtaatatctccttcagagtctatgaggaacttaaatttacaagaaaaacacaaccccattaaaaagtgggcagaggatctgaacagacacttcccaaaagagacatgcatgcagtcaacaaaaatatgaaaaaaaaaaactcaacatcactgatcattaaagaaatgcaaacaaaaccacaatgagataccatctcatgccagtcagaatggctactattaaaaagccaaaaaataacatgctgggaaggtt

SEQ ID NO: 770650 - DNA, 626 bp, Homo sapiens
tatgagagaacacatgaatgaacgctctttagcagacatggactccaacctctctccaggctccaggtcagttaggaatataggacaatctgagagagaacaaacatttccaactacctttagtgcaagccaataaaacctggaggtttcctctggagctagctctccttgctacttactttcccctttaactcatatttgaaggccaagatctgattaaaatatttgcatatcatatagcaatcaacaaatataattagaaagtttttgcaacaattgatttgttaacataatgggattctgtttgtactattttgtctttggaattccaatgataaactattctgctgaagttagaaaattcctccccayatataccatgtactgatctgccctttccctaagtttaccaaaggaagagtataaagaagaaaggatctgatgacttcatcccatacctagtagactgtcaatctcctccaagtttccattatgctgtctctccacataaagtctcagtaactggaaatacggagccaggcacagtggagataccaatctgagaaggaaaaataaatttctagaccacacttcataggtgtattactccacatacatagggagat

SEQ ID NO: 770651 - DNA, 626 bp, Homo sapiens
tatgagagaacacatgaatgaacgctctttagcagacatggactccaacctctctccaggctccaggtcagttaggaatataggacaatctgagagagaacaaacatttccaactacctttagtgcaagccaataaaacctggaggtttcctctggagctagctctccttgctacttactttcccctttaactcatatttgaaggccaagatctgattaaaatatttgcatatcatatagcaatcaacaaatataattagaaagtttttgcaacaattgatttgttaacataatgggattctgtttgtactattttgtctttggaattccaatgataaactattctgctgaagttagaaaattcctccccatatataccatgtactgatctgccctttccctaagtttaccaaaggaagagtataaagaagaaaggatctgatgacttcatcccatacctagtagacygtcaatctcctccaagtttccattatgctgtctctccacataaagtctcagtaactggaaatacggagccaggcacagtggagataccaatctgagaaggaaaaataaatttctagaccacacttcataggtgtattactccacatacatagggagat

SEQ ID NO: 770652 - DNA, 535 bp, Homo sapiens
cctttatgggaaacagtatggagatttcttaaagacctaaaaatagaattaacctttgatctagcaatcccattactatgtatacatccaaaaggaaagaaatcattatatcaaaaacaaaaacaaaaaaaaccactcgtatgtttactgcagcactagtcacaatagcaatgatatggaattaaccaaagtgtccatcaatggaggactggataacaaaaatgtgtatwtatctacatctatatctcaccttgaatactacttagccataacaaagaatgaaataatgtcttttgcagcaagatggatagaactggaggccacgtgtataagtgaaataactcagaaacagaaattcaagtatcacatgttctcactttaagtgggagctaaacaatgtgtatgcatgagcatacagaatagaatgacactggtgactataaaaagtgtgagggtgggaggagatgagggttggaaaattacctattgggtacaatattcactatttgggtgatgatgggtacactaaaagccc

SEQ ID NO: 770653 - DNA, 535 bp, Homo sapiens
cctttatgggaaacagtatggagatttcttaaagacctaaaaatagaattaacctttgatctagcaatcccattactatgtatacatccaaaaggaaagaaatcattatatcaaaaacaaaaacaaaaaaaaccactcgtatgtttactgcagcactagtcacaatagcaatgatatggaattaaccaaagtgtccatcaatggaggactggataacaaaaatgtgtatatatctacatctatatctcaccttgaatactacttagccataacaaagaatgaaataatgtcttttgcagcaagatggatagaactggaggccacgtstataagtgaaataactcagaaacagaaattcaagtatcacatgttctcactttaagtgggagctaaacaatgtgtatgcatgagcatacagaatagaatgacactggtgactataaaaagtgtgagggtgggaggagatgagggttggaaaattacctattgggtacaatattcactatttgggtgatgatgggtacactaaaagccc

SEQ ID NO: 770654 - DNA, 581 bp, Homo sapiens
tcctcttgctggtgagcagtgaggacttcctccaacagcacccagcaaagtccttcaggagcaatgcttatctatgctctccgacggctcagtgcctatccagcaacacggtccagggcacagggtaactaactacacctaaccactcctctttctatattcagggacacttccaatccttctgagatggaggtggggtcttgatctgagcgcccaagcttctcatgtaacactgtaaacttttctctttagaattmttctccccagcctctgacttgaacacagacaggtgtaagatttagtccagtcacctcaacaggtgttgttgattggagcgtccctttgcacataatgggggctgtaaatatgactacctgctcacaggtggactgagccttaggaaagtaagtgctatgaaagggaggggagataaaggttacattttattgagcatctactatggcccatccttgcgctaggtgcttttgcatgcatatctcattaaatacccacctcagctcctacaggcatgtgtaagaaacaccgaggctcagaaggtggaagtagcaggttcaaagtca

SEQ ID NO: 770655 - DNA, 584 bp, Homo sapiens
tgttcactctgttcttcactgtcttgttcttttgctgcgcagaagctctttagtttaattagatcccatttaaaatttttgcttttgttgtaattgcttttggcatctttgtcaggaaatgtttgcccattcttatgtccagaatggtattgcctaagttgtcttccagggtttttatagctttgcaattaagtctttaatccatcttgacttaatttttgtatatggtatgaggaagggtccagtttcgatcttcagcatatggctaaccagttttcccagcaccatttattgaatagggagttctttccccattgcttgtttctgcctactttgtcaaagatcagmtagttgtaggtgtgcagccttatttccgggttctctgttctgttccattggtctatgtgtctgtttttgtaccagcaccatgctgttttggttactgtagccctgtatttatagtttgaagtcgggtagcatgaggcctccagctttgttctttttgcttagtgttgccttggctattcgggctcttttggttccatatgaattttaaaatagtttttttctagttctgtgaagaa

SEQ ID NO: 770656 - DNA, 513 bp, Homo sapiens
ttttactttttctaaaacaagccaacagtttgcactaggaaaatccattgtggcaaataatgacctctatgatcccttcccctctccaaaaaaaaaaaattggcgagggtaaccatatgtcctggtttgctcagtttatacttgtcgtagtgtgattatttatagcgatcccttcaccctcagaagtgacctagtttggatgataaattatattgtcatcctagccccaggggattcctcagcagctgggttatctgcctacacttgccacctctctactccccctgacaatttgctscctctccaacaaaggattcagccacattgctttcaccacgcttgactcaaaaggttctgcgtgtgtccagcctcttgtgatttcacattagcccagtaggcatgcacttaagtgtgtccactttcccattcctttctcctccatcttgccgatggttgtcagtggcattggcagggcacttttcatttgattcagaaatgcttttgtctttcaga

SEQ ID NO: 770657 - DNA, 599 bp, Homo sapiens
aaaaaccaaatacatatttcttcttatatcacaatagaatatgtggatattatttggcaataaattttatagggaataggaagagtcagaaactcatttctatttccagagttccatctcattgcaatcacaatgatcaaagtaaggttaggctcagagaggaaaggcatccttaactgtgcagcctataaaacactcaccggtttttggagtcgtccagcaatgtataagttattccagttgaggagatcttcaatcagaacgttagtgctaataactccatatttgataagctgaaggaaaaaagaaatggcacaaaamggagtaaaataccatgttattgcttatacaagtataaaatataaggaaacagataaaattcttgaccagagcagtaccttgattccaaagccactcaaaacacctgacttgtgaaaacacacatctccaccaaaacttttgagaggttaagtgtccaagactgatttagcccctagggtatgtaaggggaggttgcaactgtcttcacaagattataacagagaagtctagcatggctgactccatcttgctgccagcctcacaggctggctatccaa

SEQ ID NO: 770658 - DNA, 627 bp, Homo sapiens
gtgaaatgggaactcagaaagaaggttgaggggattaattaggtttctatctataacatatttgagggctgaatgcagtagctcacacctgtaatcccaacactttgggaggccaagacagaaggattatttgagcccaggagttcaaggccagcctgagcaacaaagcaagtccccatctctacaaaaaaaaaatttttttttaaaattagccaggcatgatggtgcatgcctatagtaycagctgctcgggaggctgaggcgagagattatttaaaccaggaatttgaggctgcagtgtactatgattgcaccactgcactccagcctgggcaacagagcaagactctctttctctctctcaatctctctctctctatctatctatatatataaaaataaacagatacacgtatatacatgtaccctacatacatatgtatacatatgtatatatacgtaagtaaaatttaaatacacatacatacatatgtatgtatatatgcatatatacacacatacatatatacataatgcttgaatatatgtataaataaaatttaaaaatgaacatatcttacacttaagtgctctgtcaatattcaactgctgttattcattattatt

SEQ ID NO: 770659 - DNA, 652 bp, Homo sapiens
aggggcgcgagcaggcgtggggccaggactgtaggggcacgggcaggcatggggctagactgcaggactgcgggctggggagcctggatgggggcctcgggatggggcagcagctgaggggctggggtgggcgtgcagcaggccggtaatccccccaaacccgctgtgagtgaggcgggctcctaccatgacatagtaatgccggaacagcttcagcttggccaggttcactgccactgagggtgggcacagagagggcggtcaggggagactgagggtgggagggaggggagggggctgggggctgggagaggtgacaaacagaacatctgagggagtgtccaggagcagcaagtctcgaggggacattaggtggggcagaaaggcggaagggggagatcagagaggagggaagggccacccaacagggcagagaggccagataaaggcattcgggggaaagagaggmcagactggggcatccagggaggcagaggcctgggggctgggcagagaggccaggaggggcatccaaggggcagaaagaagggcccggaggaggaatggggccatgagcagagggcctgcaggcgcagggcctcacccttcccgtctgtgccagacgcatcctggagatgccggatggacctgg

SEQ ID NO: 770660 - DNA, 561 bp, Homo sapiens
tcaagttctggaaattatcattatcattatgatagtaatatcatcatcaccaccgtcaccattctcctcatcaccattcttatcatcatcatcatcatcatcattatcaccaccatcaccatcatcgttaccattataaycatcaccaccatcattaccacaatagtattcatgaccatgagcatcaccaccatcatcatcttagctccagctgggaaaccaagagcattcaccaacccatcaatttttgtattttgggttgtctttgtttctgtttttgttttgagatagagtctccctctgtcatccaggctggagtgcagtggcgtgatcttggctcactgcaacctccacctcccaggttcaagtgcctcagcctcccgaacagctgggattacaggcgcccaccaccatgccctgctaatttttgtattttctttttagtagagacagggtttcaccatgttggccaggctggtcttgaactccttacctcaagtaatctgcctgccttggcctcccaaagtgctaggatcacaggtgtgaaccactgcacccggt

SEQ ID NO: 770661 - DNA, 600 bp, Homo sapiens
tttcaagttctggaaattatcattatcattatgatagtaatatcatcatcaccaccgtcaccattctcctcatcaccattcttatcatcatcatcatcatcatcattatcaccaccatcaccatcatcgttaccattataaccatcaccaccatcattaccacaatagtattcatgaccatgagcatcaccaccatcatcatcttagctccagctgggaaaccaagagcattcaccaacccatcaatttttgtattttgggttgtctttgtttctgtttttgttttgagatagagtctccctctgtcatccaggctggagtgcagtggcgtgatcttggctcactgcaacctccacctcccaggttcaagtgcctcagcctcycgaacagctgggattacaggcgcccaccaccatgccctgctaatttttgtattttctttttagtagagacagggtttcaccatgttggccaggctggtcttgaactccttacctcaagtaatctgcctgccttggcctcccaaagtgctaggatcacaggtgtgaaccactgcacccggtcaatttttgaaactggaaaatacctcagatattaatc

SEQ ID NO: 770662 - DNA, 514 bp, Homo sapiens
ctccatccggaggaccgaaggggatcccgggacgagaccactccgggcccggaaacggggggcgccggaccactccaccgcctcggggacgggggagggcggacgagaccactccaagccagggggcttctccgagacaaagttgcgccaccgaccccagaccctcgcgcggcgggcctcaccgtcagcgccagcyggtggatgcgcccggagcagccacccaacagcagcaccagaagtagccgctgcccccactccgcggggctcccgcggccgagccccctcctctcgctcactgccatctctggagccacctcctccccgactccgcctctggcgcccaagcccgcccaccgatgagccaatcgccgcacggcggggcccggcctttcggagtttccagtccgccaaccaatcagcaattgcctctccgcaagcccgcctgcttgcgtcaccgacggacagcaccggttccgaatgggagagccgataacgcttaacccccagctcactc

SEQ ID NO: 770663 - DNA, 568 bp, Homo sapiens
tgtgctccctctgggggctccaaaggagaatctttctctgcctattcctgcttctgggggctccagatgatccaggacaggcgagcccctagattggggcttagccctggagggttcttggcttcacccaggaaagaattcaagggcaagctggtggtgttagcaagttttattgaagcaaccatgcagagcagcagcagaggtactgttccttgcagagcagggctaccccattggcagtgagcccagagtagcagctcagaggcagtgctgcaggcatatttatcccgttttaattatatgcaaatcaaggggtggattatgcagagatttctagaaayaaagtggtaacttctgagttgtcaggtctttgccatggaagggggcatcagcttctgggtgttgccatggcaatggtaaactgacatagcactggtggccatgttttatggagaggcacttttgcctcttccctgtttcagctagtcctcaatctggtccagtgtctgagccccacctccagagtcgagtcctgcctcctatttcacatgcatccttggattgtgac

SEQ ID NO: 770664 - DNA, 512 bp, Homo sapiens
gtaatgacatacactttttaatgcactaatattaaataatgctgaaattaagttatgcttatctaatgtaagatacattgcagtttcagatactaaaatttgaacaagtagacaaacgtttctcttgaaatcagtgaaatctctatctaaatcccttaraatagggttagcacatagtattccaggaaagcaaagctctaattattattgttggattgtacccagattatgttactatttaagtttctactttatgtaaagcactttttcatatggatattctttatcctaacaatagtccatttgttacaccagaagtaacaccagatacttctgaataataatggcagttaaatctgtggttttgtggaattttgcttatatacgtcactgttgattcaaacaatatagcagctctaagaacatctgtgcctccagcctctgcatttcaaccatgagagcgtcatttctctccatgatgcttaaattaaaaatctaaatatttggtaaat

SEQ ID NO: 770665 - DNA, 610 bp, Homo sapiens
aatagaaaatccaaaaatttgtacatgaattaaattaataaacaaattcaatgagtttactagatacaaaattcattgtccaaaggaattgtatttctttacaccagcaataatgttaaaaataataatttataagattaagttcatatttcatgaaaagtgtaaaatttaagaataaatttaaaaatagtktacgaagtctttatatacaataatataaaacttttgtacaataataacatcaaaatgaggggtgatatgtactacattcataggctaaatgtctcacttttataataatgttaattctcaaacatatttatattatgcttgagtttgacaaaattatatacgtttgacaaaattccaataaattcccaatatattttgtggaacttataaactacacaataaaggccaaaacagtccttaagaaaaacaagttgagaagacttgacatatcatgaatgatttgaaatttacaaatttcagaatttttcccattgtaatataagcatgtaatactatcacatttccccaaatggctactttaagtgcatcctacaaattgtgatatattctgtttttgttttcatcttcgtcctctttg

SEQ ID NO: 770666 - DNA, 610 bp, Homo sapiens
aatagaaaatccaaaaatttgtacatgaattaaattaataaacaaattcaatgagtttactagatacaaaattcattgtccaaaggaattgtatttctttacaccagcaataatgttaaaaataataatttataagattaagttcatatttcatgaaaagtgtaaaatttaagaataaatttaaaaatagtgtacgaagtctttatatacaataatataaaacttttgtacaataataacatcaaaatgaggggtgatatgtactacattcataggctaaatgtctcacttttataataatgttaattctcaaacatatttatattatgcttgagtttgacaaaattatatacgtttgacaaaattccaataaattcccaatayattttgtggaacttataaactacacaataaaggccaaaacagtccttaagaaaaacaagttgagaagacttgacatatcatgaatgatttgaaatttacaaatttcagaatttttcccattgtaatataagcatgtaatactatcacatttccccaaatggctactttaagtgcatcctacaaattgtgatatattctgtttttgttttcatcttcgtcctctttg

SEQ ID NO: 770667 - DNA, 610 bp, Homo sapiens
aatagaaaatccaaaaatttgtacatgaattaaattaataaacaaattcaatgagtttactagatacaaaattcattgtccaaaggaattgtatttctttacaccagcaataatgttaaaaataataatttataagattaagttcatatttcatgaaaagtgtaaaatttaagaataaatttaaaaatagtgtacgaagtctttatatacaataatataaaacttttgtacaataataacatcaaaatgaggggtgatatgtactacattcataggctaaatgtctcacttttataataatgttaattctcaaacatatttatattatgcttgagtttgacaaaattatatacgtttgacaaaattccaataaattcccaatatattttgtggaacttataaactacacaataaaggccaaaacagtccttaaraaaaacaagttgagaagacttgacatatcatgaatgatttgaaatttacaaatttcagaatttttcccattgtaatataagcatgtaatactatcacatttccccaaatggctactttaagtgcatcctacaaattgtgatatattctgtttttgttttcatcttcgtcctctttg

SEQ ID NO: 770668 - DNA, 608 bp, Homo sapiens
atatggacttatctgatctacaagatgaaaagtattcaaaattggctttaaaaaatagtcaatttggttctggaaataaattgtgagaatttctgtatctatttctattatcttaaaaagtaggcacatatctaagtgttactaatattgaacatgtagactgattctggactccccactcaggctgcatgtcagagatttgcatagcaagtgaagtcactggtttcctgagaaatgtgggccctgcagagggcagaggagttcccacagccccactcacaggrtctcttgcagctattgttaaatggcacagtcatcttaaccatggcaagtgaattcaaggattaaattgtctacttttgactaaactaacttcacaaaaggttaagtgggttaaaaaatttcctacaaagaaataccaaatttagataatatgataattcaagaacaataaaatatcagagctacatttcttcaattagttgtatatactcttgtcaaccacgtagcaaagttgaaaacaatggcaaggagtcagccaaaaattctacattatcatcaggaaagcattttgaaacataggttatatccattgtcatcaatgtcaa

SEQ ID NO: 770669 - DNA, 528 bp, Homo sapiens
catctcaaaaaaagaaaccaaaacaacaacaacaacaaaaaacaaacaaacaaaaaaaggacaatgtacgctttgtaaactttaagtctgggagatggctaacattatgggggaagacttggccaagacagcccagaaaccacaaggtgaataayagcacccagaacagaaggtccaccatgaagataaggacttaatctatcaggaaggattaaatgtaaccgtcaagagtaggcttgatggaggagggtgaatctgaatggagccttgagctacagtggggtttacagcacaggcaaatcctggtgactgcatgctagatgaaaggaattggacaaatgaaataactgaggcaagagaggttgggcatgttcaaattcgtatctgtattgcatagatagcttaagaatgaagtagagccagaaaaaacatactaggctcagattacggaacatgtttaatgctaggctaagaactgtgttctattatatatgcaaagaggatccatgatcgctttttgagcagaaa

SEQ ID NO: 770670 - DNA, 624 bp, Homo sapiens
tatctgacagatatcagtgatggcttatcttcacttgtctttcaacccctctttattctctacccctctttatgcaccccaaaactgccaatatctctataaatagcatgactctggctttcctgggcttgaacttccatgtggatttggctgacggagatcaatgtaaggtgatgggatgctcagaagacagagagttgggggtaattttctcccactccttttctgcagtgggaactgcagtgatggcaacagtattctctccacgaaaacactccctgcctcctgctrtggtttcaatatttgtgtccctccaaaattcatgttgaaacttcatcctcagtgtgacaggattaagatgtgaggccttgaggaggtgattatatacccttataacagcactctaggggactagctagatcctgtttgcttttatattccttctgcaatgtgcggacacagcaagagtcgccatcttggaagcagaaagcaaccctctccagcccccagatctgctggcaccttgatcttggacccacaactgtgagaaatatgtttttctcaatagactacatagcctccatgtccatgttctgttaatgcagaacaaacagattaagacat

SEQ ID NO: 770671 - DNA, 634 bp, Homo sapiens
cacaaaccacttttgaccataatgacccattggtacatcctgtgctaaatttcacctgtattcctcctgattgcactcacgatgcaactcagggtcatatcaagcaaaacctgtttatctaatctgtctgactcaccctaaccttcctgccgcacgtctcagtttaacccatcataatcgtattgtcaaaataactgcctgtaatcccagcactttgggaggccaagrcagaaggatcacttgagcacaggggtttgagactagcctgggcaaaatggtgaaacactgactctataaaatatatacaaattagctgggtgtggtggtgcccacctgtagtcccagctactcaggagcatgaggtgagaggatgacttgagctaaggagttcaagcctgcagcgaaccctgatgacgccactgcactccagcctgggcaacagagtgagaccctgtctcaaaaaataaataaataagctgcgtgtggtggtgtgtgcctgtaggcccagctgcttgggaggatgagccattgagccttggaggtcaagaggtcaaggctgtactgagctgtgatcttgtcactgaattccagcctgggagacagagtccttgtcttaaaaagtaattataataaa

SEQ ID NO: 770672 - DNA, 678 bp, Homo sapiens
gcagaggcttctcggaacacgcggatctatgagtgcagtccccggggtagccaccagggaacgccataggctttcccgctgtgttcctccttgccttttccgtttgggccaagtagtttctattgaccatgacattacagatcagaagtgggtggggtcagaaaacacaccctgggagaagctggcaaaatgcccagaaccgccatcactaggcctggggttttcttctgtagtggaattctcgtgcttatgtagtacagggaggagcgcagcgcatttccgccaagacaggtgagactgcagttctgacctgcgggcctcgatgaattgctttagggcccctgggcgccggcagagccgatctcctacacaaagcaagcgtgttatgtctacgaccgaacggggacactaagaaagagccccaaaggccctgctttcatcmcaaagaacagcgcctgtctgcgtagtttctaccttgctctatgaggtgagaacaccttcaccgctggcacagaaatcctacaaactcctgtggggaccgcggttacaagcagacgctgtgtgaaaggtgactctgggggctagggaaaaacacgaagattttcacagagcgtgagaccccaagagactggagaccatggaccaaatttctgcgaacagtagccttatgtagaaaga

SEQ ID NO: 770673 - DNA, 619 bp, Homo sapiens
ttcaattacctccacctggtctctcctttgacaaatagggattatggggattatggggattacagttcaagatgagatctgggtggggacacgaagcctaaccatatcaggggagggggctcacaactgaatatttcagataattttaatatgtgctggtatccacaaacaagagccartgtggactcagcaggcaatgtcatgggccttctgtttcaaaaatgattcagatagacttttatgcttttacatgtgccatatgggagtggggcattctcatcttgttccttgttttaccctcagcatctacctttcatagcagtaactgatgatcatgaaatgtttgttgattgaatggctgaagtatagacagatgcagcttctgtccatgaaaggcatcctgcttgctccttgcactgtgtccagtgaaaactcttgtttctctgcgcagctgcaacacgtttcacatcacaaggagcacaaggcactggcttccatttccaccctgaagctcagcagccccatttgcgtcccatcagctgcctgctccggaatagaggagggaagggctgggcttcagagtttgctttttttttcttggttctgtgaatggaaaatg

SEQ ID NO: 770674 - DNA, 593 bp, Homo sapiens
atgggagactcagtggatccttatcaccttcatagaaaggtactcacctcccacgtcaagagaaaagccaacatgtttttcctccaatgcataaaaggaacttccatagggctggcaggagtcaggctgttcaagacaactggaaggagttgaataacatctatccagtgagtcctgcaagacttcaggctctactacctccagcagctccctgctgagcctggaaaaggaggaaaaagtaaagaataagccaggggaaatcagacacaacagagccccaactaggtttcatgggtagcatagggaagtggttaaaaaactaaaaggatagatccattaatgaggtaacaaattattgccttcatgttgggacagaacagggccaaatggaaaagaatgaaagagaaagacagatagacacacacacacacacacagagagagagagagagagagaacgagctcagtgaattstccaggtgacacactgatgagggagtaacaggacactctgagttagtgccctcaggacacacagcatacagggatcatgaaaagactgtgctcaataattttccataaaatgtgctcaag

SEQ ID NO: 770675 - DNA, 612 bp, Homo sapiens
cctgctgagcctggaaaagtaggaaaaagtaaagaataagccagggggaatcagaaaccacacagccccagctagatttcatggctaacataaggaactgtttaaaaagaaaaaggacagatccattaatgaggtaatgaattattgcctttaggttgggatagaccagggccaggtagaaaagaatgaaagagaaagacagggagagacagagacagagacagagagaaagtgacctagtgaattggccgggtgacacactgatgaaggagtaaaaggacactctgagttmgtgccctcatgacacacagcaaactgtgatcatgaaaagagtgagctcaatagttttccataaaatatgctcaaaattcgatgcagtggccatgagagtacagcttttgaagtatggtcaacctatggtacgttaggaaatgataaggggaggaagaaatggaaacctaaacatctactgcaatgaaaaccaacagcaatgacagtaggagtaattcagccttcgttgaaaacgtgacatcaaacacactctggtttccctgaatctgttgcctccaggtgttaacacagaactaaggatccacaattgctgaaagtcac

SEQ ID NO: 770676 - DNA, 656 bp, Homo sapiens
tggatccttatcaccttcatagaaaggtactcacctcccacgtcaagagaaaagccaacatgtttttcctccaatgcataaaaggaacttccatagggctggcaggagtcaggctgttcaagacaactggaaggagttgaataacatctatccagtgagtcctgcaagacttcaggctctactacctccagcagctccctgctgagcctggaaaaggaggaaaaagtaaagaataagccaggggaaatcagacacaacagagccccaactaggtttcatgggtagcatagggaagtggttaaaaaactaaaaggatagatccattaatgakgtaacaaattattgccttcatgttgggacagaacggggccaaatggaaaagaatgaaagagaaagacagatagacacacacacacacacacacacacacacacacacacacacacacacacacaaacacacacacacacagagaacgagctcagtgaattgtccagatgacacactgatgagggagtaacaggacactctgagttagtgccctcaggacacacagcatacagggatcatgaaaagactgagctcaataattttccataaaatgtgctcaaatttccatgcagtcgccatgagaatagagtttttgaagtctggtc

SEQ ID NO: 770677 - DNA, 575 bp, Homo sapiens
tgggatacattatagtgtactgatagaacaaatattggatatagcagcatctaataacttctggaggaaaaaatatttttcacattactccaattatggccttatatgacaaaaaagaaaaaaaaatccctaagagaaccactaacatccactggttttgtagaaacaggatacccttagtgcacttaaagttggaaaaatggctctgcctttagggccatgcaatgaaacagactgtgtggtagttgacacaggaagagcagagcagagtttataacaatggccacaagacagttaagaaaatgctttggggcttttaagcagcagataaggtgactcagaggaatgttagacaatcgcagaaaagcaacttcagcaaagtttttgattcagtrggcactgcatacttagtccatgctctgcatctgttctttcacagtctgtcccttcatcgacttgggcctacaatgacttttctgggaggggacagggatcaacacaacagcatgcacacacctgaaataaagaatgaatttctgattttcagattttagtctctgacataaccaaagaag

SEQ ID NO: 770678 - DNA, 576 bp, Homo sapiens
agcatgcacacacctgaaataaagaatgaatttctgattttcagattttagtctctgacataaccaaagaagtgactaccatagatgttaactttttttttttattattatactttaagttttagggtacatgtgcacaacgtgcaggtttgttacatatgtatacctgtgccatgttggtgtgctgcacccattaactcatcatttaacattaggtatatttcctaatgctatccctcccccacccccccagatgttaactattaataacataaatgatgctcacaaatatgcagatcttataataacgaggtaaaatagcttaaaaaataaatggtagaactgtagtccagggacactaatagaagtgacccataacattacatcatctccacttccaacaaaaatcaggcaaaagaaggaaggagactggcaacccaatgcacagaactatatataacaggcatactagttattggttggttataaaccagtgggaakaaatcttttttatatactgactcttggtttatgtcactgaggcacagcatggaacaatagaaaaccggactgtaa

SEQ ID NO: 770679 - DNA, 602 bp, Homo sapiens
aaagcaaggcttggccctgagatttttaccccatgagtggccaatgtttctgtgtagcacaaaagatttcattttgcttttttaatttttttcttttttggtttttttgtttgagacagagtctcactctgtcacgcaggctgaagtgcagaggcacaatctcagctcactgccacctctgcckcccgggttcaagtgattctcatccctcagcctgccaagcatctgggattacaagggccaagtaacatgccagctaatttttgtatttttagtagagatggggtttcgccatcttggacaggctggtttcgaactcttgagctcaggtgttccgcccacctcggcctcccaaagtgttgggattaagatgtgagccagcgcccctggtcagagactttattttttttttttttgagatggagtctcgctctgtctcccaggctggagtgcagtggcacaatctcggctcactgcaagctccggttcctgggttcatgccattctcctgcctcagcctcctgagtagctgggactacaggcgcccaccaccacgcccagctatttttttttttttgcatttttagtaaagacggggtttc

SEQ ID NO: 770680 - DNA, 602 bp, Homo sapiens
aaagcaaggcttggccctgagatttttaccccatgagtggccaatgtttctgtgtagcacaaaagatttcattttgcttttttaatttttttcttttttggtttttttgtttgagacagagtctcactctgtcacgcaggctgaagtgcagaggcacaatctcagctcactgccacctctgcctcccgggttcaagtgattctcatccctcagcckgccaagcatctgggattacaagggccaagtaacatgccagctaatttttgtatttttagtagagatggggtttcgccatcttggacaggctggtttcgaactcttgagctcaggtgttccgcccacctcggcctcccaaagtgttgggattaagatgtgagccagcgcccctggtcagagactttattttttttttttttgagatggagtctcgctctgtctcccaggctggagtgcagtggcacaatctcggctcactgcaagctccggttcctgggttcatgccattctcctgcctcagcctcctgagtagctgggactacaggcgcccaccaccacgcccagctatttttttttttttgcatttttagtaaagacggggtttc

SEQ ID NO: 770681 - DNA, 602 bp, Homo sapiens
aaagcaaggcttggccctgagatttttaccccatgagtggccaatgtttctgtgtagcacaaaagatttcattttgcttttttaatttttttcttttttggtttttttgtttgagacagagtctcactctgtcacgcaggctgaagtgcagaggcacaatctcagctcactgccacctctgcctcccgggttcaagtgattctcatccctcagcctgccaagcatctgggattacaagggccaagtaacatgccagctaatttttgtatttttagtagagatggggtttcgccatcttggacaggctggtttcgaactcytgagctcaggtgttccgcccacctcggcctcccaaagtgttgggattaagatgtgagccagcgcccctggtcagagactttattttttttttttttgagatggagtctcgctctgtctcccaggctggagtgcagtggcacaatctcggctcactgcaagctccggttcctgggttcatgccattctcctgcctcagcctcctgagtagctgggactacaggcgcccaccaccacgcccagctatttttttttttttgcatttttagtaaagacggggtttc

SEQ ID NO: 770682 - DNA, 587 bp, Homo sapiens
aatctactaatgaaaaaaaaattaagttgagcctcattaaaattaaaaacttctgttgtgtgaaagacactgttaagagaatggaaaaagcaagtcacagactgggagaaaatatttacaaaataatctgatggaaaaactgctgtccaaaatatatgaagaattctgagaactaaacaacacaaagcaaaaaaaaaaaaaaaaaggtgaaagatctsaacacctcattaataagatatacagatggcaaataagcatatgagaaagatgttcaaaatcatttgttgtgagggaattgcacattaaaacaacgagatatcactgtaaacctatcagaatggctaaaacacaaaacggtgaacacaccaaatgctgtcgaagatgaggaacaaccagaactctccatagctagtggaaatcaaaagtgtacagtcactttggaaaacttaagttcattcaaaatcctgcacataagtacttgcagcaattttatcataattgtcaaaacttggaagtacccaagacgtctttcaccaagtgaatgaataaacaaactgtgttgtagccatacaatgaaatctgattca

SEQ ID NO: 770683 - DNA, 778 bp, Homo sapiens
aaataggagaaaatctgagggatcctgggttcaatgatggcttcttagatacaaaaccaaaagcacaatctactaatgaaaaaaaaattaagttgagcctcattaaaattaaaaacttctgttgtgtgaaagacactgttaagagaatggaaaaagcaagtcacagactgggagaaaatatttacaaaataatctgatggaaaaactgctgtccaaaatatatgaagaattctgagaactaaacaacacaaagcaaaaaaaaaaaaaaaaaggtgaaagatctgaacacctcattaataagatatacagatggcaaataagcatatgagaaagatgytcaaaatcatttgttgtgagggaattgcacattaaaacaacgagatatcactgtaaacctatcagaatggctaaaacacaaaacggtgaacacaccaaatgctgtcgaagatgaggaacaaccagaactctccatagctagtggaaatcaaaagtgtacagtcactttggaaaacttaagttcattcaaaatcctgcacataagtacttgcagcaattttatcataattgtcaaaacttggaagtacccaagacgtctttcaccaagtgaatgaataaacaaactgtgttgtagccatacaatgaaatctgattcagtgattttacaaaacaagctgtcaagtcatgaaaagacgtggaggaacttaaaagtacataatgctagaaagaagccagtctggaaacctacatactgtaattccaactctaggacattcttgga

SEQ ID NO: 770684 - DNA, 587 bp, Homo sapiens
aatctactaatgaaaaaaaaattaagttgagcctcattaaaattaaaaacttctgttgtgtgaaagacactgttaagagaatggaaaaagcaagtcacagactgggagaaaatatttacaaaataatctgatggaaaaactgctgtccaaaatatatgaagaattctgagaactaaacaacacaaagcaaaaaaaaaaaaaaaaaggtgaaagatctgaacacctcattaataagatatacagatggcaaataagcatatgagaaagatgttcaaaatcatttgttgtgagggaattgcacattaaaacaacgagatatcactgtaaacctatcagaatggctaaaacacaaaacggtgaacacaccaaatgctgtcraagatgaggaacaaccagaactctccatagctagtggaaatcaaaagtgtacagtcactttggaaaacttaagttcattcaaaatcctgcacataagtacttgcagcaattttatcataattgtcaaaacttggaagtacccaagacgtctttcaccaagtgaatgaataaacaaactgtgttgtagccatacaatgaaatctgattca

SEQ ID NO: 770685 - DNA, 495 bp, Homo sapiens
tcatgaataagcaccattaaaagagcgaaaaggcaagctacagattgaaaaaagggaaatgcaatacatatatatcgtagaaaggacacatatccggaaaaaagtattacaaatcaacagaaaaacaagcatatcaatgaaaactggataaaaagatttaacaggcacttcacaaaagaggacacacaaatgacaataaaagatactcaatctcaataccaggaaaatgcaaaatgaaatcacactgatacattactgcacccctactagaatggcaaaataatttttaactgacaggcatcagcaaggwtgtggggtaaccagaatatccctgctaaatggtacaaccactttgggaaaacgttcaacagtatgtaatactaagttttatcattcatatacctctaaaaccaacaatgccactcctacaaatataccccagtctagtaatgctctatttcttgatctgtggtggttcacttggtaaaaattcat

SEQ ID NO: 770686 - DNA, 633 bp, Homo sapiens
tcatagtacaacagtgtgactattgtcaataataatttaattgtacattttaaaataaccaaaagagtgtaactggattatttttaaaacaaagtataaatgcttgaggagatggataccatattcttcatgatgtgatcatttcacattgcatrcttgtatcaaaacatctcatgcaccccacaaatatataaacctaatatgtacccacaacgatttttaaaaaattaaaaaatataggccgggtgcggtggctcatgcctgtaatcccagcactttcagaggccgaggcgggtggagcacgaggtcaggagttccagaccagcctggccaatatggtgaaaccccatctctactaaaaatacaaaaattagctgggcatggtggcgtgcacctgtagtcccagctactcaggaggctgaggcagaagaatcgtttgaatccaggaggcagaggttgcagtgagctgagatggtgccactgcactcccccctgggcaacagagcgagactccgcctcaaaaaaaaaataaaataaaataaaaaataaaaaaacacagtaaaataaattcctaaaacagtcattaaaaacaacaaagaggtaaagctaaatgaagataaaatattaaaatac

SEQ ID NO: 770687 - DNA, 690 bp, Homo sapiens
gaagacacaggagaaaaatctgcactatgaggtggagatagacacaaactacatcgtgaagaaggctgaatcaaaggttgtaacaaaacgcattctgtctgatcgccacttgcagagtccagtgacaacattgaggtacggtagaaagaaatttattaaccaaaactagtaatggggaagtggccagattcccacccaaagtggccactttgaatttctagagaaaaggcacaggcttaaaaaggggggacttgatatggaaggcatgcagcagttgtgtaaaaaaggggaacttgacataggaggcatatcaagttgtgctgattctgaggtctgtatgtcttgtttcagtgacttatcttgtgtctcactccacctgaagttcaggctggcatcacgtcgacaatggccaagttgttgactagctgtcttgaggtaagcgctggarttttacagctgggtctgtaaaattcaggcttggtctctctgtctcacggttaactcctggaacttctaagtaagcacataattaggtactatcatgcagatagataaatgtgaagggagaatatggtgagaaagggagggacatgaagtgtatttcaaagttaagggaaaaaacttctgcagtttgcttcaaggttatgtcttgagactagggagaaaagagaaaaggggaaaaattaaatg

SEQ ID NO: 770688 - DNA, 599 bp, Homo sapiens
attaaatttacatatagagagtgacagattacttccaaaagttattttttaacaaagtggttaacaaccctaaaggaaactggactcggttatttatctgaattataacaatactttatatttatttgggcttgtgtttttcttttgggacttgataaaattctcaagataaaatgcatacgtcaattcctgagttcctattcacatataaaaactggaaattcrtttggggaagtgttttcatcacattcaaaaggagacgaaactcctcaagccagcatgagaataataaatctgctcagaatattttccatttactgtctcctgttagcagttttggaaaagctttccactgtcttctccatttgattttggcacaagaagccaaaaccaaaacaaaaccaaccaaccaaacaacaacaacaacaaacaatctactgcttagggagaaatcatagcaacaaattcagaaacttctattaacctcataagggaaataaacagaaacacacacaaagtaaataagagaagagagccatttcccctagagacaatcatgtatgccagtgtcaggtaaaccccaaaattcacattctcaa

SEQ ID NO: 770689 - DNA, 619 bp, Homo sapiens
tatttcttcagcaatattttctaggcactaacctctgttttggttaataggggttaatcagtgaataaacataccaaaagggaaaaaaacaagcaaacatacaaattaaaaagaaacaaacaacaactcctgccttgctagaatttactatataatgaatactcatttcagactcaagtaaagttacatgtaaatactagaaggctagcactaacagagcattgcagaaaamtacctttctgaaatgctctgttagttcagagcattgaagtaatctttgaaaccacattttcaaagactttacttagaaagccattgttcaaattgttcaatgcctatctttaggatggaaaaaaataaagggttttagcatggttgagagaaatgagaaggaagaaagagttgcagggtaaattcaggatgtatcccaggacagaacagggaaagctagctcacgataaatttaacttctcagagtttcttcttaaatgagctagctgcatactcttagaggatcctgagttccacaatggtcttttacttttcaaaagcattcaggacatgaaccagaaaagaaagaattaaaactagtgaaaggagccccatatacatttctgaa

SEQ ID NO: 770690 - DNA, 619 bp, Homo sapiens
tatttcttcagcaatattttctaggcactaacctctgttttggttaataggggttaatcagtgaataaacataccaaaagggaaaaaaacaagcaaacatacaaattaaaaagaaacaaacaacaactcctgccttgctagaatttactatataatgaatactcatttcagactcaagtaaagttacatgtaaatactagaaggctagcactaacagagcattgcagaaaaatacctttctgaaatgctctgttagttcagagcattgaagtaatctttgaaaccacattttcaaagactttacttagaaagccattgttcaaattgttcaatgcctatctttaggatggaaaaaaataaagggttttagcatggttgagagaaatgagaaggaagaaagagttgcagggtaaattcaggatgtatcccaggacagaacagggaaagctagctcacgataaatttaacttctcagagtttcttmttaaatgagctagctgcatactcttagaggatcctgagttccacaatggtcttttacttttcaaaagcattcaggacatgaaccagaaaagaaagaattaaaactagtgaaaggagccccatatacatttctgaa

SEQ ID NO: 770691 - DNA, 610 bp, Homo sapiens
gaaaaaatggagtatctttaatgaagttaggaggtaatagatgaaaggttaagagcataaactttgaaggcaaacagacatgaattcttactcccattctgctatctacaggcaatgtgagagcagaaattttaattactctctctaagctgccacggttaataacaatcataaattgtaaagttgtcatgactaaagaaggtatttaaaagtacacacaaaaaaatagactaattgaatctgctattaagagtattattaacatcattttatccgctttcctcatactctaagatcgatgcattctcataaatgcatacgatttttttttcagatttatctgggaacatagaaaatctatgtttatataacataaaaagcaatatgrgtttttcttaacatagagtaaaattgatggaatagatatattttatatattctaagtatttgttcttagtctacttcttaaagaacttgagatagtctgaattctgtcataaagtttaatagtatagttaaggttcagaagagaatacctgatgtacatccacggcatgtactacatttccagacacttgaaatgagttagagtagggttttgcataggatc

SEQ ID NO: 770692 - DNA, 643 bp, Homo sapiens
atgatacattttgaattaagttttgtgaaagttgtaaaatctctatctaggttcttacattttgctttttgcctgtggatgtcttgttgtcccagcatcatttgttgataaggcttatttttctctactgaattgccattactccttcatcaaagatcagtttacactatttgtgtgagtcagtttctgggcttataaatctatttgaaggctctttcttttctcttcctttacagttttcatttttcagtggtagtgtttccttttgttcaggagatagcrtcatgcttttgttgtttcctcatgtttatcaacttattgtagaggcaatggaatgacacaggaaagagcgtgggcctagagagagagattttttgtttcaagtcctgcctctactgcttagtagccatgtggagatgtggatgtgatttaactcatgcatgaaaacagaatagggaaacatatttcaaaaggcaactgaaatgatttagttgaaggtaatggaagtaaccactactcctcagtaaagttctgggtactgcaaatgtgccctagtcaaacttgaatttatgtttactcaaactccccaaatatttgatggtaacattaacatgcccatccatctttcactaagttgtgaaca

SEQ ID NO: 770693 - DNA, 611 bp, Homo sapiens
gtatcttaaaagcataaaattctagctgaaataactcctattttgcaataaactaatgtttgatataacagatattttgtcatagagtctccacaggggacaatgaaatcaacttcttggtacccttatgaataaatagcacagcttacttgcggagaatgcttaatttatttcatcacgttctatattatttatctttgttctgctttaattagctttttcatagatcaaagctgaactccagcttttctgatttgttctctccactgttgcaagaaaggaatggaaaagaggaaggagaagaacgacaactatgacatcttgataaaggagatttcaatatttaacaaatttgcatgtcatcaataaakgcattagcacttcagcacctggcttctcaagcaaacactttaataagcagatggttctgcctgagtgaccattttaaacacttactccatttagctttgacaatttgcttgagacaggctggtattgctcatcaattctatggcatcttcagaaacagccaagccatttactgtgaaaaatattttttccaaggggttaaaaataaatttaaagtgttcacacatattttaatttaaatc

SEQ ID NO: 770694 - DNA, 621 bp, Homo sapiens
ataaaaccttctacaacctcacattgatggtataaatcaaaatctttaccacagatagtaaggaatttccattctgtggtccctgagtaactttatggtttttttttttttttttttttggagacagagtcttgctctgtcacccaggctggagtgcagtggtgtgatcttggctcactgcaacctccacctcctgggttacagagattctcttgcctcagcctcccaggtagacgggactacaggtgcccaccaccacgctgactaattttttttgtattttcagtacagacaggtttcaccatgttggccaggctgatctcgaactcctgacttcaggtgatccgccccccttggcctcccaaagtgccaaggttacaggcttgagccactgcccctggcctatgatatcattttgtaccacttttgatctctctcggtgctccaraaataccaaaattctacctgtttcttgaatacatctttatgcaatggtgaataaatgactggaccccttgctgttagttattttttatgcctgtaaaatgtcacctctatatagcccatcccctcacttcagtttgctttactccagcatgcctttttcttttcttcctaact

SEQ ID NO: 770695 - DNA, 621 bp, Homo sapiens
ataaaaccttctacaacctcacattgatggtataaatcaaaatctttaccacagatagtaaggaatttccattctgtggtccctgagtaactttatggtttttttttttttttttttttggagacagagtcttgctctgtcacccaggctggagtgcagtggtgtgatcttggctcactgcaacctccacctcctgggttacagagattctcttgcctcagcctcccaggtagacgggactacaggtgcccaccaccacgctgactaattttttttgtattttcagtacagacaggtttcaccatgttggccaggctgatctcgaactcctgacttcaggtgatccgccccccttggcctcccaaagtgccaaggttacaggcttgagccactgcccctggcctatgatatcattttgtaccacttttgatctctctcggtgctccaaaaataccaraattctacctgtttcttgaatacatctttatgcaatggtgaataaatgactggaccccttgctgttagttattttttatgcctgtaaaatgtcacctctatatagcccatcccctcacttcagtttgctttactccagcatgcctttttcttttcttcctaact

SEQ ID NO: 770696 - DNA, 588 bp, Homo sapiens
atttttagtagagacggggtttcaccatgttggtcaggctggtcttgaactccctacctcaggtgatccacccacctcggcctcccaaagtgctaggatgacaggcatgagccgctgcgcttggccagcaccattttgttttaataggaaggttctgggtctgtggtggtatcaggctcttgggsagcaacgggaggagcagggatgctaatgacaacaataagccgggagagaggagggaacttagttgaaggtgaagtggtgaaagcagtttgaagtgtttggagcctgaatgtattgtgaaagcacagccaacaagatatgctgatgttctgcatgtgagaaaaaaagaaaggatttaggaaagataccaaggttttggtgtaagccatttggcaagaacagcttactttatgttaggctattcttggaatctcttttgtataattcttttgtgatgccttggtgttcttttggaatgaacactgttttccatatctgatctaaatgtcctcagtcctgataagaagttgttaattgactgtctaattataattatagagagatagtggtagatacaaaaactaa

SEQ ID NO: 770697 - DNA, 635 bp, Homo sapiens
tggctgttttagttaaataaatgacgtcaatcctaaagcattgagggaggtgtgtgtgtgtgtgtgtgtgtgtgtgtgtgtgtgtgtagaaactgccattatgtcttggagtcacttagagatttgagtggagtcctattggctgacaacaagtgtggcatctgttgagtagggtgggatgaagaaagatgaaattcatgttgctgttagcagacacaagatagacaactagaggcctgagaagtttatacagaccatgatcctacccttctagaccctcaactccaggattgtagccaaatccatctgtgtgtargacacttcatggagcaggccttgccatgtaaggatcatggtggtcaggctgatctgaaagagtcccagcttcatccatattatctgtgtgatttgagtaacttgctgaacttgtgagagccttggtttcctcattcataaagtgatcctttatagggttactattaagatacagtggtgatcaatatctcaaaatgcctgtctcattatgtaagtgctcagtaaactgtagaattatttctttctactgaatcaaaagcagcccccgatacagattgctcagacttcccttctttagaagaaatcatcctggttcctta

SEQ ID NO: 770698 - DNA, 628 bp, Homo sapiens
gcagtaactgtagacaaatcttcccttgaccagagatctagcagtcttgtttcaggagattaaaaccacaccatgatttaaacagaggaagtttaacagaaagaattaaaatgattaagatatgatagtaaagtgaccatagactrtaagaatactctatatatggcagctcagagcagaaggagagagaggcacaaacttggaaggtggcacccttcccaagactgtggttcaaatctcattatagaatgtgtagttgaactcagcagatggtagggaagtttgctggtttgctggtcagaactgcagtcacaggacgagcagggaagaatatgctagagggcaggcaaggctgggagccatagctggtggccagtgcctggcaatgcagcaggagtggggccttagtgctgcaagaggcctggagttcacttgggaaggaaaatgagattgagaggggcacagcatcaagaggattgtgggagatggacctgaggactggggtgagtgcaagcaaccaggcagccaatgccagcaggaggctggagcacagggtgtctgtatggagaaggcagcagtaagatgatcactaggccatactggggctgcaaagccgccaaagtacaat

SEQ ID NO: 770699 - DNA, 623 bp, Homo sapiens
acatgaataatgccatatataagaatgtttcataggcctcattagaatatatggtttagttatttatccatatcagctgaaatctctgcaatgattcagttgatctgtttgtagagttagtgacagttgttaagtattctatcraaaccttgtcttataagagctgtgctctggactgagtacggccatagaatgttcaattttaaaattactaacaaaggataaataccattttaatacaaatgaaatttgtgttccattataaatagtcgaattatatatttgctggcttaagctttgtaaaaagatcatctttcttacattaagatgctccttatactagttggtaaaggtaaaaaacatcttattagtaataaatagaaaatgtaccaattactactagtacatcaggaatttaataaaagggaattaatggtttatagacagctccataatcactccttgcggaactgcattttacaaatacatcatttgaacagtccctgggttagaatcaaaaacagaatcagggtctatattagcaaaattaggtaatgaagtattgttttcagcatgcttatcatctctcttcaaaattatttctgtaattttcattttggagg

SEQ ID NO: 770700 - DNA, 498 bp, Homo sapiens
gtgtatatgtgaattttaaaataagtattaagcctactaagtgaataataagaaaacagattaatattaaattagacattatctaaacttggacaaactgggtttttttccaaattaaatatgaaaccatcaacccaagatgattaggaggaaaatgatgtaataaaatcaacttttaaatagctataacatgttgcatttcctaggaatcttcaaatgtttgcttaaaaatggccaaaacatttgaaacaaaagataaagtaccaaaacaactttttgaaatcatatttctcaacatttataatttccccatattctctacatttaagggaaaatttacttaccctggaargaaacttcattttttcaaaaaaccactccggtattttccttgctaggaaataagccagatggttccaacactcggaatttttactcaggaaaaattcagaaatacaggaaaacttcattaattcttttggtactaacagccattgt

SEQ ID NO: 770701 - DNA, 626 bp, Homo sapiens
tacattgaaattaaataaccttctcctgcacagcttttgggtaaacaatgaaattaaggcaggagtgaagaagttctttgaaactaatgagaacaaagatacgaatatcagaatctctaccacacagctaaggcagtattaaggggaaatgtattgcactaaacacccatatcaaaaagaaatatctcaatttaacaacctaatatcacaactaaaagaactggataaccaagagaaaactaacctcaaagttagcagaagacaagaaataaccaaaatcagagctgaactgaaggagattgakacatgcaaaatcattcaaagatcaacaaatcctggaactggttttttgaaaaaattagtaaaataaatagactgctagctagactaataaaaaggaagagaaaagattcatataaacacaattagaaacaacaaaggggatattaccactgacctcacagaaatacaagtaaccatcagagaatattataaacacttctatgcaccaaaactggaaaatttagaagaaatgataagttcctggacacacacactttcccaagaatgaacccagaagaaattgcattccttaacagaccaaaaatgagcaccaaaatggaatc

SEQ ID NO: 770702 - DNA, 618 bp, Homo sapiens
tatgcccatcagtctgtaagtattgttcaatatttaagtgacatttagttcaattcacttatgaggttgactttggtgtcatgtataaaaggcatttgattttagtgattcttcttccttcattagcacagtcttattgaagaaaaacaactaatgcttggtcatgcatcacaatttaaatgtggtaataaggcacatatatctactgaatgaaaacatttttaaaatcatggctttgtgtatttttcttaagaaacaaattcctttatttagaaattattttcctagaggtgttagaagaaatttacaacccgcaacatgtcaaagctcttcatctgttctcagtgcaaccaattaggactatccaataaaagtaataagatgytaaagaaacagcagggagaagataccatggctctgccatgtttagacaccaaagccatccaatagtgtgaaattgcgagccttaaatgggtcttatactgggcccctatgacttaaacagatgaatcctgtcatactagtaaatgtaattactttcacgttttttagcaattgagattggaagatcaaactggaagtcaaagtaattgtatcaaatgactgtgatagtatttt

SEQ ID NO: 770703 - DNA, 641 bp, Homo sapiens
gtgaaaggctaaatgctgtcctgttaacatcagaaacaaagtaaggatagtctctgccaccattctattaatgttgtactagccagtgctataacaacaaaaaaaaaataatatacataaggattagaaaaaagattatctttattcatagatgacataattatatattcaaaatattatttaaaatctaccaaaaaggatactagaactaattatgtgaaagtgttaagtttgcaaggtaaagtacaaaatctactgtttctgtaagcaataaacaattgataattacaataaaataatatttaaaatatcataaataatgaaattcttaggaataaatttaacaaaaaaaagaccaagatgctgaatattaaacaatatttttatgacaaattaaactaaaatatatactatgcttattaactggaagattcattattgttaaaaagctcttcctaaagtgatctatagatttaagtccttcycaatcaaaatccaagcatgcatttttatagatattgacaaagctatttttttaatcttcaaaattaaccaaatgtcccaatttttatttcaattgtaatttgaagactttagaaataattattttttttcatagatacagtatcattgagtagaaa

SEQ ID NO: 770704 - DNA, 628 bp, Homo sapiens
ctgccaggcggaggggctcctcacttctcagatggggtggctgccgggcggaggggctcctcacttctcagatggggtggttgccaggcggagggtctcctcacttctcagacggggcagccgggcagagacgctcctcatctcacagacggggtcgcggccgggcagaggtgctcctcacatcccagatggggcggggggcagaggcactccccacatctcagacaatgggcggtggggcggagacgctcctcacttcctacatgggatggcrgccgggaagaggtgctcctcacttcctagatgggatggcggctgggcagagatgctcctcactttccagactgggcagccaggcagaggggctcctcacatcccagacggggtggtggccgggcagaggctgcaatctcggcactttgggaggccaaggcaggcggctgggaggtggaggttgtagcgagccgagatcacgccactgcactccagcctgggcacaattgagcactgagtgaacaagactccatctgcaatcccggcacctcaggaggctgaggctggcggatcactcacggttaggagctggagaccagcccagccaacccagcgaaaccctgtctccaccaaa

SEQ ID NO: 770705 - DNA, 602 bp, Homo sapiens
ctcagtttacaacatttttggtgaccacgaagtgaatggagacagcaggcttactgtctcctttgcctctggggttggagcacgggcctcaggaaacctgtgaccccaggcaccaccgggaggacttcagcccagaagggagatcagctctcccctgacccagtgcccctacccagcagcaccatggaacctaaagagagactacaggatgaattcaaaaacagcrtgcttcaggaactgcggtaaggttttggaggcctaaggcaggacccatcccttggacagaaggggagcctgatcacctcctggggtgtgctgaatagtttgacccacaggggctgggggtgatgagagtgactcaccaattcagatgaaactcacaccccaccgacacaggacacgagagtggctcactaagtcagctagtaatctggaggtggtgagagtggcgtgccaccccaactgggaactagaggtggcaagagtggctctccaccccaactgggaactggaggtggcaagagtggcttgccaccccaactgcaaaactagagggggcaagagtggctcaccaccccgattgcaaacatgagaactaaaag

SEQ ID NO: 770706 - DNA, 400 bp, Homo sapiens
gacaaagagatttagactcccacacaataataatgggagactttaacacccactatcaatattagacagaccaacgagacagaaagtaaacaagaatatccaggacttgaactcagctctgcaccaagtggacctaatagacatctacagaactctccaccccaaaacaacagactgtacattcttcttagcatcacatcacacttattccaaaattgaccacatagttggaagtaaagcactcctyggcaaatgtaaaagaacagaaatcaccacaaactgtctctcagaacacagtgcaaacaaattagaacccaggattgagaaattaactcaaaactgcacaactacatggaaactgaacaacctgattctgagtgactactgggtaaataacgaa

SEQ ID NO: 770707 - DNA, 593 bp, Homo sapiens
attgcaatatctcctctttcatttcctattttattcgaatcttctttctctctctctcttttagtctggttaaagatttgttgatttcaattacattttcaaagaacaaactatttttcttttgatcttttttattgtctttctagtatttattccatttagctctgtttctttattaattattatttctttccttctrctgatactcaacttggtttgttcttctttttctagtttcttggagggtagtgttaggttgtttatttgaattttcttgtatataggcatttattgccataaacctagctcttagaactacttttgctacatcctctaagttttgacatgttgtggttttttttcatttatctccagatatttttcaatttcccttttaattttctcttcgaccgataagctggtcaacagcacattaattttcaaacatctgtgatttttccaaaattcttcttgctattgatgttcagatttattccattgtggttaaaaaagatactttatatgatttcaaccttcttaaatttgttgagacttgttttgtggcctaatacataatttatcctaaagaattt

SEQ ID NO: 770708 - DNA, 593 bp, Homo sapiens
attgcaatatctcctctttcatttcctattttattcgaatcttctttctctctctctcttttagtctggttaaagatttgttgatttcaattacattttcaaagaacaaactatttttcttttgatcttttttattgtctttctagtatttattccatttagctctgtttctttattaattattatttctttccttctactgatactcaacttggtttgttcttctttttctartttcttggagggtagtgttaggttgtttatttgaattttcttgtatataggcatttattgccataaacctagctcttagaactacttttgctacatcctctaagttttgacatgttgtggttttttttcatttatctccagatatttttcaatttcccttttaattttctcttcgaccgataagctggtcaacagcacattaattttcaaacatctgtgatttttccaaaattcttcttgctattgatgttcagatttattccattgtggttaaaaaagatactttatatgatttcaaccttcttaaatttgttgagacttgttttgtggcctaatacataatttatcctaaagaattt

SEQ ID NO: 770709 - DNA, 282 bp, Homo sapiens
tggcttgtgcctgtaatcccagcactttgggaggccaaggtgggtggatcgcttgagcccaggaattagagaccagcctgggcaacatggtgaaactccacttctactaaaaatacaaaaaaaatagccagtcgtagtgkcactcacatgtgggcccagctgctcggaaggctgaggtgggaggatcacctgaccccagaagtcaaggctactgtgatctgtcgtcatgctactgttctccagcttaggtgacagagtgagacactgtcttggaaatctata

SEQ ID NO: 770710 - DNA, 557 bp, Homo sapiens
gaattggccaaaatttctaattctggcccaacaattttctagctttgttatctggggaaaaacatatctctctagatctgtttctaatttgtacatcgcttacattttagagctcctatgaaggtgaatgaagtaatttacagcactctaatttactgtagcacacatctgtaatcgtacctccttcactcatagacctttccttgtttcattgaagcctaatactatacagatatctacactcgtccacaaaacaatgtgcttttaaagagtgtctccatcctccaacctcaggagtacttcctaattggtctaatcaaacaacagcactcccatttagcttgtcaatgattggtctaactctagacwtaagatccaatgctggacagtctatatgaggacaatctccagaagagttaaaggaaaagtttcttttcctctaaaagtgaaactctatacattacgttctctttgtggatttgtgttagtgtctggatataatacgtggagctactgcagccaccttgctgtgggcctacagaaaaaatagctgaaaa

SEQ ID NO: 770711 - DNA, 568 bp, Homo sapiens
catacttagtgctctctttagaaatttccacaaatcattttctgtgatcttctaatcctattgtttcaagatttctggacaactgttcaggctattcattactgtccaggaagcatgtgtgtttctataattcagatgtttttctccttcatacaaagtgaatacactagtatattcttacagctttctctactgaatttsccttaactcatatttcactgccactcccaagtgggtttataataaagcagccatttcattgtctgccaggaatctgtacattgtttggacccaactttgaaccaagcccttgtgtttttcttttctcgcagtgagccatagataaccacttagggaaaattggtaaaaataaaagataagcatcagtgcaacagacataggtgccatttgtacaagtaaattattcataccataccatctggaccatgtgaacctcaatcagaaacaaaccagtcctattttgtagtgaattgtttttctacccactcaaacttatgttttgtagacttgatagcactcagtgaaagatgggcagctccagccacat

SEQ ID NO: 770712 - DNA, 543 bp, Homo sapiens
atatatattatatgtaatatacattataattctatatattatgatatacagctaattgttattttatatatattatatattcatatgtataatatattatatattcatatatattacatattcatatgtataatatatattatatattcatatgtataatatatattatatgttatatattcatatgtataatacatattatatattgtatattcatatgtatagtatatattacatataaataaaataagaaattagctcatgcaactatggaggctaagtcccaagatctggagtggcawgctgccccaggagagcccatgttgtaagttccaatccaaatgccagcagcctcaagacccaggaatagccaatgttttagtctgaatccaacatcaggaaacaaatgatgtcccagctcaaaggcagtcaggcaggcagggggaattctctcttactctaggcagggtcagcctttttgttctattcaagccttcaacagatcagatggggctagcacacattagcaaggacaatctgctt

SEQ ID NO: 770713 - DNA, 552 bp, Homo sapiens
atgtcaaatcctagaaaacatagcatttctacacttgatgttaacattgttcttgaacggttgttgatggaagattcattttgtgaatctgatttttccaaaatagacgattttgatgttagttctgtttagaaagaactccaataaaagttattatattttattttcaygttgaaaattagtcgaacttgcttcagcctcaaagagtgtgtttatgtaaaattaaatgagcgctggcagcgagctgcactttctttttcctaagcgggaaaaggttaagaaattaattcctaagcccgggcgcggtggctcacgcctgtaatcccagcactttgggaggccgaggcgggtggatcacgaggtcaggagttcgagaccagcctggccaacgtagtgaaaccccgtctctactaaaatacaaaaattagtcaggcgtggtggcgggcacctgtaatcccagctactcaggaggccgaggcaggagaatcacttgaatccgggaggcagaggttgcaattgagccgagatcgtgccatcacactccagcctggg

SEQ ID NO: 770714 - DNA, 574 bp, Homo sapiens
tcaaaagaagacatacaaatggcaaacaggcatataaaaaggtgcccaaaggctggaaacagtggctcacacctgtaatctcagcactttgggaggccgaggtgggcagatcacctgagatcaggagttcaagaccagcctggacaacatggctaaaccccatctctactaaaaatacaaaattagccaagtgtgatggcacatgcctataatcccagctacaagggagactgaggcaggagaattgcttcagccagggagatggaggttgcagtgagctggratcttgccactccactccagtctgggcaacagagcgagattacgtctcaaccaaaaaaaaaaaaaaaaaaaaaggtctaaacgtcattgatcatcagagaaatgaaaatcaaaactacaatgagatgtcatctcaccccagttaattggcttttatccaaacaacaggcaataacaaatgctggtgaagatgtagagaaaagggaactctcatacactgttggtgagaatgtaaattattacaggcactatggagaacagtatggaggttcctcaaaaaactcaaaataaa

SEQ ID NO: 770715 - DNA, 574 bp, Homo sapiens
tcaaaagaagacatacaaatggcaaacaggcatataaaaaggtgcccaaaggctggaaacagtggctcacacctgtaatctcagcactttgggaggccgaggtgggcagatcacctgagatcaggagttcaagaccagcctggacaacatggctaaaccccatctctactaaaaatacaaaattagccaagtgtgatggcacatgcctataatcccagctacaagggagactgaggcaggagaattgcttcagccagggagatggaggttgcagtgagctggaatcttgccactccactccagtctgggcaacagagcgagattacgtctcaaccaaaaaaaaaaaaaaaaaaaaaggtctaaacgtcattgatcatcagagaaatgaaaatcaaaactacaatgagatgtcatctcaccccagttaattggmttttatccaaacaacaggcaataacaaatgctggtgaagatgtagagaaaagggaactctcatacactgttggtgagaatgtaaattattacaggcactatggagaacagtatggaggttcctcaaaaaactcaaaataaa

SEQ ID NO: 770716 - DNA, 549 bp, Homo sapiens
gcttgctggactccatgagtgtgggatccactgagctagaccacttggctccctggcttcagccccctttctaggggaggaaacggttctgtctcactggcactccaggcaccactggagtatgaaaaaaaactcctgcagctagcttggtgtctgcccaaatggctgcccagttttgtgcttgaaacccagggccctcgtggtgtagtcacctgagggaatctcctggtctgcgggttgcgaagatcatgggaaaaacacagtatctgggctggagtgcaccgttcctcagggcacagtctctcacagcttcccttggataggggagggagttccctgacaccttgcgcttcctgggtgaagtgacgccccaccctgcttcgtcttgccctccgaaccagtcccaatytgatgagctgggtacctcagttggaaatgcagaaatcacccagcttctgtgttgatctcgctgggagctgcagactggagctcttcctgtttggccttcttgccagccacctgcaccttgacaagatattttaaacagca

SEQ ID NO: 770717 - DNA, 606 bp, Homo sapiens
aagtccttatttaccaataataatattgctgtaaatggacttttatccttacagagtagctgaatggataacaacaaaagaaggcccaaagatctcctggctacaagaaacacacttcacctataaagacacacacagactgaaaataaagggctggagaaaggtatttcatgcaaatggaamccaaaaaaaaaaaaaaaaaaaggcagcaaaattagttatacttatgtcacacaaaattgatttcaagacaactataaaaagaaacaaagaaggttattacataattataaaagggttaatccagcaaaaggatataacaatttaaaatatatatccacccagtactggagcacccagatatataagctaaatgttattagagctaaagagagagatagaccccaatataataatagctggagaatttaacaccccactttgaacattgaacaaatcttccagacagaaaatcatcaaataaacattgggcttaacctgcactgtagaccgaatggacctaatagatatttacagaacatttcatccaatggctgcagaatatacattcttctcctcagcacatggatcattcttaaggatagg

SEQ ID NO: 770718 - DNA, 606 bp, Homo sapiens
aagtccttatttaccaataataatattgctgtaaatggacttttatccttacagagtagctgaatggataacaacaaaagaaggcccaaagatctcctggctacaagaaacacacttcacctataaagacacacacagactgaaaataaagggctggagaaaggtatttcatgcaaatggaaaccaaaaaaaaaaaaaaaaaaaggcagcaaaattagttatacttatgtcacacaaaattgatttcaagacaactataaaaagaaacaaagaaggttattacataattataaaagggttaatccagcaaaaggatataasaatttaaaatatatatccacccagtactggagcacccagatatataagctaaatgttattagagctaaagagagagatagaccccaatataataatagctggagaatttaacaccccactttgaacattgaacaaatcttccagacagaaaatcatcaaataaacattgggcttaacctgcactgtagaccgaatggacctaatagatatttacagaacatttcatccaatggctgcagaatatacattcttctcctcagcacatggatcattcttaaggatagg

SEQ ID NO: 770719 - DNA, 606 bp, Homo sapiens
aagtccttatttaccaataataatattgctgtaaatggacttttatccttacagagtagctgaatggataacaacaaaagaaggcccaaagatctcctggctacaagaaacacacttcacctataaagacacacacagactgaaaataaagggctggagaaaggtatttcatgcaaatggaaaccaaaaaaaaaaaaaaaaaaaggcagcaaaattagttatacttatgtcacacaaaattgatttcaagacaactataaaaagaaacaaagaaggttattacataattataaaagggttaatccagcaaaaggatataacaatttaaaatatatatccacccagtactggagcacccagatatataagctaaatgttattagagctaaagagagagatagaccccaatataataatagctggagaatttaacaccccactttsaacattgaacaaatcttccagacagaaaatcatcaaataaacattgggcttaacctgcactgtagaccgaatggacctaatagatatttacagaacatttcatccaatggctgcagaatatacattcttctcctcagcacatggatcattcttaaggatagg

SEQ ID NO: 770720 - DNA, 545 bp, Homo sapiens
ttaacctgcactgtagaccgaatggacctaatagatatttacagaacatttcatccaatggctgcagaatatacattcttctcctcagcacatggatcattcttaaggataggtcatgtggtaggtcacaaaacaaatcttaaaacattcaaaaaattttaaataatatcaaacatcttctcgaccacaatggaataaaactagaaatcaatagcaagaggaattttggaaaccatacaaacatgtggaaattaawcaatatgctcatgaatgaccagtgggtcaatgaagaaatcagaaggaaattaaaaattttattgtaacaaatgataatggaaacatgacatatcaaacctatgggatatagcaaaaggagtactaaagggaaagtttatagcaataagcacctacatcaaaaaaagaagaacatcttcaaataaataaactaacaatacatcttaaataagtagaaaagcaagagcaaaccaaattcaaaattagtagaagaaaagaaataataaagatcacggcagaaataaattaaa

SEQ ID NO: 770721 - DNA, 687 bp, Homo sapiens
ttacataggaagtacctaaaaagcagctttggtccacagctccaataacagctctccacctacactgacttccagctggccttccataatcccttggcttcattctctagttcccatcacttgccccaggccatcttcccctttcccatgacccactctgctgtggctcagcagctgctgctcagacaaagaggtgccttctctgctggctgtaatcaccagcaccccttactctacccactgaatactccatcccttacctcaaccctcaagagaggagattcatgatgcagggcaaagtggaggaktgcctgtaatgagcttttggtttggactatggctaaggaaccaatatattctacttatctgagagatttgttgtgaggactaaataatatatgtaaagtgctctgaatagcttatttatttatttatttatttatttgagatggggtcttgctctgtcatgcaggctagagtgcagtggcatgatcacagctcactgtagcctccaactcctcggctcaagagattctccctcctcagctttctgagtagctaggactacaggcatgtgccactatacccagccaatgtttttactttttgtagagatgggatcttactagttgcccaggctggtcttgaactcctggccccaagggatcctcctgcctcagcctccca

SEQ ID NO: 770722 - DNA, 615 bp, Homo sapiens
agggatggacttgtgatggttaatactgagtgtcaacttgattggattgaaggatgcaaagtattgttcctgggtgtgtctgtgagagtgtcgccaaaggagattaacatttgaatcagtgggctggggaaggcagacccacccttaatstggtaggcaccatctaataagctgccagcaaacatacagcagacagaaaaacgtgaaaagacgagactggcctagccttccagcctacatctttctcctgtgctggatgtttcctgtcctcaaacatcggactccaagttcttcagttttgagactcgaattggctctccttgctcctcaagcttgcagacagcctgttgttggaccatgtgattgtgtaagttaatacttaataaatatatatatatacactattagttctgtccctctagggaaccctgactaatacatacacctataaaatgaggctgcagcagtagatggagccaggctttacaaggcattgaggactatgcaaacaatttgggtctttatgctaagagccatgcttaagagaggaggtggaaaagatgaaaagaaaaaatatgatcagatttgcattgtgaaaatatcactgtggatgat

SEQ ID NO: 770723 - DNA, 642 bp, Homo sapiens
tattcataacatcctatgaagtaggcaacactatcattcccatttcatagacaaaaaaaaaaaaaaacttaaagaaaggttcactatcttgcctaaggttttgaaggtagaaggtagggtgaataagagaagccagaggctaaaatcaatccctgatccatccccaggctccccaagcaggtggacacattcacccattcatctcaagtgcctgctgtatgcctggtaagtgccaaattcaggtcatacaaagacaataaggcctgggccagacatcaccaccccttctggggtccatcgaggactccttaraaatggtattgtaaggagcagacattgatatttagtcattcaaagtgctaagagaagcacactccataagttcaatgcccaatagtgaagacaaatatgtaagttatagtatagtgctgagagagaggtaggtgggaagtgtgtgagaacgaaatgaggagttcactgatcaagaagcgtatttcagatggcaggagttgcttgaaacaaagttcagagccaccccgcaaaaagatgtccttcctggggaactgctcgatgatgcatagacttgctgggcccccttaggcagggagggtggcacatttgccagatagctggatcaccccc

SEQ ID NO: 770724 - DNA, 644 bp, Homo sapiens
gcttcatgttgggacactatggatgaatggcaggaatggtccatgccctcatggagcttatagtctagcagggaagaaagagagttaaaccaatgattatcataaagtataaggcatgttatgatttggagaagtacaggatattatgaacatgtatartgggcaactcacttagcttgggacaggaagggaaggcctctcaatggagattataattgagttgagatctgatttgagacctaagaatgcagggatgaaatcacagcccctgtcctcaggaagcttacagtttagtaggaatctaagctgtataaactaacaccctcaacacgacatgataaaaactacaaaggtggagtatacaaggcacagcacagaagaaaaaggccctgatcatatctgtgttggggtggggcatcagaaaagatctggttttcgaatggtgtctcaaaggaagtgcaaaccttaggtggtcaagtgcatgaaggcctgtctgaggctgagggtgcactgtggcactgcagagcatgttgttgagctgtgctgtctaatatgcagggattcaccatatgtagctattgatccatgaaaatgttcacacatacacaaagttgaaagaatattttggtgaatacccatacact

SEQ ID NO: 770725 - DNA, 631 bp, Homo sapiens
aacctttacccagaagtcacacataacagactgagggggaagcagggagccaagggaacccagtcaggaggacttgaggaggcaagggctggagaaatgatgggaagagggtatttgttttgtttttttgagacagagtctcactttgtagcccaggctggagcgcagtggtgcagtctcagctctgcaacctccacctcctgggttcaagcaattttcctgcctcagcctccccagtagctgggattacaggtgcatgccaccctgcccagctaaattttgtatttttagtagagatggggtttctccatgttggtcaggctggtcttgaactcctgacctcaagtgatccacccaccttggcctccccaaatgctgggattacaggcatgagccactgcgcccrgccgggaaggggttatttgaaggaaacattactgaggttgatttcagaagttttgggcactgatgagatgtaaaaaattaaaggaggggtggagaaaggtgattttcaggtttggagtgggtggaaagtgaaagagtggtgctcatggaagagagaatttaacgtggcagcacaaaataagactcctgtggtgggcatcaggaggcttataagctgtgtggttgc

SEQ ID NO: 770726 - DNA, 588 bp, Homo sapiens
caagatggaggatccatggagctcatttagaagacagacaaagcagctaagaaacctggatgacaataatggtgactttgagaaacataaagagacacgatgccttgagctcttcctatggtccagagagcacaagctaagaacttcttactgactgtcttaattgttggcactattgttgctcctactctacagaagagaaaattgaggctccaagaggtgaactacttgccccytgaacccagcaagtagggagtgaatccaggactcttccaaagttgatctgagtccagagcccctgtccttggccatttgccaccttgaggctctgagatgttacagaaactgcctaaggtagacttgggattcaaacccagtctgtctccagagcctgcgcagtttcttctctgtggcctctggtgaggagaaagagaggttgtcaatctgaacaagctcagtaaaggatgcagcactctgcatgaggcgggcacttggtgccccctccccacagaaccacaggcccattcctcagaaagggcagctggtgcaaggggaagcatgttgcttcaggcctggaggctttcctct

SEQ ID NO: 770727 - DNA, 554 bp, Homo sapiens
aaaagacttgcgccaccttctggccgacacctgaaattccaaggacaggagccttcagaccggaggagacagaggtagcaaaccccgttttctccttcttcgagcatacagcccggtccttgtgaatctgataagttcccagagtgaccctgagaagctcagactaargacttgatagttaggaatgtgttcccttcacaagtttatctacagatgtatattgcttttgagatttgaagaccttcttttgagatgcaggattcacttatttaatcagcaaatattgtctgagcagctactatgtgccaagcagagttctaggcgttggggataaagtgtgaacaagataaataaggtccctgctttcataaaactcaactagggctagttatcagacggtagacagatgtctgaaagagatcatttgagtagttatgtgtggttcgggggacggaagaccaggtaacatgacggtatgggggggggaggtgacaaggacctgggacagaatgagccagttgtgggaagagccgggagaagaacgttctaggcag

SEQ ID NO: 770728 - DNA, 559 bp, Homo sapiens
aaaaaaaggagacgtcacaaactaacttttatatttacctatgtagttacctttattggtattctttatttgttcgtgtggcttcaaggtgctgtctagcatcctttcatttcagcctgaaacactgttagcagtttcgtagtccaggtttactaattattaactccttcaagttgttttgttttgtttgtttgtttgtttgtttttgagatggggtcttactctgtcaytcaggctagagtgtggtggtgccatcatagctcactgcagcctcagcctccctgggctcaggtgatccatccacctcagtctcctgagtagctgggactacaggcatgtgccaccaagcccagctgatttttttgtatttttggtaggcatggggtttcgccatgttgtccaggttggtctcaaactcctgggctcaagtgatctgcccacttcagcctcccaaagtgctgggattataggcatgagccactgtgtccagacaattccctcagtttttatctggaaatgtcttaatttcaccttcatttttgaaggatatttttggcag

SEQ ID NO: 770729 - DNA, 559 bp, Homo sapiens
aaaaaaaggagacgtcacaaactaacttttatatttacctatgtagttacctttattggtattctttatttgttcgtgtggcttcaaggtgctgtctagcatcctttcatttcagcctgaaacactgttagcagtttcgtagtccaggtttactaattattaactccttcaagttgttttgttttgtttgtttgtttgtttgtttttgagatggggtcttactctgtcatycaggctagagtgtggtggtgccatcatagctcactgcagcctcagcctccctgggctcaggtgatccatccacctcagtctcctgagtagctgggactacaggcatgtgccaccaagcccagctgatttttttgtatttttggtaggcatggggtttcgccatgttgtccaggttggtctcaaactcctgggctcaagtgatctgcccacttcagcctcccaaagtgctgggattataggcatgagccactgtgtccagacaattccctcagtttttatctggaaatgtcttaatttcaccttcatttttgaaggatatttttggcag

SEQ ID NO: 770730 - DNA, 455 bp, Homo sapiens
tattgtaaataaaaagcattttaaaaagtattgacacaaagcccatcagtgggcattaaaaatattaaaagtgcagacttttactgtccttaagtgccatcaactctcagctcccttgtagcttttgtgggatttaacaagtaacaaattctgttgtgtttccctggtatacatctttytaggaaaaaaaaaaaaaagagagagagctgtataatgatttttcgtttacatgctgaaaagtaattatcagttctgcacagcagcagatgcagggtttttttttaaagatgtagtttgatttatcaaattaatgtgctgatgataatactggctttgactttgttactccatgttcagctaatttaggtttgtgagattaactttaggattttttgttgtgtaagacaatgataactattatttgtgcaacattactctttgaaataaaaattggc

SEQ ID NO: 770731 - DNA, 622 bp, Homo sapiens
gaaaggatgaggttggttgagggtagcaccaaaagattctctttttcactcagaataggcgctgcaagtctgtcctgctggtgatgcacatactggagaacaagagggtggtggagaaaattatgtaaacttccagggagaaaatctgggcaaggggaagggcatggaggtgggtggtcaggtatatcggggcatattgtggagagaagtgtaagaagtatgtggttactttggtagtggacactagagagacactgaaggttcttgaggaggagagtgacataatccaaaagtcaaatctgatkgctatgtggagaggcttgaatggagagactggcatcagggactccagggaagacataatgaagggctgaacatggccataaaggaataggtagaaaggtcacaagaaaggcacaaagtagaatccaggtgaccttgtccccaaagacatgtaggaagaatgctgatttctttaaagggaactagaaagtgaggccagaaaactggtttatagtgaagaaataccgagtttaaggtacttgtaggtcatccaagtggagataatattattgtcattagtattggctgacaaacattaagagattactctctaccaggc

SEQ ID NO: 770732 - DNA, 620 bp, Homo sapiens
  misc_feature 616, 617, 618, 619, 620: n = A,T,C or G
tgcaggctgagcagctaccctttaataactggggatagttttatgaagtccactctgactattgagtttgtgtcacttagttccccatttcttctttcactagcatttttgttaagataatccatttgactgcttaaaaacctcctgttagaaacaattagctcacagacttctagaaaaggtctgatggtgcagaaaatttatatttgtctttaaaattgaatatttctctctctctyttttttttttttttttttttgagactgggtctgacactgttgcccaggctggattgcagtggggcgatctctgctcactgcaacctccacctcctgggctcaagagatcctcccacttcagccccacaagtagctgggactatgggcacacaccaccacaccctgctaattcttttgtgtgtatttttcgtagaaactgggtttcaccatgttgcccaggctggtctcaaactcctgagctcgctcaagagatcctcccatctcagcatcccagagtgctgggattacagacatgagccactgtgcctggccaacattattgaatatttcaattttattctgaagtattaagaatttattctctctctctctctctnnnnn

SEQ ID NO: 770733 - DNA, 609 bp, Homo sapiens
taaactttttctcaaaggtattttttcaggcttacacattggctactttatctattatgtggaataataaccacaaagataaccacagaataacaccacagatatactatcagtggataaaagagttaaagttgtttatatgttacctttctaaatagaaagagtacataatattgatgagaatattattaattcaggtcttaaaggaataaaagcatctctcccctagttttttggcttcccattttatttccttattttaaaagtgatttccttgtgccatttcctgcccactcatattcttcattctggaaggtcgacaaaaagctaacagttttgtaaaatctgtcaagttacttaaccttcctgagcattgatttttttcatctgtacctttgggcttataatgtgtggcactggaatcagatgagaaatgtttgtaagaagtctagcccagtgtctcatamtgttcattaatgctaggctttatatatttgtgaaacaaatagtcttatcgtgttttaattttgttttgggcaaaatatcaaattttaatatttgaaatctcttatagttccattgtaattgttttttaaaaacaatatattt

SEQ ID NO: 770734 - DNA, 668 bp, Homo sapiens
attactttattattttcatattctaaggcacatgtgaagggtaacagcaacaaaatcttcttggttgagatgtaggtctaatgaaaatatttgattaaaccttgtcttcccgttaacatttctaaatgtagtaagtacagtagcattaaraaagctagatgtcaaatacacttttagatcagttgcatattgtaaaattgacttcagtagtcattttacttgaaaatattttcaaaatgtttttagtatctatttacttacatagaagtttctgcctttctaatctcaacctgagaagagatttgaggactaggaaataaacaaaatggcttctgcacaactgaagcttctggcttaaatcttcacagcaaaaaaccatacattgtcttcaggagagatccttagcttttggtcagaagccactttctcttacttagcacacaattattattaacaaataaacaaagtaagagatttatttcttaacatggaggcaattagaaacagcaaaggagtgaagactggataggaaaaaaggtttatttttgtctcccaccaactcaactcacatttcaactgccttctacaggtgacccaagtctccagcattgggatcaatcacctcatcatctggtatccagaacacttataaaaaacaaatttacatc

SEQ ID NO: 770735 - DNA, 544 bp, Homo sapiens
tttaattacacctacatcttagcagagttcaggcccctttcatccttttaacctggtggcctttcattagatttatagagacagttttgttctggtaagggctattctcttttaaactacaaactaaatttttccgaagttctttgtctcacagctgagaaaatcaagaaggsgacatgccaagggtgaggttagagcagcagtttaataagcaaaagaaagagagaaagctctctgccacagagaagggtcccagaaaagagttgccattttacagttgaatacagaggcttttttaagaaaccaatgagggctgggcatctaatttgcataaagtacaaatttctgatagctccactctgtcctcctagtgtgcatgcaggcccttaccttgagttactccatattgctttgttccccttactgcacatgtgtcaggggatggaattttccattgcagacatgtctgggcaagtcagctgtgtggcctgtcttatctatgcagtgaggccatgtcttaggcaagccctcctatgcaagttcc

SEQ ID NO: 770736 - DNA, 643 bp, Homo sapiens
actaaattgatggaaactgtccatcaattcagtctgctcattaaaaatagtaattactaaactttcatcatgtgcataatacattaacaaatatagtgtttctcagtttattaaaaacataacatcaaattttacccttctacacacaaaattgatgtgttttatttcycagattacagaaagaacaaaatgaatactcaatagaaatttgtattttcaagattctgctggtgtagctaagcaatgccatcataatgtgaagtgttgctgccatctgcagcatgaaagacttattaaacatatatattacctaggcatatgtaactggattttaaaaagtaacaactgtttaattctctattagtctttctatgtattttctacagctagctttcaacataattaaaaatatggtatagtttaaaacattcaatgtacttaagaatataatataggtgccaaaatgaatactgacattttattttattttattatttggttaagctaaaattaatattgaagaggcaatgaaatggtagaccgaaactgcttttatgatttattgatattggaaaatattttccaaatcttttatgtttaataaagtttttttattaattactccaatataatgtaaactttt

SEQ ID NO: 770737 - DNA, 667 bp, Homo sapiens
tggagaatcaaggaacataataaggctggttggttgctcctaagttcaggggacaaagtaatgaaagaaaatgatgaactcagagattctgtcttctggcttcagaagcagatactgagcctcaaatctgctaagaytgccctgattgacagtcttgtcttctctcgagaaagagctgaaattatggataaacagacacaagctcttatcatatgagtgtctgacctgcaaaaaaggtgcatgcagagcctcgccaggtgtctactgttaaagtgggggcattgattggaaaacaataggtccctgcaacttgaaatggggatgtgtgggaggaccctgatgaagctggggacactgagtttgtaaactctgatgaaaccttttttttgccagaagaaacagcttcctcatccccagtattggcaacatcccctctccaacccatgctgccatcagcctttccacatttgtctgaagaaataaaccctgggctgcctgaggcaactgtgatggcctcccctgaggcagttgccagacacaataatattgattctcctaaggagccacccccaactctcctgtttgcttctagacctataatttgactaaagttccggcgggcccccagaagtcaggttgagagcataacccatgagaaggcacacta

SEQ ID NO: 770738 - DNA, 667 bp, Homo sapiens
tggagaatcaaggaacataataaggctggttggttgctcctaagttcaggggacaaagtaatgaaagaaaatgatgaactcagagattctgtcttctggcttcagaagcagatactgagcctcaaatctgctaagattgccctgaytgacagtcttgtcttctctcgagaaagagctgaaattatggataaacagacacaagctcttatcatatgagtgtctgacctgcaaaaaaggtgcatgcagagcctcgccaggtgtctactgttaaagtgggggcattgattggaaaacaataggtccctgcaacttgaaatggggatgtgtgggaggaccctgatgaagctggggacactgagtttgtaaactctgatgaaaccttttttttgccagaagaaacagcttcctcatccccagtattggcaacatcccctctccaacccatgctgccatcagcctttccacatttgtctgaagaaataaaccctgggctgcctgaggcaactgtgatggcctcccctgaggcagttgccagacacaataatattgattctcctaaggagccacccccaactctcctgtttgcttctagacctataatttgactaaagttccggcgggcccccagaagtcaggttgagagcataacccatgagaaggcacacta

SEQ ID NO: 770739 - DNA, 667 bp, Homo sapiens
tggagaatcaaggaacataataaggctggttggttgctcctaagttcaggggacaaagtaatgaaagaaaatgatgaactcagagattctgtcttctggcttcagaagcagatactgagcctcaaatctgctaagattgccctgattgacagtcttgtcttctctmgagaaagagctgaaattatggataaacagacacaagctcttatcatatgagtgtctgacctgcaaaaaaggtgcatgcagagcctcgccaggtgtctactgttaaagtgggggcattgattggaaaacaataggtccctgcaacttgaaatggggatgtgtgggaggaccctgatgaagctggggacactgagtttgtaaactctgatgaaaccttttttttgccagaagaaacagcttcctcatccccagtattggcaacatcccctctccaacccatgctgccatcagcctttccacatttgtctgaagaaataaaccctgggctgcctgaggcaactgtgatggcctcccctgaggcagttgccagacacaataatattgattctcctaaggagccacccccaactctcctgtttgcttctagacctataatttgactaaagttccggcgggcccccagaagtcaggttgagagcataacccatgagaaggcacacta

SEQ ID NO: 770740 - DNA, 602 bp, Homo sapiens
ttgtatattttttctttcatgatcagaatggaggtgttcactattgggaaaagtaaaacaaaagtactgtgccctccttattcagaaggtatttgatatttacaggtattgctagaggtcttgaccttgatcatctgattaaagttgattcactatggtgaaattattatttttccctttgtaattagtaaatatttgggagaagatactttgagataattcaaatgttctagttctgcttaaacttttctcaacaatattaccatccatgagtagtagttactcagtctgcagtaactttcttctatctcatcaagaaacctagctcaaatgacctacaacatatttacttatttgttcaaccatagtatacaaaaacaattgtttccaaacttctaarccacatctctgtgagaaacaatttacttactataataatagtttacaatattattgttcagttctttttatctttagccgtttgatatccattcagtgtcttcactgatacaagataataaattgatattattttctgatgataatttatagtaaggctatgtatttatatcaagctctattgttacctgaaatgtattata

SEQ ID NO: 770741 - DNA, 564 bp, Homo sapiens
cacagacttgtgagctgcactgatggaagaaacatggccagaagctatttgatatggtactcctgccacagaaggggaggtctgtcttccctcctcttgaatctgggcagacctctcactgctctggcctataatacagaacagcagagagggtgctccgtgagttccccacttagcctttagaaggcctggcagcctggtctcttggagcaccaacggccgtgtaagaagtctgactcccgtgctgacagaccatgtggggaggtcctgaggccacatggaaggagacaccggccccactgagtgcagcyctccagctcacccagcaacacaccagatatgtgagtgaaaccgtcttgggcccttcagaccagctcaattgcttggtgtcactgctgaatatcaagtgacctcaggtgatgccagatggacatgccggccctgtctgaattcccaacccacaaattcatgtgctataataaaacacttgccgccatgtctccaggtagtttgttacagagcaacagatagccttaatagtagcaagccttggagacaaaccca

SEQ ID NO: 770742 - DNA, 616 bp, Homo sapiens
atatttgtgtctgtctctgaatagaagaatctcaatgtctttcaggatatttaaggatcatatacgtaaggtgcctcatgcttccttgagaagtctatgaacacatccttacaattatatgcaaaattttgggctttgtttacttatctgaaaaagagaatccacagattttataaygtctccagggagttcaagacccaccgctttccccaaagtttaagaaccactggtattatagaagagaaagaataggtctaaaacaaaatctggaaggatggccacgtcaggaagccacaaagaaagagtggagcctatgaaagttagagaaggatgaaattcccaggcatccccatgggagacagtagggtggtgaagctcatgcactgtggaatcatttcatctgagctcacagtctagtgtctccatctattaactgtgctggctgtgtgccctggggaagttacctctccaagcctcagttttctaatctatacaatgggatgatagtgcctacctcagagttgttgcaaggatgaagtgaggctatccatgtagcatgcctctctgcctccctattggtatgatgtgtgtgtgtgtgtgtgcatgtgttgtctct

SEQ ID NO: 770743 - DNA, 630 bp, Homo sapiens
acctgttctttgagaatgtgatgtactcagttcagtgcgttaattcttgacaactgcctggaaatacaaataaatacaaaacttaaagagaaaataaaatacaaatagttttaaaaactcattttggctacaaaaccctatttttaccycatttccaatatttactgtttctattctatttatacccatttctgcctggtggtttcatctaaacaagagggaaaacaggaacacacctgtgacatactcttgagttcataacatcaaagttatataaaagcccagctgaaggggaaaggaaagaagaggcattttggatgacccactctgtccagtttaccttatttcagctcttcctttctctgcacctcacccccagctccccacataaccgttatgtggtgtcctgctttcctttttcccctggggactagttggtgtgttaggagttggacccacacctggccatggttttctaattagtgttgatgctcagtttcattagaggaaggctcatgtccagtatccaatatagctttaatgagaagccacatttggctcaaaagcctttgtgaaatctctgcagcatcccctgcaatgttgaaggctatgatacagcaactttctgat

SEQ ID NO: 770744 - DNA, 594 bp, Homo sapiens
ctggaagcaactttctctgattacctctgggttcctaaagtgcatggcaccattaaggaactggagctagggaaatgcctgcaatgctactggctcctgctaggcaattggaatcaaagcatatttctttctttctttctttctttttttttttttttttttttttgagacagagttttgctcttattgcccaggctggaatgcwatggtgcgatctcagctcactgcaacctctgcttcccaggttcaaacaattctcctgcctcagcctcccaagtagctggaattacaggcgcctgccaccatgcccggctaactttttgtattttttgtggagatggggttttgccatgttggccaggctggtctcgaactcctgatctcaggtgatgcaccagcctcagcctcccaaagtgctgggattacaggcatgagccaccacatgtggccggaaccaaagcatatttcaaacccctcacctgacctggttttcatcatcacatgaatttccctgtctcatccttcttaacctttcctttgatgggaagggagacagctcatctgtctggagcggagaatagggcctgtgtggtg

SEQ ID NO: 770745 - DNA, 531 bp, Homo sapiens
aggcagtccttttatgatggatcctaaattggatgggaatctccaacaaaatagagatatgtgccatggaggaaaataaagcagtaaagaagtacaggaagtgctggggtggagggaggtggccaattttaagtggtatcatcagagaagagctcaaagagaaggtgatatttgagttgaacctaaaagacgtgagggagctgcccaagaggttacctggaggaaaggcatgttaggtagaggcatgaacaagtacaaataccccgaggtgggagtgagcttggcatgtttaaggaaacagcaacgcrgtctgtgtgtttggagcagagtgggcaagcaggagagcaataagagctggggtgggagatgtgatgatgccaattgtgtggccctcataggccaagaaggccttttgaccagaagccatttcagggttttgatagaggagtgacatgacccaacttatgtttcaaataattactccagtgactgcatttaaaaaacactgcagggcaaaggcagaagcaagtt

SEQ ID NO: 770746 - DNA, 652 bp, Homo sapiens
aaattatcttccaatgtggctatgccatttgcatttcaccagcaatgaggaacagttttgttgcttctaattctcaccagcaattggtatcatcacttttgaaattttagctattcaaataggtttgtagtggtatgctgttgttttaatttaaatttccctaatgacaaatgatattcagcacctttttatgttgcttatttggcacttgyatagcttcttaaattacatatttattctgatcttttgcccaatttttaattgggttgttttcttattgttgatttttaaaagttatttgtttattttgaatacagttttttattttcaggtatgcagtttgcaaatattttctagaagtctgtgtcttgttgttttattctcttaatgatgccttttccagagtaaatatttttaattttaataaagtctaatttaccaattttcaatttcatagattattgctttctgtgttgtgtctatatagtcatcactaaacacaaggccacacagattttctcctatatattctccttgatgttttgtagtttacatttaacatttaggtaaatgatacatattaatttaacttttgtgttagatatgaggttcatttttttccatatcgacttccattcttcccagcatcatt

SEQ ID NO: 770747 - DNA, 652 bp, Homo sapiens
aaattatcttccaatgtggctatgccatttgcatttcaccagcaatgaggaacagttttgttgcttctaattctcaccagcaattggtatcatcacttttgaaattttagctattcaaataggtttgtagtggtatgctgttgttttaatttaaatttccctaatgacaaatgatattcagcacctttttatgttgcttatttggcacttgtatagcttcttaaattacatatttattctgatcttttgcccaatttttaattgggttgttttcttattgttgatttttaaaagttatttgtttattttgaatacagttttttattttcaggtatgcagtttgcaaatattttctagaagtctgtgtcttgttgttttattctcttaatgatgccttttccagagtaaatatttttaattttaataaagtctaatttaccaattttcaatttcatagattattgctttctgtgttgtgtctatayagtcatcactaaacacaaggccacacagattttctcctatatattctccttgatgttttgtagtttacatttaacatttaggtaaatgatacatattaatttaacttttgtgttagatatgaggttcatttttttccatatcgacttccattcttcccagcatcatt

SEQ ID NO: 770748 - DNA, 610 bp, Homo sapiens
tagctgagagtttaacagccaagaaagaaggaaaaagacaaaaggaagaagctcccggtacagacacagagagagggggctccaaagaggaaagaggagactctgcatttggaggataccagccagttttacgtgatggctggaagaggcggtgtctgatttcaagttccatggttcaggggattggtttgacctggcatgtcattcacgttggcygtgaaaaaactggccctcccacagtcctttaatatgcaaatgcagggcgccataatgttctacacacacttggggatatgtgggcgtggccatgttgtcaggcacatgctggggcaagggcaagaggacaagggtgggaatcgccatgttgggtggacccagtttctaatggtcagcttttgcgtatcacaggttgccagtctgggtctaagagccagggctttcatgctagacaagaaatatttttggagctgcaaaaaaaacctttcaaggacctcttttcctctctatctaaaataattttttttttcttttttttgagaaggggtctggctctgtcgcccaggctggagtgcagtggcgcaatcttagctcactgcaagctccgcctcct

SEQ ID NO: 770749 - DNA, 592 bp, Homo sapiens
ccctaatcttttattatgcagatggcatctctatctggctggcgccatgttgcctgcttttttaatgcacacatagcaacaataaaaagagaagagggattccctccttgttgaacatacctggcccccagctagccttttcctagtggcacagctgccagcatttacctatgcaagcttccagcttgcttatttatgtctgtagctcgattttacaagctggtctttgttagaaaagaaataatttkgaggctgctttttgctaaaagggaagctttattgaggactctcttaccctcactaactgcctaaagaatttccttttaactcctgtatcatttagaataatctggcttcagtagtggagaataactagcactcacgtacatcctgtttgggtcctgattaacaaatcttaaaagcaagacccaaatagataaaaatgatttcaaagaacttatctacaatacagaaaaaatctcaaggatatttaaaggagtacaaaaatatgctatagacaacaaggtaagattctctctattgtatccaatgaaaattaccagaaatacaacgcagcagtaaaaaaccacac

SEQ ID NO: 770750 - DNA, 592 bp, Homo sapiens
ccctaatcttttattatgcagatggcatctctatctggctggcgccatgttgcctgcttttttaatgcacacatagcaacaataaaaagagaagagggattccctccttgttgaacatacctggcccccagctagccttttcctagtggcacagctgccagcatttacctatgcaagcttccagcttgcttatttatgtctgtagctcgattttacaagctggtctttgttagaaaagaaataatttggaggctgctttttgctaaaagggaagctttattraggactctcttaccctcactaactgcctaaagaatttccttttaactcctgtatcatttagaataatctggcttcagtagtggagaataactagcactcacgtacatcctgtttgggtcctgattaacaaatcttaaaagcaagacccaaatagataaaaatgatttcaaagaacttatctacaatacagaaaaaatctcaaggatatttaaaggagtacaaaaatatgctatagacaacaaggtaagattctctctattgtatccaatgaaaattaccagaaatacaacgcagcagtaaaaaaccacac

SEQ ID NO: 770751 - DNA, 588 bp, Homo sapiens
tgggtccgcctcccacccagtggagtgtactttcattttcaataaatctctgcttctgttgcttcattctttccttgctttgtttgtgtgatttgtctgcttctttgttcaagacgctaagaacctggacaccttacaaccagtaacagcttctatatctattataaagctaccctaatcaagaaatcaggatagccaaatagattaatggaacagaayagagattccagaaatagacacacacacttataaatgactggttttgacaaagatgcatagatgattgactggagaaaggtacaaagggccacaaagaaaacttgggagtagtagatattgtcactattttattgtgatattttcattggtgcatgcatatgtcaaaacatcacattttttacttttgattgtggttaagtgatgatcaattaaaaaaaaatgatgactttacaacagaacaatgaaaccagtgtatgtggtgggttaaagacaactgacaattctttttcactcaccttattgcattgtaaagtttttcattccgctccttgaaaatgggctcatcttggaactttgtatcaagtagac

SEQ ID NO: 770752 - DNA, 588 bp, Homo sapiens
tgggtccgcctcccacccagtggagtgtactttcattttcaataaatctctgcttctgttgcttcattctttccttgctttgtttgtgtgatttgtctgcttctttgttcaagacgctaagaacctggacaccttacaaccagtaacagcttctatatctattataaagctaccctaatcaagaaatcaggatagccaaatagattaatggaacagaatagagattccagaaatagacacacacacttataaatgactggttttgacaaagatgcatagaygattgactggagaaaggtacaaagggccacaaagaaaacttgggagtagtagatattgtcactattttattgtgatattttcattggtgcatgcatatgtcaaaacatcacattttttacttttgattgtggttaagtgatgatcaattaaaaaaaaatgatgactttacaacagaacaatgaaaccagtgtatgtggtgggttaaagacaactgacaattctttttcactcaccttattgcattgtaaagtttttcattccgctccttgaaaatgggctcatcttggaactttgtatcaagtagac

SEQ ID NO: 770753 - DNA, 628 bp, Homo sapiens
aaggaaaactaggaagaagcctatgaattattcagtgatgtccagtataacacagggaaaggaagaaaatcttactgcctttctggagagactaagggaggcattgaggaaacatacctccctgtcacctgactctactgaaggccaactaatcttaaaggataagtttatcactcagtcagctgcagacattagaaaaaaacttcaaaagtccwccttagtcctggagcaaaacttagaaaccctattgaatttggcaaccttggttttttataatagagatcaagaggagcaggtggaatgagacaaacaggataaaaaaaaaagccactgctttaatcatggccctcagggaagcggactttggaggctctggaaaagggaaaagctgggcaagttgaatgcctaatagggcttgcttccagtgtggtctacaaggacactttaaaaaagattgtccaagtggaaataagttgccccctcatccatgccccttatgtcaagggaatcactggaagacccatttacctaggggatgaaggtcccctgagtcagaagccactaatcagatgatccagcagcaggactgagggtgcctggggcaagcaccagcccatgccaacaccct

SEQ ID NO: 770754 - DNA, 619 bp, Homo sapiens
gtgattgttttctggccatcttagccttaataaagtttagagataagtaagaagagttggaattatcttattaagtaatgaatttcaggatgtagtttcaaggtcagcttcagcaattatctctctctctgtattttaacatgtgtttctgttcagtagcctatctctatctggacagcttatataattacaaaacttctctttttgcatttgtacaaagtgccctcttcttagagattgatctatcaatttgaagacaagcttcagctactagtatacactttttaaaaaaaataaattttattktgtatatttgaagtttacaacacaatgttatagaatatatagggatagtaaaatagttactatagtgaagcaaattaaaataatttatcatctcatatagctactattttgtgtgtatgacaagaatagctaaaatctacatatttaacaagaaaaaaattccctaataaaataaaatcgtgtcacctatagtcttcatgtggtatattggatttctagacttgttcattctttatgacggccactttgtatcttttgacattcctctccctccccatttcctcaccacccctgatgactaactaatgtttta

SEQ ID NO: 770755 - DNA, 619 bp, Homo sapiens
gtgattgttttctggccatcttagccttaataaagtttagagataagtaagaagagttggaattatcttattaagtaatgaatttcaggatgtagtttcaaggtcagcttcagcaattatctctctctctgtattttaacatgtgtttctgttcagtagcctatctctatctggacagcttatataattacaaaacttctctttttgcatttgtacaaagtgccctcttcttagagattgatctatcaatttgaagacaagcttcagctactagtatacactttttaaaaaaaataaattttattgtgtatatttgaagtttacaacacaatgttatagaatatatagggatagtaaaatagttactatagtgaagyaaattaaaataatttatcatctcatatagctactattttgtgtgtatgacaagaatagctaaaatctacatatttaacaagaaaaaaattccctaataaaataaaatcgtgtcacctatagtcttcatgtggtatattggatttctagacttgttcattctttatgacggccactttgtatcttttgacattcctctccctccccatttcctcaccacccctgatgactaactaatgtttta

SEQ ID NO: 770756 - DNA, 584 bp, Homo sapiens
taaattgatcctgttccagaaagacatcttgcctatgtctatgccagctatggatggccatggaagacagtgaacaagggctattcttccagacagcaaaggtggaagtttccagattgactgaccaaataattcactataccaccaggtcaaagagtctctgcatttctgtccattaatgtgtgctgtggtcaatgggctttatgtattctgttcattccttcctatttccccaatgtgagctattactgacatgattattaccatggaatagtgtaaaaattgtaagaagatgaatgtacatttaaccaaataccactaggccatgaagaggctcaggaagaagtttgacaaagaaaactgagtatttctgagcactttagacatgagcatatagatatagatgtttaaaattttgaaytgtctcctttttgggagaaatagcttggttttataatagctcaagtacttctaagggctagtatatcttccagtggattctgcataccttagtaacttcacaagctttcatatgtttatgaggtctgtaagatgtcgacttacagagttgagtatagctctct

SEQ ID NO: 770757 - DNA, 606 bp, Homo sapiens
atctattgctctatttgacattattgaaattggaataagctattattcaattatattttatgaagggctttttttagtagtgcatgaaagtctttaacttataatgtttatcttataactatctatctaattgcactcttttgttaccctaatgcataattaatttatttccttatgttctgcaagtatgtgacaataccatcagttttataatgatatttactatccattgtttcatctctagatctagtttcccttccagacgtatcgacatactctacagataaatgatyaataacagtgtcaattgtggaaatttttgcccttatttcagtattcattagcaaattatatgcatgattttcacagtgatggtaagacctgtgagagtaagaatataaacatttaacaggactcttaaactgaagcgatcagcttacacaatataagaataaaaatatgatttaattttcctatagcaaaatgtttacagagctatttagtaataaaaagacatgtctttatccttttcaattattatcaaaattggaattgtgtcaagaaaattatctgcagattagatattagatatttacaaaatcttta

SEQ ID NO: 770758 - DNA, 527 bp, Homo sapiens
caagtccaaagtcatctatcccttggcatggaagcgatgatagcaaacttggcatgtgaggtacaatgaatctccctattccactggctttgaatttattaaaaatttgtattaatgtccagaactattggggaactaacacttgttgagtacagttttatttcttatatcattaaaacatcacacaatccaaagagataaatatatcctcacttttacaaattaaaaaactgaggcaaaaagaagtcgagtaattggctaaaagtcatatgaaaagtaaggagaacagtgatggtccaaactcagacctacccagctatgtgacggtagcatcgctttataaaawttcattttttatctgttccttttaacttaaaaaatgcctactaccatacatatcacttgtcctttccttggaaaaatcaagggttaaaatatttgatgttttctcagcacacctctttagagcagacatgaacacaatgtgccttgaaatttactccactcaccatttagaaagatggaaa

SEQ ID NO: 770759 - DNA, 596 bp, Homo sapiens
gccctaaagcccccatggtttcaatcttaaataaataaaattatacatagtcattttcccaatttatcttccaaaaaacagaactaaataatcttcagtcataaaaataggtaaacaacaacaatatatagagtcatcacagtgttaacttatttcaatgttcataaattaatattgaaatttaataaaattgggcaaatatttgactatcaactattttctcaatataaactgttttcctccacatctcatataaacgttcaacagatgcatcaagcaacttattttcttacagtttcttgtgttgcttgaaacaaaccaggagctatttttgtttaaaagttttatttctatatataatcattggtttttttwaaaaaaaatattttcatagtttttggagaacaggatgtttttagttatatggataagttctttagtggtaacatgagtgcaaaaatcaaattttagcctatggctatgatagagacagcaagtttttccctaaaagcttgaatgggactctcatataatagagctgttgggaggagccttcctagccagtgacttagttttgaggttaccccattcatttg

SEQ ID NO: 770760 - DNA, 604 bp, Homo sapiens; identical to SEQ ID NO: 744414

SEQ ID NO: 770761 - DNA, 483 bp, Homo sapiens
agtcagtgatacttaggggctcaggtttgaaggtctgaattgactcagtgtaatcttatttatcaaaatctgacagttttagcctaccctgaatctgtcttctctttatatttaccagccccagcctcctcatttctcctattagtttttgtctgatatttttcaaaatccctctatgtaaacttcatatattcaatttcacttgcctttggtgagtattctgctcagttatgtaggctccctccatgtgttccttaaatccaggttttcgaagtgtcttctggaatattatttcggaaagagaagccmcagtaatgatgtaattccatttatttagtgaacgttgcatgcatcttatatctgtttttggtgactcatagtgcatgaagcatatcaaagggtttgagaaatcctgcagtaaagaaattggtttagcttttttaaaaccaagcacttcacaagcttatttgaccatagactgat

SEQ ID NO: 770762 - DNA, 601 bp, Homo sapiens
cactcccctcaggatagtaagactggttaaaaacactgctctcagcccacacagttatagctacagcctaggttaaatgattcctcatcctggtgtttttattctcatgtttaattacttctttaaagattaagattatatatagaaaaaataattgtggtatcagagaatacaggtakaatttttcatatatcaggactatgtgatgatacttaagcaatagtgtacatacagtaatatatgtttaatatcgagtatggataatgaaggacttttctttttcaccttgtttataatgacattttatccagggtttgaatcaaataaattcatgttaactgtactattttattgaaatgttctagtcttattattggataattagaaataaacattttaaagtctttatgaataaataaggatgttttcctatgtatacaactgtactattttcattagtaataaacatcactttcaagaacctgtctacatttgtttttgtcaattagaggaaaattgtagatcttagcaacagttgaattgtaatgaccatttaaagacacatgctatgtaagcattgtgtgaaaatgaaaatctttct

SEQ ID NO: 770763 - DNA, 602 bp, Homo sapiens
  misc_feature 8: n = A,T,C or G
tctgtcangtagcttatttgcaatgagtagaaatgaactctggttaattcaagcagaaaaacaatttctttaaagtgtaaacagcatgttggttctcagccacctgcttggaaatttctgcaatttggtttggctcctcatttacgaatattttgagaattggattctggtgcttttcactctctacttgcaatttaacatttcaatttacaaacgaaattgggcattgtccagaattgcaaggaggattggaggagaaccaggcttggaggctaagcagcaaagaacagtgcccaaaaattatgtcccasaaagaggctcagtgagaagattgttccaccatcaccagtgccaagttctataaactctgaatctctattagagggatcacaggtgctgacgctcagtatcaaaacccgcactgctacacctcctaccccagaatgtccatctcgcttcaactgccactccactgatattcagctaattttaagaaatattatgaaatggacatacttatttttatataataatatactgttataacaaagtatttggaaggacacatgctattaattatggtaacctttggaaagttggat

SEQ ID NO: 770764 - DNA, 546 bp, Homo sapiens
ggaaaaagagttaatatttgacggtggtttaggttcagggtctgggcaaaaggtagatctgattacttggccatggagtgagacttcatcagagaagagcgctgaaccactgtccaagccgtggcttgaagatgatgattcacttttgccagctgagattgaagacaagaaactagttttagttgacaaaatggattccacagaccaaattagtaagcactcaaaatatgaacatgatgacagatccayacactttccagaggaagagcctcttagtgggcctgctgtgcccatcttcgcagatactgcagctgaatctgcgtctctaaccctccccaagcacatatcagaagtacctggtgttgatgattactcagttaccaaagcacctcttatactgacatctgtagcaatctctgcctctactgataaatcagatcaggcagatgccatcctaagggaggatatggaacaaattactgagtcatccaactatgaatggtttgacagtgaggtttcaatggtaaagccagatatgcaaacttt

SEQ ID NO: 770765 - DNA, 629 bp, Homo sapiens
tttatttttgcttgtgttgcccgtgcttttgaagtcttattcataaagtcttttaccagaccaatgccctgaagtatttcccctctgtttttttttctagtagttttattatttcaggtcatacacttagatctttgattgattttgagttgattttgtatagggtgagaagtaagggtctagtttcattcttctgcatatggatatccagtttttccagcactacttattgaagagattgtcctttccccaaggagtgttcttggcacttttgtcaaaagtcagttgactgtagatgtgtggattaattttggggctctctattctgttacattggcctatgtgtctgtttttatgccagtaccatgttgttttgcttactacagctttgtagtatattaatattttgaggtctgatrgtttcatggctccagctttgttctttttgctcagattgtaaaagtaactttttaattcatgctagtgaggtagcatggagcataaggtaggagaacataaacaacactaattgttcactgttttaaattcacattaaccagtaatcagcagtcttttaagtaggtttttgctgactaaaaacagtagcaaaacattgctacttagattct

SEQ ID NO: 770766 - DNA, 601 bp, Homo sapiens
tgatagactggataaagaaaatgtggcacatatacaacaccatggaatactatgcaggcataaaaaaaggatgcgttcatgtcctttgcagggacatgcatgaagctggaaaccatcattctcagcaaactaacacaagaacagaaaaccaaacccctgtgttttcactcataagtgggatttgaacaaggagaacacatggacacagggaagggaacatcacacaccagggcctgtcgggccgtgaaagggttggtggggggatagcattaggagaaatacctaatgtagatgatgagttgataggtgcagcaaaccaccatggcacgttcatacctatgtaacaacctgcacgttctgcacatgtgtcctagaacttaaaktacaataataataaaagaaagagtactgataactaatctgaaaaaaaagtagactttaatttcttattcccagcccttgtgctactgttctccaacatttatattacttatgtgatgaaaatagcaaaatattttaatatattttctttaaagtttcaatgcttatttaacctagtttataatacaaccacatcttacatttacaaatattatctttt

SEQ ID NO: 770767 - DNA, 542 bp, Homo sapiens
tttataaagacatcaattcagcttttaaaccgcatattgaaaatactgaaagagaagaacagtttcctcttctaaacattttaagttagacaaaacaaaaaatcagaaaatctggcatatatgaaaaagtgcataaagcgaaacaaataatttaaggaccaccgtttcattgtctgctctactattctattttaacataaaatgtttggaaaattccacttgccttagtattcacagtgagtgttttatttaatttgcccctttcagaggatttgcmaaagttggagtagaaatgctgatttttattttaaagtctaaaattggaaagatactaaatgcctgacagcagcaggaaagttcagcacccaaatggaaatgtgataccctattatggaagcacacgaaaatacagatagatttgtctctgggatttcagggattctgatcatgtttctattatgcacttccttttccatgcccagaactgctctcacagttctgagaataacatttgcaaactcagtgtctttcataacttttca

SEQ ID NO: 770768 - DNA, 569 bp, Homo sapiens
aagtgccaagtatgatgagctacttttaacgttagatggacagagcactatgacgttgcttcacagattataatatggagttgcagaaggacctctggaagtaatttctatataaatactgaatgactaacaggaaagccacctggagaatatgggacttgtctgcaatcttaagaaggactttcacagcaggaaatcagaaggatgattattctacataatgaggcatctttatatcctcaaataaactatgaagtatctgtagtaggagctataatgtaacaycatttagtacaacattgtttttaagtaatcgttctaatgacactgtatgtgtgtgtatctgtaggtttccctgtttggtttctttgtacatgaccatacacctgttctcttactgttcattcatttttctttcagtaaaaaattttctaagcactttgtggcaggcaggatcgtaagattgccttaaaatacccttgagttcatataatttattctcatgagtgtggtttggactggtgaatatgaggtctatctcctaaggctatattacattctatggcaaa

SEQ ID NO: 770769 - DNA, 569 bp, Homo sapiens
aagtgccaagtatgatgagctacttttaacgttagatggacagagcactatgacgttgcttcacagattataatatggagttgcagaaggacctctggaagtaatttctatataaatactgaatgactaacaggaaagccacctggagaatatgggacttgtctgcaatcttaagaaggactttcacagcaggaaatcagaaggatgattattctacataatgaggcatctttatatcctcaaataaactatgaagtatctgtagtaggagctataatgtaacaccatttagtacaacattgtttttaagtaatcgttctaatgacactrtatgtgtgtgtatctgtaggtttccctgtttggtttctttgtacatgaccatacacctgttctcttactgttcattcatttttctttcagtaaaaaattttctaagcactttgtggcaggcaggatcgtaagattgccttaaaatacccttgagttcatataatttattctcatgagtgtggtttggactggtgaatatgaggtctatctcctaaggctatattacattctatggcaaa

SEQ ID NO: 770770 - DNA, 506 bp, Homo sapiens; identical to SEQ ID NO: 744175

SEQ ID NO: 770771 - DNA, 595 bp, Homo sapiens
gattatgggctaggttctgggatggtaatggagttttagaaaggaagtgaggattaaatgtatcaaatatagactctattcctacaaatgcctctcctctttctcttaaagtatttttgaaaatgattagcagagatggaacggaaaactagtgaatgggattagaacctccagagctttaatttctacccactcctttgccattgcaacattgaatgacattaacctaaccctcagttcttcagtctcagtttccccatatctaaaatagacatgaagattgtacctacttcatagccttatttttatcagagtcaattatgtgaaaatgctctatacatgatgaaaccttgagttactacttttgatgctgattcaagggctcattcattcattttttttcaattaagtgtctattttgtggagagccttctccaaarcatcaaggggagaagaggatgcagtgcctgccactggatacctcagaatctaattaggagagtaagttaaataatacatcaatccagttgttcagttcaagggatgtgggcaggtaacgtgcatgcaagtgcctatgagactccaaaagaggaga

SEQ ID NO: 770772 - DNA, 568 bp, Homo sapiens
tggagtgaccagcacccagctgcagtgactgtatggaagctttttagggcacacgctgctgtatgcccagaagcttcagaaaattgactagaagttgatgactgaaggccctaggattttagtcttgtgagagccaattgcttcttcttccatcttcttctgcctttcattggccacttttatcaggccccttgccatcactggactctcaccagactctcactgctattctaaattctgaattccaccaaggccattgtatcaraaactccacttcttggccaggtgcagtggctcacacctgtaatcccagcactttgggaggccaagatgggtggatgccaagtccaggagtttcagatcagcctagacaacatgcaaaatcccacctctacaaaaattacaaaaattagctgacatagtggcatgtgtttgtagtcccagttacttgggaggctgaggtgggagagtcacctgagcatgggaagtggaggctgcagtgagccatgatcgtgccactgcacactgcactccagcctgggtggcagagtgagattctgcctcaaac

SEQ ID NO: 770773 - DNA, 605 bp, Homo sapiens
gccctggggtcctatataaatttgaaaggcagtctaggcaggttctggtgtcatgctgagctcagagccagtggacatggcttacatatgacctactgaaacaccagctgaggtggccaagggcgtgcaacctcccacaacactaggcaccaggagagactccttccctctgcttgaggataggggagggaagagtaaagaagactttgccttgcaacatggataccagctcaactacagtagaataggacactggggagagtcctgatgccccccttccaggccctagatcccaaatgacatttctatacacaccttaagcataaaggaattcatcaccttgaagagaaggactcagttctggcaggattcatcacctgctgactaaagagmcattgggtcctgaatgatcagcaccaatacccaggcagtactcaccatggaccttggcgaggctctgagatatgctcgcttcaggtgtaacccagcacattaccagctgtagttgctatggggaaagcctccttctgcttgagaacagaagaggaaagatgaatttgtcctgcagcttagatgccagctcagccacagttgggaagagcaca

SEQ ID NO: 770774 - DNA, 581 bp, Homo sapiens
aataaatgaaatggaaataaaagaatacaagagatcaatgaatcacgtttgttttttgaaaagataagcaaaactgacaaaccattagtcagactaattaatacaaaaagagagaagacccaagtaaataaaatcagagatgaaaaakgagacattacaaccaatactgctgaaattcaaaggatcattacaggctactataagtgacaatatgccaataaattgaaaaacctagaagaaatgaatacatttctagacacattaaacctaccaatattgaaccatgaagaaattaaatccctgaaaaagaccaataataagcaatgaggtcgaagccatatataaacttagctaagcaaaaagcctgggacctgatggcttcattactgaattctacgaaacatttaaagaactaataccaatcctactcaaacagctccaaaaaacagttccaaactcattctatgaggcaaatattacccttataccaaaaccaaagatacatggaaacaagaaaactacaggcgaatttatctgatgaacattgatgcaataatcctcaatgaaatactagcaaactg

SEQ ID NO: 770775 - DNA, 581 bp, Homo sapiens
aataaatgaaatggaaataaaagaatacaagagatcaatgaatcacgtttgttttttgaaaagataagcaaaactgacaaaccattagtcagactaattaatacaaaaagagagaagacccaagtaaataaaatcagagatgaaaaatgagacattacaaccaatactgctgaaattcaaaggatcattacaggctactataagygacaatatgccaataaattgaaaaacctagaagaaatgaatacatttctagacacattaaacctaccaatattgaaccatgaagaaattaaatccctgaaaaagaccaataataagcaatgaggtcgaagccatatataaacttagctaagcaaaaagcctgggacctgatggcttcattactgaattctacgaaacatttaaagaactaataccaatcctactcaaacagctccaaaaaacagttccaaactcattctatgaggcaaatattacccttataccaaaaccaaagatacatggaaacaagaaaactacaggcgaatttatctgatgaacattgatgcaataatcctcaatgaaatactagcaaactg

SEQ ID NO: 770776 - DNA, 581 bp, Homo sapiens
aataaatgaaatggaaataaaagaatacaagagatcaatgaatcacgtttgttttttgaaaagataagcaaaactgacaaaccattagtcagactaattaatacaaaaagagagaagacccaagtaaataaaatcagagatgaaaaatgagacattacaaccaatactgctgaaattcaaaggatcattacaggctactataagtgacaatatgccaataaattgaaaaacctagaagaaatgaatacatttctagacacattaaacctaccaatattgaaccatgaagaaattaaatccctgaaaaagaccaataataagcaatgaggtcgaagccatatataaacttagctaagcaaaaagcctgggacctgatggcttcattactgaattctacsaaacatttaaagaactaataccaatcctactcaaacagctccaaaaaacagttccaaactcattctatgaggcaaatattacccttataccaaaaccaaagatacatggaaacaagaaaactacaggcgaatttatctgatgaacattgatgcaataatcctcaatgaaatactagcaaactg

SEQ ID NO: 770777 - DNA, 629 bp, Homo sapiens
aagggatccagtttcagctttctacatatggctagccagttttcccagcaccatttattaaatagggaatcctttccccattgcttgtttttctcaggtttgtcaaagatcagatagttgtagatatgcggcgttatttctgagggctctgttctgttccattgatctatatctctgttttggtaccagtaccatgctgttttggttactgtaaactacttttccattcagatcattttagtttggttaattatgtaaaagcaaatatttgtttagagtaatgcygctgctccattaatgaattattgcctggttccctcgttattgtacatctcagtcactttcaattatgctcaaaaggcgcatctctcaaaggaatctttttttttttcttcccacactcactcagtttaacttcctctcctggtttatctaaacaggaattcatcttcattttaggaagtacttacttcacaaattagctttccttacattctttctaaagcaaaacaaatctagttttgtttctaagaatcgaaatcagaaatgctataacttaaattttgtaactgcttaacaacaaacacaccgactacaagtttttcttaaagacaacattgcccatttcc

SEQ ID NO: 770778 - DNA, 564 bp, Homo sapiens
ataaacttgctttagtttggatgtttgtctccttcaaatcccatattgaaatttgatccctaatgttgaaggtcgggcccagtgggaggtatgtgggtcatgggggtgggtccctcatcaataaattagtgccttcgctcaagggtaagttcttcctctgttcattaccgggagaactgattgttaaaaagagcctggcaccgcctccacaccttrcttcctctctcgccatgtgatctccacacacgctggctccccttcactttccaccattagtagaagcagcctgaggccctcacctgatgcagatgccagtgccatgcttcttgtaaagccaaagacccataagccaaattggcctcttttctttagaaattacccagcctcaggtattcctttatagcaatgctaaatggactaagacaataattaacctgcctgagcttcagtttcttcatccataaaatgaggatggacacagaatctgtttcactaggattgccaagagaatttagtgaaataatacagaggacacagattatgtgttcttttctggcttaggaa

SEQ ID NO: 770779 - DNA, 641 bp, Homo sapiens
ggataagaatcagaaagggcagtgccaaggtgcaggggctacaaggaaaggtgactcccctcgctatctgaggataagaggcaattgatgatggcccaacactcacagcttctatcttccccacaaagggaaagaaacagggaggcacctcccatcctctaggtggacacagcccagccagcaaatcagggtatcacgaccagctacagaatttatgggacccaggagaaaatgcaaatgtgcagctctttgttcagaaagtattaaggatttcaagacagtgacagcaggactttaagccgagccagagtctttctgagtgcaggactttgtgcacgtgtcctgctggctcaatgtgaagcccctgcctgcccttcragcatggtggggtgatgttccagatctatcatggatgtgattagaggtcttgtcccctggtctgaaagacattccacccctcaggtttactaccctcgtctgcacttcatttttgaggtgccgatgacacaaggtaggtaagtgagccccatgaaagctgctaccaagggctcagaggttatggggcttggggatgaaggtgaccgtgaggaacctgaatcaagacggctccgggacacggtggcaaaggtgcctttccaggc

SEQ ID NO: 770780 - DNA, 584 bp, Homo sapiens
tggaagtgccagcctctggtctagaactaggcccctggggcagcaccatggccggcaccgtccatcagcacttgcctggaagcggcatcactgcaccttaggagatgtggggctcccaggctggaaaagcacctcccctccctcttcctcagtgttaggctgcaattcgttcccatcctgcaggaaaaattaaaaaactcagatctcatctttgccttcaagatcatttgcccaaatctgggagcacaacttcctcctggaggtggagaagcacagtctgtatgagcagcaggcctaccaccgccagcccttttggatatgctgggaagtgagtccactctgctggagtccacgcccaayaaacttcacagaagccagtgctcccaaacactggcttaaagaggacaaataagtcatttaaagaaagatattgtatggtgttacctgtccatcataaaaaggtctagcctatatggttttataactttgccaagtcttattgtggtgtttgagtttagcctggacagtggctaaatttggagttccttatttatttatactttcatgcaagagggtcacagtgt

SEQ ID NO: 770781 - DNA, 586 bp, Homo sapiens
atctgagccttcagcgagttgtaatctttttgccagtggagggtcttgcctagactctgatggttgccaactgatcagggtggtggttgctgctgtggaaatttttaaaactaagacatcaatgaagtttgccacatcgattgtctcttcctttcaagaaagatttttctatacatgcaatgctctttaatattttaaccagataacttctttcaaaattgaagtcaatcctctcataccctgccagtgctttctcagctaagtttatgtaatattctaaatccttgattgccattttaacaatgttctaacatcttcaccggaattagattctatctcacgaaaccattttctttggttattcataggatgcaactccccatctgttcaagttttaccatgagattgcagcaattcaaacacatcrccaggcttcacttttaattttagttctcctgctacttctacaacatctgcagttacttcctccactaaaatcttgaaccccacaaagtcatccatgagggctggaatcagcttcttccaaactcctgttaatgttgatattttggcttcctcccatgaa

SEQ ID NO: 770782 - DNA, 634 bp, Homo sapiens
attatttcctcctccctccctcactctctcccttcatccctctctccttccttccctccttcctcccccaacttccatttttcttccttccttttctttctttcttttctttctttcttttctttctttctttctttctttctctcttcttgcattcaataaatatttatccactccttacacgccatgcttatgggaatatagaaatgaaacagaactatcatatttctaaatataacacaaaaccataagaaaagagaagcaccaaatttattacgtgtttttcagaagctttcagaaatcctttctatgatatatatcaaggaaaatatacaagagtgcagggaatagtggaatctggggcttttcctaaactggcaaagaaagtgacttaattcagggtcagtacatatttaaatcccacaatttgaaaaacatctgttccctasataataggaaataaaatcaagaaattggttcagcggttggtgtatgggatatgggagtagatatgctgaaaagaacataatatcccatactatctataacttttagggcactgactgtttaaatttgcacgcacattgtagaattggagtttgaattgggttccatttttcataagtgaaaagct

SEQ ID NO: 770783 - DNA, 637 bp, Homo sapiens
tatgcatgcgttgatatgattatgtaatttttctttctgaacctgttgatgtcatgggctacattcactgattcctcaactgttgaactagatttgcacacctggaataaatccctcttagtcatggtgtgtaattctttttacacatcgttagatttgatttgttaatattttgttcaggatttttgtatttgtgtgaattagcaatgttggtctgtagtttttctttcttataatgtctttatttgatttttgcattaagccaatggtgccttcatagaatgcattaggaagtgctctgtttctatgttctggaaaaaattacaaaaatttgaatcatctttttaaaaaccrttcagttgaattcaccaaaaaaaaaaaaaaaaaaatcatctggacctgctgctttccttttcagaagattagtgatttaatttctttaatagttataggcctatttagatgatctatttttccttgtgtgagttttgatagcttgtgtctttcaaggaattgattcatttcatctcagttactgtattcgtaggtatacagttgttaataagattcttttactttctttatattcatggaatcagtagtgatgaaaactctcatttctgatattagtaattta

SEQ ID NO: 770784 - DNA, 432 bp, Homo sapiens
tccacaagcacttcctgactttctggcacgacaagattcccaggctcaccttgtgctttacctgccttggaccttgaattaactattcaagaaacgttggttcctttcaatagggagtggtgttagtaaccataatctgggtacgagagatgctcattgctgttgggctatcagtgctcacaggtctaattggtaggggatggacaggcagataacacaagcacatacmttgctcataatattaatgttttctttattatttaatatgtgtaagttattaaaaattcaccataccaacattatgactaaacataaagttactgagtaaaaatttagactacttggctgttattgccttatttttaaaaacatttcccagtggcattttgcagtagagttttatgttcaaatgccacttgaaatagttcaatt

SEQ ID NO: 770785 - DNA, 570 bp, Homo sapiens
ctcttatctgcaagtgacagaaactgaaattgaattgaaacaaacatacagaaggaacttagtggcttctgtcacagaaaatgtcaggaggcgcattaagaactcaacaatgagaacacatggacacagggaggggaatatcacacactggggcctgtcaacgggtsgggggctagaggagggatagcattaggagaaatacctaatgtagatgacgggttgatgggtgcagcaaaccaccgtaacacatgtatacctatgtaacaaacctgcacgttctgcacatgtatcccagaacataaagtataatttgaaaaaaaaaaaaaaaactttaggtccagatacacagcctggggaggacctgatttctttcttgactcttccttctcaggcaggtcctccctcccgacatgaagtttgttgtctgccattcttagcaaactcagcagaaagtactcttcatccagtagcaccgaccagcatcctagcattgattctgattggtccaccgtggggtctatgactataggagtgccatgttttattatcaagcataggaaatgtgcccac

SEQ ID NO: 770786 - DNA, 570 bp, Homo sapiens
ctcttatctgcaagtgacagaaactgaaattgaattgaaacaaacatacagaaggaacttagtggcttctgtcacagaaaatgtcaggaggcgcattaagaactcaacaatgagaacacatggacacagggaggggaatatcacacactggggcctgtcaacgggtcgggggctagaggagggatagcattaggagaaatacctaatgtagatgacgggttgatgggtgcagcaaaccaccgtaacacatgtatacctatgtaacaaacctgcaygttctgcacatgtatcccagaacataaagtataatttgaaaaaaaaaaaaaaaactttaggtccagatacacagcctggggaggacctgatttctttcttgactcttccttctcaggcaggtcctccctcccgacatgaagtttgttgtctgccattcttagcaaactcagcagaaagtactcttcatccagtagcaccgaccagcatcctagcattgattctgattggtccaccgtggggtctatgactataggagtgccatgttttattatcaagcataggaaatgtgcccac

SEQ ID NO: 770787 - DNA, 447 bp, Homo sapiens
taatattttattgactttgatattatttccatcagtcatttttttataatgaagcatcctaattttttaaagttttatttaaaatattcaaatattctagatattaccacagataatttaaaacatagtaacccargataattgtgtgtgtgtgtgtgtttgatgtgttctataccactcatcaacaataaaacaaaggactatcctaatagatgccataagaaaaaaaaaaaaaagcatgtgagggagaagtacaggtgggaaactgagtttttttccctgaacatatttatactttcaaatatccaaaatcttttgcttaacagaagtgtgctttcttttgttgctcatctttcaaattcttctagtctttcagtatcctgtttcacaaagctgctgaactgaattacaccttcttctaatacccaaagtccttgaggtgctaaa

SEQ ID NO: 770788 - DNA, 447 bp, Homo sapiens
taatattttattgactttgatattatttccatcagtcatttttttataatgaagcatcctaattttttaaagttttatttaaaatattcaaatattctagatattaccacagataatttaaaacatagtaacccaggataattgtgtgtgtgtgtgtgtttgatgtgttctataccaytcatcaacaataaaacaaaggactatcctaatagatgccataagaaaaaaaaaaaaaagcatgtgagggagaagtacaggtgggaaactgagtttttttccctgaacatatttatactttcaaatatccaaaatcttttgcttaacagaagtgtgctttcttttgttgctcatctttcaaattcttctagtctttcagtatcctgtttcacaaagctgctgaactgaattacaccttcttctaatacccaaagtccttgaggtgctaaa

SEQ ID NO: 770789 - DNA, 627 bp, Homo sapiens
aaaatgctcctggggaaactggatgagttctgggccaagtaaaaaacagacagctgtgggtatggggtcttccagggaccataagacaggcaaaataatgacagtgctttgaaaatgagcctttaaagaagcttcaacactatttttccctctctggcagctgtcagcctactggttttcactgtgattgcaggctgttggctttcaaagctacttcagagctgtggaggagaggattggataagacaagttaaaatgctacaaagcttgctctttaccaagattcaaattttttcattttttttttccaaataaatgctccccaggtttctgcaaacctttagctaatttctagagttctgagcaagttgattctgatcatttttgccagttttctcattgcttttatggaagagagaatttttttaagtccttactctgccatttttgctgatatcatctctccaagattttatcatgtaggttatatracaagctccaatagatattcacttgaacacatattcatatgttatagtccctaagattagtttttttttccccagctgattctttaaatagtgagagaaatttagttcctaggaagtatgtgctctggccataatg

SEQ ID NO: 770790 - DNA, 648 bp, Homo sapiens
tctagttttaaaagataaaaactcaaggaaatttatccatgattaatgaatttgtggaggttgtttttcaagggctaatagagactaaaacatagatatatgtcttagtctgtttgtgctgctataacagaatatcagactgggtaatttataatgaacagaaatttattgtctcatagttatgaaggctgagagatccaatatcaaagtgctggcatctggggaggaccttcttgcttcatcataacatggtggaaggcatcatgttgtgmgagaaaccaagtgagagaaagcaagcatgggcaaaaccattcctgcagtaacaaacccactcctgcagtaatggtactagttgattcatgagagctctgcctctaagagatcccacctcccaataccatcacaatgacaattgaaattcaacatgagttttggtggcgacaaacattcaaactatagcaatatattgaattatcatatcaaaaatatgcctttgctctcattccttcaataagttggacagggcagtagaaatgaattaaaatttagaaaatccttcttacctgaatgtaaaatattgtaaaatttaagtttagcaggatttggcccttgtctctaatgctataacagatttagagattgttccat

SEQ ID NO: 770791 - DNA, 648 bp, Homo sapiens
tctagttttaaaagataaaaactcaaggaaatttatccatgattaatgaatttgtggaggttgtttttcaagggctaatagagactaaaacatagatatatgtcttagtctgtttgtgctgctataacagaatatcagactgggtaatttataatgaacagaaatttattgtctcatagttatgaaggctgagagatccaatatcaaagtgctggcatctggggaggaccttcttgcttcatcataacatggtggaaggcatcatgttgtgagagaaacmaagtgagagaaagcaagcatgggcaaaaccattcctgcagtaacaaacccactcctgcagtaatggtactagttgattcatgagagctctgcctctaagagatcccacctcccaataccatcacaatgacaattgaaattcaacatgagttttggtggcgacaaacattcaaactatagcaatatattgaattatcatatcaaaaatatgcctttgctctcattccttcaataagttggacagggcagtagaaatgaattaaaatttagaaaatccttcttacctgaatgtaaaatattgtaaaatttaagtttagcaggatttggcccttgtctctaatgctataacagatttagagattgttccat

SEQ ID NO: 770792 - DNA, 648 bp, Homo sapiens
tctagttttaaaagataaaaactcaaggaaatttatccatgattaatgaatttgtggaggttgtttttcaagggctaatagagactaaaacatagatatatgtcttagtctgtttgtgctgctataacagaatatcagactgggtaatttataatgaacagaaatttattgtctcatagttatgaaggctgagagatccaatatcaaagtgctggcatctggggaggaccttcttgcttcatcataacatggtggaaggcatcatgttgtgagagaaaccaagtgagagaaagcaagcatgggmaaaaccattcctgcagtaacaaacccactcctgcagtaatggtactagttgattcatgagagctctgcctctaagagatcccacctcccaataccatcacaatgacaattgaaattcaacatgagttttggtggcgacaaacattcaaactatagcaatatattgaattatcatatcaaaaatatgcctttgctctcattccttcaataagttggacagggcagtagaaatgaattaaaatttagaaaatccttcttacctgaatgtaaaatattgtaaaatttaagtttagcaggatttggcccttgtctctaatgctataacagatttagagattgttccat

SEQ ID NO: 770793 - DNA, 648 bp, Homo sapiens
tctagttttaaaagataaaaactcaaggaaatttatccatgattaatgaatttgtggaggttgtttttcaagggctaatagagactaaaacatagatatatgtcttagtctgtttgtgctgctataacagaatatcagactgggtaatttataatgaacagaaatttattgtctcatagttatgaaggctgagagatccaatatcaaagtgctggcatctggggaggaccttcttgcttcatcataacatggtggaaggcatcatgttgtgagagaaaccaagtgagagaaagcaagcatgggcaaaaccattcctgcagtaacaaamccactcctgcagtaatggtactagttgattcatgagagctctgcctctaagagatcccacctcccaataccatcacaatgacaattgaaattcaacatgagttttggtggcgacaaacattcaaactatagcaatatattgaattatcatatcaaaaatatgcctttgctctcattccttcaataagttggacagggcagtagaaatgaattaaaatttagaaaatccttcttacctgaatgtaaaatattgtaaaatttaagtttagcaggatttggcccttgtctctaatgctataacagatttagagattgttccat

SEQ ID NO: 770794 - DNA, 589 bp, Homo sapiens
ggaccctgctttctctgaaggctctaggagaggaccattcctctcccagctttggaggtggttggcactccttggcccatggcagcagcattgggtctctgcctccgtcttcacagccccttctcccctgtgtcttctcctaaggttcttataaggatgctcgtcgttggatctagggcccaccggattcatcctggatgatctcagcttgagattcttaactgagtcacatctgcaagacctcttctttttttttttttttttttttttgagacagagtctcgctctgtcacccaggctggagtgcagtggcgcratcttggctcactgcaagctccgcctcccgggttcacgccattctcctgcctcagcctcccaagtagctgggactacaggcactggctacaacgcccggctaattttttgtatttttcctagagataggatttcaccatgctagccagaatggtctcaatctcctgacctcgtgatccacctgcctcagcctcccaaagtgctgggattacaggcgtgagccaccgcgcccagccctttttttttttttaagacagaatgtcactcttgtcgc

SEQ ID NO: 770795 - DNA, 679 bp, Homo sapiens
gcttcccagtgtccacaccaccaaaagtaaacaatttcattgacttctcacaccagagattagtttggcatatcaataaaattgtgcattatgtataaccctctttttttgacagtggtccagccgttggacatcagctataccatccttttgtttaaataaaagtgaacaatctrgaatcaccaacatatatgagagagaaggagagcagtactaaggagaaaaaacaaacaaacacaagtttttaagggaacaaaataatttagggaaaagataagagatgtaatgatctcatattccactaatagaattaccataaggagaaaacagggaaaactaagaggaggaaattatcaaaaacataatggaagaaaatttcccagaactagaggacataagtcttaagactgaaaaggcccatcaagcgttcagtccaataaatgaataaagatatacacatagccttaactttttaaaactgtaggctatcaaagataaagagatgactctaaaagcatccggagaaaaatgacaagtcacttataaagggataagaaacagtggcttcagtttggcatcagcaaaagtggatgtctactagagaatgatgtaatagtgatgtctaaaagttctgaagaaaagttattttccacccagaaaattactatattattattat

SEQ ID NO: 770796 - DNA, 679 bp, Homo sapiens
gcttcccagtgtccacaccaccaaaagtaaacaatttcattgacttctcacaccagagattagtttggcatatcaataaaattgtgcattatgtataaccctctttttttgacagtggtccagccgttggacatcagctataccatccttttgtttaaataaaagtgaacaatctggaatcaccaacatatatgagagagaaggagagcagtactaaggagaaaaaacaaacaaacacaagtttttaagggaacaaaataatttagggaaaagataagagatgtaatgatctcatattccactaatagaattaccataaggagaaaacagggaaaactaagaggaggaaattatcaaaaacataatggaagaaaatttcccagaactagaggacataagtcttaagactgaaaaggcccatcaagcgttcagtccaataaatgaataaagatatacacatagccttaactttttaaaactgtaggctatcaaagayaaagagatgactctaaaagcatccggagaaaaatgacaagtcacttataaagggataagaaacagtggcttcagtttggcatcagcaaaagtggatgtctactagagaatgatgtaatagtgatgtctaaaagttctgaagaaaagttattttccacccagaaaattactatattattattat

SEQ ID NO: 770797 - DNA, 540 bp, Homo sapiens
atgccattccaaggtagctgcagtggccaaaaggcactgggagagttgagtaagagaaagagatggcagtctcaacaatgagctagcagtgggagcaataaacagaggcaactatgagtgctataagtgtgggatgacaaaagcagcacacaggttccacctgtctgaacacatcctaggcgtaaacctgtrtacaactgtaattaaactgtctctagataagaaagttgtaaagaaaccacctatattttttaagaaagaaaaagtcttctacctggagaggtttttttttttttttttttttttttctggagtctcgctctgtcacccacactggagtgcagtggcatgatcttggctcactgcaacctccacctccggggttcaagcgattctcctgcctcagcctcctgagtagctgggattacaggtgcgcgccaccacacccagctaattttttggtatttttagtagagacgggatttcaccacgttggtcaggctggtctcgaactcctgacctcgtgatccacctgcctca

SEQ ID NO: 770798 - DNA, 541 bp, Homo sapiens
tggaggacttcatggggcttcagaacccagggcactcctgccacatgttatcaatgactttgcagtattgtgatagtgtgtgataccacccgtcatatgcagtaacaaggagggagactgaccgaactttgaaggcatccttcctgttagaatttcaactacctccatatctagtacaggagagggaagtaaatgcagtggaaatctgattttttttttcactctgttccccaggctggagggcagtggcacaatctcggctcactgcaacctccgtctcccgggttcaaacgattctcctrcctcagcctcccgggtagctgggattacaggcatgtgccaccatgcccggctaattttgtatttttagtagagatgaggtttctccatgttggtcaggctggtctcgaactcctgacctcaggtgatccatccgccttggcctcccaaagtgctgggattacaggcatgagccaccacacctagtccctgatttttttttatcggcaaattcactgttgagggttggagcagcctgtga

SEQ ID NO: 770799 - DNA, 609 bp, Homo sapiens
aggatcctggtggcctcgtggtaagctgtgacaggaatgcacaaggatctcctggcttgttggctggcatcgctggcccagtgatgtgaggtgaagggattctttgctctgactcagctcaatccccctgtacaaagggactaggtgggcttgctgtgcttttggaaggaccagaaaaatctgcttccttcactcactgggagccatgtattctctttgacttttgtttgcaggagcaaaacaaacagatgcttggggaaaaccaaccaaaaaggggggaaggggaggctggtgctggctggcaaccttgactcagcgctcggcaggaggtccattcggaacagaaaccctcaccctgcactttcctcacccagccctgaaatcacaaacaaccccttggccagggtcytaatgagcctctgacaaacacagcccgccctcctgacacagaaaagacaattagacatgcacaagtggcctgtgaaatgccaggctgggcacttgagctctccatgaatggcaccccctgtaccctgggccttctcggaaaaacattgcttgggttccttacgggtggtaatggctaataatgcagagagaacaccgtgt

SEQ ID NO: 770800 - DNA, 566 bp, Homo sapiens
taaaaggaaacaggtaaaattgattctaacaacattttatttaacttaacgtagccaaaatattatcctttcaacctgtaaaaggaaaaaaaaaattaaaatgtatttatataaatataaaatgtacttatgcctatgtataaattttacatttgtagtacatctcagtgtggactggccacatttcaagtgctcagcagccacatgcagagtggctactatctgggacagcacagctctagagggaaagacaagaacttggaaattacatggagccaggctgcatataagggaatgcattttaacactgaatcctgtgtatatgtggctggaataaagaaccttgggaagagcgatctccctgtgactgaaggtatccaatctgaggctggtcactgcttgctggaaactgctgagaaagaactctttcmctagcctggcatttggactggatgaaccctgaggtcctatctagttcttacccaggtgagtctaggatttatgctctggaagccagaagtcataataatgaacattcatatgatcccttacagaatgcaaaaggc

SEQ ID NO: 770801 - DNA, 606 bp, Homo sapiens
atttatgatggggttcataaatataatttatgcaattacgtaaaacaaaagtgtatgcaaaaattccacaaattggccaggcgaggtggctcactcctgcaattccagcactttgggagggcgaggtgggcagatcaygaggtcaggagatggagaacatcctggccaacatggtctctactaaaaattgaaaaaaaaaaaattagctgtgtgtggcagcatgtgcctgtaatcccagctactggagaggctgaggcaggagaatcgcttgaacccgggaggcggaggttgcagtgagtcgagatcacaccactgcattccagacggcaacagagcgagactctgtctcaaaaaaaaaaaaaaaaaatccacaaattactgaatatcatgtccagatctccagtaatgtatcatttttattcttttatcatttttatgttaagtttaaagcatgtaaaatagtgctctgtattgtttagggataatctagtcatgatataaagaactgtgtgagaagaatgataactgtccattcatgccagtggttagttctgagagggggtagtgcaggcattgtgattgaataggggcacagagagataagag

SEQ ID NO: 770802 - DNA, 627 bp, Homo sapiens
tacagttttcataaagatttgtaaaacatcagatgtggccattatttcttcaaatgtttttcctgtatctgcccttcctctcctagaactccatacagtgtgttagaacatttaatggtatacatagtcatggatactcttgttaattcygcccatcttttttctgttttattttgaatagttttttattgctttatattccctttcactgatatctttttctgcagtgtctaatttgctgttaatggctcttcagatatattttacttttcgtctctagaagttctattcgggtcttttcatatgttacatctttcacctcatcatatttatgttttcctatacattcatgaacatatgtgggctatttataactgtttttaacatcctcttctgctggtttcatcatgtctatcatttctggctcagtggctaatgagtaaatttttttcatgcttctttgtatggtaacttttgttggacacagaacattgtaaattttttgttctcaagtgctagattttttgaattctttactggtgtttaattttgttttatcacttagttaagttacttggagtcagatgttttaaggcttgcttttaagctttgttaggacttgttcag

SEQ ID NO: 770803 - DNA, 607 bp, Homo sapiens
cctgactggctcattgggcgtatgccactctagtagtcacattaagcaatgcttggtgggtaacaatgataacaagaatgattaagatagcaaacatttacatagcatggactcagtagctgcaccgttataagtagtgaaagacacagccttaactacatgtgaaaatagcttactaccaccttcttggtgataataatgacagtggtagtagccaaccggagctgaattctaggtatcaagcaccatgccaagcrttttatttgcatgatgataaaacgatacttgatggagcaagagtgctatggggataggagggaattgaaaacacaggttgaaagaaaaaaacaagtaaagaggattcgctccagacaagcgttcctttgtacaggtgagtgaggaaaaagacagagcacagatccagcacgatgtgttcatagagaggagcgacacagagagggttaagccaagtagcttcattttccccgggaagaaggaggctgcctcacctgctatgaatgaggatgctcccatgttaggtaaaattagtgtctgagacactaatttatcctatgacagaaattactgaatatagctgatgtgtttt

SEQ ID NO: 770804 - DNA, 682 bp, Homo sapiens; identical to SEQ ID NO: 768608

SEQ ID NO: 770805 - DNA, 682 bp, Homo sapiens; identical to SEQ ID NO: 768609

SEQ ID NO: 770806 - DNA, 641 bp, Homo sapiens
gcctctttatctgttctggtcactttgctccttgttcaaaggagtcaggtgcccagagggctgctaaagggaagatacagacctatggccaatgagtgggaagaaggacgtagcagctcagaggactcaggcgcttcttttcttggagagctggacctcagcaggggtctgccctgggccccagagagcagttataattcgttcgggccaacgacaaggggatgatttattccctggtgcagtgggatgggctttacaggcataaaacaggaacaatagcaccgtgtaataaacccagcatgtccttgccagagaggaaagaaaactgagtgactcagacattaaactgtcagattgtgaccggagacaggtcaggtgaagakagctcttgcatagggccaggttcccggattctggggcaggcttgagccgcctactggtgaaggacaaataggacagtcagccccagaaagacatggggagagggccagcgagccaatgcgcagcttttaatagcaacgttcaaagtgttgacttttattttatttagcaaatgtggaacataatgtctctgtgttgcacttggtaggaaaagtaacaattgtttccagggttttccataaacttatctattttgatca

SEQ ID NO: 770807 - DNA, 612 bp, Homo sapiens
tagagcccttagtgcagccaataacttgatcaatgtctaaactgaagatgactctttaattcatgaagctcctggtctgtttgataaaacctgcccagaaacagactcttatattctaggaaaaataaggacattcttaaacagttttgtattgtcaatatttagggtggttttgatctccatggaagacacagagtccaagctatgaaatggcaaacatttagaatataattcttttatttagaatatacaactttcttcaaaagtattgtttctttaaaacatgttattttagactgtgtaatttacagagagtttagrttacaggagacaaagcattttagtattaaatatgatgtttacaaatgaattagaccttgtctttagcatgcctcattgagttcatgacttcttgtatataataaagatgcatatgctttaaaagagccagttttcactagtgcttgatgatctggccttatgatctcttgagtaatacggccatttttttttcatatggctcaaaagtgaattagcagaattaaatattttagttacatcctattccatacaatactagatgtgacatttatttaagtaaatgtttttaaa

SEQ ID NO: 770808 - DNA, 640 bp, Homo sapiens
aagtcttataattttaagcatttattaatttgcttatttggtataaaacaggctcaaagaggaatagtctaaactaattctgtcttttcagagtcaaaagatattacctcgttagaggaagaaatatagtaaaatataaatagtctatcatgctcgcattaataccatttactatgccaagccttgtgctaattagtaaaaattccaagatatcaaataaaaaacttaaatatattaatttagtggaattggcaagtagttattttttgatattatcctgtggattcaaaataaattggagatttttgccaatgtttttcatccagtatttcatcaagttgaagagaaattagaagattttgcagttaaaattgtgtgacctcctaaaggtacatttcataaatttaaaaagaaattatatttatcaaaaatataagtcaaatcttttattgaaaaaaragcatttgcttcaagtaattttgctcctgccaaaaatacacatactgataagggtttattttgggttcagagatgactggaggagttaagaaatcttaaactatgtacaaggagacaacccagaaggcacccaagtaaaatcaacgaggcatggcaaactatagatttcagatatgtcatc

SEQ ID NO: 770809 - DNA, 620 bp, Homo sapiens
tgcatatcactggcatttggagtacaaattactttgtactacctgtacataactactacctgtacacgggtagtgagcataatacctgacaggtagtttttccatccccacttcttcccacccccaacccttaagtaggccctggtgtctactcttcccctcttgtgtccatgtatactcatgtttagctctcccttacaagtgagaacatgaggtatttggttttctgttcctgcattaatttgcttaggataatgaactccagctgcatctgtgttgctgcagattgaagaacatggttttgttcttatttatggctacataatagtccacggtgtatatgtaccacattttcttcattcagtccaccatcgatgggtatctagattgaktctatgtctttgctattatgaatagtgctgtgatgaacttatatgtgtcttttctggtagaatgatttatattcttttgtgtatatacccaggaacaggattgctaggtctaatggtagttttgttttaaggtctttgagaaatctccaaaactgatttccacagtgtctgaactaatttacattcccactagcagtgtataagcgttcccttttctctgcaacctct

SEQ ID NO: 770810 - DNA, 614 bp, Homo sapiens
ctccagctgcatctgtgttgctgcagattgaagaacatggttttgttcttatttatggctacataatagtccacggtgtatatgtaccacattttcttcattcagtccaccatcgatgggtatctagattgattctatgtctttgctattatgaatagtgctgtgatgaacttatatgtgtcttttctggtagratgatttatattcttttgtgtatatacccaggaacaggattgctaggtctaatggtagttttgttttaaggtctttgagaaatctccaaaactgatttccacagtgtctgaactaatttacattcccactagcagtgtataagcgttcccttttctctgcaacctctccaatatctattattttttgacatttaataatagtcattctgattagtgcaagatggtatctctttagggttttgattttcatttctatgatgattagtgatgttgaacattattttcatgtgctttttggccacctgtatgtcttctttggagaagtgtttatgtcctttacctattttctaatgaggttgttttctttttgcttgttgaattaagttcctcatagattctggatattagaactttgtcaga

SEQ ID NO: 770811 - DNA, 566 bp, Homo sapiens
ctaatatgaacttaagctaaagaaggaaatataaattttgcctagtattaagagacagtaggccaagaaaaagatatgcaggctgcttgttacaaggctaagatctcgaaaaaagaaaaatcagaaaaagaaaacatatgcataataagaaaaactggcacacactttaaaatcttatctaatagcaaaatccttgatgttggactgaacagctacaaaaatatgtcaaattaaccttctcccaccacastcacacacagactaaattaatgttcttggttttctacaataaaaacctagaggattgcattacttgccttttatatttcacatgttggtttaaatgtataaaaatatgaaaccaatccatttaaaatatatttgtagttaaatgcaacattacctttgtctgtgtatatgagtgcagttgatacagaatccaaaaattaaaatttgcagcgtgtaatatcttcaattctatgaacaatctagatttctgataaaaactaaatatatagaatatgaagtgaataaaatacaaacacggaactgtaattgagatgaag

SEQ ID NO: 770812 - DNA, 545 bp, Homo sapiens
tagtgaataagtctcacaagatctaatgtttttctttctctgttcatccttttttgaatattctggtaagtatttcacattaatacaagctacattacatagagccactgtatgacaagaaatttactcaactttttcctttcaagtatgtaaacaattatacatgtatttatcaccctaagaggttgaaacatgtaatcaactaattctcttctgcatgcaagtagtattcagtatgtttagccaaaaacactaaggtcatatgatctgaagtgatctgatggtttcatatatgggagttcccctgtacaagctctcttgccttccaccatgtaagaagtccckttgctcttcttttgccttccacaatgattgtgaggcctccacaaccatatggaactgtgaatcaattaaatgtcttttatttataaattccctagtcttgtgtatgtctttattagcagcatgaggatagactaatacagacactaacttaagaagatgctccaccttcacataatatgagaattaccagttaaaactac

SEQ ID NO: 770813 - DNA, 630 bp, Homo sapiens
gtcttagggctttttaagtctcctgccctgtagtcataatacactatgaagagacctagacaatctgagcattcaaggaaacatcacgctgactcgttgcatcagtgatatcacactcaacgataaaatgaggaagaggcatctaggatgttgcaagtttaaaagacaaacacacactagagggtacaaggtaaattttatgaatgytcaagacctaccacttctgtgaatgttttagaggttcaatcatcaggttcatgccaaagtaaaagtttctgcgtcattcattccctaccacgattagggaagcacaacagtctttgacttccgaagttaacagattttatatttatacattttaagcatgaccatgtattgggctactttgagtcagtcccagaggataggactgtgcaacaaattcagactgtgttacaaacagctttattgcttgagttatacaatctagcagtccctttggtggtggtagtagtgggaaaagatgccttatggtcctatggcattcctgaacatatgtaccctcccacaactggaccaggaagaaattgagtccttgaatagaccaataatgagttcaaaaattgaggcagtaataaataccctaccaac

SEQ ID NO: 770814 - DNA, 405 bp, Homo sapiens
tttagccaggagttgcagtttatttttaagtgagtctagcattatgtgaaatttggttatttactttagggttcctatgtagtgaaaaaactacttgaaataaccatgtatagtgtttagaagcatgacataaaatatgagggcatggttcatgtactctggttgttttttctcttactaattgggcatgggacaaatwagtcttttttttttttttggaatccccctactctcccaatatggttggaatctccctgctctcccaatcatatgctgtagttttaacccccactactacacaatgtgactttagaaacagggttagtaaagatgtcaaaagttaagattaagtgattaggttgggccctaatatgaattctgcccttataaaaatgggaaatttga

SEQ ID NO: 770815 - DNA, 405 bp, Homo sapiens
tttagccaggagttgcagtttatttttaagtgagtctagcattatgtgaaatttggttatttactttagggttcctatgtagtgaaaaaactacttgaaataaccatgtatagtgtttagaagcatgacataaaatatgagggcatggttcatgtactctggttgttttttctcttactaattgggcatgggacaaataagtcttttttttttttttggaatccccctactctcccaatatggttggaatctccctrctctcccaatcatatgctgtagttttaacccccactactacacaatgtgactttagaaacagggttagtaaagatgtcaaaagttaagattaagtgattaggttgggccctaatatgaattctgcccttataaaaatgggaaatttga

SEQ ID NO: 770816 - DNA, 597 bp, Homo sapiens
gtttttcagacttgattggacaagaccctgccttatacttttttcttattgaacgattaaactcagctctcaatgggcttaaacatgctgcaattgtaacaagcttaagttctgactgatgaggtgaaaaaatacaatttagaatgagtgatgacaaaataccatagcagaagtatttatgactattaagggaacacagaaaaacagccctttgattttgctatggagtgggtgttagaaacatattcctagattaagtgaattttgagctaggtttaattttataaattttataaatgtgcttttagcttctgggaatttggaatcatggtagaagtgctatattttctttaaaaaaaggaattgattgctgtattgtcatcttctttaaaaccatgattgtttattcatcattcagctgtcatatcaaataatcyttaatagtgtcaacaaaatgaacaactccaggtgcaccatcaatattgtattctatttcatttaattattttggccactactatcttcacaatgctaacattattcatgttgaatgctatatgaatgtcgccccttggaattgggcaaaatagttgcctg

SEQ ID NO: 770817 - DNA, 512 bp, Homo sapiens
catcaaagttcttggcctaaatttttctttttttgttatgactctgatagattttcgtatcaggatgatgctagtctcatagaacaagttagggaagagtacttcctcctcaatttttttgaatagtttcagtaggagtggtatcagctcttctttatacatttggtagaattccactgtagtcgatcaggcgctggacttyttttgtttggcaggctttttgctactgattcaatttctgaacttgttattggtctgttcagggattcaatttctttctgattcagtcttgggaggttgtatgtgttcaggtaacttatctatttcttctgttttctagcttgtgtgcatggaagtttttgtaatagcctctgaaggttttgttgttgttgttgttgttgttatttctgtggtgtcagtggtgtcccctttctcattcctgattgtgtttatttgaatcttctctctttttgtctttattagtctagctagtggtctatctaccttatgaa

SEQ ID NO: 770818 - DNA, 470 bp, Homo sapiens
gcaaagcagaagccagcacatcacatggcaaaagaaaaagagagaggaggtcccagacttttaaacaaccagatctcacgtggactgagggagaactcacttatcagcaaggggatggggctaagtcattcatgagggatctgccccattattaccaaaacaccagtggtttgatgtaggtcttgatgcttgcttcacagaaagccaatcactgaaacaacagttattgccaaggaaggctttaatcagttgctgcagccaaggagatgggcgctcagtctcaaatccatctgcctgactaaaactaagagtttgtatagcaggggagaaaygtaacagtgtgtaagaaaacaaaaattagggaagggtcaaggacgcaatcatggtgaatgagggattcatgatgtggtgccatcatctggtgagtttcagttctttgatactttctttgagaggcctgaaggttcttt

SEQ ID NO: 770819 - DNA, 570 bp, Homo sapiens
gtttgtttcacatactcagacttcttccctatctgcttcatctgccttaaccaagatgttagaccagtgattcttaatcctgtatacatgccagaatcactggggagcttaaaaccaaggaaccaaacacactggagcctggatttcattcccagaagtgtgaatttaattgatacggggtatagtgtgtatgagcttgcttctgggattttttttgaagttccatagaactttgggatgaraatctctaccttagatgctattcttatcttcctcctgggtttattgagcaacatgccttgtttttgtttgttttgttagtaatagctcccctgcctcccttggctgccacctccacttgcagtggtttacctatctgccctgctatcattctgcctgttctgttttgttctgttcctctgtgtcctctcttagcaaaaggacattgctgatcttaccttcaaatctttgtccttgctattgtggctgcttgtaatcactcctcttttctctattggaatcttgttgaaccaaagtttcgccttctccatgcaactgtctctcatcact

SEQ ID NO: 770820 - DNA, 570 bp, Homo sapiens
gtttgtttcacatactcagacttcttccctatctgcttcatctgccttaaccaagatgttagaccagtgattcttaatcctgtatacatgccagaatcactggggagcttaaaaccaaggaaccaaacacactggagcctggatttcattcccagaagtgtgaatttaattgatacggggtatagtgtgtatgagcttgcttctgggattttttttgaagttccatagaactttgggatgagaatctctaccttaratgctattcttatcttcctcctgggtttattgagcaacatgccttgtttttgtttgttttgttagtaatagctcccctgcctcccttggctgccacctccacttgcagtggtttacctatctgccctgctatcattctgcctgttctgttttgttctgttcctctgtgtcctctcttagcaaaaggacattgctgatcttaccttcaaatctttgtccttgctattgtggctgcttgtaatcactcctcttttctctattggaatcttgttgaaccaaagtttcgccttctccatgcaactgtctctcatcact

SEQ ID NO: 770821 - DNA, 563 bp, Homo sapiens
tccattacctggatcctcctcagggtcagtttctattgaatgccttttttctctagattattttttgttgtctttgtgtatcggtgatctttgatggcaactggacattatacattatacattgcagagtctctggattctaccatgttcttttgaagagtaatttatttatgtatttatgtattttttttttttgagacagagtcttgctctgtcacccaggctgtggtgcaatggcgcaatctcagctcactgcaacctccccctcctgggttcaagcaattctcctccctcagcctcctgagtagctgggattacaggcatgtgccaccatgccmggctaatttttgtatttttaatagagacaggtttcatcatgttggccaggctggtctcaaactcctgacctcaagtgatccacccaccttgacctctcaaagtgctggaattacaggtgtgagccactgtacctggcctcaagatatgctttgaaggaagatctgataaactgcttaattttctgtgccttaattttatcatttataaaatgggaataataataa

SEQ ID NO: 770822 - DNA, 620 bp, Homo sapiens
gacagatcagcgagacagaaaattaacaaggatatccaggacttgaactcagctctggaccgagtggacctaatagacatctacagaactcttcaccccaaatcaacagaatatacattcttctcaacaccacattacacttattctaaaattgaccacataattggaagtaaaacactcctcagcaaacataaaagaacagaaatcacaacaaacagtctctcagaccacagcacaatcaaattagaactcaggattaagaaactcactcaaaacttcacaactacatggaaactgaacaacctgctcctgaatgactactgggtaaataatgaaataaaggcagaaataaagatgttctttgaaaccartgagaacaaaggcaatgtaccagaatctctgggacacatttaaagcagtgtgtacatttatagcattaaatgcccacaagagaaagcaggaacaatctaatcaaaacacactaacattaaaattataataactagacaagcacaagcaaacaaattcaaaagctagcaggaaaccagaaataacgaagatcagagcagaactgaaggagatagagacataaaaaacctttaaaaaaatcaataaatcca

SEQ ID NO: 770823 - DNA, 564 bp, Homo sapiens
agcattttggtcaaagccattccacaagtctctaggaaattccaaactttcccacatctttctgtcttctgagccctccaagtttctagcaagttccaaactttcccacattttcctatctctgagcactctaaactgtttcagactctgcctcttacccagtttcaaagtcgcttccacatttttggatatctttacagcagtgcccaactactcagtaccaatttactctattagttcattcttatgctgctaatgaagacatacctgaggctgggtagtttataaaggaaagaggtttaattgactcacagttcagcatggctggggaggcatcaggaaacttacaatcatggtggaagggaagcaaacatgtscttctccacatggtggcaggagagagaagaatgagtgcccaacaaagggggaagccctttataaaaccatcagctctcatgagaactaactcactatcatgagaacaggatggggcaactgcccccatgtttcaattatttccacctggtccctcccgctacatatagggattatgggaactgcaat

SEQ ID NO: 770824 - DNA, 643 bp, Homo sapiens
tctcagctcaaccttcaacacacaattcagttaagatctccttttgtgaattttattatgaatccttcagttagatgggattgtcccaatgtctaagttccccaaacatttggcacacatcttaggtcatatgtcatctcctgctttttgttatagtattcatagccttcagatgtattcattgatcggggcctggaagttcagaatggggtcttacacctcttcatattctcccacggtatgaaggacaatataaactacaaaatgascaatctacacagttattgaattgaattgagacagtttttcatgcaaatgctaaaatataataatctcttttctgctaaagggcttacttgaagacactaaaaatgaatcaataatttcagttttgtaatagtcttattttagggattcctgccagttttttgtttttcaagggatgtctacagtctgctcttctaagggctttattcatcaagagggtgaacctgcagaaaatagtggaaccatttgacctcaacagtaaggtaccagatttttggatgcctatgcttgataagtgcgtgcttttgtttcaggaggtttttgaggccacacccttcctgttattaaaattttctacaacaggcttaattttaag

SEQ ID NO: 770825 - DNA, 523 bp, Homo sapiens
gcacacattatatccaaaaaggtgctactataatagtgtgggtttatgtcaatctgaacacactcctacctaaaacctaaaattttagccatgacaaatggccattgaatatggtagcagagaatacaatggggaaaggaaaatattaagtaacaaagcagtactgctgcaatccctgcatcataaggtctaatttggtaatcagaatttccctctactgcaaagtacatgctttctgttatttctggcatcacctctgcaggaagtgtttatacacctactgggttaaaccaaaacttcattcttgtaatgcctgagtccttggtgatcctgtctttattggcctgcttaaattttctattgatcaggayggttgggcaagaaagtactaggaagcgcctcaatgaatcctatagatcctaggcatggttctaattgtcccattgatggcagtggcaggccctctggagtggctgctgctatcacgccagctacagcagagaggcatagccagaactgcatg

SEQ ID NO: 770826 - DNA, 656 bp, Homo sapiens
taatttggtagctccagggtgggcctcaaactctatttttctttctttctttctggtttgttttgttttgttttgttttttgagacagggtcctgctctgtcacccaggcttggagtgcagtggcatgatcatggctcactgcagcctcgacctcccaggctcaagcgatcctctcacctcagcctcccaagtagttgggactacaggtgcatgccaccatgcttagctaattttggaggtatttttgggtaaagatgggggtcttactatgctaccaggctggtctcgaactcctgggttcaagtgatccacctgccttggcttcccaaagttctgggattacaggcaggagctaccatgctcagccttgagctcctgggtgatgccaatgctgttgggccaggaccacatgttgagaagcagggtcccggggtgcactrctgcctgactgtccatcagttcctcccccgtattcagaacctctggccctacctggctttgcatccctgggcatagtcccttctgtaactggactttcattggtggctgtgcactgtccagatatagccatggtacttgccaggttcctctccctgatctcaccctgccctcctcatatctttatctcagactgggaggcaatgatagattaagg

SEQ ID NO: 770827 - DNA, 600 bp, Homo sapiens
ttatcctcatagtacatcagttcaacattacaaatgttcaaactaaaccaatttaacaaaaagaaacctaaattctctctacaagggaactaatatctttttataaacttttatagcattgcatctttgtctttcttaaagtacttatcttccaccttattgtattcatttctgtacatcttctgcaagtttaaggagaaaagcagctctcgttatctaaaatgtcaatgtgccctgtacttcgcagaacatgaaagtggaattttaataactcagtatgttggaatggaaagcaaagccacaacaatgtttaaccttttcaggttcaccaactgctgtgagaacttcctgacagctgtggaccttttycccagaaaactgtgcacaggcaattttgaatataaccttggggatctcctgaatataatccgggggataccccttaagaggtccagggccccagttaacaatcactggcacatgaaataccaagagccaaaccattcttcaactaaagagaacagggataaaaagaggatgttcaagttcaggtttctatcagatcagttaggctactcccacaatagaccaaaaagacaa

SEQ ID NO: 770828 - DNA, 544 bp, Homo sapiens
gctactcagggggctgaaccaggaggatcacttgagcccatgtgttcaaggttatagtgagttatgatggcaccactgcactccagcctgggtgacagagcaagaccctgtatctaaaacaaataaataaataaagtggagaagttaatgtctcccttatataggcagagacagagaagttttagcaggattataacattttttatataagaccagagcatatattacagcaatttgattgattacagattgctacattccaaggaagatgatttctttgtgaggaggggtaatggtctgaggggcccttactctggtgctgcctggtcttcctaattacttacaggaaaaaaatgcagaagttgcagctgcatggcacgtaacttaggcctcatagccacattcctytcaaggctcagaataatttaaggttctaatagctttaagttagcatgatttaatttcacacaatttaaaaatgacatcagccctttttccaagagaattacactttgtgaaatcccctctgtgctaactttagaaa

SEQ ID NO: 770829 - DNA, 634 bp, Homo sapiens
caccacaactaagcactacccagtccaaaatatcaacagtgccaaggtcgcacaaccccccgttaaagataggaaactccccaaaggcgggcgccatgtctgtttcatccagtattccagggccaacccctcgaayggcagatggatggacaatgagtgggaaggtgaacaaggtccgtctcactcggactgtaagtcacggcagtttctcgatccctggcccctggcacagagcaggccctcagtattcattcatcccccgagtatgtattcagtgccttccgtcattccctcagcatgttcactgaggtcccactatgtgccaggcccggcgtgagtgagacctcaagtgagaactgattgcggtcacctggggactggactgggaatgagtcaaagtgtcacttacaaaagcatctcactgtagctgtccacaaacagggtcttcatcgacggccgcctctgcaggaaatactgaatctgcaggtaaacagagagagtaagatcccaggcaatgctcgatgtggctaaatggtgagcactcagatgcttcctaaatggcaccatgatggggtggtcgaatgtgtgaaagcacagattgtgaaaagagcagaacagcaagggtcaggccaat

SEQ ID NO: 770830 - DNA, 580 bp, Homo sapiens
gaaaataaaagagccaggagtggcacatgttatgaagatgtaccttgtgagacgtggacgtaagttggactccaggctttgctgcagccgctataccatttcagttgtcctgccaaagcccctgatttctgatgctaagaacaagaaggcagtgcttcaagggtcctcattaagaagccactgaaggatgtggtagagcgcctgtagtcccagctactcaggaggctgaggcgggaggatcgcttgagcccaggagttggagtgatcagtgagctatagttgcaccactgcactacagcctgagctacagagcaagacctgcctctcggaaggccgggcrtggtggctcacgcctgtaatcccaccactttgggaggccgaagcgggtggatcacctgaggtcagaagatcgagaccagcctggccaacatggcgaaaccccatctctacgaaaaatacaaaaaattagctgggtatggttgtgggcacctgtaatcccaactactcaggaggctgaggcaggagaatcacttgaaccctgggggcggagattgcagtgagccaagatcatgccactgca

SEQ ID NO: 770831 - DNA, 623 bp, Homo sapiens
aaatagctaaccaaagtcacaacacaggcacgattgtaagaaaaaccatctaattcatcaactgcattttagactgaaatgaagaatgtctccctccacactaacaaaacaaataagaagcagaagaggccggcgcaggagctcacacctggaatcccagcactctgcaaggctgaggtgggcagatcacttgaggtcaggagttcaagaccagcctgaccaacatggcgaaaccctgtctctactaaaaatacaaaaagkagccaggtgtgatggtgcacgtctgtaatcccagctactcaggaggctgaggcaggagaatcgcttgaacctgggaggtggaggttgcagtgagccgaggtcacgccactgcactccagcctgggcaacaagagtaaaactccacctcaactaaaaaaaaaaaacaacaacgtaaacaggactgctaagcctgttgccgccttctccactccatgctgccttccacgtggggctctgtgatgggtagagttggccatcaccaccatctcagcctcccagagtgctggaattacaggcgtgagccactgggccccacagccctgaagttttctgaccttctccatgggcatttacgtgtctcc

SEQ ID NO: 770832 - DNA, 623 bp, Homo sapiens
aaatagctaaccaaagtcacaacacaggcacgattgtaagaaaaaccatctaattcatcaactgcattttagactgaaatgaagaatgtctccctccacactaacaaaacaaataagaagcagaagaggccggcgcaggagctcacacctggaatcccagcactctgcaaggctgaggtgggcagatcacttgaggtcaggagttcaagaccagcctgaccaacatggcgaaaccctgtctctactaaaaatacaaaaaggagccaggtgtgatggtgcacgtctgtaatcccagctactcaggaggctgaggcaggagaatygcttgaacctgggaggtggaggttgcagtgagccgaggtcacgccactgcactccagcctgggcaacaagagtaaaactccacctcaactaaaaaaaaaaaacaacaacgtaaacaggactgctaagcctgttgccgccttctccactccatgctgccttccacgtggggctctgtgatgggtagagttggccatcaccaccatctcagcctcccagagtgctggaattacaggcgtgagccactgggccccacagccctgaagttttctgaccttctccatgggcatttacgtgtctcc

SEQ ID NO: 770833 - DNA, 584 bp, Homo sapiens
caatgggagggggtgtctgcatcaaacagcctgtgctctaatgtgtgaccgaggttatgtgtgaccgaggaaatgacctcaagttggaagttatatgtaaatgacaagcagagctcaaaagtttggaatatctgcagcctggccaagtgatcaaaaagagaagctgattttcagggggaaaattcatgaaggctccagaaatttgcttaaaatggaggccagtgctaatagccaagacaatgggggaaaaagccttggaggcatttcagagatgtttgcagcagcacttgctgtcaggccctgggtcctaggagagatgaatggtttcctgggccagccctgtgaccctgttgctgtgtgcagcctcaggacactgctgcytgcatcccggcagccccagctcctgctccgaccttggctgaaagatgcacaggtacagattgcatcactgcttcagagggtacaggccataagacttcatggcttccacatagtgttaagccagtgaatgcacagagcactagtccagaggcttcggagccttcatgtagatttcggaagacatacgaaaatgcctgggtgtc

SEQ ID NO: 770834 - DNA, 630 bp, Homo sapiens
atctgcctagtagtcattttttaaaaaataatctcagcttttattttagtttcaggaggtacatgtgtactcatttgttacatgggtatattgcgtgatgctgaggtttggggtacagatcccatcagtcaggtagtgagcatagkacttgataggtagtttttcaacccacaactcttccttccgtcctgtctctagtagttcccagagtctgttgttcccatctttatgtccatttgtactcagtgtttagctcccacttataagtgagaacatgtagtatttggttttctgttcctgcattaattcacttaggatatgacctccagcttcattcatgttgctgcaaaggacatgatttcattcttctttatggctgcatagcattccatggtgtacatgtaccaaattttctttatccagtccaccactgatgggcacctaggttgattccatgtctttgctattgtgaatagtgctgtgatgaacatatgcatgcatgtatctttttgttacaacaatttatattcctttgggtatatacccagtaatgggattgctgggtcgaatggtagctgtttcaagtttttgagaaatctccaaactgcttttcacagtggctgaatgaat

SEQ ID NO: 770835 - DNA, 625 bp, Homo sapiens
aatgatcagataagggtaattcacatatccagaacctcagatatttcacatttttctgtggtgagaacattgaaaatctgctcttctagctatttaaaaatacacagtaaattttttttagtatagtcaccctataatgctgtagaacactagaacttattcctcctatcaagctatattttggatttgttaacaaccctctggctattatcccattcccagcatctagtaaccgctattctaccctctacttttatgagatcatctttttttagctttcacatatgagtgaaaacatgccgtatttatctttctgtgcctagcttatttcacttaacataatgtcctttaagcttacytatgttgccacaaatgacacaatttcattcttttcgtggctaattagtatttcattatgtatatattccacatttcttttgtccattcatctgttgatggacacttaggttgattccatatcgtggctattgtgaactgtgctgtgataaacctgagagtgtagatatctcttcaatacactgatttcctttcctttgaatatatacccagtagtgggactgttggatcctatggtagttctgtttttagttttttgatgaactgc

SEQ ID NO: 770836 - DNA, 686 bp, Homo sapiens
aaggggatactagtagaatacaggagatatttgtttatgtagtcatccaacaaatataacaagcatctaccagtaccaggcgttgtgttaggtccccagtatataaagggtcagcaaaacaatcaggtgcctttcccttgtgactttacagtccttgtacctctcaagatttgtatttctggttttcaacctcttcttttctaatattatctcaatcagaataaatascttgcatttttgtcatactcagcaaaaaaatttagcttgcttccccacaaagaaaacctagcaaccaattctcttaacttcccatctttttgctataataggcagccctcccctggagctaacttttttcatgaaagatgattgtgtcatcagtagcagccacattactaaatgacaccttcctttctctctgatgtgttagcagcccaggagctcaagttagcagaaatctgtgctgaggcctggaaaagaatgaattgtttctttttttctttttcttttttttttttttagacggagtctcgctgtcgcccaggctggagtgcagtggcgcgatctcggcttactgcaggctccggaattgtttcttttaaataagctctaagatggattctaggaagagctatagtaagctacttccccccactccaagattttgttgttatttctacaatata

SEQ ID NO: 770837 - DNA, 528 bp, Homo sapiens
attatctttctgtgcaaatatgaattgttgtgatatgtccgtagagacggcacaacctcatggctaagaatgatagttaccagttctagagatcctactctaattgctctagagtgggggcctgaacaccagtattacaaaaaagacaaaagaaaaagaaggaaaaaagaaaaaagaaagagagaaaatcaaagctaccttcatcatgtatgaatttgagcaagtaacacctttgtgagtccccaggccccagtttctcattggtaaaatgaggataacaattacacagaccttgttgggctatgtacagaattaaatgagattatgtacctaaaaggcttgtggcacagtgacacacacacacacacacacacacacacacacmcccagagtacttcgtggttatttctaggctttactgcttgaaaggctgaaaagatgggtggatgagaggtgccctgaggttccttccaactctccaagattctgtgatactcctccttgggtgctgaagacactttggcaatg

SEQ ID NO: 770838 - DNA, 601 bp, Homo sapiens
tagcccctatcagagtaaatcagttccatgaaaataaaatctgagaataaaacagctatccacaagaaacttattgaaggctgacaaaaatactgtatttatatctggtttgccaaaagacacattatatcctcaactgtattactcagttttcacaaagttttattatattgaagcctggcgtttagagaaaatcctaaaaactactcttctagaaggcaaagaaacaaaaccccaaacaagcataccagtttttttctatatttgattatgttttaaaaattaacagacgttttattagcagtaatttgttggagtctatactttttctagccataaaactacatgtttttacttggtaatatgatgtttttcatctccacagtatgatttcccccaaaacacgtacatccactaaaggtataatgttctctctmtatatatcatatatattatatatataatatatatatattatatataacatatacacacacgtatatatgagtatatatacgtgtgtgtgtgatatgtatttatctatagctctatctacatatagttgaatttgctttgtttttggtataagtttctatgtatc

SEQ ID NO: 770839 - DNA, 643 bp, Homo sapiens
taaacgtacagttttcaaagtggacaatgtctgtgaaatataggttggggcaaaggtaactgcggtttttgcgattatttttaaaatagtggttttttaaaatggcgctactaaaaatgatggcaaaacccacaactacctttgtgccaatctaatcgtatacagtatttagaaatttcttggaaaataaagggtgctgtgcacatgagtgagaatgtagatgagccaacaataacagagactgcagtttgtgggtgtgtggtgcatgtgggagtctgtgtgtgcasagtgtgtgtgtgtgtgtgatgcatgcttattgtgtgtgtggggtagatgttgtgcatttgctgtgtatgtctgtacaggtatataggcataaaattatcttgattgcattaaaataacatagtactccaattatagcctttcagacaggtataaagttgtaatatttgttcacagtactgaatttcaataggttagaaggtgaaaattctcatttagagaattctcatcaaatcataatttgatgggagaggggtttgggtaggtaagaaattcatttcttacagagtttacagagcccatcttaaaatctaacagcaaacagtgaaggagttatactttttcaatagtggacttc

SEQ ID NO: 770840 - DNA, 616 bp, Homo sapiens
cgggatacatgtacacctccctctatgaggcagtgctgtgatcatccctgttttactgttgaggaaactgaggcacagagaaattaagtgattccctcagagaatcacagctagtaagtggcagaatcagaattagaactggcatgtggcaggcggtagtgaggcaaccctggaaaattccctttgagagctggtctgtccctcacaggaaagtctgtgactttttcttggatgacagtttcagaaaccagctaacaattgagcagattgttttaaggtgatgatttaaattgcattttggtaggaattgaaaccagtctttaatgaatttgataaacgaatttttttaaggtgctgtgtttactgtgtgaagtgttcactggcagcagtgacttaactgcctaaattggctgtcaaagcatatatttagaatacagaaaygtaatgggctccctttatcattacttgcttccccctacatgacataaaatgttggtgaacaccaaaatgcccccagaaaagaggctactttgggtccaattagaaagaggaaaatgaggccattaccccaggacactctgtgagtgtggacttggttgcccacgctggaagagct

SEQ ID NO: 770841 - DNA, 431 bp, Homo sapiens
aaatgtgtgtggtggtctgcagttgatggttttctttttaactgcctttctatttttattttattctttttttaactaaaattcttcagtatgatctctagtgcaaaggaagtcaataaagagatcatttccttcctaaattmtgtgtcctaatttagaaagattaaaaacagacttaagttgaattactatatcaatcatctgcacagtcataaaaatatatgaacatatttaaataaatgtgatttgttgtttttaagttgttactggtttatgggtcattaatctgcaggatttcaaaatatttggaaaactggatacccatgaaaattcatcctcttatctttaaagtacctattagcactttaataggaaaataaaaatgaaaactataagtagaggatataatctgaatagctttaacatatctc

SEQ ID NO: 770842 - DNA, 431 bp, Homo sapiens
aaatgtgtgtggtggtctgcagttgatggttttctttttaactgcctttctatttttattttattctttttttaactaaaattcttcagtatgatctctagtgcaaaggaagtcaataaagagatcatttccttcctaaattatgtgtcctaatttagaaagattaaaaacagamttaagttgaattactatatcaatcatctgcacagtcataaaaatatatgaacatatttaaataaatgtgatttgttgtttttaagttgttactggtttatgggtcattaatctgcaggatttcaaaatatttggaaaactggatacccatgaaaattcatcctcttatctttaaagtacctattagcactttaataggaaaataaaaatgaaaactataagtagaggatataatctgaatagctttaacatatctc

SEQ ID NO: 770843 - DNA, 599 bp, Homo sapiens
tggttttaggtttaacattgaagtctttaatccatcttgaattactttttgtataaggtgtaaggaagagacgcagtttcagctttctacatatggctagccagttttcccagcaccatttattaaatagggaatcytttccccatttcttgtttttgtcaggtttgtcaaagatcagatggttgtagatgtgtggtattatttctgagggctctgttctgttccattggtctatatctctgttttggtaccagtaccatgctgttttggttactgtagccttgtaatatagtttgaagtcagggggtgtgatgcctccagctttgttcttttggcttaggattgacttggcaatgcgggctcttttttggttccatatgaactttaaagtagttttttccaattctgtgaagaaagtcattggtagcttgatggggatggcattgaatctgtaaattaccttgggcagtatggccattttcatgatattgattcttcctacccatgagcatggaatgttcttccatttgtttgtgtcctcttttatttccttgagcagtggtttgtagttctccttgaaatccttgaagaggtccttc

SEQ ID NO: 770844 - DNA, 579 bp, Homo sapiens
aatttcttaaacacaaggtgcactggacaactgcttcttagagcaaactcaaactgcctggaaagattagagatgcttctaaactaaaactaagctaaagaataaaaacatctttgaatgctattagaggacactggtgtacatctcctttaggaggaaaaattctacaactgtggatggcacctgacatcccaccaggcagctrggtacatgtaggttatacaaaagactcttaaacaataaatgcagaagcaaataaatcaagtttaacacattcccaaatgaatctagtcatgtggatgactaaaggagagtttttcccaggaatgcaaattttttaacacttaaaaatatctactttaaacagatcatcacaggttgaatcctctctggaaggatgtttttgttggtttggttccggttttttggtttttcggtttttttttttttttttttttttttttgacacagaacctcactctgttgcccaggttggagggcagtggtgcaatctcagctcactgcaatctctgcctcccaggttcaaacgattctcctacctcagcctcccaaatagct

SEQ ID NO: 770845 - DNA, 579 bp, Homo sapiens
aatttcttaaacacaaggtgcactggacaactgcttcttagagcaaactcaaactgcctggaaagattagagatgcttctaaactaaaactaagctaaagaataaaaacatctttgaatgctattagaggacactggtgtacatctcctttaggaggaaaaattctacaactgtggatggcacctgacatcccaccaggcagctaggtacatgtaggttatacaaaagactcttaaacaataaatgcagaagcaaataaatcaagtttaacacattcccaaatgaatctagtcatgtggatgactaaaggagagtttttcccaggaatgcaaattttttaacacttaaaaatatctactttaaacagatcatcacaggttgaatcctctctggaaggatgtttttgttggtttgkttccggttttttggtttttcggtttttttttttttttttttttttttttgacacagaacctcactctgttgcccaggttggagggcagtggtgcaatctcagctcactgcaatctctgcctcccaggttcaaacgattctcctacctcagcctcccaaatagct

SEQ ID NO: 770846 - DNA, 579 bp, Homo sapiens
aatttcttaaacacaaggtgcactggacaactgcttcttagagcaaactcaaactgcctggaaagattagagatgcttctaaactaaaactaagctaaagaataaaaacatctttgaatgctattagaggacactggtgtacatctcctttaggaggaaaaattctacaactgtggatggcacctgacatcccaccaggcagctaggtacatgtaggttatacaaaagactcttaaacaataaatgcagaagcaaataaatcaagtttaacacattcccaaatgaatctagtcatgtggatgactaaaggagagtttttcccaggaatgcaaattttttaacacttaaaaatatctactttaaacagatcatcacaggttgaatcctctctggaaggatgtttttgttggtttggttccgkttttttggtttttcggtttttttttttttttttttttttttttgacacagaacctcactctgttgcccaggttggagggcagtggtgcaatctcagctcactgcaatctctgcctcccaggttcaaacgattctcctacctcagcctcccaaatagct

SEQ ID NO: 770847 - DNA, 605 bp, Homo sapiens
ctgtgtgtatgtgtgtattttggaaacaaagaacatcgttatatataatatagcattatacgtgcccacactgtatgaagcagacctcttttttcctcgtataggtttaggtatcatcaggttttggtagttttgtgagatgaactggcattttctatacctttaaataattttaaatagtttatatcatagaaatcatctgtttaaaatgtttgaaagtgctagttcctacaackctctaaatcttgtcctgtttttgggattgagggggagcatcatggctccatctttaacattattttcaagtttccccccacttattgttatattcaatccaagttcttataataatttttaaataaattacataatttagattcacttgggacaaaaactatccatttcatgaggatactgaaatttattttctagagttgttcatcgagtctgaagtggctgtaagcctccctgttctcccttttcctgccacaaataatgtgtaatctatttactctttggcctaggactttatacaaattctagtgtgtggagttggggagttcaattgtttattattcacttatgttggactatattatagtccg

SEQ ID NO: 770848 - DNA, 572 bp, Homo sapiens
caaataagaaacacgatagttgaaaataatttttatagtaaataattgttttgggctgatttttcagtaaatccaaagtgacttaggttagaagttacactaaggaccaggggttggaatcagaatttagtttaagatttgaggaaaagggtaagggttagtttcagttttaggattagagctagaattgggttaggtgagaaagaaagttaaggttaaggctagagttgtctttaagggttagggttaggaccaggttaggtcagggttggattgggtttagattggggccagtgctggtgttagtgatagtgtcaggatggaggttaggtttggagtaagcgttgttgctgaagtgagttcaggctagcattaaattgtaagttctgaagctgatttggttrtggggtctttcccctgtatactaccagttgtgtctttagatggcacacaagtccaaataagtggtcatacttctttattcagggtctcagctgcctgtacacctgctgcctacatcttcttggcaacaaagttacctgccacaggctctgctgagcctagttcctggt

SEQ ID NO: 770849 - DNA, 629 bp, Homo sapiens
aatcactcagctcgtgggggctgggtgcacagtgacaccagtaaccctgccggtggaggagtactccagtaaacatctccaggccaatgaccacgtacaggaagggttgcatccaggagggagagaaaatgctgaagaagatgctccctttctctcttcagtcttccctcaagtccctcattctgacattctcgctcgtcctcgcgcgaggtcaaatacccagctttattcctgcccatagagccccaacaaagttttgggtcacgtgcttactatccaagcaggtgcactgtcggtctttcattcctttctaaataaaaaggaaaaacctctacactacatgcccttcatttctgcagggtcccggattcgttctatttgaggatcccgggtctacacaggcgaccgcctcggccccagactggaagcgacactccagggaccaaagctyccagcccgcgctcggccccagcccctgtttccgcctcagagccgcagcgagcagggtcctgcggcaccgcccagagactggcctaggaggttccagcccccagcgccagcacacactcaccggctgcagcagccccaccagccctgctccttctcccgggtcccggccacaccaagag

SEQ ID NO: 770850 - DNA, 621 bp, Homo sapiens
  misc_feature 99, 114: n = A,T,C or G
agcaaggcgagtgggtcagcccccattgagctacatggactgagagtaaagggaaagatggctgcaaaggaagatctaggggctgaattcgggagcagnagatgaaactcacanaacatcctctgtgggctcctcattcattttgaatgtagcaccttctcccatcaatcattaaggctggttccagttcatcaccttttgttctaaacctgtgtctggatcttgcctctcctgaagacatctagttctgggagcaggaggcatcttgctggcaatgatgccctayctgtcccatctctcctgctgctcccagcagactatgcctttgcccaggtcagaaggcctttgccccacaaggcccttgtttccagtttcaaggatgcctctagttcacagtccacatgccggaaggcaatgatgggcctaccctgggtctaaacacagatctcaatccatggcatctgtgctaactccaggtagacagtatcagaatcgaatggattatagagcacctagttattgtgcaccaagaactggagaattgcttggtttgaaaatcccttgcacatttagtggtcggaagtattgggatagtggagggaaaaagcagtttttccttta

SEQ ID NO: 770851 - DNA, 552 bp, Homo sapiens
aaaggagtttgtatatgtgaggcacttacaatattgcctagcacacagtaagtgcttaatgaatgttagctcttattattaccattaggtgcaataatttagcagctatgcttaaagatgggaaaggaggaaggggtgtggctaacagcaatttataccaattctgctcctttgggacatgcaggtagagggtgttgtagtgagagggaaacaaactatttctatcattattattattgttattgctttatagagacagagcctcactatgttgcccaggctgttcttgaaatcctgggcttaagcgatcctscctcctcagccctcccaaagtgccaggattacaagcataagccaccacacccggctatcatcattattaatgaacataggtctgtcataggcctgcagctatttctctgcatgtctccagtgcctcaaggtgtggatgccatctctgtcagtgtgcatgttgcacacttcccccacccttaggctgggcaggtggccttgccccacctttcctccacagggaggtgggcaggagcattt

SEQ ID NO: 770852 - DNA, 581 bp, Homo sapiens
acagagcccagcataaagaaactaaagaataaaaaaactgaagagagatttcagctgttggttattgcaggtaagacagagtttggaacttaaatcaagttaaattaattaccctgtagaacattaacaactagagaattctttatcagagaaacacamcagaacctatagtatctaaaacatatctaatatgacatcaaaaagtataaagcacgcaaagagatgggaaatatgacaaaagagtaatttttataaagacaataggcatcagtctcatgaagatccaaattagtagttagcagatcacaactagaaagcagctactagaaacatattctagaacttaagaaagatatatgtttaattagccaacgtgtagtgactcacacctataatcttagcactttggaaaactgaggcaggaggattgcttgagcccagtaactcaaaatcagtctgagcaacataatgagaccccatctctacaccccaccgccaaaaaaaatcataaaaattagccaggcacagtgacacacacttctagtcctagttactcaggaagttggagcaatgaggctcat

SEQ ID NO: 770853 - DNA, 600 bp, Homo sapiens
tgagttttgttctgtggcttaacatgtggcttattctagagaatgtttcatgtactgatgagacaaatgtgtatgttgtaactattggaagaaatagtctgtaaatgcctattaggtcaacttggtctgtaatgcagattaaacccartgtttctttgttgatttcgtctacatgatctgtccaatgctgaattggggtgttgatgttttcagctattattgtattgggttctatctttctctttagctacagtaatatttagtttatacatctggtgctcttattttggttgcatatatatttacaattgttatatctttttgctgaaatggcccctttgtagttgtaatataacctttgtcattttattattaatactattttatttaaattacattctatccaagtatagctatgcctgcatacttctggtttccacttgcatggatttttttttttcttcacttctttcagtctatctgtgtctttactggtaaagtgagttttcggttggcagcatatagttggatcttatatttttaattcattcatccagtctatattgtttagttggggaattaaaaatatttataattaat

SEQ ID NO: 770854 - DNA, 600 bp, Homo sapiens
tgagttttgttctgtggcttaacatgtggcttattctagagaatgtttcatgtactgatgagacaaatgtgtatgttgtaactattggaagaaatagtctgtaaatgcctattaggtcaacttggtctgtaatgcagattaaacccaatgtttctttgttgatttcgtctacatgatctgtccaatgctgaattggggtgttgatgttttcagctattattgtattgggttctatctttctctttagctacagtaatatttagtttatacatctggtgctcttattttggttgcatatatatttacaattgttatatctttttgctgaaatggcccctttrtagttgtaatataacctttgtcattttattattaatactattttatttaaattacattctatccaagtatagctatgcctgcatacttctggtttccacttgcatggatttttttttttcttcacttctttcagtctatctgtgtctttactggtaaagtgagttttcggttggcagcatatagttggatcttatatttttaattcattcatccagtctatattgtttagttggggaattaaaaatatttataattaat

SEQ ID NO: 770855 - DNA, 600 bp, Homo sapiens
tgagttttgttctgtggcttaacatgtggcttattctagagaatgtttcatgtactgatgagacaaatgtgtatgttgtaactattggaagaaatagtctgtaaatgcctattaggtcaacttggtctgtaatgcagattaaacccaatgtttctttgttgatttcgtctacatgatctgtccaatgctgaattggggtgttgatgttttcagctattattgtattgggttctatctttctctttagctacagtaatatttagtttatacatctggtgctcttattttggttgcatatatatttacaattgttatatctttttgctgaaatggcccctttgtagttgtaatataacctttgtcattttattattaataytattttatttaaattacattctatccaagtatagctatgcctgcatacttctggtttccacttgcatggatttttttttttcttcacttctttcagtctatctgtgtctttactggtaaagtgagttttcggttggcagcatatagttggatcttatatttttaattcattcatccagtctatattgtttagttggggaattaaaaatatttataattaat

SEQ ID NO: 770856 - DNA, 623 bp, Homo sapiens
acctttagaagagttaaaatgaatgaataaattacttgcagttttgcaagctggttcacctggatcttacaagcctgaaatccatgccctcttagggagatggcctgaagcagtgggggaaggttacttaggaatctcagacgaaatggaacgtcagtgtccatggatgagagacagatggaatagcctacttggagtagttgcgtagacatytgccccctgtagttgccaggagcaacagaagagacaagtccaaaggcgttgaatatccatgaggtgggtttcacaaacgaccaggcattcttccttcaggttacagacgtatgaactggtcccagcagggactaagaagagggacaaggtgcagcaaacgggaagcaggaggcatgggcagtagaattgggatggaacttccttgttactcccctgtccttccccggtttcgtagtagtcagtgcacttggcctcaaagctttcttctgagagtcctgaactcactctacctttctaaacggaaccttgtgttaaaaggtgaagtttgtccactgcacatgccttaactcattattaggcacaatcatggctgaaagttagaaaactaaggtaaaattctatcaaatcta

SEQ ID NO: 770857 - DNA, 626 bp, Homo sapiens
aagtgcaaattcggagaacttctgtactatacaggatgaccacttcaagacacagtcatcagattcttcaaaatcaatgttgttaaaatggccatattgcccaaataaatttacagattcaatgttatttctatccagctgttaacatcatttttcaaaaaaaaaacaaaactaaaaaaaaccattttaaaattatatggaaccaaaaaaacagccctaaaatccaaagcaatcctatgcaaaagaacaaagccagagacatcacrctgcccaacttcaaactatatttgtaaggctacagtgaccaaaacagcatggtgacagtacagaaacagatctatagataaatagaacacaatggagaacacagaagtaaagcctcatacctacatccattcaaactttgacgaagttcacaaaaataagcaaaggggaaatgactcactatttaatcagtggtgcttagataactgaaaagccatatgcaaaagaatgaaactgggctcttacctttccctttcgttacgtacaaaaattacctcaagtaggttaaagtttaaatgaaagccctcaaactattacaatcttagaaggaaatgtagaaaacacaattctgggcatcaaac

SEQ ID NO: 770858 - DNA, 626 bp, Homo sapiens
aagtgcaaattcggagaacttctgtactatacaggatgaccacttcaagacacagtcatcagattcttcaaaatcaatgttgttaaaatggccatattgcccaaataaatttacagattcaatgttatttctatccagctgttaacatcatttttcaaaaaaaaaacaaaactaaaaaaaaccattttaaaattatatggaaccaaaaaaacagccctaaaatccaaagcaatcctatgcaaaagaacaaagccagagacatcacactgcccaacttcaaactatatttgtaaggctacagtgaccaaaacagcatggtgacagtacagaaacagatctatasataaatagaacacaatggagaacacagaagtaaagcctcatacctacatccattcaaactttgacgaagttcacaaaaataagcaaaggggaaatgactcactatttaatcagtggtgcttagataactgaaaagccatatgcaaaagaatgaaactgggctcttacctttccctttcgttacgtacaaaaattacctcaagtaggttaaagtttaaatgaaagccctcaaactattacaatcttagaaggaaatgtagaaaacacaattctgggcatcaaac

SEQ ID NO: 770859 - DNA, 472 bp, Homo sapiens
tcaagagtgctgctctacttggcaatatttgggggatggaagaggtgaaacccttcactgcggtactctacaatatatccaaattcagaacactctagcacaggccaacataggctccgatgtctcacttagcctcacagaaatatctcccagacctgcagacacagacaaatcctagacaagcctatgatgctttgattaatcactaatggagttgtccttgaagacagtattttaaattgtccctktgacatcctgcagtttttttacagctcagggcaatgcacaatagtaagattcaggatggataaggatgtgtctttcttttttgtccaaaaatgccattttaaagagaagatgggcaaggagactgtatctgatcattccaatctgttttcaggcagattttaagaatgacagtcgaggcacctggaaattgattcccttccaagtctctgtgcaaggggtattc

SEQ ID NO: 770860 - DNA, 521 bp, Homo sapiens
gtcagatgctacggctattgcctcacttttcatttggttatttccctggaaagtctttttcatccttttctttcttatttatgtatttatttatttttgagacaaggtcttgctttcttacccaggctggagtgcagtggtacaatcatagcacacagcagcctccgtctcccaggttcaagcaatcctcccacctcagcttccacagtgtataagagttcccttttctctgcatcctcaccagtatttgttattttttgtctttttcawaatagccatcctaactggggtgagatgataccttgttgtggttttgatttgcatttctctgataattagtgatgttgagcatattttcatatattttgtcggccatttatatgtcttcttttgagaaatattcattcagattgtttgtccattgtttaattggatttattttttatctttgatatgtttgagttccttgtacagtctggatattaatcctttatctgatgaatacttcgaaaatattttct

SEQ ID NO: 770861 - DNA, 565 bp, Homo sapiens
tctatgaagagcagaacagtctccaacacttatatgtcatttaggagttgataactatattatatttacttttgtagctcttagaattcttacacaagcccccaaacacatagaaaaagatatggccattggctgagtgctgccaccctaactaaccccaaggaagcaactattttctattttattttagaaggcttgtgatcagataaaatgaaccatccctcaaatgactatagcacataacactgaaactccagggagaagcaaataaaagctgtygaattgccagttccaacaagaagtagcaagaatgtctgacaatactttctcatagatagatctagatggtcagactctcccagataccatcacatcaagtttatttagtagtgtttttttgggtgcgtgtgagtagaaagaaggaaattagtatttgtctcagaccagtattgtgctaggcacattcgcatacaggatcaaacagcagggctggaagaaatatactgaatacacaggtctctgtgctcgaacatttgtacatttaaaagaacatccagccttttcc

SEQ ID NO: 770862 - DNA, 591 bp, Homo sapiens
ttttttctttgctgaatatccactgatggaaatactgttaactggaaggcagtggtcagaggtcctagggtggacccgtgatctccttcgggatgggcctgagggatgcttctgttaacctcctaatcttgaagttggatcctacagatggctgtcacaagagacagactccacccccaccatccccagcttccatcccagccaggtaccagtcactctcaacctgctcagtctagactgcaatccacagccaaacataattttcttctgtcagcagcatcccygaaccatttgcctagacacacacagtagggttgttgtctgaaacctcagaaataaaaagtgagccatttaaagttttatgctttgaagtggcaaaatgatgtcacacttgaaggtgctggcctcaagtcctgaccttgcagctgtctgcttctcctggctgttcacagggttgtgagacagcaggcccccagaaaattcctcggacacagcctcctcccagcctggctctgctcactgcgctatccagtgccttgggcctctgatggaagacaacgagtaggactgacctccatactctggtcttcc

SEQ ID NO: 770863 - DNA, 635 bp, Homo sapiens
gtggaaatgtaagaaggactcactgagaccagagagcccaccacgtgtgtgacagcatccctggaaacacgtgaaagaggcttctttactaaggcaataaaaatccactgatgacagaggcattagcacttttaagaagctcagtggccactgtcttccaytggcctggactgacactagaaaatgctgcatagaactaggctctctagtaaattgatgtgacaggattcccacaaagcaagaatccctttggtcagagacgagaaagatgtgttaacataacaggcacacatggcttcagagattgacggtaatgcccattaggccatagtattcctgcggggggtaagataaatgggtagctggctagggtgtaatctgacttcaaaacagaaaaagtggagttctgatgagcaaaggtcaatgttaactgctgcaacagaaaatcactgttcctcctacagtttccagagttaagtcagttcacagacccaggacctattgcttccttgagagaaatcaatattcttccagtcctttcccaaagggatctgtggctacttcccagaataattgtatgtgtgcactcttagatatgagttctaggctaaaactgatgataagggacccagcat

SEQ ID NO: 770864 - DNA, 638 bp, Homo sapiens
ggaaatatagttctaaactacgttctaggaaccttagttccaggaaatattaatatcccaggaaaaaaggtgggggaccgttgagggtcgttcagtttccctagaaaacaaagcctggggcaatggttatatgctgatgtttttaatgaaggcacaaatccagagcctcaagagtgatataaaagggagggctgggaaatgatgcaagatgcttggaggagccagcggctcctggcagcagctggctggccacagaactccagagttggctgcagtggcaacagttaaggaaatgcaaaaggctaggatccaggacttaggcaggctaagagaacctatgaaaacacgtagaatgtgtccaacataaatgtcaaacaaaattaagaaacactaggtactacatgccgcctcttagaaatccgcaatgcatattagcacatttaacagttctagaagtacctcagcaaggaaaccagtttcwttttatttaatccagcatttcccaagcttatttgaccacagaacctttctttcacgcactgctcatctgtagaactcagttctggtcagctatgaatactggaatttggggcttaggaaagaggatagattatagatatgaatttgggattaatagt

SEQ ID NO: 770865 - DNA, 638 bp, Homo sapiens
ggaaatatagttctaaactacgttctaggaaccttagttccaggaaatattaatatcccaggaaaaaaggtgggggaccgttgagggtcgttcagtttccctagaaaacaaagcctggggcaatggttatatgctgatgtttttaatgaaggcacaaatccagagcctcaagagtgatataaaagggagggctgggaaatgatgcaagatgcttggaggagccagcggctcctggcagcagctggctggccacagaactccagagttggctgcagtggcaacagttaaggaaatgcaaaaggctaggatccaggacttaggcaggctaagagaacctatgaaaacacgtagaatgtgtccaacataaatgtcaaacaaaattaagaaacactaggtactacatgccgcctcttagaaatccgcaatgcatattagcacatttaacagttctagaagtacctcagcaaggaaaccagtttctttttatttratccagcatttcccaagcttatttgaccacagaacctttctttcacgcactgctcatctgtagaactcagttctggtcagctatgaatactggaatttggggcttaggaaagaggatagattatagatatgaatttgggattaatagt

SEQ ID NO: 770866 - DNA, 622 bp, Homo sapiens
ccccgattctgatataccaggtagccttcaagtgggttggggcagaaaataatttgagaatcactgagttgagttggaatttccctagaatcagagactagccaggctgagagttcctccaagaggcacatgaaatgggccagtgccaagtgaaaccagctgattgtagatctaatgccattccctaaatcggggatggtggcttaatctgaggggctagggttctgagttttgtgttactgagatccaggacgaaggcacagatatgttgacctaggatatcaagctgagtcctgatgtggactggggatgacagatggaagaagggtaagggatcaggcaggatgaggtgggaagggtgtatgggcctagggctgggtgaggtgagaggatcaaggcgagagcgagtggacgggcaatgggcatcaaaacgggttgggtgctggcagggcaaggcagtgatggggttaggggttccctggtttktggcgttaggaatgacttgggtaacagggatgaaggggagaaggtgagatagagagggacgacgtgtaaggggcccaggacccgaaatgaagtggaagaatatgggcccggggctgggggtgggcggggtcgggtg

SEQ ID NO: 770867 - DNA, 655 bp, Homo sapiens
tatatatatatatatgttatatatgtaatataactatattacaagttatgcttgaaataatgctgttaccaagataaagaagctccttcacccaaggaaccctggtgttaaaggcaaagattaaccaaataatcccacaagtaaactatcatggactatgtaaatgctgtgaaagaaatgtatgggaagtcgagagaggatcccacctgggggctggacagggtctcaasacagtaggtgagggttctccatgcaagagacatgtgagttgaattctgaaggatgaacaaaagtcacctatacaagggtagggttggaggaaggaaggtgaggagctgttcaagcagaggtagtagcaggagcaaagacccccaggcaggagagggtgcagtgcatctgaggacctgaaagaagagtggctgacagcagacagccaacaaatgagggggttgagatgagatgggagaaggcatggggtaaagacttttgcctaaagagaaagtgagccattggagggttctaagcaggggactgacatggcaagatttgcacttcatgatcactcgggctgctctaaagaaaatgaactagagcagagaggaagtgggagctagagggagaggcagaggacaagaggaaaaaaatcagagaatgg

SEQ ID NO: 770868 - DNA, 653 bp, Homo sapiens
tgggctctccggttaaggaatttgcttgaggtcacagaacttgtggattcacaccccatggctgcagtcacaaattaccacaaacgcagaggcttcaaacaacatcaatgcattctgttccactcgggggtcagagtcagaaatggggcacaggcttgctctccctctgggggccctacgggagaaaacgtcccttgcccttgccagcttcttaaggctgcctctaaccctgggatccaggcctgcatcaccccccactctgctttcatcatcacagctccttctttgactctccctcctccctcttatgagaactttatggcccaagytcacccaggtaacccaggataacctccccatttcaggatccttcctttgatcacagatgcagaatcccttttgtcatgtgaggtaacatattcacaggtttgggggataaggaggtaggtatttggggggatgggagcatcggtctgcctatcacagtgagtgagtggccaaatgagggttcaaacccggttctgtcgtattcctgaatctgggatctttctccaaaccacactgccccttccttcagtccttcctgtccttggagctgtcctgggttcccagcaagcacagattctcagaaagggacagcagaagaccctaag

SEQ ID NO: 770869 - DNA, 603 bp, Homo sapiens
agaaattgatggtaacagtccagaatgcttaaccatgaaaataggttcagactgatcaggcaccacagagcagcagttaactctggatacacttaagtacttgggggagcttttaaaaatccaaatgcccacactgtatccagatctattatatcagaatctatgggggtaggacccagacatcaatatttttaataactctcttggtgacataactataagaaaacacaaaaggaaagctaagggatatggatgatagaagtgccaaactttttctatacagaatcatatcaatctccttccccattcctgctaaactctcagaactgacagattaaaacctaggaccccctgcactcaattctgctctttcctagtagttaacaggtgaaatattgaccagtgaggttgtctggtggtagctataggagtgatgatcacargctttatggtacctagggctttctaatacaggactcactccttccactttcctttaattcactggtattgatgcagaccagggcatgccctttggcctttccccaatacaggaagaattagcagaatgacaaagacataaggaagcttcaggtaggagaa

SEQ ID NO: 770870 - DNA, 549 bp, Homo sapiens
gttcttttctcattgctttaattttctcagtgaaaatgtgaagaaagtaatcagttgagagaaaataaaaggaaggagaactcgagtctgaagtcagggcagaaggtagaaaatatcaatctaggaaagaaaacaacaacctagggaaatggcttatgactgccaggcagcattcatagctcatttgggtctcacagtgggaatacccaacttatctgcatgtttttcttcagccaccatcagcaacatgagtgatgccacagagtagccaaggactgtggttttgccagttgagtaagacaagacgatgggcttgcgggagaatgcaagggagtggttagatttattacccatgggatgtatgctcagtaagaagagagaacatgaaggggctgaagaacaatagaaarcttgtagaaccaatgaattagaggtcttactggagtaaaaatattatcaggatcagaataacagagggaataaattgaaaacttaggaggagggataaaatttagaccgtgaacagattgcagttattagtaatgacat

SEQ ID NO: 770871 - DNA, 623 bp, Homo sapiens
tacaagagcttgactaatgactgggaagatcacttgtcagtgaagcatttttcagttgaaggacagttggaatacagagcccttctattttcccatgatgtgctccttttgacctgtttgaaaacagaaagaaaaagaacaatatcaaattgtatgtatgcagagttttcatcacggataactgtgaggagctaatccctgaatacctgaacttcattagagtgctggtagactcggaggatctccctctaaatatttcccataagatgttacaacaaagcaaaattttgaaagttatcaggaagaatttggtcaaaaaatgcttagaactctttactgaactggcagaagataaagagaactacaagaagttctatgagcagttctctraaaacataaagcttggaatacatgaagactctcaaaatcagaagaagctttcagagctgttaaggtactacacatctgcctctggtgatgagatggtttctctcaaggactactgcaccagaataaggaaaactagaaatgaatcttaaagttgtcttttcagaagtggagactgacatcttattgacaggactgctccttattttcttaataaagtgaattgcctctatcag

SEQ ID NO: 770872 - DNA, 474 bp, Homo sapiens
agataacaccaatagcaggaaaaaaacagtttggggagaaaagatgacttgtttaattcttggccttaagtctgatgtattgacaatgtagtttattcattcaagtggagatccatttatataataagaggttggaaaagcagatagaggacatacaaaatagacagtggttagaaagctagattttggaatgatccaaatggactcaaaaacatcttcagagcaggtaatatcagcaaaactttttttggtgtaaaaaaattaaagagagaggacagctgaagacaaagtgtttgggatttttttattttctgaaaaaaactctttttataataagragaagagcattcagaaaaagacaaaaacaccgtgcttgaaaaaattgagaaagagaatctcagaaatctgggaggtgtttggaggagtgaatggtggaaattgcctgtttccccctcctttcctcttcccagacat

SEQ ID NO: 770873 - DNA, 664 bp, Homo sapiens
ataatttcactgtgagaatgacattatgtatgtaagttttccctttacattctttgttccccaaaatgtcagagaaagccagaagaatttttttgtgttgcctgtcttccattatctatctcacttttgcaaaagactaagaaaatgataaattaaagagtttctgacactttctagcaatagttataatgcaaaatcttatttatactccccacaaacttttgctgtgatttagatttcaayggagaattggcaggatcaatctcaccatggccaaatccctcagaccctaaataaggtcctaaatctctaatgggaattttcataagattaaatagaaagtatggcactttaatttttataagcttttagatatttgtaaaaaagagtaaatgaaagaaagttttctaaatttcttatatttgctttgttgtcaaagtatttatcataactgaatgatatttaaaggcatgtaatatcacctaaatatggatctgcaactacataaaataatctcaataattaataggttgtacaaagtagttcctttaaaatctcaaataatatttgtggtacttttattttgaacactttgaactaaaaaaaaattatatatttctctagacatttaaatatttaaaagtttaaagccagacactagaat

SEQ ID NO: 770874 - DNA, 597 bp, Homo sapiens
tccaagttcttcagctttgggactcggactggcttccttgctcctcagcttgtagacggcctattgtgggaacttgtgatcttctcagttaatactacttaatatatatattaagtagtatatatacagagagagagagagaggggaatttatatatatatatatatatatatatctcctattcattcttcattctgtccctctggagaaccctaatacattgtgtcctcctacaactttttgctggcaacataaactcaaaaaggtgtatataaggctaataattgttacatacgagccaccgcattttttgtttgcatctatcattttggactagatggattttgagtgatttgaggacacaagattcaatttatttgttgttgggaaatgtgaacctattaccaactcccatgctatctgggtgcaactttgctaacttttgctctattcatyttttatattaaattactttctgggctatgataatgatttatctctccttttaattgttggatatataaattaatgagagaattgtgctcacatacttttcttttacatagaaaagaacatttttgagaatactttattggg

SEQ ID NO: 770875 - DNA, 549 bp, Homo sapiens
gttcttttctcattgctttaattttctcagtgaaaatgtgaagaaagtaatcagttgagagaaaataaaaggaaggagaactcgagtctgaagtcagggcagaaggtagaaaatatcaatctaggaaagaaaacaacaacctagggaaatggcttatgactgccaggcagcattcatagctcatttgggtctcacagtgggaatacccaacttatctgcatgtttttcttcagccaccatcagcaacatgagtgatgccacagagtagccaaggactgtggttttgccagttgagtaagacaagacratgggcttgcgggagaatgcaagggagtggttagatttattacccatgggatgtatgctcagtaagaagagagaacatgaaggggctgaagaacaatagaaaacttgtagaaccaatgaattagaggtcttactggagtaaaaatattatcaggatcagaataacagagggaataaattgaaaacttaggaggagggataaaatttagaccgtgaacagattgcagttattagtaatgacat

SEQ ID NO: 770876 - DNA, 644 bp, Homo sapiens
taataattgctttaggccttaatgaaaagtgacatttgaacatcagcttgaaggaggtgatggagtgacccttttgggtatctggaggaagagcattccttgccaaaggaacaggctgggcaaaggccctgcagccaaagcatacctagcatgtttaaggaacatcaaaaagctggtagagggggagttaaattagcaagagggaaatgaaatcaaagatattatgagggctagatggtagagggtcttatatgccattgtaaggactaagtgacaagaggatgtgtttggattgctttgactgatctgacttccattttaaaaggatgttctttctggccgctgtagagaatagactaaagcagagtcaggatggaaggaaggagtcagcttttgaaaaaggtgagaggaagacttgggtggacgaggtggataacagtagaggtaataagaggtgataagatacaygaacattggatgtacttagggcaacagtatttgccgacaaatactggagagtgagaaggagaggtcagtttggcctgcacagctggaaggatggcgatgaggattactataggtagaacaagcttgggtagggtaagagctccattttggatgtgttgagtcctttttgacatcca

SEQ ID NO: 770877 - DNA, 644 bp, Homo sapiens
taataattgctttaggccttaatgaaaagtgacatttgaacatcagcttgaaggaggtgatggagtgacccttttgggtatctggaggaagagcattccttgccaaaggaacaggctgggcaaaggccctgcagccaaagcatacctagcatgtttaaggaacatcaaaaagctggtagagggggagttaaattagcaagagggaaatgaaatcaaagatattatgagggctagatggtagagggtcttatatgccattgtaaggactaagtgacaagaggatgtgtttggattgctttgactgatctgacttccattttaaaaggatgttctttctggccgctgtagagaatagactaaagcagagtcaggatggaaggaaggagtcagcttttgaaaaaggtgagaggaagacttgggtggacgaggtggataacagtagaggtaataagaggtgataagatacatgaacattggatgtacttagggcaacagtatttgcygacaaatactggagagtgagaaggagaggtcagtttggcctgcacagctggaaggatggcgatgaggattactataggtagaacaagcttgggtagggtaagagctccattttggatgtgttgagtcctttttgacatcca

SEQ ID NO: 770878 - DNA, 536 bp, Homo sapiens
aaagccgaagtctatacaatggtctacaaggccccataaaatctggttcctggcaacctctctaactttatttcctgccactttcccattgctctatcctcctttgttattctggttttgttccttgcaaataccaagtgtgcgtccacctcagggcctttgcaactactggttcctttgcctgatgtgcccctcatcctcatactcacatggcttatttgtttatgttattcagatctctccttaaatgttagcttctcagagatactttctgtaactyttttatctaaaatagcaccatcagtcactctgtttcctcttaccttgtttcagtttttgcagtgacacttgccattatatgacattttaaaaattcatttttgtatttgtttataatctctaccctattagactgtaagttctttgaaagcaaggctttttttttttttttccccaccaaagtcattttactgccagagacaaggactttattttacttcctgctctatctccctatctggcgtgggtctggcaga

SEQ ID NO: 770879 - DNA, 633 bp, Homo sapiens
agcctcagtgcctttaggctggctttctctctgcctggaatgttctccccctacactatgactcccactcacttcattcaggtctttaaatgtcaccctgagccaggcgtggtggttcatgcctgtaatcccagcacttygggaggctgaggcgagtggatcgcttgagcccaggagttcaagaccagcctgagcaacatggcgagaccccgtctctactaaaaatacaaaaattacccgagtgtggtggcacacacctgtagtcccagctacttgggaggcttaagtgaggatcacttgagccctggaggttgaggctgcagtgagctatggtcatgccactgcattccaacctgggtgacagagtgagaccctgtctcaaaaacaaaaaagtcaccctgtcaggatcatcttccctgatgctgtcaccataaagagcccactcccccaacttctgcagctctgtctcccatccttgctttattttcttcataccactcatcattagctggcctgttccatgtttttatctactgtctccgctatgatgcaagcccaatgaaggcaggcatttccatcagtttaggtcagagcagtatccccagtgcctagaacagttcctggcacacggtc

SEQ ID NO: 770880 - DNA, 581 bp, Homo sapiens
gcaggaggattgcttgagctcaggagttcaagaccagcctgggcaacatggcaaaactccgtctctacaaaaaaatacaaaaagttagctgggtgtggtggctcacgcctgtagtcccagctactcaggaggctgaggtaggagaatcacttgagcccaagaggcagargctgcagtgaaccatgatcacaccactgccctctagcctgggtgacagagcaagactctgtctcaaaaaaaaaagaaaagaaaaaaaaaagaaagggaaagaaaaaagaaaaagtccatgtttatgtttattgcattatggtcaaagaatgtggtctgtatccattctactttttggaatttattaaacttttctctgtggcctaatattatggccagtgattactaatgttccatagttgctgactgactaaaagatgtattcatggttttaagaaaagagaatttgatatagctttattaattatactgtttttgtttttgtctactagagctgtcatttgctgacaaaggtaagttaaagcctcctgcttctggtatatttccatcatttatttattacatttcccaga

SEQ ID NO: 770881 - DNA, 581 bp, Homo sapiens
gcaggaggattgcttgagctcaggagttcaagaccagcctgggcaacatggcaaaactccgtctctacaaaaaaatacaaaaagttagctgggtgtggtggctcacgcctgtagtcccagctactcaggaggctgaggtaggagaatcacttgagcccaagaggcagaagctgcagtgaaccatgatcacaccactgccctctagcctgggtgacagagcaagactctgtctcaaaaaaaaaagaaaagaaaaaaaaaagaaagggaaasaaaaaagaaaaagtccatgtttatgtttattgcattatggtcaaagaatgtggtctgtatccattctactttttggaatttattaaacttttctctgtggcctaatattatggccagtgattactaatgttccatagttgctgactgactaaaagatgtattcatggttttaagaaaagagaatttgatatagctttattaattatactgtttttgtttttgtctactagagctgtcatttgctgacaaaggtaagttaaagcctcctgcttctggtatatttccatcatttatttattacatttcccaga

SEQ ID NO: 770882 - DNA, 610 bp, Homo sapiens
aattgtaggattctggctggatgctaaacgtgcagaattgtgtgtagggttaagaatgaggagttatagagacacagccctgctttcgtgtttgtattcggggtgggaaatgtgtggagaatgcatcctagtgagtggacctgtgtcaacacccacatgcccacacgcatgcgtgctcagccccttggtctgaaagggcaggctgagtgattgctcagtctatggaagtttaggaaattaggaaaaggtgtggagcagtttagtcattgaattctgggaaatttggaccttaccccaagatgaaagggtgtccgtagtgggtacgttgggaatgacctctgttttggggctagtcctcctaatgacagttcccctcacagctccctggcaggagtttgataagctcaccccaggccttcctgctcactcttgaggtgtggayatttcccacccagtgtcttttcttttctttttttttttgagatggactcctgctctgtcgcccaggctggagtgcagtggcatggtctcagctcactgcaacctctgcctcccaggttcaagcaattctctgcctcagcctcctgagtagctgggattacaggcgcct

SEQ ID NO: 770883 - DNA, 601 bp, Homo sapiens
  misc_feature 393: n = A,T,C or G
ggccttaaactttcacttaatctctgtttttcttttttggagactgagtctcactctgttgcccaggctggagtgcagtggcacaacctcggctcactgcaacctcctcagcctcccaagtagctgggattacaggcacccgccaccacgcccggctcattttttgtatttttagtagagacgggggtttcaccatgttgcccaggctggtctcgaacttctgacctcaggtgatccacccgcctaggcctcccaaagtgctgggaatacaagygtgagccaccgcggccggcttaatctctgttttcaacgcagtacccttgccctcaactgtactcaggtgctctttaagctaaaaaacctgttttccatttccgacaaactccagtattntgatgggttgggggagatcggttgccaagatatatagagtcaataaagagatctggaggtctaacttcaaataatcctcctaattttagtaccactttcaccccagctgtaagcgatgctactaatttcatggtaaatcaggttgcttgtaagctttctttgctgctggcttagttaccacctcactgcaaaatgagtctgttttcca

SEQ ID NO: 770884 - DNA, 548 bp, Homo sapiens
ctgcctcagcctcctgagtagctgggattacaggcctctgccaccacgcctggctaatttttgtatttttagtagagacgaggttttaacatgttggccaggctggtctcaaatgcctgacttcaagtgatccgcctgcctcagcctcccaaagtgctgggattacaggtgtgaggcactgtgcccagcctatatatatatttttatttcagtagttttggggaacaggtggtgtttggttacatggataatttctttagtggtaatttctgagatgttggtgcacccatcacccgagcagtgtacgttgtactcaatatgtrgttttttatccctcacccatctcccacatttccgcccgagtcctcagagttcattatatcatttttatgcctttgcgtcctcatagcttaactcccagttgtaagtgagaacatacgatgtttggtttttcattcttgagttacttcacttagattaatggtcaccaacgccatccaggttgctgcgaatgccattattttgttcctttttatggctgagtagta

SEQ ID NO: 770885 - DNA, 548 bp, Homo sapiens
ctgcctcagcctcctgagtagctgggattacaggcctctgccaccacgcctggctaatttttgtatttttagtagagacgaggttttaacatgttggccaggctggtctcaaatgcctgacttcaagtgatccgcctgcctcagcctcccaaagtgctgggattacaggtgtgaggcactgtgcccagcctatatatatatttttatttcagtagttttggggaacaggtggtgtttggttacatggataatttctttagtggtaatttctgagatgttggtgcacccatcacccgagcagtgtacgttgtactcaatatgtagttttttatccctcacccatctcccacatttccgcycgagtcctcagagttcattatatcatttttatgcctttgcgtcctcatagcttaactcccagttgtaagtgagaacatacgatgtttggtttttcattcttgagttacttcacttagattaatggtcaccaacgccatccaggttgctgcgaatgccattattttgttcctttttatggctgagtagta

SEQ ID NO: 770886 - DNA, 548 bp, Homo sapiens
ctgcctcagcctcctgagtagctgggattacaggcctctgccaccacgcctggctaatttttgtatttttagtagagacgaggttttaacatgttggccaggctggtctcaaatgcctgacttcaagtgatccgcctgcctcagcctcccaaagtgctgggattacaggtgtgaggcactgtgcccagcctatatatatatttttatttcagtagttttggggaacaggtggtgtttggttacatggataatttctttagtggtaatttctgagatgttggtgcacccatcacccgagcagtgtacgttgtactcaatatgtagttttttatccctcacccatctcccacatttccgcccgrgtcctcagagttcattatatcatttttatgcctttgcgtcctcatagcttaactcccagttgtaagtgagaacatacgatgtttggtttttcattcttgagttacttcacttagattaatggtcaccaacgccatccaggttgctgcgaatgccattattttgttcctttttatggctgagtagta

SEQ ID NO: 770887 - DNA, 548 bp, Homo sapiens
ctgcctcagcctcctgagtagctgggattacaggcctctgccaccacgcctggctaatttttgtatttttagtagagacgaggttttaacatgttggccaggctggtctcaaatgcctgacttcaagtgatccgcctgcctcagcctcccaaagtgctgggattacaggtgtgaggcactgtgcccagcctatatatatatttttatttcagtagttttggggaacaggtggtgtttggttacatggataatttctttagtggtaatttctgagatgttggtgcacccatcacccgagcagtgtacgttgtactcaatatgtagttttttatccctcacccatctcccacatttccgcccgagtcctcagagttcattatatcatttttatgcctttgygtcctcatagcttaactcccagttgtaagtgagaacatacgatgtttggtttttcattcttgagttacttcacttagattaatggtcaccaacgccatccaggttgctgcgaatgccattattttgttcctttttatggctgagtagta

SEQ ID NO: 770888 - DNA, 526 bp, Homo sapiens
acaggatcctctagctagaatatccaagggtcatggagagaaatacccagttaaaatatcagaaaagaaaaagtgataccattagagacactaaaaagaccattaggtaatagtattagcttttgtattctgagatccaatagcagcagtcacttccctccaccgctatgtgtatcccaggaccaccctgggcggggagggctgsggttagggagcagccatggatgctctgatgctggccctgggcctcgggggtgacagtgatgaggaactgggtgcacacatgagtggggcagccgggcctggccagagaagcagcacacacgtgcacagacgtgtttacccacatacacatgtgcacgcacgtgcacaaacacattgcaggcaggcatgttgacgcctcaggcagcggaggaccctgactctgggcgctgctgacccgggcaaggccccactgtgattcgtgccatgacctcagaatgtcactggtgcttagcacctgtctgctctctggcctgcctcagtg

SEQ ID NO: 770889 - DNA, 624 bp, Homo sapiens
tggaaacaacccaaatatgtcccatcaacagatggatgtataaacaagatgtagtatatacaaattattcagtcaaaaaaagaaattaaattctgctatgtactacaacatggataaaccttgaaaacattatcctaagtgaaataagaaaggtcaaatattgtttgattctatttccatgaagtgtctagaataggcaaattcataaaaagagaaagtagaatagaggttaccaggggctggggaagaaaagggatagagaatttctgtttgggatgatgaacaagttctggaaatggacagtggtgatggttatacaatattgtgaatgtacttcatgccactaattgtacactttttaaaatagttcaaatggtaaatggtatgttttwtatatatatatatataaccacaataaaaataaaataaattgccaaagccaggagaaggtgggggagagctatgtacatacccgagtttgtgaagatcagacaaagattcacatgaactattttgaaagtcttttacaataatcctagtaagacatagctgaaaacataatactgatcatgactaagccataatcctattacagtggaaatcataatttagtacaattttttg

SEQ ID NO: 770890 - DNA, 528 bp, Homo sapiens
atgtcccaagaggagtgctccagtggccccctaccttcctgcagcactgccccgggccacagagcctctcaggccatgaccggggagctggaccccagatggcgaggaaagagccaaggaagccaattgccgcggccaggcctggggactggagtgctgagcgggccagccccttcaccctgttctgtttgtcagaggttggaagctggggccaaggtgggctcagtgagtctggatgggagacaggaccaaagcaccgaggagaaacgaatcaggatgggggccgcagaggagcggcggccgcttccggcaraacatggaatcctgacgcagcccagctgggaagctggaacccttctccagtgcccccacgatccagaggatgggaagttctagagacaaagcctctaacccagtcaccacaggaggcctgcgcagatgtggcctaggatgggtactctgggttgttgcgggctggcaagcatctgcctgagaaatcgggatccaccctcaggaggcagctggagc

SEQ ID NO: 770891 - DNA, 592 bp, Homo sapiens
tttctcagggacgttccatgctgagaaaaagaattcagtgatatttctcccatttgcttttgaaagaagagaaatatggctctgttctgcccggctcactggtggtcagagtttaaggttatctcttattccttgaacaattgctgttttttcaaggtgctcagatttcatattgcacaaacacacatgctgtayaatttgtgcagttaatccaattatcacatagtcctgaggcgacatacatcctccttggttgataggattaagagattaaagacaggcataggaactcacaagggtattgactggggaagtgataagtgtccatgaaatctttacaatttatgtttagagattgcagtaaagacaggcataagaaattatgaaagtattaatttggggaagtaataaatgtccataaaatcttcacaatccacattcttctgtcatggcttcagccggtccctccgtttggggtccctgacttcccacaacatatggtgattcctcaaagagctaaaagcagaactaaaacatttgacctcgcaatcccattactgggtatatacccagatgactataaatcattcta

SEQ ID NO: 770892 - DNA, 592 bp, Homo sapiens
tttctcagggacgttccatgctgagaaaaagaattcagtgatatttctcccatttgcttttgaaagaagagaaatatggctctgttctgcccggctcactggtggtcagagtttaaggttatctcttattccttgaacaattgctgttttttcaaggtgctcagatttcatattgcacaaacacacatgctgtataatttgtgcagttaatccaattatcacatagtcctgaggcgacatacatcctcctyggttgataggattaagagattaaagacaggcataggaactcacaagggtattgactggggaagtgataagtgtccatgaaatctttacaatttatgtttagagattgcagtaaagacaggcataagaaattatgaaagtattaatttggggaagtaataaatgtccataaaatcttcacaatccacattcttctgtcatggcttcagccggtccctccgtttggggtccctgacttcccacaacatatggtgattcctcaaagagctaaaagcagaactaaaacatttgacctcgcaatcccattactgggtatatacccagatgactataaatcattcta

SEQ ID NO: 770893 - DNA, 436 bp, Homo sapiens; identical to SEQ ID NO: 740639

SEQ ID NO: 770894 - DNA, 624 bp, Homo sapiens
aaatagagaggatcctagtcttctgtttttcccctaaaaaatggtcagctaatagaacagagatgtttgcctggtggtagaaagaggccataaaacacctcctaatttcttctgaaagggactgacttcaattgcatcagagattaaaataggtactcaaacctaaaggtactctcaggaacagttgagattttggccaaaaggtaattgaggggaggctcaagatactggttaaactgaaggtctgtgagtttgcaggagagaactaggggctgaaacaactgggaggagttctcctggaaccaaaagaaagaacaagcactgacatcagaaactgtttcttcaagggagccagaatttgaytaaattagtttatggagcaattcgtatccgagaacattgttgaaaaaaacagagcaattggctggcaatgagtaaagtgtaatagcttggtgtggccaagaatatagaggaagggagccctaccaaaaccactacaaggggcccatgggctaaacaaagctatgttccctgaggaacaccagagactgaacacgtaggtgtcactgaaagaatccagttggtctctgctgtggtttgaatgtgtcctgcagagttcatgtg

SEQ ID NO: 770895 - DNA, 598 bp, Homo sapiens
aatcaaccttttgcttttcaacatcagaatcatagcttttctcctatgattgccaagctgaaggtacagtggagcaaaataacatgttttgtacacccagctctctgaagggtggaggggaatggtgcttcaagccccagaagaatatgcttcctcccatggaacgggactgcagaaccccatccaggagcagtcaagacgcatctgtgggaggttccagggctcaagacatttggcagcactgctgacgtggacgttcaactcagaagaccagatcttggcttagcctcaaggagagttagrtctttgttgtgcttggatggaaactggcgggggctctttgataggtgtgagggttttaagggaatgaaatagtaacattaaatttgcaacagttattctgcaaaatcttcaaatccatagaaatagctctatttctgctacaaaatgagttttggatgaggaatgaattacctcggcatcacttttgcatttgtgcccttgtatttggtttttccttttttttctcattttggtttccggtttttagggttcaattttaaatgattgtaaaaggtcaagccctgggtgaatattt

SEQ ID NO: 770896 - DNA, 537 bp, Homo sapiens
cctctacatctgttgtctctcctcctgttcttatgaggacaccagtcatattggattaagggataycctactccagtatgatctcatcttaactaattacagccgaaccacctcttttcccaaataagatcacattctgaggttctaaaaagaaaaattattgaggggaggaatgaatgcacctagtatatttttccttaaatatttggtaaaaattcaccagtgaagaaatctcatactgagcttttctttgtgggatgttttcaaattactaactggatatcttagttactatatgtgtattcaaattatctattttatcttgaatcaatttcagtagtttgtgtctaagaattttttcatatcatctgttttatctaacttgttggcatacagttgttaatggtgtttattttttattatactttaagttctggggtacatgtgcagaacgtgcaggtttgttacataggtatacacatgccacggtggtttgctgcacacatcaacccatcatctacattaggtatttctccc

SEQ ID NO: 770897 - DNA, 610 bp, Homo sapiens
tgagacttgagagatttaaaaacatggctgcagctctataatcatcctctttatatcttaagcagacaattcatacaataagcattctaagtacattgagttgtggaaattgttttcttgaattggacacagcttgataatagctgctatatattaaagttctcatgctgcytctccttgtagattcatgccttggtactttctgcttttaaagaaactttctcttatatttaatatcatgtcacaaataaacttgatgatttaaggctttaatttattttgtatgtatccgaacctattagaaataatactaggagcatgaattccacgttaaaacacctccggttacttattgcaaaaagttctcccctcatttcggagcaactttcagtgtctttccccaagctatatatctttgttaaaattacattggtcatgtcactaaataatgcttggtacctaaagaaataaaagaatttaagtggaaaatatagatattattttgaaaacatttcaaaacaatgaaaatgtgatggatttcccctctcattttgaggacaattttagccttagatggaatcttctaaagtgttgtttaagtaagatgcat

SEQ ID NO: 770898 - DNA, 610 bp, Homo sapiens
tgagacttgagagatttaaaaacatggctgcagctctataatcatcctctttatatcttaagcagacaattcatacaataagcattctaagtacattgagttgtggaaattgttttcttgaattggacacagcttgataatagctgctatatattaaagttctcatgctgcctctccttgtagattcatgccttggtactttctgcttttaaagaaactttctcttatatttaatatcatgtcacaaataaacttgatgatttaaggctttaatttattttgtatgtatccgaacctattagaaataatactaggagcatgaattccacgttaaaacacctccggttacttattgcaaaaagttctcccctcatttcggagcaactttcartgtctttccccaagctatatatctttgttaaaattacattggtcatgtcactaaataatgcttggtacctaaagaaataaaagaatttaagtggaaaatatagatattattttgaaaacatttcaaaacaatgaaaatgtgatggatttcccctctcattttgaggacaattttagccttagatggaatcttctaaagtgttgtttaagtaagatgcat

SEQ ID NO: 770899 - DNA, 633 bp, Homo sapiens
tttcccctctcattttgaggacaattttagccttagatggaatcttctaaagtgttgtttaagtaagatgcattgtttctagtctttttttgttgttgttctcttttgagatggagtctcgctctgtcacccaggctggagtgcagaggcgtgatctaggctcactacaagctccgccgcccaggttcacaccattctcctgcctcagcctcccgagtagctgagactataggagcgcaccaccaccacacctggctaattttttgtattttcagcagagacagggtttcaccattttagccaggatggtttcaatctcctgacctcgtgatccacccgccttggcctcccaaagtgctgggattacaggtgtgcaccaccgcacccagctgtttctagtcttaatgatagytatgacagaatcagggttatttttaatggtaaatatttgctttttagagatatttctatatttatttctgtgctcctaagttttattctaaaactcatttacataaaatatgcttatcttaaaaaatgtatttatctattttttaccctctttccccactcaaaagacaaatttatatctacaatctcagacttacataaaaacaagacatcactgaaatt

SEQ ID NO: 770900 - DNA, 568 bp, Homo sapiens
aggcttgagaagagaaatgaatagatgctgcagttaaataactaccacaagaaaaataacaaggagggcaatactgaagagcaaataattcaatgagaatgaagacatggactcagagggtcaaaatttttctctgacctatgtggcacaataatctattacatagttaatagtttgaaagacgtttccatcagcctggggccctctctccggtatcgagacacagtgatattttytacgtcaagaccatagctccagtccaccagattaatgccagaaatatgtatacgcagggcctacaaatctaatgagtatgttggcagaccataattctacacagcttcaatatcactgtcctaccttaatatcactgtccataattctacacagcttcagtatcgctagcctactcagagcccctctccatgcttgttgtgatctgattttattcccccaaagttaaataacaaaataggcaaaagccttaaggtatcaaaaggaaaatagagagagaattggggtaattagtcatggattactatcaacactaaattattattaaccccaa

SEQ ID NO: 770901 - DNA, 568 bp, Homo sapiens
aggcttgagaagagaaatgaatagatgctgcagttaaataactaccacaagaaaaataacaaggagggcaatactgaagagcaaataattcaatgagaatgaagacatggactcagagggtcaaaatttttctctgacctatgtggcacaataatctattacatagttaatagtttgaaagacgtttccatcagcctggggccctctctccggtatcgagacacagtgatattttctacgtcaagaccatagctccagtccaccagattaatgccagaaatatgtatacgcagggcctrcaaatctaatgagtatgttggcagaccataattctacacagcttcaatatcactgtcctaccttaatatcactgtccataattctacacagcttcagtatcgctagcctactcagagcccctctccatgcttgttgtgatctgattttattcccccaaagttaaataacaaaataggcaaaagccttaaggtatcaaaaggaaaatagagagagaattggggtaattagtcatggattactatcaacactaaattattattaaccccaa

SEQ ID NO: 770902 - DNA, 595 bp, Homo sapiens
ccagccactgaatgtcaatggatcttctgaagtttctttcccctctttttgtaacaattacaaaaatgattaaaggcacttctatgtgtgtatgcatacacacacacacatacacacacatgcacacacacacacacctgtgagggagcagaacatgatgctcaattaacaattctgaaagattaatacacamacacacacacacacacacacacacctgtgagggagcagaacatgaaaacataatgtgcaattaacaatgctgaaagtttaacacacacacacacacacacacacacacgggttatatctttatttgaataaactttccatcaaagagagtgaaacttacaggcaatatgaatgagagaatgtgtccaaaagttgtgaaaaactaccccaggaaaatatctcttttaaaattaggtttttataaacagtgcatttaatgaagcatattagtccttttccatattaaattggattatcacattttttcttgtttgttttaatgcctcaggattcaagactgaaatcaatcatttactgatccagattaaagtctgtatatatagatatatacatgtatgggttt

SEQ ID NO: 770903 - DNA, 591 bp, Homo sapiens
tataaattctttaggggatggagaccctagtttacatgatgtgattattgctcattgcatgcctgtacaaaaaaaaatgtgccccataaatatatatatctactatgtaaacacaagaattaaaatttaaaaatttwaaaaattgaaagatattttaaaaaagaaaaaaaatcaggatataggcctgagcaaagatttcctaagacatgccataaaaattataatccataaaagggaaaattgataacttggccttattaaaaatttggccctaggaaagggaaaataagagctatagaaagagcaatactatttgtaaaccacatatgcaacaaaacactataatttataaagagctctcaaaactcaacagtaaaaaatcaaataatccaaataaaaatgtgcaaaacacataaagagtacgtacaaataacaaataagcacaggaaaatatgttcaatatcattagttattagggatgtgcaaattaaaatcacaaggagatatcacgatatacgtaactgaatggctaaaataaaacacagctagaaccaaatgctgacaaggatgcagagaaagtggatcccactc

SEQ ID NO: 770904 - DNA, 618 bp, Homo sapiens
aagatcaattgcttttcacagcaagagtttgataactttattatgccaacaagtctcctccccataagtaatgaggatgccatgagtaacaaggagcaaaggggcaagagatgctatcctgccatatgtcatttcatttgaatataaatgtccaaggcgtttagaattttaaaaagcwctcagttttgttactgtgctacctgttacatgtatgggattcatgattgcaatgaactctaaacaaacatatttcttaccccaaattcataaaataacatgtttctaatttttgactgtacttctattatgtttttttggaaaaaggtgacaataaatttgtattgattgcttactgttgccaagcactgcaggtatttcatcttaattctagaggtaagaatactattggctaagaaatactcattagcttttcaaaaacaacataagtggaaaggatatattttagacttgaagttaaaaccaacagacccattacactataggccacagcctcctaaatgtatttctttgcctggaacatattcccttttctgcctatttacgtacagtgtaagtcttcaagagaatccttcgttgactattagaattctcggaaat

SEQ ID NO: 770905 - DNA, 511 bp, Homo sapiens
ctaactcacccaccacctatgtgaccttgagaaggcaatggctcctctggagcctcaggcactggtggtaaagatgttggactagatgatttgcaatttattgaggaggaaagggaagagcagttcatcctgctgacatagagtttacctccttagattagctgcttaactctttgaggacagagctctagtattatcttttatctgttttgcaaaatatttaccagagcataactttmtcctgacactcttgtatttttgtacggttcatttcatatgcaagttaagtgaagcttgaagtaatttgctccactccattcagaaaattaagcgtgaaggtcagaggaacttatttcatagatactctctgccagaccctcctgcttcattttaaagaagccatcgatacttccatactcctgaatgacagaatatttggaaagtaaatgttttaatagtacataaaaaattatgttttctgagattatttccaaaataaaatttgtggtaa

SEQ ID NO: 770906 - DNA, 597 bp, Homo sapiens
ccatttgtttatttttgctttttgttgcctgtgcttttggtgtcatgtccaagaagtcactgtccagaccaacgtccaggagctttgttcttagttttcttttaggagtgttacaagttagtgtcttatatttaagtctttaattcatttcaagtaaagttttgtttatggtataaggtcaagggccaattttattctattacgtatggatatccagtttttctgacatcatttattgaaaatactacccttyctttattgtctatccttgttgcctccttgcaggtcactgtgcaggttcttgggaagtaggattgtggctaaaaggagcttgaaccaagtcacaggtcttcctcagagtccacagctggaacagaggtctacaggtcagcctctgggggtacgaatgggtgtgccttctgtcaagttcctaggaaggtagaaatgccccaaaactgcagctgagaggggccagagcctagtcacaggctgcttcagggtctgttactaagactgaggttggcaggcctgctatccatggtataggtgggcatgacttcccctgggtacctagtcagatgctactggtgacaggag

SEQ ID NO: 770907 - DNA, 656 bp, Homo sapiens
taaaatatatattaaaaattctgctggaatctaaatatattgttttgacattctctgatatgccagtaaatcttctcaaaaaagaataatgaggcccatttgcaattacttgtttcctatgaatcaatgcttttttccagtaataactacttctttcactacaatgtcttatcaagccatctgcatctgcataatcaacttcttaaaattttttaggagttgtattgagcagattagtctctagtacagataaaaactcttttttcttcattagatcctttaagaatattccacttgagtaccattttcattccatcaaattttccaaaattattgactatggttctggtgtttttagtactctgaaacagaattcccttgaacatgaagacttgaactcatttggaagcataaaattcatgcaacagaagcatagaataagaagaatcacagaggcagatgtaagcagcaccctaatcaatggccaagtgagaagagctctgtcatgtcagtgtctawttgtatgtatcagagacaaaatccaataaacccttgaaaatataaataaccttttcatgttttgattccatgcttactatgaaatctgattatcacacagctttaaaaactatccctagagctggaactagagcatt

SEQ ID NO: 770908 - DNA, 517 bp, Homo sapiens
ttaaaaatctgttttctttggggcttgtctttaaaccctcctgtcaggtatttatattcttatttgcttttaatatttccattatcttgaattcttaaatctttgcagcatcttgaattctttaatttctttggattctggagcctgaggctgcaaaatcctgtctggcaccaggaaaggcctggaagcttaatcctctggtactggcctagagtctgggaccagtggtggcctgcatggcactgggtttactaggatgggtctggtactaggctctgaggcaacgtctgatgctcacttcattctcatttcccctcacagagggtgtctctttctatgtgtgtwacctggaattgaggaaagagtcattcaaacaatataaaactgtcctttctaccatcttcaatgtatctctttatttctgtgctacatctaggtacagtagtctctcacctatttcctttagctcttatgaatgcattttttttgtgtgtgtggatagtttttcaaattaatg

SEQ ID NO: 770909 - DNA, 624 bp, Homo sapiens
taatgctgcaatgaacatggcaatgaagatatatctttaagcttctgatttcaattccttttgatatacacccagaagtgggattgctggatcatgtagtagttctatgtttaattttttaaagaaacctccatattgctttccataatggctgtgctaatttacattcccaccaacagtgtacaaggattccttttctccacatcctcataaacatttattatcttttgctttttgataatagccattctacaaagtgtgaggggatacctcattgtggtttccaattgcctttccctgatgactagtgatgtttaacaccttttcatgtacctgttaacmatttgtatgtcctctgtggggaatgtctattcagtttgttttgtccattttttaaattgggttattattaatattattttgctattgagttgcatgagtttcttatatattttggtattaaccctttatcagatatgtggtttgcaaatattttctctcactctataagttgcctttttatattgttgatttttttcctttgctacgtagaagctttttagtttaatgtaacttgtctatttttgcttttgttgcttgtgcttttggtgtcatgtccaataa

SEQ ID NO: 770910 - DNA, 579 bp, Homo sapiens
tctcacaacaatcttataatgtagcatttttatcccattttcagctaagagaactgtggttttgcaaaatttgtaacttgcctttcacagagctagtaggcaataaatagaggccgatgactagtttctctattaccaggttttttttttttttttttttttttttgggaggggggacagggtctcactctgtcacccaggctggtgtgcagtggtgcaatctcggctcactgcaacctctgtttcccaggctcaagtgatcttcccaggtactttaaaagatagaaagatgctcatcctagtgacagaccaagagacaatacaacccaaattggacaattaaggtgccrtgattccctacaagtattgctttattcccctctgttgccaaagtcctatactgagacattcataagtccctcatggggactaatagatcaatttaaagaataataaataagaagtcaggaaatattcagtgaaatatagaaaatattttttctgtatcccctaacaattgtgtacttatttatcctttaaacttgaatatggcatatattacagactagcccaaatcta

SEQ ID NO: 770911 - DNA, 607 bp, Homo sapiens
tccagcctagtactgacaccatatggtttaaaaccagtgtacgcaaagtagctaatgagctaaactcacagcaatgtaaatggtaatcaccaagaaggtaacactgatggtaatctgtgccaatagctgggcagtttatcacagcttatgtatgtgtcaaatctgtatatatacattgggcctgcgtgcccaatgyttatgggtcaggcttatgtgtcaagcctatgtgtatgtattgggtttgcatgcccaaagtttatatatcaggcctgtgtgccaaacctgtgtatcaaacctgtgtgtccaaggcctatgtctccctcggcctaggggatggaatgtaaggtacacggatgtgctttggtcgaagaatagaccaaggcggatatccaggcctgcaggaatcagcaagtttggtgcacaggtgcaaacctccacttgttatataacctgtttgtataagttcatactttgctctgagccactattgcctgtgaaaggtataattgccctgctaatgctatacagcggctcgtgggcttggcttggctcaacatagcaggtgcacttgtgcccagagaaagagagagtcagagctatccatctt

SEQ ID NO: 770912 - DNA, 535 bp, Homo sapiens
attttaattaggtctcttttagtttctggttttggctttttttttttttcttttcttttctgagatggagtctcgctctgttgcccaggctggagtgcagtggtgcgatcttggctcactgcaacctccgcctcccgggttcaagcgattctcctgcctcagcctcccaagtagctgggattacaggcgcccrccaccatacctggctaattttttgtatatttagtagagatggggtttcaccatattggccaagctggtctcgaacacctgacctcaaatgatccaggttttggcttttataagggctggttatttgcagaatcaaatggaagatttaatcaccaataagagagtaatggtaaacagtgaggtttaatcaacctggaagttctttgcttccatagggcttccttgtttcactaagtgcaggctttaataaaaccaaatacagaagcacctctggagtgcaggtcctcagctactgagcacagtgcaaaccctcgggaaagtacacgtcctgtacatttctcac

SEQ ID NO: 770913 - DNA, 602 bp, Homo sapiens
tcttaaatattgcctaatcatggactgcagatgatagagcacacactgagctttttttgtctttttttttttttggcggcgggggatggtgaaaatggttcatgattcaactgtctgtgaacttctcaaagtatttttttttaaggtataattcttctttctatgaaatgctattaagaaaaratttgggattctaacaacatttctatcattctaagcaataagatttttaagctaaaaagacagaaaggttatagcccatagtttttgatagctgctgtctcctgggttctgaaagggcgatctggctgatgaattgcatagcaggaatagtatgaacaaaatttagggaaaacaaggagtaaagattaattgtctcattttggagctgttcacctttcctatttgtgtctttctgctacttataaataggttaaaactgctcacagtcatggaaacacttggatgaaacctaacagtggaaatctgtttagaaattaaattaccagaagtaatatctacatgacagaataatttttgatttattctagaatttacttcgctgttcctttcatattgaaatttctacatacgttaaaaat

SEQ ID NO: 770914 - DNA, 584 bp, Homo sapiens
actatgattgctattatattatcagctgaatcctatcacatctgatgtctttatatcagattttacaggtcttttttttccaactgggctttaactcattactataatttacaagaagaaagaggaaaaatgtaaactggaaatactaacaatatctttttactgcagaattacacagtattactgttatactcagaaaattattggatgataaagatttttttgggrggaaagatattgttataaaattttactggtgtcatttttctgacaaattacctaaaatttcaattgctaagttgaaacattttccttgaaacagtcaaaggaaatgtgctattaccaataaaaagagaaagactcacaaaagagtagataatgatataatgattgctattaaaattctagaaagagactaaatatgaaataaattcagaaggttaaatgcttaacttccagggtagcacagcatctagtactctttgtaattcccattggcttcagttttctatagaatctgaaagaattcttattatgacttcatttccccaattttaacactatgtttatgctctctgtactct

SEQ ID NO: 770915 - DNA, 589 bp, Homo sapiens
aggcctcctatgatgatttcagagagggggtcatggctgtgggaagggaggtgaaactgtgaacctctcaccaagcgcctgtgaagcatgttgggtcatagtaaaaagagagataagcaacagaaattaaccttatcatataaaggttttcttatgtctgcagtcctactattcccataaactcaagtatcttaacaataaatattactatataacaaaaggttataatctttttatgtatatagttttatatatatatatatattcttttttttgtttttagatggagktttgctcctatgcccaggctcaagtgaagtggtgcgatctcagctcactgcaacctccacctctgggttcaagcaattctcctgcctcagcctcctgagtagctgggattacaggcatgtgccaccacacccagctaatttttgtatttttagtagagacaaggttttgccatgttggccaggctggtctcgaactcctgacctcaggtgatccacccgcctcggcctcccaaagtgctaggattacaggcgtgagccaccacgcccggcctatattatttaatatatatagagtaata

SEQ ID NO: 770916 - DNA, 472 bp, Homo sapiens
caattaataaccctacagtggcccctaagtgttcaagtgaaaggaagacgcacacatctctcacacattttaaatcagaagctggaaattattaagcttagtaagaaaggcatgtcaaaagacaagacaggccaaaagcaaagccccttgcaccaaagagttagccaagttatraaggcaaaggaaaagttcttgaaggaaattaaaagtactactccagtgaacacatgaatggtaagaaagtgaaacagctttattgctgatatggagaaggttttagtggtctgggtggaagattaaaccaggcataatatttccttaagccaaagctttatccagagcaaagtcctaactctcttcagttgtatgaagaccgagagaagtgaggaaactgcagaagaaaagtcggcatctagcagaggttggttcatgaggtttaaggaaaaaagcctccttcatgacataaaagtgc

SEQ ID NO: 770917 - DNA, 616 bp, Homo sapiens
agagcacattcagggcacccgctgtagacttgcagggcaggatcagaaagggtatagtggagacttgaagtgcttacccatgtcttttttcttctctccatctggatcttctgggaaaacgatatagcctaggttccttgcagctagacatgaacttgttactagttctagccaatgcactgtggacagaagtggtggtcttttgggtcaacggagaaagagacaggattttatagcccttcagattcttattaccgtgttttggcgatgttggaagtgcatgttaaaatgacaaagtcrgccgggcgcaatggctcactcctgtaatcctggcactttggggggccgaggcgggcggatcaactgagattgggagtttgcaaccagcctgaccaacatagagaaaccccgtctctactaaaaatacaaaattagccgggtgtgctggtgcatgactgtaatcccagctactcgcgaggctgaggcaggagaattgtttgaacccaggaggtggaggttgtggtgagctgagatagcgccattgtactccagcctgggcaacaagagcaaaactccgtctcaaaacaaacaaacaaacaaacaaaaaatgacagtg

SEQ ID NO: 770918 - DNA, 629 bp, Homo sapiens
ccaatatggttttacagagtaggaaaaagtaaccaaatggaaaaatggacaaaagataaaacctttcacaagaacaaatcctaatggccaagcataaagatgctcaaaatcattactgatcagtgaagtgccaataaagtcacactgagatttctgggactctatcttatgatctccatatcatctcttataatatcatattaaatgtatcagtaactaaattcatatataagattgcttaatgtagcatcattcataacaaatataagyatgcatcaatagggaacttgagtaaaatatggtacatccaaagcatggaatactatgcagccatcaaaagaaccctatagttatacaggtgactttaaagtgatttttgaacaaggtctgaaataagaaaacaaggatgtaaggtatcctgcatttgtaactgaaggacaaaaacaccctcaacagtcaatataatatgaagataatatatagagaagaatacatttgaggttatggggaggtgaaccaagagggaaaaggctgtactgaaaataatcatgtgacaatatgcatgcacttataaaataatgcatgtgtaacattttaaaagaaagcaaatacaaaagaatggcatgtag

SEQ ID NO: 770919 - DNA, 687 bp, Homo sapiens
aaggactttggttgggagaaaatgggatcctgtaagttgtaatgtggatgtgtgggaagaccctaatgaagctaagggcattgaacccctaaattctgacaagtcttctttgccagtggaagaggcctactcacctctagcagaagtggcctctccaatcacagctgctttcccaccttggtggtctcagcctctccacccttgtctgaggggattaaccctgcattgcctaaggaaactgtaatgaccttctctgaggcagtttccatgcaagacaatgttcactcttctcaggacctgtcccttccaccccgctttgcttctagacctagtagtagactaaagttccagccagcccctaaagggaggtactcattgtgacccatggtgcactactttccaaaagaacagcttaagttttctaatatgggtaagcagaaatccaggaaacaygtgtgggaatagatattaatggtgtgtgataatgggtgttaagaacattaagttggatcagtctgaattcattgatatgggctcacatagcagagattctctatttaatatcatagctcagaagttagattagaggtatgcagacctttcagaatgggcaaaaagtgtgaagatatttgtgttccatgtgaatgcccaccagatggtgaactcagcagaggattttactaatca

SEQ ID NO: 770920 - DNA, 608 bp, Homo sapiens
ttcaaaaaatatcaaattacatctatcgtgaatattaaatgactgttatgaacctacattggaacttatagatatgcatgtgcaagcaaacagttactttttagttgcgtacaatgtggatacataatgatgcatgctgagaatatgggctttcttcactgaacacaattaaaatttcacatgtatgcaaaagaaaggaatgaaaaataagcagataattggggtgaattaatgagcaccttattaatttcaatgtactcttttaaccttaaaatcattgggtacttcagattttttttatattatactaaaatgtcacttaaaatcaagtgctattttttaaatataatgatctgcgttcttcttaggcatataacggttttcacctcaactgaatagcttctcttaatctayaagaatttactcaccaattaagttaagaagtttaatagcttctaacttttactcatgatagaaaagtcaaggtcctgattaagcaaatatggagctgtaatttgattcttcaattttcaaaagagaaaatagattcagaaagttatgtagcatgccccacatgtaaccacccaacaggttcacgttgcctgctg

SEQ ID NO: 770921 - DNA, 640 bp, Homo sapiens
tatgcataactgggccctcctctacattgccccatgggacttgggggcctggcaaagggaactgatgtaaacatacagttcctgcttcctgctttgccatgagtaaaagcgttctttttctctgatccagtagtttcttgttttctgggacctccatgaaacagtagcaggctaacctgttttaatgtcaatacatttcaggtaattcacaattcttgaacactgccccacaacaccactttaaaatcatttaaggttgtgggtttggactatttgtggtgatataaagttattatattgagggtagaaatttagggttaaaaaacatgttaaatatatttgaaacattttcaattttatatctctgtgaatacctaagtcctatgtttttgtgtgtcagcttgtgtttgtgcatctaatttttgatagrtcagtaactagcatattacatttgtatccaaatttttaaaattctaaaattggcttttgcggagcttaactttcatatttggaatcaaaaacttaaaaaaatacataaatttagattttaacattagagaatgcaaattggcaaatttgtaagaaattttattaacccacttaaagtttcctgcaattactgctgattgcaaccaataac

SEQ ID NO: 770922 - DNA, 603 bp, Homo sapiens
attgcttataacatatatgtatgatgaagacaaaaaccttttgtagatttctaatcttgaatcttttttaaaaactggaaaatttccatttaaggacaagttcagttctcagtagttaaatgatggatgtgctattttgataacaaatcattgttatttgggccttccgggtggaaagtgaacagcttttgtaatcaggcagaaatgacagggaattgtagtcctctatttattagctgggagacatcaaacaatggaaggaatggaatcartttttaggataactttgagaattaaatgaaatagttcctatacagctgtgatggttaattttatacatcaacttgactgggcctggggatgcccagacagctggttaaacattatttctgggtgtttctatgagggtgtttccagaagagatcagccagtgaattggtggactgataagcatcatccagtccagtaaggacctgagtagaacaaaaaggaggaggaaggttgaattcactttctaccttaatgcttgaagtgggacatcaacctcctgccctcagtgcttctagacttcagactctctacatcattggctctctggctctc

SEQ ID NO: 770923 - DNA, 540 bp, Homo sapiens
ctgtttttaccaacattataatatcacattagaaacattagtcacactttatggaggcatttatggataaaatatagatatattattctaatttatatagacatttatagctaaaaacaaaaaaatgctcagttactaaagaagcccaacgcagagctgcataacttaaatttgcattataattttcaataaacatgaatttttgcataggaatagactttgaatcagtagcaattatattttatttttgcatatttgtctgagaaatagcataataaacttagatcttaaaatttcyatgaataaaaactcaagcttgtatgttatagcagaatagtaataatcatctcaatgacaacaaaaaaagaatttgggatctagcaataaacttactacaatgagcttgctgcatttagagaaatacttctgagattcaggggttcccatttttgttgaagcactaaatatttgaaaaaaaaagataccattatccttcttaccatctacagatttgtgtatatgattgttaatagaatgtat

SEQ ID NO: 770924 - DNA, 671 bp, Homo sapiens
ttgtccactgtattgggatctatggtaaataaagagattacaaattcagtccaatgtttcctccaaaaagaaaagagattagtttactcagactctttactttatcccatatctaagtatttatacagatgttaaacattaggtttttcattatgttgattgattccagtcatcttaagaatatttctctccttagaygtcagcacaatgggttttttgaaagctgttgttttgagtgatgatcattaaagaaaggaatatgacatttctaggagaattttagcatttatgtaaaatataacagtagcttatggaggtggagagaaatgtataataacttcaagcatatgaaatccttagaagaagttcttgaatatgtgatcatgggaaaaaaacctagataaagacagatcttttcagggtattttatatatttaaggaaaaaaaaagacttttttttttaatgctgctatagtcctcaggatgcagtgaaggtcactgcagtaaaaaatgtctctgttgatttagataaatgtggcctcattccaatatattctggtttttcttttatccaattgaaaacctactggaggtttttactgtggctgtcagacagagcacaaatatttcataaaccatactgggcttattaagttggcagcaattttagc

SEQ ID NO: 770925 - DNA, 576 bp, Homo sapiens
agtgagaaatcgagcgcagcaccggtgggccggcactgctgggggacccagtacaccctccgcagccgctggcccgggtgctaagtccctcattgcccggggccaggagggctggcctgctgctccgagtgcggggcccgccaagcccmtgcccacccggaactccagctggcccgcaagcgccgcacgcagccccggttgccgctcgcgcctctccctccacacctccctgcaagctgagggagtgggctctggcctgcccagaaaggggctcccacagtgcagtgggggactgaagggctcctcaaatgccgccaaagtgggagcccaggcaggggaggtgcccagagcaagcgaggactctgaggactgccagcacgctgtcacctctcaataatacattcagataaaaggcagccatagataacacttctagagaactacccacagaacccctataatctatagcacgtaagctgagcatacaagtaggttattaggcataatctctacaattttaagttaagtgcccacaggatcttagatgaatagatggtgggcttagcagttcgggat

SEQ ID NO: 770926 - DNA, 567 bp, Homo sapiens
cactgagaaatctgctttcaactgtataggagcccctttatatgctatttttttcttcagctgcatttggggctcttcgtttattcttgaccttctggatttgattattaaatgttttgaggtagttttatttttattttttgagatggagtttcgcttttgttgcccaggctggagtgcaatggtgctatctcggctcaccaaatcctctgcctcccaggtttaagtgattctcctgcctcagcctcctgggactacaggcgcacgccactgcacccagctaattttttgtatttttagtagagatggggtttcaccgtgttggccaggctggtcttgaactcctgacctcaggtaatccacccacctcagcctcccaaagtgctaggattacagaygtgagccaccgcgcccggcctgaggtagttttatttatgttaaatctgcttggtgttctatatccttcttgtatttgaatattaatatctttcagtaagttcagaaaattaccagttatctctttggataaactttctaccctgatctctgtctctacatcctctttaa

SEQ ID NO: 770927 - DNA, 567 bp, Homo sapiens
cactgagaaatctgctttcaactgtataggagcccctttatatgctatttttttcttcagctgcatttggggctcttcgtttattcttgaccttctggatttgattattaaatgttttgaggtagttttatttttattttttgagatggagtttcgcttttgttgcccaggctggagtgcaatggtgctatctcggctcaccaaatcctctgcctcccaggtttaagtgattctcctgcctcagcctcctgggactacaggcgcacgccactgcacccagctaattttttgtatttttagtagagatggggtttcaccgtgttggccaggctggtcttgaactcctgacctcaggtaatccacccacctcagcctcccaaagtgctaggattacagatgtgagccacygcgcccggcctgaggtagttttatttatgttaaatctgcttggtgttctatatccttcttgtatttgaatattaatatctttcagtaagttcagaaaattaccagttatctctttggataaactttctaccctgatctctgtctctacatcctctttaa

SEQ ID NO: 770928 - DNA, 567 bp, Homo sapiens
cactgagaaatctgctttcaactgtataggagcccctttatatgctatttttttcttcagctgcatttggggctcttcgtttattcttgaccttctggatttgattattaaatgttttgaggtagttttatttttattttttgagatggagtttcgcttttgttgcccaggctggagtgcaatggtgctatctcggctcaccaaatcctctgcctcccaggtttaagtgattctcctgcctcagcctcctgggactacaggcgcacgccactgcacccagctaattttttgtatttttagtagagatggggtttcaccgtgttggccaggctggtcttgaactcctgacctcaggtaatccacccacctcagcctcccaaagtgctaggattacagatgtgagccaccgcgcccrgcctgaggtagttttatttatgttaaatctgcttggtgttctatatccttcttgtatttgaatattaatatctttcagtaagttcagaaaattaccagttatctctttggataaactttctaccctgatctctgtctctacatcctctttaa

SEQ ID NO: 770929 - DNA, 630 bp, Homo sapiens
gtacaacttttttttaggtagtactagtttttgaggtagagagctaggtagcaatttcactaatttatatctctctatccatcatgataatagaaactcaaagatggaatttgtgagtgtgttaaacccagcttctactcaatgtctgaatccctctcacagttttcccagtgaatgatggcccccatccccatttgaacacttccaaaaatgagataatcatttcttccagaggaagccattcccacgtggggatagtctttgctagtccaaaaccaaaatcatttggttttagttctgccctcttggatcatatagcgtaaacccaatgcctctttacatgacaacttttccagtagtggaaaattactaaggtgttccccttgtgaactccattgagygttcagaaatattttcttttaattaacatattccagctttcagctaatggtgatgaaaatagaacaaatcattatacatttcttctacttcagagcactttcgtatattacacatcttaatttagacaagacttgacaattcatagttgctaattcaaaaagacttaaccaagaacagagattgtcttgactaatggatattcttaagaaaatatatccatctcatcta

SEQ ID NO: 770930 - DNA, 631 bp, Homo sapiens
tatttatttatttgagacggagtcttgctctgttaccctgtctggagtgcagtggcacaatctcgcttcactgcaacctctgcctcccaggttcaagcgatgctcctgcctcagcctcccaagtagctgggatgacaagcatgcaccaccatacccagctaattttttgtatttttagcagagatggggttccaccatgttggccaggatagtctggaattcctgacwccaggtaatccacccgccttggcctcccaaagtgctgggattacaggcataagccacaacacccggcctgtattgttatttttattgttttctttttccaaatattttttaaccatgattggttgaatccacagatgcagagggccgactgtatatacagtaaaaaaaaaaaaaaaaaaaaaaaaggttagtgtgacttgcattgtctgaaacagctcctacatctatagtttcttacccctgaagctgtttgaaaaatgaaaaagtgattctaacacatcccaaacctgaagtccaacatgaggctttgcttactgttctcgattccttcacaaaggaatcaaagagatcatgacacatgacacagtgttgtgtatacatagaagacactacaaagagaagc

SEQ ID NO: 770931 - DNA, 631 bp, Homo sapiens
tatttatttatttgagacggagtcttgctctgttaccctgtctggagtgcagtggcacaatctcgcttcactgcaacctctgcctcccaggttcaagcgatgctcctgcctcagcctcccaagtagctgggatgacaagcatgcaccaccatacccagctaattttttgtatttttagcagagatggggttccaccatgttggccaggatagtctggaattcctgactccaggtaatccacccgccttggcctcccaaagtgctgggattacaggcataagccacaacacccggcctgtattgttatttttattgttttctttttccaaatattttttaaccatgrttggttgaatccacagatgcagagggccgactgtatatacagtaaaaaaaaaaaaaaaaaaaaaaaaggttagtgtgacttgcattgtctgaaacagctcctacatctatagtttcttacccctgaagctgtttgaaaaatgaaaaagtgattctaacacatcccaaacctgaagtccaacatgaggctttgcttactgttctcgattccttcacaaaggaatcaaagagatcatgacacatgacacagtgttgtgtatacatagaagacactacaaagagaagc

SEQ ID NO: 770932 - DNA, 631 bp, Homo sapiens
tatttatttatttgagacggagtcttgctctgttaccctgtctggagtgcagtggcacaatctcgcttcactgcaacctctgcctcccaggttcaagcgatgctcctgcctcagcctcccaagtagctgggatgacaagcatgcaccaccatacccagctaattttttgtatttttagcagagatggggttccaccatgttggccaggatagtctggaattcctgactccaggtaatccacccgccttggcctcccaaagtgctgggattacaggcataagccacaacacccggcctgtattgttatttttattgttttctttttccaaatattttttaaccatgattggttgaatccacagatgcagagggccgactgtatatacagtaaaaaaaaaaaaaaaaaaaaaaaaggttagtgtgacttgcattgtctgaaacagctcctacwtctatagtttcttacccctgaagctgtttgaaaaatgaaaaagtgattctaacacatcccaaacctgaagtccaacatgaggctttgcttactgttctcgattccttcacaaaggaatcaaagagatcatgacacatgacacagtgttgtgtatacatagaagacactacaaagagaagc

SEQ ID NO: 770933 - DNA, 653 bp, Homo sapiens
ctaggaatgagaaggtaaactttcccccacatgctaaccaaagccacagggctggaattccagtgactctagaggttcttggaaggaaatttaggaaataaaaaagcatcccacagttctagccctccctcacccactaccccaaccaaatctgcccagctagacagtctcagacacaaccaatgatagtgaagaagagtcctgagcacacccagaagctgcaatatcagaacttttcatccattcccagtatgctttgtgaagagagcctatggcaaccaggcctagaaatgactgctctggtcaaggttcttgtctaaggtaagtatttgagttcagtattcaatcaagggccgtctgaactgtagcaaataaatattaccaataggagattggkggatagtaagacattcccttacctgaagcagcagagaccaagaacacattattgggccagggaggcccatcggcctgtcattcacagcacaggattgtgggtaaatggactttctctagatactctataacacccttgggagacaagtgggtgacaggtacaatccctccatttttcaccaagcgtaaatgaagcccagaaagtgtaggtggcagagttccagaaagcttttcaaaaagtaagaagctaaccttcc

SEQ ID NO: 770934 - DNA, 488 bp, Homo sapiens
gtttgttctttgtgcttaagattgctttggctattcaggctcttttatggttccacaggaattttagaataaacttttctaattctatgaaaaatgacattggtagtttgataggaataacactgaatctgcagattgctttgggcagtatagccatttaaatgatattgattctttaaatccatgggaatggaatgcttttctatttctgtaatctctgatttatgtaagtagtgttttataattatccttgtaaagatcyttcacctccctggttaggggtattcctgggtggttttttttttttttttagctactgtaaatgggattttgttcttgatttcactctcagcgcgaatgttatttgtgtatagaaatgctacttatttttgtacattgattttatatcttgaaacattagcaaagtcatttatcagttccagaggcatttggtgaaggttttagtgatttctgtacatagaatcata

SEQ ID NO: 770935 - DNA, 528 bp, Homo sapiens
gttatcattgtattaaataattgaatgagctcattagacagctgactttttgcatcattttcatgttttggatactttttttttttatttttttgagacggagtcttgctctgtcgcccaggctggagtacagtggcaggatctcagctcactgcaacctccatctcccaggttcaagtgattctcctgcttcagcctcccccagcagctggattacaggtgggtgccaccacgcccagctattttttttttttttttttttggatttttagtaaaracagggtttcaccgtgttgggcaggctggtctcgaactcctgacctcaaataatctgcctacctctgcctcccaaagtgctgggattacaggcatgagccactgcgctcaactttgtttttctaaattaaaaaatggaagctctgagaaatgctggagtcacagttctgggaagtggcaactccagagttctgtctcctacatagccctattcctctgatggtaacagccctcaaggttctttccttgcca

SEQ ID NO: 770936 - DNA, 528 bp, Homo sapiens
gttatcattgtattaaataattgaatgagctcattagacagctgactttttgcatcattttcatgttttggatactttttttttttatttttttgagacggagtcttgctctgtcgcccaggctggagtacagtggcaggatctcagctcactgcaacctccatctcccaggttcaagtgattctcctgcttcagcctcccccagcagctggattacaggtgggtgccaccacgcccagctattttttttttttttttttttggatttttagtaaaaacagggtttcaccgtgttgggcaggctggtctcgaactcctgacctcaaataatctgcctacctctgcctcccaaagtgctgggattacaggcatgagccactgcgctcarctttgtttttctaaattaaaaaatggaagctctgagaaatgctggagtcacagttctgggaagtggcaactccagagttctgtctcctacatagccctattcctctgatggtaacagccctcaaggttctttccttgcca

SEQ ID NO: 770937 - DNA, 560 bp, Homo sapiens
atacccaatcccatctcatacagcagacaaagaggtcatttaaaaatgtaagtcatggcccggcatgataaccgatgcctgtaatcccagtactttgagaggccaagatggggaggatcactcgagcctgggagtttgagaccagcctgggcaaggtgatgagactccatctctacaaaaaaatattaaaaaaaaaaaaattagctgggcgtgatggtgtgcagstgcagtcccagctactaggaggctgagatgggaggatcatctgagcccaaaaggttgagcctgcagtgagctgtgatgacaccactgcactccagcttgggcaacagagtgagaccccatctcagaaaaaaatagaaagttaaaaaaatacaaatgtaaatcagattttctctctctccacctgaaacattaaattcatgtctccctccaatttagaataaaacctcaactcctgactgtggcccatggcatcctggccttctggccctgccactctcctgtcactcttccttgctgggttagcttcaaacacactctctctctttcactgtctc

SEQ ID NO: 770938 - DNA, 683 bp, Homo sapiens
cactctgtgcctggcactttgctaagaaatttacatatattatctcacttaatcatcacaaaatcctccggtgaagtagacatttcacagttcagtcctttataagcattatcacattaaatccttacaacaaatttcaaacatggatactattatcccttctctagaaattaaaaaacacacataaatgttaaaaaaaaagttgaatyggttgaacaagttcccttaggtagtaagcataggagaacaaattcaaactcaggtcttttagactttactactataccatatggcatagtttttgcagaaagaagaatgcagacattttagaatagatagtaaactcaagtgccacagtaaaagtatttggcaaatttaaaggagaaatcccctactagcatctccatgaatcaatcagcattcatccagttcagtcaacttttgtccttgccttgtgagattttacaccatataaacactatcaaaatattacacagaggaaagaaacttgtggagacaaagaaagaaggagaaggaggttaaggagaagcaggttaaggaaaaggaggaatgtgaaagaaaaaggagaaaaaagagaaaaaaaggaataaatcatttctaaatgataatatggcaggaatacagaatggagactatagtatatgaaaccagcacaaggaaaa

SEQ ID NO: 770939 - DNA, 589 bp, Homo sapiens
caaactatgcccataaaacttcaacctcttgatttttgttgtagttattaatagttattaatagttattaacacatcactgaaccctgagaactttttcctctttctctttcttctctttcaatgctccacacccctcttcatgaatccccactccaacagtcttacttcatcacgtttccatcagaaatttgttagatatttgggaagaatgtgcaaagtaaatgtatgtaacccaaagcaagaaaayagatttttcatgtgcttgaccaaaagtgtgttttaaacaataaatgcagatctacttaggaatcagtgcttttcttatgatataaaataatcatcaagaggcaacacattaagcctgggaatttcccagcaaattctctgagaagagtcagttctgtatctttttcttccaccaagagaagagtcgaacatgtccagatttcaccctgccccagaggggctggggggccggcttggcaaccctgggtaccacacaatcacaacacactgggactgccttccaggatcagcaaatttggggaagttatgtgcctgttgtgaatttgtatccaagcaacacg

SEQ ID NO: 770940 - DNA, 572 bp, Homo sapiens
atgaagacccttaagactagctagtaaaagagtacctggtggctaagaacctataagccatgctgggggttgcaaaccaaacttattacagggacctgcacaaagcaaagactggggccttcaagtacagattgtagaaagttgtaaaattctgtttagtccaaaggggccagtcgcagttcatttagctagttctgcagccaataaacgcctagtgggaattcagtaccaggacactctcagatttttttttttttttttttttacttttcaagaaaaatcagaaattctcattttattttaattttggaagcaaatgtttatttttcccttaggcatataattctttcagaggctttaaagtttactactgtttttcccacaaagtctattcrttcagtctcctattagagttatatctgggcattttaaggttgtttttataatgttacatcttgtctaacttttttttcttccacttttcctttttcttcccctctttttggtattattatttctgctcttttcgctaagatgaaatataaagacatcagccttagaagaccagtaga

SEQ ID NO: 770941 - DNA, 603 bp, Homo sapiens
ctggactagttctttcatcattatataatgtctctctttgtcttttttaactgttgttgctttcaagtctgtttttttttttctcacttttggtgtcgatttgcataaatttcttttccacccctttagcttaagtttatatgactccttatgtgttaggtgagtcacttgaagatggaagacaattggttggtaaattcttttccattctgccattctgtatcttttatgtggagcatttaggccatttacattcaacattagtattgagatgtgaggtgctattctattcatcatgctatttgttgtctgaataccttgttgttgttgttgckgtttttcattgtgttattgttttataggacctgtgagatttatgctttaaggaggttctattttggtttacttcaagattttgtttcaagattgagagttccttttagcagttcttgtagtgcccgcttgggattggaaaattctcacagcatttgtttttctaaaaaatactttctctttccttcatttatgaatcttagttttgatgaatacaaaattcttggctgataattattttgtttaaggatgctaaagataggaccccca

SEQ ID NO: 770942 - DNA, 613 bp, Homo sapiens
atgaagagagatagtttgatttcttcttttcttatttgggtgccttttatttctttctcttgcctgattgctccggccaggacttctagtaatatttgaataggagtggtaagaatgggcatccttgtctttttctagttcttaaggaaaaatgcttccaatttttgcccattcagtatgacgttggccatgaatttgccatagagggcttttattattttgagatgtgttcttttggtgcctagtttcttgaggatttttatcacaaagggatattggattttttttttttaagggattctcgctctgttgcctarcctggagttcagtggtgtgatcttagctcactgcaatctccacctaccgagttcaagtgattcttttgcttcagcctcccgagtagctgggactacaggcacacgccaccgcgcctggctaatttttgtattttcagtagagacagggtttcaccatgttggccaggctggtcttgaactcctgacctcgtgatctgcctgcctcggcctcccagagtgctgggatttcaggcatgagccaccgcgcctggctgggaggttggattttattgaaagcttttcctttgcctattgag

SEQ ID NO: 770943 - DNA, 613 bp, Homo sapiens
atgaagagagatagtttgatttcttcttttcttatttgggtgccttttatttctttctcttgcctgattgctccggccaggacttctagtaatatttgaataggagtggtaagaatgggcatccttgtctttttctagttcttaaggaaaaatgcttccaatttttgcccattcagtatgacgttggccatgaatttgccatagagggcttttattattttgagatgtgttcttttggtgcctagtttcttgaggatttttatcacaaagggatattggattttttttttttaagggattctcgctctgttgcctagcctggagttcagtggtgtgatcttagctcactgcaatctccacctaccgagttcaagtgattcttttgcytcagcctcccgagtagctgggactacaggcacacgccaccgcgcctggctaatttttgtattttcagtagagacagggtttcaccatgttggccaggctggtcttgaactcctgacctcgtgatctgcctgcctcggcctcccagagtgctgggatttcaggcatgagccaccgcgcctggctgggaggttggattttattgaaagcttttcctttgcctattgag

SEQ ID NO: 770944 - DNA, 642 bp, Homo sapiens
actgaatgcctacatgctaaggtaacacagagtaaagggcctaatcaagaatcacttatttaaacaggtgcatttttaacatttttttattggcccttagtagaaacagaaaatgcctgagcttcatacagcaatctctgttctctgatttgaaagtattaaattggtcttaaggaccaactctggacacattactgactgtttcaacatagcacaaaacaaatggaaccaaataaaatcttactgcaagcaaaaatctaatttttaaagagtatatgttcattcaatgaagaaaaccattttgtagygtttccccactgaaaaaatcacttctttcagatcattgcttacttttgtgcacatctagcatgaaaccatgaaaatgaacccgttttttcctcttcatttccacataagcataaaacatgtccatcaccattgtttttcctgtaccttaaaaataaaaaaaattttaagaatactattaaatagtatgtactgattgctgtaatgattgttcattagctttgagataatgaaaccatactcttccgctaggaagctgaagactatgtcacttctttagaagggggagcttactttgtatgttaaactagctaaaaataaaatgttaatattact

SEQ ID NO: 770945 - DNA, 573 bp, Homo sapiens
aagcatgaactgtgaaaacatgttaagtgaaagaagccagacacaaaagatcacatattgtgggcttccatttacatatgcccagaatgggcaaatccacagagaaaggagactagcaggtggttgccataggctgagtgaggaagggttggggagaaatcagtggwgtctactaatggggacagggtttcttttattgggtgataaaaatgctctaaaattgactagtgctctaaaatagtgatggttgcacaactctgtgaacatattaaaaaccagtgaattatacactttaaatgggtgaattgcatggtatgtgaattatatctcaataaagctgttactaaaaacaaaagcggtcgggcggggtggctcacgcctgtaatcccagcacttcgggaggccaaggcgggcggatcacaaggccaggagatcgagaccgtcttgctaacacggtgaaaccccgtctctactaaaaatttttaaaaaatgaataaataaatttacaaaaaaaagcaaaatatacactcagcaaacgtttattaaacatttccagtgtgccacatggtatgt

SEQ ID NO: 770946 - DNA, 566 bp, Homo sapiens
agctggggtggtaggatgaggaaggagaggagggaatgaattagagagtatttcgcatacaaaattgagtagcatcgatgattgattggctgagaacctggttgaggagaacaggattgtgggaggaagaggaatatatcagtaatcaycctgaagtttctcacttggttgactccagaagtctaaaagagggggtggagaagagcgtttttctcttgtgagattctcaaatcctgtaacactaactgggtattcaacagttcaatttgattctggcactctttatttgaagtgagcatcagatcccacaagtaaaagggctcagtcccatagaatgtccccacttcacatgccagctgcaaatggggtatacaggctacccacatatctacctggcaactacaaatttgggaattcccatagccttcctcccctttagatttgataatttgctagaatagctcacagaactcaggggaaaattttgcttatgtttactgatttatgataaagcatacaattcagggagcccagtagaagagatggcctagggggatacctagagg

SEQ ID NO: 770947 - DNA, 621 bp, Homo sapiens
gttctttattaaattagatgaaagcatataacaatgttagttattagcaagtcactggagtggagaaaaaatagaaactttggcagggataatttttctgaagttttattttataaagataatgactataattacccagagaaatggaattttgtccattattgactaattttttctatgattttatatgaaaatatagtttattatttagggttgcttctgcaaattgatagcatgctgcacctaggttacacttccgtgtacatagcacacattacatttaagatttttatgatctcattagaaaagcctttataggtaactttgatttaaaatagatgtttgggatggcattacccaaataatttgtcattttcctgttttaacattatcttttataacattataaaataattctctttttyataaaattaatcacatgacaagacatagaaaaccaaattctcctcagtattatatctgagaatctacactagtgcataattatatgtaatcaaacaaataatttagagtgtcccagaggaagattaagatgtcttggtgctagaatagtctccaggtttatagtataggacgaatattataatccacattaaataa

SEQ ID NO: 770948 - DNA, 632 bp, Homo sapiens
ggtctttgatcacagttgtgaaaaaatatgaaatgtgcatattccaatttttagaacattttacacttgttttagctaattttaactcaaaatatctctaagttaaagagtatcagttaagatcagttattgttaactcctcataaagccttttttgtttacttcatgataagttagaatgtgaatttctctaagagtgtgattttttaaattgtgcaagttagatcattttgtttcatggtttcaacaaaactacagggaaatctactcaagctktcagcacatagcacatttgatgatcaacaattatgtgaactttggcatataaattagaaagactgcaaataattagtatttctataacaaaactcattttatttctatttatttatataagatatttcacagcaaataaattaataaaaggaatagaaatgataataattcctcattttaccaactgatagtcatccacagatatataaagtaattcagaatagtaaatctcacacaattcactgatgtctttttaataaaacattatgttcatgtttaataactaatcaaaattattagtatacacatttttgagaattgtatattgttacaactaataacaatatttgtcaatt

SEQ ID NO: 770949 - DNA, 556 bp, Homo sapiens
aaagaatctgaacagcagcccttgagttccagatttttccactgaaccagtctacccaattgagaagaaaccacatgagtaattctggttgtatgccaaaacaaggttctataaaaccaccaaaagatcacactagctctccagcaatggatccaaaccaggaagaaatctctggatttccaaatgaagagttcagaaggttaattattaagctaatcaaggtgataccagagaaaggtgaaatgaacttaaggaaattaaaaaatacaggatatggatccaaaagtctccagagaaatagttatcataaagagaagacaatcataactactggaaatgaaagacacacttaaagaaatacaaaatacatggaacrtttcaacaatagactagaacaagtagaagaaaaccataagagctagaaacaggctttctaattaacccaatctgacaaatacaaagaaaaaaagattaaaaagaaatgaacaaaaccaccaagaaatttgggattatgtaaaatgaacaaatgtaagaagaattggtgttcctagaaaaa

SEQ ID NO: 770950 - DNA, 632 bp, Homo sapiens
agaagtatttttcttataataataaggcattatttgcttttaacactcttcttctcacacaagaatgcaggggaagtttctaaaggctacatgacatacgacatgacaacagaccgatgcagaaggagatatacaaatccatgaatctcctattgaggcagayattaaagagatttgcaaagatgtaaaacaatgccacttttctcatttttgtttcaaaactgacattattttccataatatttatgttaatatgcaataaaaatgttttggaaatgtttgtttcaatttctaatacagtaaacactgttagatagaagccagaaaaacaaactttaaaaaagtgtttggggttggtctcaacaacttctaataatgtaatgtcagaccaaaaagtgtgaggacccatactgaaacttaagaactaagtacagaggcttcatatttcttaatgctaaaattaactagtatgataaaagggaaaacataaatagtcatcctggttattatacttgactattgagttggtatgggtaaagggtgccaatacattgacagttaagacagctacgaaagtagatgataaagatgtaaaatggagctgaaaagtagtataaataatattcttttaa

SEQ ID NO: 770951 - DNA, 476 bp, Homo sapiens
ccatcagttaacactgaagagtcaaagacttatctttaggatccagctaagaaaaggtcccagggaatattccagacttttgttgcaatttgttgcaattcctaactagctatccccaaggaaaatggctaaagggagagaagggaacccttaaaaaacataaccttacctcaatccagttcgaccctgattaatttaaggtaacatttcttaaaacgtcatctgcatatgtgaaaaatattttcwtcataatactaagatgctatttatcttttccattttgttgacatctgcactgatggtccaaaagcaatggtggttaaaagtgttggtgccataacacaaactaaagcgctggcaccaagctgcactagcactcatattgcactctgcttcacagcttggacccacaattaaaatccccacacagttttttaaaatgccaatttcacatatgacaaagaagtaaaaagtat

SEQ ID NO: 770952 - DNA, 543 bp, Homo sapiens
cttgttgggaacaggtgctcagcgtcacaaacattaacactgagacaaaggatctctcagtaaggctactttactttctgcagaaagggtacactcaccagcagttttgccaggagagtacaacgaaaaaaggagacarggtcatttataacctgacacgtccatcctactgctgtgtccggtttccactggctggaacgggaccttacattctgtatttgtcccgattggctagcaacttagaactttccaaaagaggcaaaggcagaggagaacaaaggaaggaggaagtaacttgtggaatgctgagaaaggtaagaacaccttcaaataaggaagtggaacaggctatgacctaatgcttgcttggaccagtataagcatgtgagggcaaatatttagggtaaaatgtgggagctaagaacacaaagtacattgattctctattatggctagcagatatctaagaatgttagcataggtctttgaataaattttgcttctaagagaagttactgtttattcctaattggacagggagga

SEQ ID NO: 770953 - DNA, 611 bp, Homo sapiens
aataaataatgggtaatattcaattgtattatataaagagggagggtatttattgactttgaaaaagagttcatgtttttacatttatatataaattgtattatgcaattataatagataccattttttgagagcttattggaagtgcaaggaattatgctaatgctaactgccttaaattttattaaattatcacaacaaacctatgaggtaatgtaatctgttctttacagayacaaaaactaaattagaaagagaaatcatccacgtggtatctatagaggttcgaatacctataaatattagcctattaattaatactatactcttcctccttctaagaggtgagtgctcttcagaatggcacatgaatgcagtgattttaaattcttgttgtacataaagtaggacatcttcgcaagcaatatttgatagcatattttagttatcttgtacattagaaagtaattaaacatattcctccttgatcttacaaatgtcttcctctgagttactgagactcctagacttctctgccccatttactaccagttagcaagttcacacgctatattctacacctgtaaacctcactcacatttctcataatt

SEQ ID NO: 770954 - DNA, 604 bp, Homo sapiens
tgtacccctgcagggaggcatgctacagaacacagaacaaatgaagtcttactcctttctacactgtggcacttactacacaggtactttgaaatttagctataactccagggagaaggcagagataaaggcagcttgatcaagtttccacttttccaataagaataaaataaaaattaagtttgaatatagacaaaaataagggcataactggtttgggataagattatccctgcaacaatcacattaaaatagagtaaaattgtaacrtccactcctctttcagaaatgtaaaatgcacatcttagaatagaggaataccatcccctttctatcattttaatggtatgccccaggctttagtaccacaccttgataggaggctgtactagttttctagggctgccatcacaaaggactacaaaccaagtggctttaaacaatagaaatttattctcccatagttttagaggccagaagtccaaaactgaggtgttaacagggccatgctctctctgaaggctctaggagggaatgcttccttgcctcttcctagcttcttatggttgctgggatcctcggtgccccatggcttgtagatgag

SEQ ID NO: 770955 - DNA, 561 bp, Homo sapiens
actagtaattataacaaataacatctaacatttacatagctcttactatgtgtgagacactattctcagtgctcacaagcatccatgaggcaggtactgtgcttacctcgtttgagcactgaaaggctaagtacctggcctaaggttacatacttctaattagtgggtaaagccaaaagtcaagcactacactcttgactaagggactattttgagtaagaggcagtcaggggatttttatttttaatgtcttaagaagttggtgattctgtattggtccctaaagatcattttcagttttttgtagtaaatggaatcttgaaatctaaraactgatgagctaagcagtgtcctagagtagcaactctgagttcacaccttatccagtgtaatattagaaaccttgttttaaaaatgcactattttgatatatttttggtttgacagaagacagctgctgaaactctttctctctcatcactcctgttcagccgatgtctcacccaagcccatgtagtcaacataaagaaatgagaaattgccagctcttggctcttatgc

SEQ ID NO: 770956 - DNA, 575 bp, Homo sapiens
aagtaatgcagatctcccttctgaaggaaggagcaaagggagaaaagtggtaaatattcaaaacatgctcttctgttgtcatttctttttcctggttaataaggggtcatacaaggctgaaaactttttggagaaatactgtgggtaggagccactcattaaagtcaactggagtagctgtgctaactttttccctccagggacaaaagaaggttttgaatgttccaggaggttggagcgtctgtccgtagccacatcaaagtaggtcacgtatctgctctaacagatttcactgtcaaataggaagctggcaccagggccagccaatgatggaaagttaatagaatatttctcrtgcaggagctgctggattgcatgaagatgttgcagacatggagtcagaccacacaatgttaagtggaggaaaaaaatactatgttttgacaatgaattaactttcagacaacctcctgtgccctttcatgaatatgtaaatgtttaaagagagattcactgagaagtgattacctcctccacgttgctaattttttttttcttttagatggagttttgct

SEQ ID NO: 770957 - DNA, 608 bp, Homo sapiens
atgagtgaactcccatttacaattgctacaaagagaataaaatacttaggaatacaacttacaagggacatgaaggacctcttcaggaactacaaaccactgctcaataaaaatgacaggacacaaacagatggaaaaaaaacttccatgckcatggataggatgaatcaatattgtgaaaatggccatactgcccaaagtaatttatagattcaatgctatccccatcaagctaccactgactttctttgcagaattagacaaaactactttaaatttcatatggaaccaaaaaagagcccatatagccaagacaatcctaagaaaaaaagaacaaagctggagacatcatgctacctgacttcaaattatactacaaggctacagtaaccaaaacagcatggtgttggtaccaaaacagatatatagaccaatggaacagaacagagacctcagaaataacatcagacacttacaaccacctgatcttcgacaaatatgagaaaaacaagcaatggggaaaggaatccctatttaataaatggtgcttggaaaactggctacccataggccgaaaactgaaaccagaccccttccttacaccttac

SEQ ID NO: 770958 - DNA, 626 bp, Homo sapiens
tggcatactatgcagccataaagaagaatgagatcatgtcctttacaggaacatggatggagctggaggccattatccttagcaaaccaacacaggaacagaaaaccaaatatcacatgttctcacttataagtgggagctaaatgatgaaaacacatggacacatagacagaaacaacacacactggggccttttgtgggggagggtgggaaaagggagaggatcaggaaaaataactaatgggtactagggctaatatctggaataatctgtacaacaaacccccgtgacacaagtttatctatgtaacaaacctgcacttgtaccactgaacttaaaagttttcttaaaaaaaaaaagatcyttcatagatataaaacaacaactcaaattttactgtcaagcagaatgctgttcagcctaatgatttttgtttcaaactctcctccttggctgtttgaaatagactatacattttctctgtggtgatctcagcctacaccgattcaaatacaatatgatatggtttgtcttagttttccttgttagaggatacatctgcatgctgacttctttcaccaaatagctgttgcatgagacaagtgtgtaagatctatcagtgcat

SEQ ID NO: 770959 - DNA, 622 bp, Homo sapiens
aaagtctggaaggatgtacatgaagttgttaatagtgattatatgtggtggaggagtagggcttttattactggtttaaatgtttaaaatttgttttacataataggaactagcatatactcttttagagttgaaatgagactatttaaatgtcgggtttttaataataagtctataaatagtttaagattgttagaaaagatagtgtcccttgtgaccattttcatgatagttcaaaattgagttatattaaatgtagggctgactcattacaaaggtgcttttctgtaagtgttacagggaggtgtacatgtctttttagtttgctgacagtaaatattaagcagtaataacaactattgcttttcccactgcatagtccatagttcagtgatttgtgattatgaagctaatattcttaaatttagagcttgtgaaatttgatgagtaaccaaattcttagagaaaacgagattctcagaaaaaaggaagattgacagattagtaataatcccatgaacattaagatkgattattgatttaattagttgaattgatgagaatactcataaaaaaccaataatttaactcttacttgataatttttttaaattctagattc

SEQ ID NO: 770960 - DNA, 630 bp, Homo sapiens
acattttttatctattcatcaagtgatcattgtttgggatgtttcccctttctaactattatgaataatgctcctttgaatatttttacatgtttttgagtgagcatctgttttcaattctcttggttatatacctaggcatgtaattgctgcatcctatacaactttatattgaactttttgaggaactaatgaactgtattccaagctcagtggccacaccatattatattcctgctagcaattacaggaattccattttctccacaatctccccartgtgtgttgtctttttttgtttgttttagtcatactagtgtgtatgaagtggtatcttattttggtttagctttacattttcctactgacaaataacattaaacatctttgcatgtgcttattggccatttatatgtatcctttagagaaatgtctattcaaaccccttttcccaatgttaaattgagttatttggtttttttgttgctcagttataagaattctttgtatgttctggatacaggacccttgtcagatatatgatttgcaaatatttctcccattatgtgtattatcttttcacttccttgataatgtcccttgaagtataaaattttttaatcttaataa

SEQ ID NO: 770961 - DNA, 612 bp, Homo sapiens
tgtggtaatggatgacttggcacaatggtacccagagctgggtagggagaagaggggatgtgttctctgggatttctgtgctcagccaatttcagcagaccctacctcaaaacttgccctgatccctagtggttaggagaacaatctgggaacatcccatccctgaacaaagaataagctccataagaacagcctccatcccagggcatggcgtaaaaggatgtaaagagagaacagctcagcctccatcacaccaacatcagacatgctcattccactgcctgggcattcacaagcttattcaaaagctccttggtctgcagcaaaagtgacaattcagtctccacctcctcagcataactgggtcctactgaaattgcacttcttctagctatgactgcttcaagctactgggaagcaccaggaaaatgcaaccttcrgatgcactgatttttatcttctcttccacaagacctctttcctcttttaaagtagtctagagcaaaattttcttctttacaggtaagaggaaaaaaataagaagactatgaatgcctggtccatgggcagggagagcaaacagcagaaagagcacagcatatcctttaagcc

SEQ ID NO: 770962 - DNA, 582 bp, Homo sapiens
agtgattactctcaaactcctttgcctataagattgtgctcatgcttttaatattggttctctcctcttcccctttctgttggccctcattagtccttgcacacagcatcagttcctgatctcagtcctaatgccatcctgattagttctcctaacatcagacaaatccagaggctgtcaacagccaatggagttgggaaatcatcttttccagatcttcattttaaagtaggaaaccctgattttacacaaaaaatggatggtatcccatcctccagcaaaggccagcctgcccatctggtcccctgtgtaagggtctcctgastgcttcggtttttctattccattgaggtatccagaaccaagagagaaattcttctctggccccaagtgacacacagactgagccctgctttcttactgccttcaagacagccctacatacctggactatgtcctgtttctgctcattccatatgttattacagaagtcctgtttctcctcattccatctgttattacagccagaatggtgaactgatccttacatattatctgtgctgcacccacctcatttcccag

SEQ ID NO: 770963 - DNA, 616 bp, Homo sapiens
aatcctcaacaaaacacttgcaaactaaatttagctgcatatgaaaaaactaatccaccacaatcaagtaggttttatccttgggatgcaaggttgtttcatcatacagaaatcaataaatttgattcatcatgtaaacaaaactaaagacaaaagccacatgattatttcaatagatgcagaaaggacttttgataaaattcaaccttccttcatgttaaaaactctcagtaaactaagcattgaagaaacatatctcaataataaaagccatctatgacaaacccacagctaacatcrtactgaatgggcaaaagctagaagtgttctccttgaaaactggcacaaaacaaggatgccctctctcaccactcctattcaatgtagtattggaagtcgtagccagagcattcaggcaagagaaacaaagggcatccaaataggaagagaggaagtcaaactacttctgtttgcagataacatgattctatatctagaaaaccccatagtctcaactccagagctccttccactgatgaacaactttagcaaagtttcagaagacaaaatcaatgtccccaaatcactagcattcctttaaactaaaaaacagcca

SEQ ID NO: 770964 - DNA, 598 bp, Homo sapiens
agtttccaggcttgtatcagggatggttaacagaagcaggtggtttcagcataatgttaagtaagtgctatgatagcataatctctcagagaaaacaccaagcctgtcctagaatttgaagaaattttgaaagagaggatacctgggctgatctgaaaggatgaagaggagttagsttaaacaaagaaatgcagtaaaaaggatggagagaggaaaagaagcatgaatcaatatgttgtttctacagcagaaattgtgtggcaaggaacagtaaagggtgaacctggcaaggcagacaggatccatggcacctggtgtctcatgcatgtgcaaaggagctgacctttattttatagcagtaaggaaccacttctatttgtttttgagattttttttccccaggactttgtgaaaaatatcttggcctggaaaattatagaagagatataaaggataaaagacagtcattacttcaaaatgcaacctttatatcatagaaatatagttcataaaactagagcagatatttgagatcacttaattctactgcttcaatttacaactaagaaaattggtccaaaggcaatcagtgccttat

SEQ ID NO: 770965 - DNA, 611 bp, Homo sapiens
agtagatgttcttcagggtctaggtactgaagaattaggtattcattttagtctttactgtttgggcttatttgtatccattcttcttgggaaggctttccaaatatctgaaaggacttgggtgttgtgatataagctgtatctggtttaggaagcaccacaagcccagtaacattgtggttcttatagacttgtagatggtctttgaccagatccaggagaattctctggattaccaggcagaaactcttgttctcttcccttacattttcccagacatacagagtgcttctctctgttctgagtcacctaaagcagggggtgaactgacatgagcaccactgtgtccaccactactttggctatactgggtcagaattgaagccagcatagcactgggtcttgcccaaggcctactgtaactactccctgtctactacctatgttcactaaaggccttggggctytacaaatagcaggtggcaaagccagctaggcctgtgcccttcccttcagggcagcaaggtcccctaagccctgggtgggtccagaagtgccatctgggacttagggactagagtcaaaaaaccttaaaagtctacttgaggttc

SEQ ID NO: 770966 - DNA, 492 bp, Homo sapiens
gagggcatttacccaatgcctgtatccccattgtatcttagaagtaactaacttgcttttgattttacaggctcataggcagaagggactttctttgtctcagatgagactttggacttggaatttggggttaatgctggaatgttgtgaargcacaattgcattttgaaatgtgagaaggacatgagatttgggaggggccaggggcaaaatgatatggttttgctgtatccccactcaaatctcatctagagttgtaatccccacgtgtcaggggaggggcctggtgggaggtgattgggtcatgagggcagtctcccctatgctgttctcatgatagtgagtgagttctcatgagatcttatcgtttaaaagtgtggcacttccctcctcactctctttcctgccaccatgtaagacatgtcctgcttccccttcaacttccaccatgtttgtaagtttcctgaggccttcccagccatggggaactgt

SEQ ID NO: 770967 - DNA, 492 bp, Homo sapiens
gagggcatttacccaatgcctgtatccccattgtatcttagaagtaactaacttgcttttgattttacaggctcataggcagaagggactttctttgtctcagatgagactttggacttggaatttggggttaatgctggaatgttgtgaaggcacaattgcattttgaaatgtgagaaggacatgagatttgggaggggccaggggcaaaatgatatggttttgctgtatccccactcaaatctcatctagagttgtaatccccacgtgtcaggggaggggcctggtgggaggtgattggrtcatgagggcagtctcccctatgctgttctcatgatagtgagtgagttctcatgagatcttatcgtttaaaagtgtggcacttccctcctcactctctttcctgccaccatgtaagacatgtcctgcttccccttcaacttccaccatgtttgtaagtttcctgaggccttcccagccatggggaactgt

SEQ ID NO: 770968 - DNA, 630 bp, Homo sapiens
ctttaatacctatgactctttgtccttggcatagccaggcatgaacccaaccttgaataaactcagccattctgtttgtccattccatcttactgggtatagccaaagcatgtactcatacattctccacaacacgggcagactaaattttctgtgaagatgataaagattaggtttcaggctcttcacttacatgcgccccttscaaggctccaaaacaaatctcagctatgtgtttgcatagatctgtgcttttgtaaaattttcaaaattaagatattttaaccagaattaggataattctctctttccactctaaatattccttcatcataagtggtgtggggttgagtgacagtggactagctacagcatttttgaaatctagctaaggggaaactgagttggacatgcatttgatttgggcttagtagggtgtgatttgtatggttcctaatcacttctatataaaattattactagacatctatgttgacttacccggtgttgcaacacacagaagccagaccctaggtcacactgtgttatgaacataatctaaaacatgaggagaaagtgaaaggtataagagatgtaggattggggtaacagtccaataaaagctactct

SEQ ID NO: 770969 - DNA, 631 bp, Homo sapiens
atgtcaggccttccacaagaggtggaggatagagtcttttctaaactcccctggggaaagggagactccctttcctggtctgctaagtagcaggtgtttttccttgacactaatgctaccactagaccacggtccacttggcaaagggcatcttcccagatgctggcattactgctagaccaaggagccctctggtggccctgtctgggcataacagaaggytcacactcttgtcttctggtcacttctcccaatgtctcctcagctcctatctctgtatggcctggtttttcctaggttatgattatagagcgagggttgttataatattggaataaagagtaattgctacaaactaatgattaataatattcatatataatcatatctaagatctatatctggtataactattcttattttatattttattatactggaacagctcgtgtccttggtctcttgcctcggcacctgggtgacttgctgcccacagaaaaggggggaaaatgtgaaaggaaaatatatcttggggctcctaagtcactaagctaaagaaaaaagttaagttggtaactgcttagggccaaactgcctcccattctattcaaagtcagccctctgctcactg

SEQ ID NO: 770970 - DNA, 619 bp, Homo sapiens
tgctttgttaccccttccaaaaattaaagcccattcttacttttctgacactcctaagtatattacgtcatagtatagtcagtagttagtagatgttctcacttacaagtgggagataacagggggaacacatagccatagagatggaaataatggacactgggaactcccaaagcagggaggatggaagtgggggtgagagttggaaaatgacttattggataaaatgttcactrtttgggtgatgggtacaccagaaacccaatacccaccattacacaatatactgttgataaaaaaaaacttgcatgtgtaccctctagatctaatataaaatttttaaaaaatcaaaaaacagaatacatggaacaaccaatacatgaacttgtctctaacaccctctcccgcctcatctctctcctgagtctcccctcactcactaagcttcagtctcattggaattatttccttcctcagattcaccaaccccttttctgcccccaatcatgctgtttttctctgcatgaaacatgtagttaaatgactttagaatatcagaagtacacacagtaaacataattaactaatactgtaagctaaacatacagtttgatatggt

SEQ ID NO: 770971 - DNA, 577 bp, Homo sapiens
ggctgtctgccgctttcatctgttcaatcttcatatgttaggctttcagaaaatctgcacttttgtatcaaccactcaaaaacctctttataccctaaattcagactccactggctgacagtttgatccagcccacagtggcattgtctgccagccagcagctggctttgtgccgagtcaccatctttgtctacatagcaaaggatgtttgtgcaattcttcgaaaattttctcatggaaccttttagaaattaatggtatattcacacacaatacagagatacattccttttgtaaatatgtgctgcccaccttacagaaagggctgaagtcttttcatctaccaaccctaatcaaggattctcccytaaagttagctactgttaccagtttttgtatgttcttccagaaggacattgtatgttcacatagaaaaattatatagtattgttttgagtgtatgtatgtatgtggggatgttatgtataaatacatactccaccatttacatgtggcattttgtgttgtgtttttgtttttgtttttttgcatttgctattttcatatgctgtagttt

SEQ ID NO: 770972 - DNA, 557 bp, Homo sapiens
gaacaagttttgtagactttttcccataagtattcagttaaatatctagatagtcatttttaactgattaggaaaaaaaaatccccaaatttcaaccaaatgtaacaaaatagaatccctctgtgataacttaatgagaaaaatattgggcaacactcaccatcaataattaactaattattaaaggaacatgcacagattccatccactataaaaattctgctcagcaaattacctttctttgcctcttttatctytatgcagggcctctctgttcccattaagcctttcagaggacattatttgggctttaaagattaaacaggaaagagttaaatggaagtaagatcatgtcacttttctgctcaaagcattccaatggttcctggcatacttgcaatgaaagcccaagtccatgctatttcagatgacctgggggccggctccctccctcccctccagcctcacctcccttcctgctgtcacttccgcggtcaagctcaccctgacgtcagggccttgttgctccctttacatgaactttcttccccacgagg

SEQ ID NO: 770973 - DNA, 677 bp, Homo sapiens
tatgtataatatttacatttgtatatgtattcaattattccttctaatagctctgtgatacagaaactattaccactatttaaagatgagtaaagtggaggacagggaagataagcaatttgcccaaggtcacacagctagtcagtggcaaagctgggctctgaacagcctggccccagagtttgtacgtttgactgctgccctacgaactttgaaagcacatgaatcctgtttctactttagttgtgccatacacagtagacaaagttaaagagggcacagtcacagatgatactttctccctctcattacaaaacaacaacaaaagctttttaaaatacagcaccagaccacytaagatactagcactatgtaaccttagaaacatctatcaccctccacaagcacagtagcttgtttcaaaagctcagataagcagagtgctactgatcaatcatgtaaaagatcattttttcctggccttcttcagtctcctttgaaggccagcttcttcagcacactcaaaacatttcaccctgagatccacatctctctctcaccccttttctttttcccttcacatcacaattctaatggggtctaaccacttttccgacccatgtagaaatgaccaaagagaaagagatagagagacaggttattttagggtttgcttt

SEQ ID NO: 770974 - DNA, 589 bp, Homo sapiens
ataatccccacctggatcctagcctcctagctggcctctttgtgctcatccttgtacctgaagtctgttttccacacagcagccagaacaatgctttgacaacataagtcatgtcataacactcgcttgccacaaaccctccagtggtacccagttttgccaaattcagaagacctttctgcagttcacaacgtcctgtagatctgtgtgaccccactcctgcaccacagtgcatgtgcacacacgcgcacacacacacacacgtgcatacacactctcatacacatgccaacacacactgactcatgatattctctgacctcctatggcactgctctgacctcactcactgcaccccatgcacactggcttcagtgctgttccatgggcgtgccaggcatgttcccacagcagggccttcacagtgactctccctctgcatggtcagtttctcacttcctccaaggctttgctgaaatgycaccacttctgtgaagctccaccttgaccacctgtttaaaattgcagctctcttcccacccattactccccatcctccctgtcttgccctatgtggttttccatggac

SEQ ID NO: 770975 - DNA, 623 bp, Homo sapiens
aatgtctttgatgaagcagtaaaaattattttcattgaagactgacccttgagtaaacatctttttaataacacatgtaatgaaatacatgcataaagcacttctgctatcaccaaagtacggtggctgtctcaaggaaaaggacatgtgtgactgagttaagagccgaactagccaatttttccttgaacatcacttttaattgaaaggataactgactatggtcattcaagtatcggtatttggcagactcttcattggaaatgaaaagtaagactgatacttcaaggaaaamctgacagtgtttgttgccaacaataaaattcaagctttcaaacaagaattaaaattttggaaaacatgtatcttacactgtgaatttgacagcttcccaatacggtccttaaacacctttcagataacatcagtgttgatattaatattttttttatattttataacaaaatgtgtcaacatttggtagatctacataactcagtgaaccaatattttccaaatgtccaacacaagatgttctatgcacattgatccattcaaagcacaagagagaccagtagattttaatgcttcaaaatatgaaaagtttattgaaatgttttgat

SEQ ID NO: 770976 - DNA, 623 bp, Homo sapiens
aatgtctttgatgaagcagtaaaaattattttcattgaagactgacccttgagtaaacatctttttaataacacatgtaatgaaatacatgcataaagcacttctgctatcaccaaagtacggtggctgtctcaaggaaaaggacatgtgtgactgagttaagagccgaactagccaatttttccttgaacatcacttttaattgaaaggataactgactatggtcattcaagtatcggtatttggcagactcttcattggaaatgaaaagtaagactgatacttcaaggaaaaactgacagtgtttgttgccaacaataaaattcaagctttcaaacaagaattaaaattttggaaaacatgtatcttacactgtgaatttgacagcttcccaatacggtccttaaasacctttcagataacatcagtgttgatattaatattttttttatattttataacaaaatgtgtcaacatttggtagatctacataactcagtgaaccaatattttccaaatgtccaacacaagatgttctatgcacattgatccattcaaagcacaagagagaccagtagattttaatgcttcaaaatatgaaaagtttattgaaatgttttgat

SEQ ID NO: 770977 - DNA, 481 bp, Homo sapiens
caaggacacactaatttgaatagaatggcaggaaaaaaaaacacttaagaaatgacaaacgtgaatttcacaaacaagatatatacttaactggggtttatctgtaatttcctgacaacaaaaagtaaaacaaaagcctcttgacctttcaaaactcataaaaaataaaataggcaaaaatgaaaatgacaaccattttgctgctggtttatatacagkatttttcttaaatcacaaaaatgaacaaatttattcaaaatataatttaatatattttaatatatttaatttactcattaaatatattttgtgattatatttatgaataatatattcataaatatatatgtaaataatatattcataaatatattatgaatactatatattcatgatatattatgaatactatacattcataatatattatgaatactatacatcatgatatattatgaatactatacattcataatatatt

SEQ ID NO: 770978 - DNA, 586 bp, Homo sapiens
gtcacatgtcacttttgtcatttgtaattgtgcttatttagactgtctctttttatttgttaatacagctaaagttctatcaatatttttattctttcaaattaccaacttcatttcattgatcctttgtatgaatttttatctcaatttatttagttcctttctgattttagtaatttcctttctttggctagctttggatttggtttgttctttttctagttcctctaggtgcaatgttagattgttaatttgggatcttctaacttcttgatataggcatttagcactgtaaactctccccttaacattttttttgctactttccagagattttggtatgttgtgtctctgttttcatttatctcaaagaattttgtgatctctgttttaattttatttacccraaagtcattcaggagctaattgtttagtttccacgtaattgtgtagttttgagagatcctcctggtattgatttctctttttatttcactttggcacaagaatatagttagtatgattttgattttttaaaattaattgagacttgctttatgggtgagcatgtggtcaatctctttga

SEQ ID NO: 770979 - DNA, 648 bp, Homo sapiens
tccaataatgcatttcattagagtattctaagaacttttctggcattgttaccataatcttcagtgttcctacttggtatttatttcaggacctaaacataataaatagaaaggcacagtccctaccactagataacttgcatttgktagtggaacacacggcagcataatatgggttgacaaaaagaaatatttgcatccaaattttactactgtggattagtgacagttcagtattggttaattaccagagaaaagaagagagaaaaacaaaggaggaattattattattattatttggctcttgtaaagccagaccacagctgttggtaaatattaaagctgctgcaatcttaaattaaggtgaaatattcacttattttacaaaatacatgtaagtaagataacaaatagtaattatggcgtttaaatctgttgagctgagacatttgttaacaatagtactgggaacttggtaatattcttactacccaaattaattctcttaaacttaacctccatcttatttaactcagcatctctttctaaaagattcccatttaacagctctgtctttgctagtctaaacatgtgttttctttagcaatgactgtatttgtttaaagattatccgtcaatgcctggtaa

SEQ ID NO: 770980 - DNA, 648 bp, Homo sapiens
tccaataatgcatttcattagagtattctaagaacttttctggcattgttaccataatcttcagtgttcctacttggtatttatttcaggacctaaacataataaatagaaaggcacagtccctaccactagataacttgcatttggtagtggaacacacggcagcataatatgggttgacaaaaagaaatatttgcatccaaattttactactgtggattagtgacagttcagtattggttaattaccagagaaaagaagagagaaaaacaaaggaggaattattattattattatttggctcttgtaaagccagaccacagctgttggtaaatattaaagctgctgcaatcttaaattaaggtgaaataytcacttattttacaaaatacatgtaagtaagataacaaatagtaattatggcgtttaaatctgttgagctgagacatttgttaacaatagtactgggaacttggtaatattcttactacccaaattaattctcttaaacttaacctccatcttatttaactcagcatctctttctaaaagattcccatttaacagctctgtctttgctagtctaaacatgtgttttctttagcaatgactgtatttgtttaaagattatccgtcaatgcctggtaa

SEQ ID NO: 770981 - DNA, 576 bp, Homo sapiens
atctcaaatctcaacatttcctcacaattgcatactagttggagatgaaggtacatattaggtgaagaatgcttgcccatacttagtcttgaggacttacagatcttgcccaaaattacacagtaaataatttaaggttttgggactggggcctatgtattctataaaatatcgcttaatactagagtgaaaaaccccagtgtttataaaaagatgtatttttaacctttcctttatatgccttcaaaatgttctgatattcctttattatatttgtgtttatataattgttaatgaccaaaatatatgctattatgctcagctaaagccattcaaaacttcattgtacaaaaaaycaaaaatcctttcaatttcttatggtaaaatggtgctaaaaaagaatcactttttgttacttgccaagagctcatttatattttagttgtattcaaaatatctatttagattttttacaagtttcatgaagtctaatttcccaataagcctgaataaaatacttgtttccaatagcacattttgaaatgttttttggagttgctactgaactccatttgt

SEQ ID NO: 770982 - DNA, 395 bp, Homo sapiens
agccatgaccataccactgcactccagactgggtggcagagggagacctggtctcaaaaaaacaaacccaaaaaatcatctgggaccatgggacatctgcctctagacttctccaaatgtgggataatgtagtatcttggtaatgtggcctactgtacatcaactattctgttgcctgaaggcaaaagcactgcacacatacaagaggctccccttggtgagagactaagcattcccacacaaatgtctctgtcycaaaccgatgacttgtctagaattgctttccatctggttctcaagatcttctccttacggctccctttgtccacaattagctcagtctagcatggctacaaatcagggaagagtcttcattattctacaagagacagttt

SEQ ID NO: 770983 - DNA, 581 bp, Homo sapiens
ttagataggggtgcataggttagagccatatctctctggacttttctgggaaaacacacacatacacacacacaaaacatcctcctgcaatgactatgagtggcagtcattcctggcagagaatagggactgggaaggtggggattggcctggggaaaggagcatgaaaattcccctctttaggacttcgaattttagtctagactccaaagcccatcagtgagtagaggaacttgggtgttgaaaagtaaactacccactggcccatgkcaataaggtaggagagatacagagaggcaggtcaaccagaagtcctgagtccagttctggccctgggaagtatttgtaagctcatctctgtgttataatgctctctctcataccttctgttctttagagaatcgaagacaagggcctatcccatatttggcgtgaagtaaaagtaaagaacaacgtctgttgccaaaactactagtggcactggtggtcaccaacaaaggacagctttgtcaagcagaatgataaactaatgagagttatcagcagcagaggcatgagggtcagatgagacagacagaaca

SEQ ID NO: 770984 - DNA, 581 bp, Homo sapiens
ttagataggggtgcataggttagagccatatctctctggacttttctgggaaaacacacacatacacacacacaaaacatcctcctgcaatgactatgagtggcagtcattcctggcagagaatagggactgggaaggtggggattggcctggggaaaggagcatgaaaattcccctctttaggacttcgaattttagtctagactccaaagcccatcagtgagtagaggaacttgggtgttgaaaagtaaactacccactggcccatggcaataaggtaggagagatacagagaggcaggtcaaccagaagtcctgagtccagttctggccctgggaagtatttgtaagctcatctctgtgttataatgctctctctcataccttctgttctttagagaatcgaagacaagggcctatcccatatttggcgtkaagtaaaagtaaagaacaacgtctgttgccaaaactactagtggcactggtggtcaccaacaaaggacagctttgtcaagcagaatgataaactaatgagagttatcagcagcagaggcatgagggtcagatgagacagacagaaca

SEQ ID NO: 770985 - DNA, 637 bp, Homo sapiens
ctctctcataccttctgttctttagagaatcgaagacaagggcctatcccatatttggcgtgaagtaaaagtaaagaacaacgtctgttgccaaaactactagtggcactggtggtcaccaacaaaggacagctttgtcaagcagaatgataaactaatgagagttatcagcagcagaggcatgagggtcagatgagacagacagaacagaggagagaggatccgaaccaaagaaccaatctgctatggtctggatgcctgtgtcctctggaaagttcatatgttgaaactaatgaccaatgtgatggtattaggagtgcagcctctgggaagtggctagacccctcatgaatgagattagtgcttttataaaggagacctccaacggctgccttccctcttccaccatgtgaggaaatagccagaagtcaccatctatgaataagagagcrgaccctcattgaggcaggaaaataggatctggaggcaggaaacataaggccaattcacacttcagctataacaggaaatgccctctccatagggtgaatgccatagatgactttgtaactttactacatcctcttcttttacatagggcgtaccccaagtagagggtatttaaactcacaaaagc

SEQ ID NO: 770986 - DNA, 640 bp, Homo sapiens
acagaacagaggagagaggatccgaaccaaagaaccaatctgctatggtctggatgcctgtgtcctctggaaagttcatatgttgaaactaatgaccaatgtgatggtattaggagtgcagcctctgggaagtggctagacccctcatgaatgagattagtgcttttataaaggagacctccaacggctgccttccctcttccaccatgtgaggaaatagccagaagtcaccatctatgaataagagagcggaccctcattgaggcaggaaaataggatctggaggcaggaaacataaggccaattcacacttcagctataacaggaaatgccctctccatagggtgaatgccatagatgactttgtaactttactacatcctcttcttttacatagggcgtaccccaagtagagrgtatttaaactcacaaaagctctgtaacagggcccttgagcccctatgcttaggcccgctcccacactgtggagtgtactttcattttcaataaaacccttcattccttccttgctttgtttgtgcattttgtccaattctttgttcgaaaccccaagaacctgtatacccttcaccgttaacacccccgaacacagagtctgctgtcatctcgatcttaaact

SEQ ID NO: 770987 - DNA, 640 bp, Homo sapiens
acagaacagaggagagaggatccgaaccaaagaaccaatctgctatggtctggatgcctgtgtcctctggaaagttcatatgttgaaactaatgaccaatgtgatggtattaggagtgcagcctctgggaagtggctagacccctcatgaatgagattagtgcttttataaaggagacctccaacggctgccttccctcttccaccatgtgaggaaatagccagaagtcaccatctatgaataagagagcggaccctcattgaggcaggaaaataggatctggaggcaggaaacataaggccaattcacacttcagctataacaggaaatgccctctccatagggtgaatgccatagatgactttgtaactttactacatcctcttcttttacatagggcgtaccccaagtagaggstatttaaactcacaaaagctctgtaacagggcccttgagcccctatgcttaggcccgctcccacactgtggagtgtactttcattttcaataaaacccttcattccttccttgctttgtttgtgcattttgtccaattctttgttcgaaaccccaagaacctgtatacccttcaccgttaacacccccgaacacagagtctgctgtcatctcgatcttaaact

SEQ ID NO: 770988 - DNA, 612 bp, Homo sapiens
cacgcctcaaggatggagggggctgcccatttcggggtgtgggtgagatgtccaaagcccacagagaaagaagggaaagaggggggagagaggagaagactccagagggtattactgtagctgttcatgtctaaagagccccaggcaatccttgagcttgcagataaactttctcttcgtgtattaagctttgggggggtcacattaattattcatgattcctctgttgacacttttggattatctgtgctaacagaagtgaaggacagggcagcctctcagcctaggtgacagagggacagtgtcgctggggaccacactgagctgcgctgctggcacagtggaggattagggttaccccaaccagttcagagagctatwttgagagaccttaggaaacagacctccccccactcatttttcttctcaagcctggccccctctgacatgatgacaggtagaggggcacagtctatctatgggattgttctgggccaaacttcagggcctctggcagcaggggatgaacctaaggttttggcttcttatctggtggctaaatacaattagattccttttataaaatataattaaccttaatatatgtgaaga

SEQ ID NO: 770989 - DNA, 612 bp, Homo sapiens
cacgcctcaaggatggagggggctgcccatttcggggtgtgggtgagatgtccaaagcccacagagaaagaagggaaagaggggggagagaggagaagactccagagggtattactgtagctgttcatgtctaaagagccccaggcaatccttgagcttgcagataaactttctcttcgtgtattaagctttgggggggtcacattaattattcatgattcctctgttgacacttttggattatctgtgctaacagaagtgaaggacagggcagcctctcagcctaggtgacagagggacagtgtcgctggggaccacactgagctgcgctgctggcacagtggaggattagggttaccccaaccagttcagagagctattttgagagwccttaggaaacagacctccccccactcatttttcttctcaagcctggccccctctgacatgatgacaggtagaggggcacagtctatctatgggattgttctgggccaaacttcagggcctctggcagcaggggatgaacctaaggttttggcttcttatctggtggctaaatacaattagattccttttataaaatataattaaccttaatatatgtgaaga

SEQ ID NO: 770990 - DNA, 608 bp, Homo sapiens
atggtgaaaccccatctctactaaatatacagaaaattagctgggcgaggtggcaggtgcctgtagtcccagctactcgggaggctgagacaggagaatggcatgaacccaggaggtggagctttcagtgagccgagatcgcgccactgcactccagcctgggtgacagagtgagactccatctcaaaaaaaaaaaaaaagaaaaagaaaaaaaaaaaagaaacctccctaactgaaattcaaggagaaaaaggagtgggagaggaacagaatatccacgtactgcaggacaatgtaaaagggtgtaacatatgcagaattggaataccagaaagaaaagaagagaaaggagaagaagaaagatttgagtaatgaagaactttccaaaattaatgacagacaccaaagcacagatctaagaagcttagagaaaaytcagcatgagaattttcaaaacattaacacctaggtatagcatattcaacctacaagaaaccaaagacaaacataaatcttgaaagatgccagaggggaagaatcatgttgcatgtataggaacaaagataggaattaccaaagatctatttccagaagttgttataaactga

SEQ ID NO: 770991 - DNA, 647 bp, Homo sapiens
tcttggaaaataagttttaaaccaaatgacacaaatagtattttaaaaagaaatttgcagtagcaagactgtaagcctgttgaggttagcaaatgtatcttggatatctcccaggacaggtacttacctttcccttgctctgcacctggaagggtttatgagcacttggtacagttgcaaaggcctgccaggtaggcaatttgagagagttggcagaccattagattaagagtcaggtggccaggcatggtggctcatgcctrtaatcccagcattttgggaggccaaggcagatagattgctcgaggccaggagttcaagaccagcctggccaacatggtgaaaccctgtctctactaaaaatgcaaaaattagctgggtgtggtggtgcacacctgtaatcccagctgctcgggaggctgaggcatgagactagtttgaacccaggaggtggatgttacagtgagcggagatcatgccactgcactccagcttgggtgacagagcaagcttctgtctcaaaaaaaaaaaaaaaaaaaaaaaagtcaggagaccttaggcaaaacacttttcttctgtggacctcaatttctttagctgtataatggggggttaactattagtgcataactccaggaacttactct

SEQ ID NO: 770992 - DNA, 729 bp, Homo sapiens
caggcagcaaatggggaaaggacagccaagtgggaggacacaaatagtcatagggctcctggcttggtgagtagagcgtggcctagctttcagcactagtttgccccctcagatggtgcccttgtgcagtgagcaacagctacaaccataccaggtgactgatcttcctttcctccttccttccttttcgtcaattgcttattgaatacttcctctgtgtttcctgttccctgaccctcccctycacacctccccactgtgtaggtaaggaaaacctaaagataaataggacataaagaggcttatggtacaatgggggaggtggacatgtaaacagataaaccattaggatttctgatatctaagactgcacaatttatacatgtctaaaattagggaacctggctgattcatacgattcacaccaggaataagagcctgggaacttacttccttaaagaccagtgcccagtgggggatgcttagaagtgtcactgtacaacatttgctgtccagaatcctgacttttcagaaagagacatggacaatattaacagggaagaggcctttgctcttcaagcaccttgatgggtttgcaacggcacctttgagaggaggctgtatttgtctgctttatttaaagggggaagtttgaagtagaggtggtgggggcactggagtaggaaaggagtaagaatggcaggatcctgcatggacaaaaggctggag

SEQ ID NO: 770993 - DNA, 644 bp, Homo sapiens
accaacacaaagtattcagtcacattgctccatccattcaggccctatttcccaatggcagaacaactagtcttcctctgcaaactccagcattcctctggggccaatttaaaaaagcttgggacttcaaaatgcacgggcacacttttctttataaagaacagcttttgggtaagcagcattgtgaaagggactgaatttataaatccacacaaaagccatgtatttcttttgagacagatcaactcacacactttgtcttctgattcactgtgtgtgctatctggtctacaatgyagacagttccctaggtcagaaaatgcatctgctcatgaacagacagaaatggcaatgttcttaacacttgtcttagatgagaagtctgcttacatgctcacaataaaacaaggaagcaatttttgactctagtcaagaagcttctggaatcttttttccaacacaaatgtttctcatttagtccaagctctgtttcaattacacgccaagaaaagacaaagaaaaaccccctctaccacctactcctgccttcacgaaaacattgtaaattatctttattacatcatatagaaaagtcatctcacatagggtaaattgttgacaaatggttacagcagccgttttct

SEQ ID NO: 770994 - DNA, 683 bp, Homo sapiens
tttttcttgaaaaaaatgctggttgcaaaccgtgaatggttgcgatccatggtttgaaaagcacagctctaacacaggtaacatttataaagccataccatagccagacactatacattcacatttattaccctcgtttaatccttccatcaacttcatgatttagattatcatccccgttttacagatgagaaaactgaggcttaaggaagttactgctcaaggtcacattttggtagtaaggtgtggtagtaagttgccaagcagggatttgaaccaaagactgaagctaggaaccaaatgcttggtcaccagactatatggccttagctgcagaaattcagggcatactcatgtccttggtagagcactcggatcccccagaagagttttggcaaacattcctgtgcagcgcttgtcatcactccttggatccgcttcatttgctcttcgtgtgtgcgcgtgtgcgaggacagagygggatccctgggggccactctgcttcgctatggccatcatactgctcaagtcggcagggatgttttcttgagggagagggtgggaaaaagaggatttcagtttgagtgtacactggtctgtggcttgtttctgcttcactatgattctttatcttttatgaggtgatactaagtcagatatgtatttaaaggatataagaaaaa

SEQ ID NO: 770995 - DNA, 613 bp, Homo sapiens
caagcgattctccctgcctcagcctcccaagcagctgggattacaggtgcccaccaccacactcagctaattttttgtatttttagtagacacaggctggtctcgaactcctgacctcaggcgatctgcctgcctcagcctcccaaagtgctgcgattgcaagcatgagccaccgtgcccgtccaattttttgtgtgtttttaatagagacggggcttcaccatgttgactgggctggtctcgaactcctgacctcaggtgatccacccacctcagcctcctaaagtgctgggattacaggcgtgagcctctgtgccaaccccatgactttttaataaatgcttatggttgcctaactatcacttcaatctagatggaaaatatttctaccgtccccaaaagttctcatgcccctttgtactcaatcccctcttcacacycccaaatccaggaaaccacagagtcaatttctgccagtgtagttttgacttttcattcatgtaaaataaatggaatcatgcactatgtaaccttttgtatcttgcttcttccatttagcataataagtttgggatttacccatgctgttgcatgtatcaatagttcgttcctt

SEQ ID NO: 770996 - DNA, 613 bp, Homo sapiens
caagcgattctccctgcctcagcctcccaagcagctgggattacaggtgcccaccaccacactcagctaattttttgtatttttagtagacacaggctggtctcgaactcctgacctcaggcgatctgcctgcctcagcctcccaaagtgctgcgattgcaagcatgagccaccgtgcccgtccaattttttgtgtgtttttaatagagacggggcttcaccatgttgactgggctggtctcgaactcctgacctcaggtgatccacccacctcagcctcctaaagtgctgggattacaggcgtgagcctctgtgccaaccccatgactttttaataaatgcttatggttgcctaactatcacttcaatctagatggaaaatatttctaccgtccccaaaagttctcatgcccctttgtactcaatcccctcttcacactcccaaatccaggaaaccacagartcaatttctgccagtgtagttttgacttttcattcatgtaaaataaatggaatcatgcactatgtaaccttttgtatcttgcttcttccatttagcataataagtttgggatttacccatgctgttgcatgtatcaatagttcgttcctt

SEQ ID NO: 770997 - DNA, 473 bp, Homo sapiens
tgcatctttcctgtaaggtgagcagaaaacgatcctccctacaaaaagattgcaggagaaaacttcctggaggttgagaataacatgcaaaaataatgtcctgtgatgaggaaacttgggcctgagtgtgcacaaaggaatgatctttgagaggaaccactcatacctagaagtcattcaataatgcgtgctggatgcagtaagatgcgagggtggtaggacatgtacagggagatttttagaggtatctgaggtacagtcttctacaaatactcagtatggggtcacttctcaggttgcaaattttgtgtctcagtctcctattgagawacaaatatggtacttgtgaagcttcccagtatgaaggatagaacattcaaatcagaataggatcttattccttgggcaactcatgccctctttcgacctcagtttactacctctaacaaaagggatacggactatcttagtgt

SEQ ID NO: 770998 - DNA, 600 bp, Homo sapiens
aattttcttgttttgaaagcctgatgtattagaatagcaaataattgaagagggaatttgagctgaggaactggggctgtagctgtatgcttcatcatattttccattaaaaatcacaatttgcagtcaattactaccacagagagaaacattggagaaatgcttaacgtgtaggcttaaaccaaaattcaatgattttccataaataataatttgactctctgccatcggcttggagcaatttgttgccactccttctcrctttctctttgcagatgctgctgagtctgaatatccttgttaaatgctgggattcttaattaaaagaacctgggtccattatatcttcagggcagtatttgtatcagatagaggcttatgaaggatggttcaaatggataagccaaggtttgacttccaggaaagagaaaattaacttttgaaacccacagggaggaccaacaggtaatccctgtattgtggtcagtaaatacaggtattcagtaaatacaggtattcttctttgcccatttcaacactctccagattctggaaaaaatttcccttcctcttaagaaccttagcaactcctccaggtgg

SEQ ID NO: 770999 - DNA, 567 bp, Homo sapiens
tgcttatgttatgcttaatctaagacttcttcagttcagctaccaataacattttaatatgcatggctctgtgcagtttgcaaagtgcttttggaacacataatagacaagcctggtgattcatgtatttatttcgtgttaggaataggtaacttatattttgtaagataatttgtctaaattcaaagaactgaaaagkagaaaaactggaaaatcaaagccaggtattgtgattctcagttcagtgcctaatccaccctaaattaccttttccacatatttggacacttagaagaaataggaaaatatgcatgagcatattatgatggctcattttatgtgtcaacttgactggatccatagaatggccgaatattaagctaaaaacatttctgactgtgtttgtgagggtatttccaaatgagatttgcatttgagttggtagactggatgaatcagattgcctttcccagtgtggtgtcaatgtacattaattgaggtcctgaatagtacaaaaaaaaaaaaaatactggagaaggggagaatttgctcttcctgcctgacagc

SEQ ID NO: 771000 - DNA, 632 bp, Homo sapiens
gtacattctctatgattgaccatatgttaggacataaaacaagtctcaggaacttaataaaatcaaaattatatcaagtattttatctgaccacaatggaataaaattagacatcataacaaaaggcacatttgaaactatgyaaatacatgaaaattaaacaacatattcctgaatgaccaatgagtcaaggaaaaaattaagaatgaaattttaatattccttgaaatgagtgaaaatagaaatacaacataccaacacccatgcaacacagcaaaagcaggattaaggggcaagtttatagcaataaatgcctacatccatcaaaaaactagaaagatttcaaacaatctaatgatgcacataaagggaaaaaagcataaaaaatgcttgaaaaaagcatgcaagaaaagcatgaacaaatcaaaccccaaattggtagaagaaataataaagattagagcagaaataaacaaaattgagactaaaataaatacaaaaaatcaacaaaacaaagttttttttaaaaagataaacaaaattgacaaatcattagctagagtaacttaaaaacagagagatatgactcaaataaataaaatcagaaaatgaaaaaggagacatcacaatgg

SEQ ID NO: 771001 - DNA, 671 bp, Homo sapiens
ggcagctcagaaaaatattagaatgctgatggtcatagtgcaagctttcattctagcttatatgtcattctctgaatctctgttatgaacagaattggaaaattcaggactgaatttgtttttgcttttgcttttttcaaatgttaacagggtatccttctcaaggaccttgtcaagttattctctcaagctttggtttggattctgaatattgaattcaggaaattaagtcctccttctctttttgttaagagatttagccttgtcaacttttccattaagtggcaactcaaggttcagagatcagagagtgagccttctcagcaggagggcttaataagattagaaaaagtaagactctttcaacactggcaaaagtaggaaggtaattatctcatgaagtcaatcagtatacataatcattgcagattatttagacaaaatagcctctctgtctttacattagggatttttgcaagaaawactaatgccgttttattttatttggtcaacataagcccagtctcaacagtagatatccaaatgtttaaaacatcttgatattttaacattgcatgacacctgactttgggttagacagatgttccattaagacttccaggagaccagcaagttatttgaatcctcaattattgtttagtttagcacac

SEQ ID NO: 771002 - DNA, 450 bp, Homo sapiens
cacattttacatgtttccttttattttatgccagtatggaatattagaataagatcctgtcatgttccaaaaaacaaataaaaaccatatgtgtctctttgatgcaatagtgaaatcaccatcatagatagatttccgttgccatagggatgattatgctctcacagaatccagtaaggcaacttcgtctctgtgaatccagctaaatgagagacaaaattctgtctctttcttttccagtctgcaaacaagaatattgttaacctcgcagagacagaaagttaatagctgggctcctctatttgtytgacttgcacctctacccttctcatctccgtgttaaagcataatgtaggtcagccaagaccaaagaaagttgtggctgttacagaaaatgcatgtgataacatatatagctttattctgggaccagtttgaggcagacacagg

SEQ ID NO: 771003 - DNA, 576 bp, Homo sapiens
cctcgacctcccaaatagctgggattacagggacaatcttctttaaaatgtccttgcaaaccacactgataacaagccctaccaggtgattggcctgctccattttctgtcctctctgaaccaccaaggtttgtttgtctgagggccatgcctaaggctgtggcctttctctgattttgcttttcytttttggtctgttcctattggtcgctattatagaacatcgatgttgccaggtttaataatgcctccagatttgttcagggctcagggctcgcttttggagctttctccttatatctgtgtctgatttggtaataaacttatcttttaggatcaattgacctttgagggagtcaggtgacaagggagtatattttcttaaggcctcctgtagctgctcagggaaggcagaaggattttcttcctttccctgagttatggtggacatcaatgaataattcatgggctttttcctaattctccttagtccttctagaacacaggtcaacagatgtttgcatctccagtccccatgatctgagtcgaggtcccagcagggatccatactgggga

SEQ ID NO: 771004 - DNA, 555 bp, Homo sapiens
ggagggatcctaaaattccagatagtcccccgacaatggggctttgggcaaaaattatgtctgtctgattggtgattctgggtgcctaaagaatggaacagagtcccaaaacttatagtagaaatcactcttataggagaaactagaaaagcaccagaggcagggagtggtttgtagaagcaagactagccttggagaagggggatgagggkaagttggtctcacaggcattaagacccaggagacaagggtcaggatagataggatagatgggtgagtcttgcttgggcaacgtgactttgagagttccgcttatggatgcagggtcaaccaactttttgtcaggaccccagaagtgaatggctttcctctctgttgacccttggctcagcctggacgtacaggaaaagtggaagctggttccaggcaaaccaacactcccaactccaaagagttaggggttgttagagagccctttcaaagaaatcctgacacccatgtctttagtccagcagccgcgctagtcacttttaactgatcagcagttgccctgtg

SEQ ID NO: 771005 - DNA, 492 bp, Homo sapiens
agcttttctttttgtcacccatgtcagtatctgaacataggactttggacttagtagatgtttagcaggtgctctagcaatacttactgggtgtggtgtgatatggttgtttgttgcatgacgttcccagctcctcctgaagagggatggaagtttccatttataaacaatggagtagacagaaaaaagtctcccttgattctttttacttcagaatatggcctcagaaagtctgtgtatggggtgaggctgagtggatcccgccagccaggagtcttatagrcagctagcagtggccctggtggttctccaatttgtatttatatctgtacacgcctcctccatcaaaatatgccatatgcaactaaaagatattgaatcaaatattaatgcccaaggtgcccacgcatttttgtaatgtcttcaaccttctttacaaaggattttaatgcactcttgtaattttacttcagcacaatgcagtcagcaaat

SEQ ID NO: 771006 - DNA, 432 bp, Homo sapiens
ctttctcctcctgttttttaaaaaactaataataaaaaaaaacacaacaagaagtaatgaaaatctacagaatgaggtcccatgtacacactctaagaaggcagggtttatgaggattttcttattccaattggggattgtttaaagtggtggattctattgtaacccatatgggagagagacaggtttagagtaacgaaatttcatcctaattcagaaaatcagaacatgaaacaagcaggtcagcaaaacctgatgttggctaaggaagaataaaaraaacaaatgaagataaattcatgtgttaggccaagtttgtgctgtcaaaataaataggtgagaacaattctggggtaccaatattgtgagtaatgaacacaatcatgataatttaaatcaaacttttttgcctctcaggttcaagtgattctc

SEQ ID NO: 771007 - DNA, 575 bp, Homo sapiens
agggatagggccgagggacaacggaggcagagactggagtgaggcatctctcggctaaggcatgtggagaatcaccagtagcgcccagagctaggagacggtcccgggacaagctctccttggagtctccagaaggaaccaaccctgccgacgacaccttgattttggacatccagactccagaactgtttttttttttcttttttgaracagagtcctgctttttcgcccaggctggagtgcagtggcgccattttggctcgttgcagcctccgcctcctgggttcaagtgattctcctgcctcaggctcccgagtagctgggattacaggcacccagcaccatgcccggctaatttttgtatctttagtagagatgggattttgccatgttggccaggctggtctcgaactcctcacctcaggtgatccgcctgccttggcctcccaaagtgctgggattacaggcgtgagccgccgcgcccagcccagaactgtgttttaaacaacccagtttgtagtgcttcgttgcggcagccacaggaaaccaatacaggtaggtaggtgagttggcca

SEQ ID NO: 771008 - DNA, 612 bp, Homo sapiens
aggactcagaagaagccagtcctgcccaacaccttggtctcaaactggtagcctccgaaacgatgagaaaataaatgtctgttgtttaagccgcccagcccatggtgctttgttacggcagccctcgcaaactgacacagggccctgccctaagaattcccagagtgaggcctagaaatatgtagttcaatgagcgttcatgttttataaagaaaacacagttttgaatgagtaaatactcaaaattggaatcttccaggactgcagtggcccagcagaggacagaacagacagaactgctcatcacgtctctgctaccactgccttgtgctcacaytaccattgccacggcacagtgcagcagcgtgttctctcacaggttctacaggaaggaggtgtggaaagtacaggctcattctgaccatgtctcgtgggcagtagctacagctgaccatctctttcttctggaagcccactgtttccttcacttcttttatactgctccctctcatttccttctgtctcactggccactccttctcgtactcctgtgctgccaccagcctctgtctgaccttgaactctgaaccctctcttgtctctcctcacact

SEQ ID NO: 771009 - DNA, 495 bp, Homo sapiens
cacgtgtgtgacttcagaggccccaggcctcaggaacactgcttgctcatcttgcccaagccttcaaaggccatgttgttaagagtgtcactcctctgcccatgcactgccaggtctgcaagaacaggagcattattgggagcactatgagggcactgactgaggtttgtgggcagcctgctgatgtcctaaagtattcggttacaactgcaggagagaggactcaggacagatgtacttcctttaggggacaacttttcatggaatcrgagagtctttggacacaggtgtctgctagtggcagtccatgcaaccagggcctggtggagcaggagtcaggaggaggaggcaggcccagctccctggcaatggggatgctcactttggggctgacaggcccactccacacacaggctgagggggacagggccctattatatgggtgagcggggccggctctggcatcttgtcattctagcttgtgtaagtcagcaa

SEQ ID NO: 771010 - DNA, 598 bp, Homo sapiens
gataggaaccaaactgcaggcaccctctggttgacaatgggcaggctcaaccggcagggctggcctttggagttgctgatgccaccttggacgctgttccccaggtttcggggactgagtggagtcatcccaattcgaatggaaatgctggctccccrcggccctgctgcacacttaaatttacgtctttacaacctgatgaaaactcttcccaggaggaaggtgaagtctccctgcccctccacctgtactaaattctctagtaaacaaaataagcacagcacagagagttgcgtgcacacttattgctgcagagcggcaccaggccccaaaggccgtctccaagggccgaggataaataatgcacactgcatttctaatatcgttaggtaaccaaataaaataaatattttacactgctggggcataacaacgcaggcagacagaccaaagaggcagagctgggagccagagagaagacatggaaatgcctggccctcggtggaggcagggaggccctgcgagactcactgggctcagacacaagagttgagagggaaatgctccgtggtgaagagtttgtaaataatactataaa

SEQ ID NO: 771011 - DNA, 550 bp, Homo sapiens
tataaaaaccccaagcaggccaggtgcagtggctcactccttgtaatcccagcactttgggaggctgaggcaggcagattgcctgagctcaggagtttgcgaccagcctgggcaatgcggtgaaaccccgtctctactaaaatatgaaaaattagccaggcgtggtggcgtgcacctgtaatcccagctactcaggatgctgaggcagaagaattgcttgaacccaggaggtgaaggttgaagtgagccgaaatgagactccctctcaaaaaaaaaaaaaaaaaaaaaaaggaaagaaagcaagctgataaaaacaatgaggtagttattaataccaaaaaaaaaaacaaaaccctaaacaagtgtataaraaagaaaatcatgttttactacaggaaaatacttagttcaacaacgaacaatatttacataggcacaatattcacattgaatatgagttcagttaaaactgtaagtaagaagtgttaagatgagactaaatccttgcctgtcctaatgggaagttcacagacaatgtcacaaactgaca

SEQ ID NO: 771012 - DNA, 656 bp, Homo sapiens
acaggttgcaagtagcaacgagaaaaatgctagattttacaggaaaataatattcataaatctcccgctgtgaattacagtataactcagagctgtctttgttttgctgctgcgatgaagtcaattctgtttcgggtggaaatgatacacacagagcccaaggtggaagccagtcccctcgcatttggtgaggtttgtagccagtcccagctggagcgcggaacagctgaacccactcgacgccggcaattcctggagktttcttttctcttcttgagagcagagctgcggaggacgtgaggggactttcttgggtgctgtgccctgaggtgaggcccctttatccttttcaccaggcggtattgcctcacaccggttccccagagggaaatggtcccaaaggtacctctcccgggctggccctggggaccgcggctggtcactctttcttcatgctgatgtcgtggaaggggtggtcgtgtgtttcaaacagagagcaagtacacatgctcatattccacacatcttttgatccatccaaactatacggagacatgcaattttgttcatgttttattgtccctagaagagttcattttccccaaaagatccccgcggctcagtggtagatcccagcatggtcactgatcctcggt

SEQ ID NO: 771013 - DNA, 656 bp, Homo sapiens
acaggttgcaagtagcaacgagaaaaatgctagattttacaggaaaataatattcataaatctcccgctgtgaattacagtataactcagagctgtctttgttttgctgctgcgatgaagtcaattctgtttcgggtggaaatgatacacacagagcccaaggtggaagccagtcccctcgcatttggtgaggtttgtagccagtcccagctggagcgcggaacagctgaacccactcgacgccggcaattcctggagttttcttttctcttcttgagagcagagctgcggaggacgtgaggggactttcttgggtgctgtgccctgaggtgaggcccctttatccttttcaycaggcggtattgcctcacaccggttccccagagggaaatggtcccaaaggtacctctcccgggctggccctggggaccgcggctggtcactctttcttcatgctgatgtcgtggaaggggtggtcgtgtgtttcaaacagagagcaagtacacatgctcatattccacacatcttttgatccatccaaactatacggagacatgcaattttgttcatgttttattgtccctagaagagttcattttccccaaaagatccccgcggctcagtggtagatcccagcatggtcactgatcctcggt

SEQ ID NO: 771014 - DNA, 594 bp, Homo sapiens
ctgtgagtgattcctaaataaaaagaacagagacatatgtttttaacaagtacttatgtgggattcataaaattaatttttatattatcctctccccatcaacaaattgttagggacaccatgtccgtgttttaaatgttyattaaaattgcattgtattttaatctcaacaatatcaatatagatttaatcctcagtcatgtatatcaacttttgtgaaaattaattttattttctttcactggcataagtttattttaatagttatttgaaaaaaaaaaaactcctggattttttattcccctgactttttaaatgtttaaaagatggctgtttcttaccttcatgtgattaggggaccttatgttaaattcttgagttatgctttctgcagactttaggtagacagagtttcactggtgaggtaaatttttttaaactgtgaaatgcacagatctaaagtttacaattcaataactttggacaaatacaaagacccatataatcaataccgattcaagctacaggcattttcctcacctcaaaaattccttcatgcctttccacttaaatctcattcacacatcaaatctt

SEQ ID NO: 771015 - DNA, 635 bp, Homo sapiens
tacattttctgtttgttttgtctgaaatatttttgactccctaaagatgcaatattttgcctccctaagatgcaggattgttctcttatatgctttatagtattagtttttatatttatgtttcatatttatgtttatgagcatctcaaattggattcatcacaaatttgtaaatgatatgggataaacattgacgttaggctaagcatgatgactcacacttgcaaccccagtgcattaggagactgaagaaggaggatttcttgagcccaggagtttgaggctgcagtgagctatgattgcaccactccagcctgggcaacagraaaagttagaaataaaaaaatcatttgattttcataaatttatctagttgtttcagatttgttgtaaaaatatgtattttctattgtcctttgtcttcatagaaaatcagttcatcatctatattaaacacgaacatatttatggatgctccattttttaacatgcagctttaaaaatcttaaaataatttaatgttacttctttgattatattattttccaagattggttaagttacctatgttcctttgtatttctgcatatttatatacatcttgacatcacattgtttatttttattttgcagta

SEQ ID NO: 771016 - DNA, 621 bp, Homo sapiens
cattagccttgaagtttgaagactaaaaattgtttgtaaaactatctagaaaaaatttattatgattacagccactattagatttcaaaagggttcatcagaaatctctgaggtatataatggggaaagaatattttgactaccactttaacaggtctgctgtttaataatattagtttatttttaattgatgtttcatggacatccagaatactagctataaaatcatatatgctgcataatgcaagsaaaacaaaagcacctataaatattacagaagactatacatgtatgtatatcactgccataaaatacctatatacatattatgtatatacacacataattgttttcacaaccatgatattattacttacaaaagcatgcaaatttagggagatggctaaataagttatggctttttcataaattgtaagcctattcattataaaatattactgaggtcaactttcatttgttccccaacaaattattgagcatctactatgtatattctaggcccatttctagggactggggaaaaaatagtgaaaataacattcagaatgtcttggcttcataaagctgttgttccagtgttgggagaaaaacagtaattaa

SEQ ID NO: 771017 - DNA, 621 bp, Homo sapiens
cattagccttgaagtttgaagactaaaaattgtttgtaaaactatctagaaaaaatttattatgattacagccactattagatttcaaaagggttcatcagaaatctctgaggtatataatggggaaagaatattttgactaccactttaacaggtctgctgtttaataatattagtttatttttaattgatgtttcatggacatccagaatactagctataaaatcatatatgctgcataatgcaagcaaaacaaaagcacctataaatattacagaagactatacatgtatgtatatcaytgccataaaatacctatatacatattatgtatatacacacataattgttttcacaaccatgatattattacttacaaaagcatgcaaatttagggagatggctaaataagttatggctttttcataaattgtaagcctattcattataaaatattactgaggtcaactttcatttgttccccaacaaattattgagcatctactatgtatattctaggcccatttctagggactggggaaaaaatagtgaaaataacattcagaatgtcttggcttcataaagctgttgttccagtgttgggagaaaaacagtaattaa

SEQ ID NO: 771018 - DNA, 595 bp, Homo sapiens
aaattaacaactgtgccttctctactacttaactgagactaccttgagggagaagcattgtcatgtgtttctccagcacttttctttgcttctctaaggcagaggagacagcagactagtacagtgaagtcccgttgatgctttttcttcagaactctttaaggaatatatgctgaaacagagcattttagggtaggtgtttagaaagctgttttacctttattcaacagagataaaaagttatctcaatgttccttaattagataaaaaaagaaatattatttatgctttctctttttataatatatggtataaaaaattgagtagaaacatgttagatggtttcagagtccatattcttcacatataagatcataatcatataatactaaacacgtgaaattaattagaaaattaacmaattaaatatatacataaatatccaaagtttggggaatttaaaaactatgtcttatgaacacagttttagctcagacagtgaggagaaaacaaaataaaaaaaaatttgttgtaatgaatattggcctagatgacattttaataaaaaactggctgctgatcaatagaaaaaatt

SEQ ID NO: 771019 - DNA, 638 bp, Homo sapiens
atatgcatagacagctaataagtgacagagatgaaaaatagggaaaaaaacacttacgtttatgaagaatagacattcaaattaatactcctgcatgcttggtgttccagaagagagagaaagagacggatagatgaaatgtgcaactgaaraataagtaaaatttgccgagtgaagtcaatgttctcagttttataatactcaaaaagtgaatgaaaactgtattaatttgaaagtttgcattgaagtattagcaaattttaatgtatataaaccttataaagaaattgaaaaactgacaagtataaaaatggtaagaagatgtactaatatatatgatgatcaattataaaaaattaaataatgatatcttgtaggtacaaaataaaatacaaaatacaattaagatataaatcaacaatcacatatgtggaattgtaaaacacctggattattctgaagaatagtacaaataaaaattaacttcagataattataattttaaagtttgttgtagtttcaagggtaaatactaaaaaataaacatttattttttgaatcagaataggaaaaatattgctgattaaaaacttatgtaaatgaatacaagaaaggcaagacatagacgagctagatca

SEQ ID NO: 771020 - DNA, 513 bp, Homo sapiens
cttcctttaacatactgatcttccaccatacccacattgccaatctctcctcttttgtggagtcctgataagataagtaagcaacaatgaggaaggggtcccagatgggtagaacaatttttctgagagatgactaatcacagacaacccgctggcacaacatcctgttcccaatacctcattctgcacatatccccctccagtacgattctaaaaaacttccctccaacccctgcctctttgcagacaactccttctctgctatgctgcccattgcaccttgcaatgtatcttcatactttctcgaataaatctgcctttcattacctatgactgtctttgtaaattyctttaccacctgccatacctgccccagccagtcacacacaggacacccttctattgaaatcaggaaataagactgtaaccatggcaactagcacagacacatttatgttactcaacatcatttggaacctcagggttcctcacccaacctttgacttctaatcc

SEQ ID NO: 771021 - DNA, 597 bp, Homo sapiens
actcttgcacttctttattaaagttacaagtttttggagaagaagggtcttccctctgtttgtcttggtcagtctagctaaagatttttccattctgttgatcttttcaaagaaccggcttttggtttattgacttaccctattgttttctattctctgtttcatttatttgttctctaatctttttgtttgtttgtttgtttgagacggagtctcgctctgtcgcccaggctggagtgcagtggcacgatttcagctcgctgcaagctccgcctcccgggttcacgccgttctcccgcctyggcctcctgagtagctgggaccacaggcgcccgccgtaatacgcctggctaattttttgtatttttagtagagacggggtttcaccgtgttagccaggatggtctcaatttcctgacctcgtgatccgcccgcctcggccttccaaagtgctgggattataggcgtgagccactgcgcctggcccctctgatctttattatttcctctcttctgcttgctttagatttagtttgctcttatttttctgatttctcaaggtagaagattaggctattgattcgggaactttcttcc

SEQ ID NO: 771022 - DNA, 500 bp, Homo sapiens
tgtttccctatcttcaccaacccttattattatctgactttcattttatcgtagtggggtgaagtggtgtttcatagtgaaacatagttttgatttgcatttccctgatgatgttgagcatcatcatgtgcttattattaaatttgtttgggggaatgtccattcagatcttttgcccrttttttaattttttttttgagacagggtcttgctctgttgcccaggctggaatacagtgggcagtggtgcaatcatggctcactgcagcttcagacttctaaactcaaatgatcctcccacctcagccttcagagtggctgggactaccaacacatgctaccatgcccagataattttttaacttattgtagagacagggtctgacattgcctaggctggtgcaatcaagttctttatcagatatttgatttgcaaattttttttcaaataaaaaatgatgaccaggggcagtggctcacgcttgtaatcctagcactttg

SEQ ID NO: 771023 - DNA, 603 bp, Homo sapiens
gtcatctgaatgttctggggtcatcacctttccactttagtatccattgagatgtacgtcatcttcccctcccagcctttgtcgccttccacaaactttgcagacattagcttagtgacctgtttcccacgtttcctagttctgggcacatgcatttctccatcggacctcaaggccacttccactctcccagccacctgagtgcccctcttgggcaaagggaamtctttgcatattctcgcgagcaactctagtatctgaggaaacgtgaggctgaccaatctcctccagtcctttgacaaccttaattgtttgcgcggctactgtgggctgacttctgcaaggcttattgattccctgtttgttccggaaatgtgcacttgatgtgatctcacatctctagctggggggattttcataccccattcagggcagtttcaacccctgagagcaggtgcagtggacaaagggcacagccccttcccagagacccacgctgcatcagactctcggtcttaccgacgtcgctagtcctgaggctgctcgccccaacccaccaggtcccggctgcgctttggcgccacctagtggtgtcttggcggc

SEQ ID NO: 771024 - DNA, 647 bp, Homo sapiens
cgcctggcctaatttttattttttgagatggagtctcgcctgtcacccaggctagagtgcagtggcgggatcttggctcactgcaacttccgcctcataggttcaagcaattcttgtgcctcagcctcccaggtagctgggactacagccacccgccaccatgcctggctaatttttaatgttttagtagagaaggggtttcaccatgttgcccaggctggtctcaaattcctgagctcaggccatctctccaccttggccttccaaagtgctgggattacaggcgtgagccaycatgccggtcttaaaatttattattaatatgcggatctatgactcaaacattttctgagaggaaataaaaacataaggtaatggtcatcactgggaaagggggctggggtgaagggaagaggcagcttaattattcatttaaaaatacatttatgttttttgaaacagagtctcgctcgatcacccaggctacagggcaatggcataatcatggttaactgcagcctcgaactcctggtgtcaagtgatcctcctgcctcagcctcctgagtagctggaactacaggcacatgccaccgtccaccatgcccaactaatttttttggaggaggagagatggggtcttactggtc

SEQ ID NO: 771025 - DNA, 604 bp, Homo sapiens
gaagactgcaagcattttgctcaccattttattttatctttctcataaagttatatcaaatcccacataacatctcttaatcagccatatgaactcaggctcaccaatttgtaattatagaataaaagtaaatgatttttaacttgattttataagttccaacagacacatactttttaaaaagtagctcccttaaatatccctgagtaatttcagaggtttctagaacactgcatcgcctgggttcctagaatttcttctggacgctgtgctgcttttcagattgtgactctaatgtaattgcagctctcttttctgctgatagctcctgctaggaactgaatgtttgtgttcctccaaaattcatgtaatgtaatgaaaatttatgcattccccatgggatggtatttggagaygaaactttgggaggtaattctatttagatgaagtcatgattgtgaggtcctaataatgtcattgttgctcttataagaagggacactaggtcattcattctcattctctctttatcttctctctctctctctctgtctctctttctctctctcctcccacacccaccactttctgccatgggaggata

SEQ ID NO: 771026 - DNA, 651 bp, Homo sapiens
agtgtcatcccagtggagcatgggaatccttaagccaaatatttaatagtcgttgtctttggttatgcaagataacatgaacttttttagttttgtcttaatacatgtctattttacaaatacatatatactacttttgtactctgaaaaaaaaagctttctgttttgggggaaaatacaaataattttttagaagagagctattttgtcagtcatacatrgcactttgggttctgaagaatataacctttagttttaaagcttcagtgccattaatggatattatatttgcttttcagcttgggcaatggtagatggtggttcaaatgtgaaagcccgctcttcctacaatgagaagaccccaaggatcgttgtgtctcgttcccattcagggatggtcaaacaggtcgctcttcagacttttggaaaccagactacaattatcccagctggtggtgctggtatgttcctcttcctgtgtggtccctggagaatgttcctggcatggtcaaggctatgttaggagactaatttgcttgtccatgcttgggaggaaagtgaggaggagtggtgtactttcaagacaggcttggtctcctgtttggtaacctcgagggtgggattttagtcactctgcccttcttattagaa

SEQ ID NO: 771027 - DNA, 620 bp, Homo sapiens
atgcagaagtctctttgccttttcatgtaactgacttctaatacttgcaggtcactgtcatctatgttgtaatgacctgttcacccactatgatttcagatctttatttcctacaccttgtttcattttcctttctatcagcctggtcctagattctaagacacactaatagaggaaatttaggcagtcttagcataagaaactgtcaattcagcaatagctcatatgataatctcgtggtaggtaaacactttaatgagggggtgattgggcccccaggtaaacacctgcgcaagttatgaacaagaaggagttcaggccttasgccaaagtcccatggcatacttgaaaccatccaaaaaatattctcaggtcgatagttacgttatctttgaataaacccaagtgtcaaagctttctctataataaaattaatatgcactatgactattaccatatatgtattaatcatccacacagcacttaaaatttactgtaacatgtcataaacaaaaacgtgcaactaacatataggtactgtgaaaaataataataagcaggcactcatatatctatctcaagcctaagaaataggtcagtgccagtatatttgatgctct

SEQ ID NO: 771028 - DNA, 598 bp, Homo sapiens
tctattgttccataccatatttctttcatcatgatacaacccaactgagtgatacagaatagattttataaaatgaagagtaaagaaaaacaacttccttaatttcccctagcatttggaatctttccaaaatagtatatacaaacctattttccacagtgaattatatatatatagtttaatttggaaattaaggcaaagtttatgaaacacatgatttcacaaagtctttttgaaaatgaaaaaccatccaattttacatattaaagaacattagagaaaaaaaactgaagagtcactagggcttaggtagattttcttttatgcaattggaaaagatgggaagaaactgtttaggtggtggagamtaggttcatttttttgttggggaaccgggtgggagaagaagatacttgttatctcagaggccaggaagtgcatctgggaggagaccaggggtaggcagcagatgccagggtgcccctcgcacatctgacatggcaaagaaaagtaaggggcagggaccactttagagagccacaagcagtgtgaaagcaaatgaacaatgaggaattgccataatccagtttttaaaaca

SEQ ID NO: 771029 - DNA, 604 bp, Homo sapiens
ttatttatttatttatttatttatttagagacagggtctcactctgtcatcccggctgaagtgcaatggtgcaacctcggctcactgcaacctctgcctcctgggttcaagcaattctcgtgcctcagcctcccgaatagctgggaccaccatgcctggtgaatctttgtatttttagtagagatggggtttcgccatgttgcccaggctggccttgaactcctagcctcaagggatccacccacctcagcctcccaaactgtggcactacaggtgtgaatcaccacatccagcccaaagcatacttctctatggtacactggtagactgaggatcacgtgagttctcaatacattaaccttctgtctacaagtacagccctggctggtatttacccaagccttttgctcaaaagccatctttacatccccaagcatgaaggyctgctcgtgacatatgaagtaaataataacctaggaacaaccttgtggtacaggaacttaaggggtcagtacagatctgattatgatgttctgtatgggatggatgagcccctcatttcactgcagactctactctcaaagttgaatggagccatggatgt

SEQ ID NO: 771030 - DNA, 592 bp, Homo sapiens
tgctttgtatcaagggtattcattgcttttctaggcatcttgcctccttcctcccccactagggattggcagcgttgagaattctgttctcatttagctacaagaaacggtgtctagaactgtgtcttgcatggaattgggactccttacatgtctgttgatttgacatctagagctcctgtaactgtaggttgtcttgcaacagcaacccccttagatatactgctcttattccaatgaccccaccactgttcaaaatatctctggaatttcttttctggaattattttcagagaaggcttatgaggcaaagaataaaactagtctcttttctttaraatcaaacaacgtgtatttcattttcattttttgtcattatgagtcaacaatttatttatttatttatttatttatttatttatatttatttattgagatggagtcttactctgtcgcccaggctggagttcagtggtacaatctctgctcactgcaaccaccgctccgattctcatgcctcagcctcctgagtagctgggattacaggtgcacaccaccacgccctgctaatttttgtctttttaatagagat

SEQ ID NO: 771031 - DNA, 526 bp, Homo sapiens
cctgttacaggggtgagactgttatacctgggaacttcacagctcactcattattcacttattcagaaatactcattgcaaacctattacgtgctgcactcttccaggcacctgggatgtggcagtgaaggagacagaccagctgtctttgggcttcctcctgatgctcacgttccagtgcagtcaaratctttaccaccatcgacattctaataataaacacaactcctacgttcacagagcttcagagtttacagagtgtgttgatgctcattagcctacttgatcctctccaaaaccgtgggcagtaagaattattattatcatctttcataaatgctcacaatgacattttttttctcattttaacatctctgtcatcaggtgggtcttgcaggggatggcatgctgtaatgaaattggtggcccttattttctttcttagtgttaaataaaagaatggtaggtcttacaatccatgccttagatttaataaaatacaaaactatccctgttttgcagatga

SEQ ID NO: 771032 - DNA, 526 bp, Homo sapiens
cctgttacaggggtgagactgttatacctgggaacttcacagctcactcattattcacttattcagaaatactcattgcaaacctattacgtgctgcactcttccaggcacctgggatgtggcagtgaaggagacagaccagctgtctttgggcttcctcctgatgctcacgttccagtgcagtcaagatctttaccaccatcgacattctaataataaacacaactcctacgttcacagagcttcaragtttacagagtgtgttgatgctcattagcctacttgatcctctccaaaaccgtgggcagtaagaattattattatcatctttcataaatgctcacaatgacattttttttctcattttaacatctctgtcatcaggtgggtcttgcaggggatggcatgctgtaatgaaattggtggcccttattttctttcttagtgttaaataaaagaatggtaggtcttacaatccatgccttagatttaataaaatacaaaactatccctgttttgcagatga

SEQ ID NO: 771033 - DNA, 526 bp, Homo sapiens
cctgttacaggggtgagactgttatacctgggaacttcacagctcactcattattcacttattcagaaatactcattgcaaacctattacgtgctgcactcttccaggcacctgggatgtggcagtgaaggagacagaccagctgtctttgggcttcctcctgatgctcacgttccagtgcagtcaagatctttaccaccatcgacattctaataataaacacaactcctacgttcacagagcttcagagtttacagagtgtgttgatgctcattagcctacttgatcctctccaaaaccgtgggcagtaaraattattattatcatctttcataaatgctcacaatgacattttttttctcattttaacatctctgtcatcaggtgggtcttgcaggggatggcatgctgtaatgaaattggtggcccttattttctttcttagtgttaaataaaagaatggtaggtcttacaatccatgccttagatttaataaaatacaaaactatccctgttttgcagatga

SEQ ID NO: 771034 - DNA, 605 bp, Homo sapiens
tttaatatgtacttttgaatttttatgtattctcttacattgtcattacagtttagcatgtttttgtccacaaacataacttacataaaatactgtatttttcctcttctcactaaagcactggctttttagatagttctccatgttgcagagagcacatctagtttgtttctaatagttggatagtatagtactgtatagtgtaagtccactctgttttccttatttatttattagctatgagctcacataattgcctttatctgtttatataaacaacacagtgatgcataccattaataatctggtgactgtggatttcttgcgaggatttctttttgataraaattctggattaatattgctaggtcagcaattttgactcaagaaagtaccccctgcgagctttccaggatgcctgcatcagcctacttccaaccagcagtgcatgagcattcttgcttcatgttctcaccaacacatgacattctcatttacactgatccataaggtataaagtagtatgttactatcttgagtttcattcctctcattaccagtgaatatgagcatttctttatatttttgtggattacccttgaaaa

SEQ ID NO: 771035 - DNA, 626 bp, Homo sapiens
atatgactatggaaagacattgaaaattgatgtctattttatttcaggggaagatgaacaaaccaaggaaataattttccaaacttttaggtacatttaaaagaaatgtcttgaatcctaaatatccccaacagatttaagtaagatccacaggggcaccgacatacctggaacataaagagggaaagaggggagataatagaggggaagggtgaccagccatccaggtttgcctgagactaaaggttttcccaggaagtgggacttttagaacaaaaaactcagggaaagtcctatgcaaaccagaatggttggtcaccctataaagggatccgagaagaaaagaatgtggtsgatgttattagcgtgccactcacaagcaattctattacttcatcactcattgtgtcagtgttttccaagcatttactatgggccaagaactgtgctaggcacggggactacaatgaggactaagcctcatggtgcacacagtccacaaagtccgctggctaatagaatctgagagactagaagtgtgaaggaacctaaatagcttgtagtaaaaactaatttcctctgatttacaggtaagaactctaagactgagaggttgtgaatgactg

SEQ ID NO: 771036 - DNA, 522 bp, Homo sapiens
cacactttttttatctctagtagctgcactattttacattcctaccagtagtacataaagataccaatgtttccacatcctcaccaacacgtgttatattctgagatttttctcattttttttgttttgttttgtttgataataaccatcctgttaagtacaaagtcatatctaattatgggcttgatttgcatttccacaaagattagtgatgttgagcatctttcatacgtattcaggccactcatatatcctctttgaagaaacgtctatattaagttcttgtcccattttttatttgggttgttttattgttgttgagttgttgaagttctttatayatgatattttggtttttaaccctttatcagatatataattgcaaatattgtctcccaccccataggttgccttttcacagtgttaattgtgatcttggatgaacagaaagttttaattttgatgtggttaaatttacctagttttacttctgctgcctgtgcttccaaaaaatcattgccc

SEQ ID NO: 771037 - DNA, 625 bp, Homo sapiens
agtacaaagtcatatctaattatgggcttgatttgcatttccacaaagattagtgatgttgagcatctttcatacgtattcaggccactcatatatcctctttgaagaaacgtctatattaagttcttgtcccattttttatttgggttgttttattgttgttgagttgttgaagttctttatacatkatattttggtttttaaccctttatcagatatataattgcaaatattgtctcccaccccataggttgccttttcacagtgttaattgtgatcttggatgaacagaaagttttaattttgatgtggttaaatttacctagttttacttctgctgcctgtgcttccaaaaaatcattgcccagaccaatgtcatggagattttcccatatgttttcttctagtagttttaaagtttcatgtctcatagttaactctcaaatggattttgagttgatttgcatatatagtatgagataaggttctaatctcattcttctgcatgtggatatccagttttcccaacaccatttgttggacaaactacactttcccccttgaatgatcttggcacccttgtcaaaaataagttgactgtatacgcaagggcttattcctgata

SEQ ID NO: 771038 - DNA, 645 bp, Homo sapiens
cttcatctggatctcaacatttcctcatgtacaattgagactcatgtgacatctgtggaatatgtaacttgccaagaacagggagagggacagcttcatgagcatgcgacaggtgcagttgcacagtgtaccacgtttggtttaaagttctactgtcaccgtcttaaagatctgaatacattttgaacaagaggcaccacatttttattttgtactgggcccccaaaattatgtagctgatcctggacagggaaaagagccaaccatcttgacttttttttggaagactattcaagctccttagtatctggtcagtaagggttaaaggtcctaacagcaaataattcaaacctgagacattgtgctggtctcagaaaggaaaytaacctcagcaaacttctggatgagctgcaggggactttcacaaactctcctcttgtactctgctcctgtactctccccctgggaaaactgcatttattaggatggctaatactgtaaccttgggatggttgcttttggtcactagggtttgttagttcactattgcattcagaacacttaaaggcaaagttgtgatattgatagggtgtgtttggatccccacttctcttcctatgccctgccatcccactactccaccaa

SEQ ID NO: 771039 - DNA, 599 bp, Homo sapiens
tgaatatttaaaaggcacaagtatttaagtattaagactgtatgccagcagtccccaacctttttggcaccagggatcaatttcgtggaagacaatttttccacagatggggggttgagggggatggtctcaggatgattcaagcttattacatctattgtgcactttatttctattattattacattgtaatatataacgaaataattataactcaccatagtatcaaatcatcrggacccctgagcttgttttcctgcaactaggcagtcccatctgggagtgatggaagacagtgacaaatcaggcattagattctcataaggagtgagcaaccaagatcactcacatgttcagttcacaatagggttcgcgctcctaagagaatctaatgcctctgttgatctgacagaaggtggagttttggtggtaatgtgagcaatggggagtggctgtaaatacagatgaagctatgctttctcacctgccgctcacctcctgctgtgtggcccagttcctaacaggccatgaataaatactggtatgggtccctggctcaggggttggggacctctgctgtatgctatagagtgctgata

SEQ ID NO: 771040 - DNA, 633 bp, Homo sapiens
caccaaaaccttcaccttaatttcttcccatggaaaaacacctgttatttaaggtttggaaaaatccaaaacatttaaaaatgaacacagtatgtcaggcaacacccacaccaaatttattcaagaatgaaataaaaagtggaaatcaaaatttttcacatggtaaaaacacttttcacctttctcatcacmtggaaaacaaccaagaagcagaagacgactgaaatacatctcagcattcattaagtatcacaaaacaagcattttcacatatgacagagaattttgaatcagaaattcaacaacagaatggaaatgaacaacaacaacaacaacaagaaagaggaagatgtgagaaaaatgatcaaacaaactcagggaagaaagaagagaaaaattttaaagctcatttcagaaatgtagatgaaattatgacatactcaagaaagaataggtaaatggactaaaaacataaaggaaaggaatagaaatagccaagaatagaaaaaacaagttaaaaaactgaatgtatcagtaggttttagatgtagaacctaggcaaaaaaatctaacatacatgtcttgtagtccacaagtaaaaagaaagtaataaaatatgtaaataatattcaa

SEQ ID NO: 771041 - DNA, 629 bp, Homo sapiens
cttctctccccaataaatacagacgggatccagatctgctgctggatttcctctgcagggatcaaggtgttactctggggactcacaaccttctactcaaatcctctgggaaccctggcatcttgcactttggccccaccccacctaaaggattggcttcttttcctgaggccttcagccttcccaccatctctgggtcctactgaaagcccagctgtatagattcccccagccttaccactattccacaccatgttcagaagttcattggaattcacattgtgtactacagcggcaccatatccagccttctgggcatttaggacctagggagacaaggcagaggacaaggagccatcatgggccttacctgtcttcattcctggtgccttttttttaccctcagctgcccagctccccttcctcattyagcaaccttgaggtcaaagttgcagtcgaatcttcgaagcagcgcaataaagactgacccattgaccggggctgggggtggtggggcaatggggctgcaggcattgtctgggtgagcctccacaaggaacccctgaaggatggaagcaaacaacagtgagatttctcctttctagattctgctctctacaggggccacc

SEQ ID NO: 771042 - DNA, 626 bp, Homo sapiens
gcccccaggatccaggctctcttgccaaaccatcctccaaggaccggatggcctgagtcccaacccccaggacctgacccaaccatagccccagtctgtgcaaaagctcaaggtttagggcctctgaggcccaagccctgccagtcttctccccgctccccmaccccaacccatttcttcctgctcactcttcctgtccagtctgctcactcatattggctccgggcactgtgtgttgttctctcttctactgtcacatcacagtcagcccctccctccctttcctcatccttcccagatactatgacccagttctatacccactccctacctcatacttctcatcctggattaatgtgggggcttctgccatgaccttgttctctcccttcccagcacagactccccctccccccggcccctcaggccgggggtgaccttgccccctggagccctcaccatgaataccaaggacaccaccgaggttgctggtaagttcacaaaccaggttcccaatgtggccacagcctttcgttctccccacgctttagtggccctctaattcttggattttctgttctccttagtgaggtttcagttttccccagtgctctgtattgccttca

SEQ ID NO: 771043 - DNA, 606 bp, Homo sapiens
tatttttagtcaccccaggtgaatttaacgtactaccaaaattgagaacaatttgcttgtcagaacttctgagaggacagaaggaggagatttttattgccaggtgattgtcatatatatatcagattgctttcttccaaagtgtcacttcagccagcaccactgtggtgatgattctcaaatgtatacctagttcttaaacattctgctgagctccaagtaatacttccaaactttccacatcttcccactccacaatcaaaccttttccacttgcttttccacrttgtagtcactgggactatcattctgctgagattcccataccagaacccggtaaactctttttgagacatttctctcttcctctcgcccttcataaatggggttccaaggcatttcagttctactttcctaacatttcttgaatatatttagtttgtgtttcaattatcaattgccatgaaacaaaccacactgaaatcagtggctcagagcaatcaccatatatttgctcacaattctgcagcctggcaggactcctcagatacaactcatcctgcttcatgtggtattagctggggtctttcacatagtggtattagt

SEQ ID NO: 771044 - DNA, 531 bp, Homo sapiens
accatatatttgctcacaattctgcagcctggcaggactcctcagatacaactcatcctgcttcatgtggtattagctggggtctttcacatagtggtattagttggggtctttcatatagatgcattcaattgtgagctcttctgaggtttagtgtatgacatagwccactcacatatctggcacctcagatggggtaactagaaaggctgggagcaggctggacatctctctccacatcatctctccagcagggtagcaggaccactttacgtggtggctcaggattccaagaacacaaaaggagctgtcagttcgcttaaggcctagaactaaactgagatagtgtcacttatatcacattttgttgattaaaaaaaagtcacaatgcaaccttagattaaaggaggggaaagcgacaccaccattgatgggaggagacatatgtgtgtaaaaagaaagaaagaatttgggggcaccatttggaagacaatctaccatgcttcatttccactattttgtttaagcaat

SEQ ID NO: 771045 - DNA, 601 bp, Homo sapiens
ccccaaccccttgtgctttccaggtgaggcaatgccccaccctgtttctgcttgccctccatgggctgcaccctgcacccactgtctaaccagtctcagtgagatgagccggatacctcagttggaaatgcagaaatcacctcccatctacattgatcttgctgtgagctgcagaccggagctcttcctatttggccatcttgcccatgtaagctgcagtattgttaactatagacactgttgtatagcagatctctagaaattattcaacttgagtaactgaaatttatacctgtccgatagcaaatacctgttttcytgtctacccagcccctggcaaccaccataccattccctgtagtatgagtagctatgagttttactttttaagattccacatataaatgatatcacacagtatttctctttctttgccttgtttattgcacttagtgtaatgttctctaggcttatttatgttgctacatatgatggtatttctttcttttctaaggatgaataatgttttattgtatgtgtataccacatctttctttatccatttattagtgtacatttagggtattttcatgtcttgtgt

SEQ ID NO: 771046 - DNA, 577 bp, Homo sapiens
gttctccatttaattatcttatggaatagatttatgtttattccattatgtattttataaaatacccatttgccctgtgatgtgaaaaaaacaatatttaatagataataaaatccctttttagaaatatttctgaagaatgaaataaaaaatatatagcatttgaggcaagagagttcaattagatggaaagacaaagcttaattaaaaataatgccttccttatatatatactagaaactaccagttaaaaaagaaaattaattcacattagtaaaaatgactatagcaatactaccaagtgactcaatgaatgtagcaaaatgttcaagatatttagctgcatacatcaaaatgtaaaagaacgcttaagaaamtctgagtaaatgagagagaatttgtatttcgtggttcagaagacaatattgtataatgtcaatactcaatatttatctgtaaattcaacctagcctaatcaaaatagcaacaagataatttaaagaccttggcaagccaattcaaaagttaacatggaaaagtaaatgttcaaaataatatctcagaaaaaaattttaat

SEQ ID NO: 771047 - DNA, 596 bp, Homo sapiens
tgtggattatcacaatatttactgaaatcctatagagtgaatactattattatgtctttaccaatgataaaactaaagcatagagaaggcaagtaacttgctagaagcccacacaccaagtaagtagtatggctagtttcagaactacttattttaagttccaagcccacgttattacaatctaaggcttactgcttataataattttttccacttcaaattatagtagaaaattccatcgtataaaaggtgcttcaatcaattgtgcttaaatttagaattatgagttagactctgggggccaggctattttagctggctgccagtatggagaagacagtttgatagaggaaggaaagaggattcagtagctggggtsatttacagcacaaagagagtattgtctcatttccattaggagaagaaagcctattttcaaaaagtttttgatcacatattttttgttgacctatgcacatttctgactcacaaaagcaaatatatatcacctctgttagaatcaagcggactttgcaatcaagaccactgccagcttatttcaagggaggaaggtactaaccagacacagagatttc

SEQ ID NO: 771048 - DNA, 659 bp, Homo sapiens
gtttcccatatgcttcagaaatccatgtgtgttaagaataaaacaatgaatttttattataacaaagaagaattgagacagatggaatgacacagtaaaaaaatactttcgaaaaatgaatttttaaaataatcacacttctcttatttttctccaaattcttaacccaatggtgtattgtcaattttgtaaaaacaaacaacaataaaaaggtgtcatgactttaatttttcctttcatcataaaatggtaattttccagtaaaatatgtgaaatgaattttttagtgatgacaatgatcatgatgataattttataaatactgaaatagtttaaatttaccaatgacaaagagcttttactgctttctgaggctgtttattaatggatataatgrgttttataatgcctatcatagagatttgaaataagaaattataaaacgttgaatagcacttaaatatatctttttaaaaaaacttcttgtgggtgatcttcaatacatacttcactgtaccaattgagatgtgatttaaggatattttatcagttaaactattacctttttatatctgtttatctggatttgtgtttgtttcagagatttgatcttatgtaatcttcagagctggctaagcttcctggttaggccatctctg

SEQ ID NO: 771049 - DNA, 659 bp, Homo sapiens
gtttcccatatgcttcagaaatccatgtgtgttaagaataaaacaatgaatttttattataacaaagaagaattgagacagatggaatgacacagtaaaaaaatactttcgaaaaatgaatttttaaaataatcacacttctcttatttttctccaaattcttaacccaatggtgtattgtcaattttgtaaaaacaaacaacaataaaaaggtgtcatgactttaatttttcctttcatcataaaatggtaattttccagtaaaatatgtgaaatgaattttttagtgatgacaatgatcatgatgataattttataaatactgaaatagtttaaatttaccaatgacaaagagcttttactgctttctgaggctgtttattaatggatataatgagttttataatgcctatcatagagatttgaaataagaaattataaaacrttgaatagcacttaaatatatctttttaaaaaaacttcttgtgggtgatcttcaatacatacttcactgtaccaattgagatgtgatttaaggatattttatcagttaaactattacctttttatatctgtttatctggatttgtgtttgtttcagagatttgatcttatgtaatcttcagagctggctaagcttcctggttaggccatctctg

SEQ ID NO: 771050 - DNA, 602 bp, Homo sapiens
ccagtttctttaaaattctgtagtgtattgctgcttcatggcaatgaagttcatttcaagattaaccactgcatttaaaacactagaaaaagtcctgaaaaacttaatgcagtcttaaattttgaacatatttctatagatgaacatagttataagcacattgcacttaaaagcttacagcacatctttagttattgtaaagacattagaatgtacttcgattcgtgtgttttattgttttaaaaataaggctattactttagggagggtaagctcaccttacaacatttgctgttgtaaaagtcttctaaaagttaccagtatcactaattatcgttgccgcatcattaccaacctctctgtcacattatacgtgtttccctaagggaaacacagtaagaaatgatccatwaaagtggtgtcaataatagggtgtatgaaccactatacctatatttgcacagtaaaggcattgaaataaaccagatggtctcttcctttcttgaaggttaaattaaatgcatatttacttttcctttaattataaccttcatcctacagggcaacttttaaccaaagacatggctgcataattcacatat

SEQ ID NO: 771051 - DNA, 622 bp, Homo sapiens
ctctatgtggagcttccaaccacacagttcccttccacactgccctagtagaggttctctctatgggtgccacccctgcagcaggcttctgtctggacaccaaggctttcttatacatcctctgaaatctaggcagtgtctggcctcctttactttcacactsagcatgcccacaggattaacaccacatggaagtcaccaaggcttatggatcacaccctctggagctgcagcctgagctgtacctggggcccttgaagccaaggctgtagccagagcagccaggatattaaggagcggcctcctgggtgatacagaacagtgctgccctgggcctggtctctgaagccattctttcatcctaggcttctggacctgtaaagggaagggctgcctcaaaggtctctgaaatgcctttgaggcctttttcccattgtcctcgctatttgcacttggctgttttttagttatgcaaatttctctagcaagtagtttctccacagccctcttgtgttcttcccctgaaaatatgcttttcatttctaccacatagtcaggctgccaagtttccaaacatttgtgttctgcttcccctttaattatgaattgcaactttaagtca

SEQ ID NO: 771052 - DNA, 658 bp, Homo sapiens
ctaggaccacctaacaaatgggaacatcccagaatctatcaaaatgttatcacgtatatatcaaaatgttctcatatatttaagcctatttgtggtttagtggtagatgagatggcaaagatgcttcatgacttatttattgaattcatcccagtgaatctccaaataattattttttacattccattatcaaacctagaacttctcacaactggtgaaaactcaaaaattggccaggtgcaaactacttttgctcaggattaaggctacttttgccttttaatcccaatagctgacttgctctactggagttgaggtaatccaaatttactactgatttttttatttttctttcaaacctcattttttggtcttttcttgatcttgagtactaatgatactccagatattgtytggaccacaccttccagaccttaaccttccttcatgctcctgataattaatcaattatttaatctttcaaccactattcattaagcatatgcttggcactgggctatgttaggaacacaaaaataattaggatgaatttcttacccccaaaaagctgactgaccagtagagcattcctgaaaataaatattttgataagtattaaaatacaatctgataaggtcaaaaatagaaataattaatc

SEQ ID NO: 771053 - DNA, 616 bp, Homo sapiens
ttgttcatttattttttcttcttttcccaactttattgacggttaaaaatggtgtatgtttaagttgtacaacttgataattttatatacataaacattgtgaaataccctccataatcaaccaaattaacatatccatcacctcacccagttaccactgtgtggggtrggggggcgggggaggtttgagagagagaaaatgagagtgcttaagatctgccctaagctttgaaactaaaagatatgcatgactatagaaaatgtcctgaactttttcaatcctcatattcctcattttttaagtgtagatactaatatctacctcacagattattatgaagatcagacaaaataaattatatatagctctctcacacaccagcactcaaaatatactcattttccccacagacgctttagcaataaatttggataacatttgcttcttcttagatatattagttttcctttatttcctaaggtctgttataacaaattatcacaaacagagtcacttgaaacaacagaaatttattctctcacagttctggaacctggaagtcctaaatcaacatatcagcaaggccatgcactctctgaagcctctagccagaga

SEQ ID NO: 771054 - DNA, 494 bp, Homo sapiens
gaataaaatcttttattttgagcagtagttctcaaaaataggcttaaaatattcagtaaaccattctgtaaacagatgtgttgtcattgaggctttgttacttcatttatcagacacaggcagagtagatttagcacaatttataagggccctaggatttttttgaatggtaaatttgcatgggcatcagtataaggtcaccagctgcattcrtctctaacaagagagtcagcttgtcctttgaagttttgaagccgggcattaacttctcttctctagctatgaaagtcctagaggccatcttcttccaatagaaggctgttttgtctacatcaaaaatctgttgtttactgtagtcaccttcctgaatgatcttagctaagtcttcttgataacttcctgtttcaccttacactttcgtgaaacatatggagatagctactttccttaaacctcataaaccagcttccactagtttcaaacttttcttctga

SEQ ID NO: 771055 - DNA, 388 bp, Homo sapiens
cttaaataaatgtggtctatacagacctctaaaactatctccataccagcaataagtctcttttgttttcttatcattcatatgttccctggagaagcacttttaatttcctttgagaactttttctttgaatttacgatttggctgttgggttcaagaggcctagctttcagcctatcttggcttttgacatgccttccttastaagcttaattatatgtagcttttcatttaaagtgagagacaggctgggttcagtgactcacgcctataatcccagcactttgggaggccggggcaggagaatcacttgagtccaagagttcaagaccagcctaggcaagatggtgagcccccatctctacaaaaaaaaaaagaaaaaattgct

SEQ ID NO: 771056 - DNA, 538 bp, Homo sapiens
cattctactggtggttctagtaaatacaattaagcaagaagagaaaaaaaaataaaagcatatgaaatggaaagggaagaaaaaactgtcattaatctcagaaaacagggttgtttatgtggaaagaaaactataaaacaggtactaaacctaaaagaatttaccaaggttttagtaaacaaatccaagaagcaattgtaactctatatgatggaaaataaaatttttatgtttcctatagcattcagaaacatgaaaatatttacagataatttttaaatgcccaaggcctctacactgaaaaccataaaacaytgctgagatgtactaaatgagaactaaataaatgaaaagacatatcaatgtattggatcagtattgttaagactcaacattgttaagatgtcaattctagataaaacacaaacagttttaaagaaattgacaagctggcttcataatttataaggaaatcaaaatgacatagaatagtcaaaacatttcggaaaagaagaatacatttatgctacctgcttta

SEQ ID NO: 771057 - DNA, 622 bp, Homo sapiens
agcattttacttcaagcccgttaagatgactattataaaaaaaagaaaataacaaatattggtgtgtatgtagagaaattgcaaactcttgtatactgttgttggaatgcaaaatgttatagccactgtgaaaaacagtatagtggttcctcaaaaaattaaaaatggaattaccatatgttccattaatcccacttctgggtgtataaccaaaataattgaaagcagatttgcaaagaggtatttgtatacccatattcataggagcattatttacaataattgaaacatgggagcaacctgtgtccacagacaaataatggctaagtaaaatgtcacacacacacacacacacacacacttrcaatggcctatattattcagccttaaggaaaaagggaattctgacatatgctacaacatggatgaattgtgaggaaattctgctaagtaaaataagccagtaacaaaaagataaatatggtatcattttacctatatgaggtacttagagcagtcaaactcataagagaccaagagtagaatattgtttgccaaggtctaggggtaggaggatatgtggtttatctatggaatggaattttttttggccatacaaatc

SEQ ID NO: 771058 - DNA, 648 bp, Homo sapiens
tttaggaaactgttgtatgagtctaaatgacaaaatctagtaacaaatggccattaagtagggtgaccacaaggcaagtttgttgcccaggacaatcccagtttatgcctgctgttgtagctgatgaattagtctgtcttttcaagatatactcatgtggatgttaaattatggtgactttcattattatttgctacaatttaataaatttaaatgaacatctgaaattgttcttagggccmtgactagcattaacatttagtcagagaaccatgaggttctgttggcaaccaattcgtcaatttggatatatcaatacctaaatatatcaagctggccgggcgcagtggttcatgcctataatccctgcactttggggaggccacagtgggaggatcgcttgaacccaggagttacctggacaacacagtgggatcccgtctccacaaaaaaaaagttttaattagctggtcatggcggtaccagctacctggtgggaagatcacatgagctcaggagttcaacatcagcctgggcaatccgctgggaccaggcctctaccaaaaaaatttttttgccagccatggtggctcacgcctgtaatcgcaaaactttgggaggccgaggcaggtgaatcttgagctcgag

SEQ ID NO: 771059 - DNA, 619 bp, Homo sapiens
gtcatcacaaacatcaagatgtgaagtagatgctattagaattgttaaagaacaagcatcaagcatacgctactcaccccctactcccctgaaaggcaccaccttacttcacagaggtcttttgagtggctgagagtaagtgtaccgatctaaaggtcagcagacactaagttctggctttaccatttaataactgattagccacatgatcataraaaaatctctctctcaaactcactttcttgaaccagaaaatgggagtaacgctctacctgcttcaatcttgttacataaattaaaaacttttgtcaacgtgggctgtgaactgaggtactgcataatgtcatatacacatatgtaaagtttaggccagaagcagtgactcacacctgtaatcccagcactttgggaggccaaggtgggagtccaggaattcaagaccagcctgggcaacatagagacctcaaatccacaaaaaaaaaaaaaaaaaaaaaaaaactcaaaatttaggccggtgcaacagtcccagctactagggaagctgaggcaggagggtcactggaactcaggaggtcgagcctgcagtaagctataatggcgacactgcacttcagcatgg

SEQ ID NO: 771060 - DNA, 619 bp, Homo sapiens
gtcatcacaaacatcaagatgtgaagtagatgctattagaattgttaaagaacaagcatcaagcatacgctactcaccccctactcccctgaaaggcaccaccttacttcacagaggtcttttgagtggctgagagtaagtgtaccgatctaaaggtcagcagacactaagttctggctttaccatttaataactgattagccacatgatcataaaaaaatctctctctcaaactcactttcttgaaccagaaaatgggagtaacgctctacctgcttcaatcttgttayataaattaaaaacttttgtcaacgtgggctgtgaactgaggtactgcataatgtcatatacacatatgtaaagtttaggccagaagcagtgactcacacctgtaatcccagcactttgggaggccaaggtgggagtccaggaattcaagaccagcctgggcaacatagagacctcaaatccacaaaaaaaaaaaaaaaaaaaaaaaaactcaaaatttaggccggtgcaacagtcccagctactagggaagctgaggcaggagggtcactggaactcaggaggtcgagcctgcagtaagctataatggcgacactgcacttcagcatgg

SEQ ID NO: 771061 - DNA, 495 bp, Homo sapiens
cagcttgcagtcctacgtcttgcttagctgcaggtcctgcctgcaaggatatcagccaagggtcaagaaagtcctcaaaatgtctgatcccaggacaagtccctcaggttgcagctgcacctagggctgacctgtgggacagattttgtgaacatctttccatttccctttagttcccgaaatacacagggccactgctaatctataaagggcctctgtcacaattaraaagagaatgtccgtctaggtagacacagcccttcaggcatacagcttcaccccctcagtggagcatccctccgtggtgaacaacctatgcaaccaaagacagcagactgacaacccacccttttctctctccctccctctccctgcttttctccaaaatctctccctcatgccctctacccctgcttcctgtgccctctctgctctttcactctccctgggcctgacaggggtacccagcacattcaccatggtgtggaccatcgc

SEQ ID NO: 771062 - DNA, 610 bp, Homo sapiens
tgccacggaagagtataagaatgaagacaacatccttgacattattttcctttgtaaaaatatactttgtattctaaaagatggaaaaataataatacaaaaaggaaggggcttatctttacagggatttgatatttgtgaattcaggttatgagctattatgagacagcctgtactcaaataagagatctgaccactgctcaaaacagaatgaacttctgcttctggaaagatgaagtagaagtacttttccctacttctcccwtgaaataccctggacattatatataaaataaacatttaaaaattctgaccagcctggccaacatggcgaaaccccgtctctactaaaaatacaaaaattagccgggcgtggtggcacacacctgtaatcccagctactcaggaggctgaggcacgagaatcgcttgaatccgggagggagaggttacagtgagctgagattgtgtcactgcactccaacctaggtgacagagtgagaccctgtctcaaaaataaaaataaaaattctgaaaggtggagaaggaagaagactggctagggaccttggggtctgaggaatgacacagctgtgagtctgctgagtttg

SEQ ID NO: 771063 - DNA, 657 bp, Homo sapiens
tcagaatggtggttacccctggactaggaggattgcctggaaaggggcatgaaggaacattctcacatgatagaaatgttctgtgtcttggtgtatgcatatgtgagaattcatcaagcttaagatttgtaaattttactgtatgtgacttatacctcaattttaaaaacacaaactagtgtgttcgtatatgtatacacacacacacacacacacacaccatatatacacgtatatatacatattaaagtttccaagacgaactcaagaaattattcttttgcctacttttcttttactctctaataaaatttgtttgttttaagaaatggggtcttgctatgctgctcaggctggactcaaactcctggggtcctgagtagctgggaccacaggtgcacccagcacgacaaagttttcttttttgttttcctcaaaatcaatctcctttccttctctctaaattttaawtttattaatatctttctataatttgcaaaaatgaattttaagctgtttgtattttctaaatggcagacacaccagggattgtatatttctactctcaaaacagcagggaatgagcctgttctgcctagacacactgtacaaccctcctctctctcagatcttgctgccttctcaggatccaacagt

SEQ ID NO: 771064 - DNA, 605 bp, Homo sapiens
aaccctcttttcttgacatccttcctgggatggactgaactttgggactggaccactagaacaagccacacaataagtggttccttgaagggtcccttaggaacaatcattagaagagcccaagtccacagttgttagagaactcagactctctggaactagccacaaaacttgagatagagatcaaaagataaaggagggcagtctggtattgaggggccctttcatttccaaatcattagattcayaattgccctttggtgtttttcaaaatgaatggaaagctcaggctgggtttggtggctcaggcctgtaatctcagctctttgagagggcgaggtgggtggatcacctgaggtcaggagttcgagaccagcctagccaacgtggtgaaaccccatctctactaaaaatacaaaaaaattagctgggtgtggtggtacacacctataatcccatctactcgggaggctgaggcagaattgcttgaaccggggaggtgtaggttgcagtgagcggagatcacgccactgcactccagccaggtcaacaaagggaaactccatttcaaagaaaaaaaaagaatgcaaagttcaaagtgccac

SEQ ID NO: 771065 - DNA, 605 bp, Homo sapiens
aaccctcttttcttgacatccttcctgggatggactgaactttgggactggaccactagaacaagccacacaataagtggttccttgaagggtcccttaggaacaatcattagaagagcccaagtccacagttgttagagaactcagactctctggaactagccacaaaacttgagatagagatcaaaagataaaggagggcagtctggtattgaggggccctttcatttccaaatcattagattcacaattgccctttggtgtttttcaaaatgaatggaaagctcaggctgggtttggtggctcaggcctgtaatctcagctctttgagagggcgaggtgggtggatcacctgaggtcaggagttcgagaccagcctagccaacgtggtgaaacccsatctctactaaaaatacaaaaaaattagctgggtgtggtggtacacacctataatcccatctactcgggaggctgaggcagaattgcttgaaccggggaggtgtaggttgcagtgagcggagatcacgccactgcactccagccaggtcaacaaagggaaactccatttcaaagaaaaaaaaagaatgcaaagttcaaagtgccac

SEQ ID NO: 771066 - DNA, 647 bp, Homo sapiens
gatttttttgttgttgttttaaatgtgcggatatcagccgtggaatgtaagtaaggcaacctataggtagtttttgacttaaatttccttttttaatttttacttatgttgtttttgagggaaaatttggggtccctcagaaagttagaactttgcatatcctggggcccgaagccccacggtgacgcctcccgcttcattcccgttcartgtagcctaggggatgctgtggccctggcccctcttaaggtcccggcttccctgcggcctttactgctaccatgcattgcggccttgtggggatgagggtccttgtgacttaccgcactgcccccagaccttgctcctgccagagaccccactgtctagcccctggccttgggctgggctgggctgtgctgtctgacagttgtttggccccctcccttgcacctgtagtgtttgtcccccccacgccctcgcaggctctcactgcagcctctgtaggagccgctggaggtggaaacttgttggtattaaacctgtgctggagagccccagtgggttttttgatgcagttggaacaagatttttttaataaggggtttggataacatttttttaattttggtttagcaatatttattttccttctgaattttctttag

SEQ ID NO: 771067 - DNA, 517 bp, Homo sapiens
ctttaaggcaagatttccagacatatgggtgattttctttttttttttttttgagaaggagtctcgctctgtcgcccaggctggagtgcagtggcacgatctcggctcactgcaagctccgcctcccaggttcatgccattctcctgcctctgcctcctgagtagctgggactacaggcacccgccaccacgcctggctaagttttgtgttttttgtagagacggggtttcaccgtgttagccaggatggtctccatctcttgaccttgtaatccgcccgcctcggcctcccaaagtgctaggattacaggcgtgagccactgcgcctggccgacatatggtgattttttaaaaattatgtgaaaatctgcartgaacacagagaaaaaggatgtgttataaaatctattcactgtaattttccacacattttatatcttaaaaatgaataaagttttctctgctcatattctcttcctattaaataaaaccttaccaccatttacaaagttcttca

SEQ ID NO: 771068 - DNA, 588 bp, Homo sapiens
cgttgatgtcaaaacatcaatttatgtcaaatataatttaacctaaagccgtttcctttattagaatgataatgtcatttatcatatgtcttttctttcactttccctgattttagttattaaaacaacaccccacttcaatgtgctcatttgtaaaatagcaatgccattactaacttgtgtctgttacagagagtatcctacaaagatggtctcaaagtactttgagatgaacagaatgttctataaatgggtattgaaaataatcaagacattcatggatccaaacaggccacagaaataccatagcaacaaatgaacaataattgctgcattatgggctctttccccagctgcactcatgcaatcaaagctctgctgcgtcttcagaggagcccaggtcagrtctggctgccatcacccatgaggaagacgtgcggagccagacaggtgcctggaggaaaggtgggtgtgtgctgtcctgccccatcctctctgtttccctcccacgtgtttgcagagacgtcctcagcatggaaccagggcccttgacagagacattgtcattctggacaccccacacccaag

SEQ ID NO: 771069 - DNA, 552 bp, Homo sapiens
ggaaggaaatgggactggaggatccaaaaggaagaagctgtcatccttgaaaatcagaagctgttagtgcccttgagctcagtccccgagcctgtgcttgctgcagttggttccagatccatggaagaggtactgcctcastctgggcagggactgctgaaagaggtgctgtctgctcaggctgctggctcccagctgcccctttccattgccagcttcgtcagtaactaccaccaagagtcagagccagcagcagaaagctttcctcttctcctgccttctaatatccacaagcacctttactttatttgtttattttttatggacagggttttgctctgtcctccaggttggactgtggtggcacaaaattagctcactgcagccttgaactcccaggctcaagtgatcttcctgcctcaacctcctgagtagctgggactgtaggcatgtaccaccacattcagctatttttgtatttttgtagagacagggtctttatattgttgcccaggctggtcttgaactcctgggctcaagtgattctcctgc

SEQ ID NO: 771070 - DNA, 629 bp, Homo sapiens
ttgagaagtttgcagatttcagatcccagagaagcttcctgacaaaacataagggctggctcccagcagggcacattcccaaagcaacatccatccaggaccgggaaggcctggctgtgttagaatgggactgggtgttgattgcattgtgtttcctttctctgcttgcttccaatccatgggctagaaaacgagggcagcccttgtggattctgattagaagcttcacaaatcaagttgctaaatttgcagaacattgtaagtcagaaagatgtgcgtctgtgtgtgtgtgtgtgtgtgtgtgwgagagagagagagagagagaaattttggattttgtgagtgtgtgcatgtgtgtatggtgagaaccacgtattcaaaccattccctatttcggcacctcatcctgccaattacaatctgcttggtggtgtgaaactgacagccggcagcagtgatggagacaggaggaacggtgaacaagggctttgtgcattctcagctttagagagaatgttcagtggggcggacaggcacgtaactggcaggtttaggaatcagtaaaaaccaagaactggaagtcctaatttatcgtctgtttcaatacaaggctacacacaggctattta

SEQ ID NO: 771071 - DNA, 616 bp, Homo sapiens
ttccatggaggtattaggttaaaatactgtttttagatatgtgacacatttccctgtattttagaaatctcttgggtatcttaagagaaatttaatccatctgattttgatccaaatataatttactcacaatgatggagaaatatttgatatccacggaaatctattgatgcacttaaagtttttctcyagggaaataagaaatcacattttttcaagggtgaatcataaacctacagtgtctaatttttctgcttatttaacaaaacctgagttaagtatcaaattgggcagttccagatcatttgtttttaagttttttagtcttttaaactatgcagaggaaattttattcaaagaggtttttttttccttattctgacagttttatctgctatcctgtttttttccctaaacagtgatttttgaagatttaaggtaataacacaattttgatgtctgtggattaatggcgtctgtattcacgatgtttcagacctgtcagagcttggaaatagcatttaaatgtattgcttaattttaattttaaaatactttctctgagaattagatcccagtcctaagtgagtactttgaatttcaaagaggggattta

SEQ ID NO: 771072 - DNA, 660 bp, Homo sapiens
cagcctagccaaaagagctagactctgtctcaaaaaaaaaaaaaagaaggagaagaaacaaaaatattttggtgtgtctgcatgttgtgatcatgtaattgacaattacaaaattccagctaacaagtaccattacaataatgtgaaaattactaaagcaatcatcaatatcattccaagaactacactgttcaggtattttcccataatttgtaataaaggaatttacttttcctaggataattaagaaaacattcatgtgggccaggcatggtgtctcactcctataatcccagcactttgggaggccaaggtcggagggtagcttgagcccagtagtttgaggctatagtgagctatgatggcaccactgcactccagcctgggtgacagagcaagacctcatctctaaaaaagaaaagaatgaacagaatattcacrtaatattctaaagactttctttggttttgtaaaatattaattaacatatacctaagaataacagtggccctttaaaaacagtttttccaaacctgactagttggtctaataagaaagagtataattaaaggaataacaaggtaaaatctttgaaattgggactgtcgcagaaaatcttggatgtgtggtgaccatgacaatcatttcgcatttttcact

SEQ ID NO: 771073 - DNA, 439 bp, Homo sapiens
ccaaaaagtactgcctaattttgagcactcaaaaaacttggcaagagtcattctaaagtctggctaaagtatgactcatacagataagtgctatataagaacatttattaggatggatctttcacttacatgatttcaattttgaatacttgacttggtaaacaattagccaagttaacattatttatgttagtcaatgaaagaaagtacagaatatagtcactgaactacttcccctcatttctctgaccttattaagtgtattgcaatgtcctttttttcctatatatttcctaagwgcattctggtaaagatagcattttcttttgctattaggtaacatctgctaaattacatgttcataaaagcatagaatcagaattttggaacctcaagacacattgagtggctcagctctatgcctcctgggagtactaca

SEQ ID NO: 771074 - DNA, 611 bp, Homo sapiens
gcacttactgctttctgtgtgggattatagttattccatgtatgtttctaatcttcttgcagagaaagaatctgaggccaagtccagatctgactgatcagtttcatctagtaggtgcctagtggctattttgttgatcagtgttgcaatgatggtgtctacaaacagtgctacctacaatttagtgtgtttcactaaaaatgtaacttaacacctggaggaatttaagtgcaaatgcaaatagaggtttttttgtgtgtgcgagacagagtctcgctctgtcgcccaggctggagagcagtagagcgatctcggctcactgcaacctccacctcccaggttcaaggaattctcctgcctcagcttcccgagtagctggcattacagacgtgcgtcamcacgcccagctaatttttgtatttttggtagagatggggcttcaccatgttggccaggctggtctcgaactcccgacctcaggtgatccgcccacctccacctcccaaagttctgggattataggcatgagtcactgcgcccggcctagagttctaataattgtgttgaaaataaatgccacttaagatcttaaaaacaccaatttttaggta

SEQ ID NO: 771075 - DNA, 527 bp, Homo sapiens
acctagtggagctgtgagaagagggccatcaccagaatggtagatccactgatggtttgcaccatgagcctggaaaagccgcagacactcaatgccagtctgtgtcaggagagaggctgtaccctgcaaagccacaggggtggagctgcccaagaccatggaaacccacctcttatatcagcatgacctggatgtgagacatggagtcaaagatcattttgragctttaagatatgactgccccactggatttcagacttgcatgggatctgtggcctctttgttttgcccaatttctcctatttgggacagctgtatttacccaatgcctgtacccccactgtatctaggaagtaactaacttgcttttgattttacaggctcataggcagaagggacttatcttgtctcagatgaggcattggactgtggacttttgagttaatactgaaataagttaagatttggtgggactattgggaaagaatgattggttttgaaatgtgaggatgtgagatttgggaggg

SEQ ID NO: 771076 - DNA, 578 bp, Homo sapiens
taaagaagacaatgtagtgttgacatcaagatacacaaatggattgatggaacaaaatagagagtcaagaaatagacccacacatatatggccaattttcttttttggcaaaggtgcatagacaattcaaaggagaaaggatcatttttttcaataattgatgctgaaataatgggatatccaaatgcaacaaacaaaccgaaactttaatctattccttgtagcacatgcacaaatgtactcacagtagattacagacctaatgctaaatctgattagaataaaacttctggaagaaaatataggagaaaatctgtgtgacattctgttatggcttaaatgtgtcacccagagttcatatgctggaaattgaatccccattgcaacagtgttgagaggmaagacttttattagggctctgccctagtgaatggattaatagcattatggtttgaatgagttagtttttgcaggagagggttcctgtaaaagaatgcattcagccctctttcttttgctcttgttctccctgcctttctgtcttccaccatgaaggtgccccccacctgattctagca

SEQ ID NO: 771077 - DNA, 590 bp, Homo sapiens
taatacctaaagatgacacttccaatccatatgaacaagaataatgcttcatacttgtataattatcttgtattttttcaaatttatttgaactataaaagaactattttagtagagagtggccagctgctgagtttaaaaaaatatatttcagggaaacattaagacatattaatttttagttatcgtacattttatatcataccttacaatactgtggagctgaagcagagaaaaattgagtatgtatagagtgaatctgrtgaataaagatttctgagcatattttcagttttattatagttcacgaagtgagcaagaaaaaattgtgtctgcatcaatgtagtgaaggagtttctcatctccaaagcctatctgtattgatatcagaaaagggtaggggtgcaaaatgacagcagctagcctgccctttcaccttcctaacagtgctggtggcagcaacgaagcttaatcaatgcaatgggagtgacattttgcagtcaaatcaaattaaatggaaatgaaaggaaaatctgaggtccaacctaaaggctgtctctcttaccactgaggtcatctccatggcaact

SEQ ID NO: 771078 - DNA, 590 bp, Homo sapiens
taatacctaaagatgacacttccaatccatatgaacaagaataatgcttcatacttgtataattatcttgtattttttcaaatttatttgaactataaaagaactattttagtagagagtggccagctgctgagtttaaaaaaatatatttcagggaaacattaagacatattaatttttagttatcgtacattttatatcataccttacaatactgtggagctgaagcagagaaaaattgagtatgtatagagtgaatctgatgaataaagatttctgagcatattttcagttttattatagttcaygaagtgagcaagaaaaaattgtgtctgcatcaatgtagtgaaggagtttctcatctccaaagcctatctgtattgatatcagaaaagggtaggggtgcaaaatgacagcagctagcctgccctttcaccttcctaacagtgctggtggcagcaacgaagcttaatcaatgcaatgggagtgacattttgcagtcaaatcaaattaaatggaaatgaaaggaaaatctgaggtccaacctaaaggctgtctctcttaccactgaggtcatctccatggcaact

SEQ ID NO: 771079 - DNA, 483 bp, Homo sapiens
gcaaacttactgtttttaaagcttatctattctttaccctcaaaccttttctccaaatctttataaataaaaatgcccacttttcagttactcaggccaaaatcctcaaatcatctttgattcttctccttctcacacactcagtcttcatcttgatcaaaaaatccagttgatggaatctttaaatgcactaagtcatggttttgaccacttctaaccacatgtactgccaccatgctgatctaatccaccatgatctcgtctggcttattgtaatagcctcccaccttgcctccctgtttccattccttgaccaaaacctgtgtcttctccmaactgcagccagagtgatccttttaaatgataacagttcttgcgatagtttgctgagaatgatggtttccagcttcatccatgtccctacaaaggacatgaactcatcattttttatggctgcatagtactccatggtgtatatgtgcc

SEQ ID NO: 771080 - DNA, 623 bp, Homo sapiens
caattttatgagacagcccttatctaagtgtggtctctggtccagcagcatcagtattatctggaaaattgttagaaatgcataatcacagaacccacaccaaacctgcacatttagaacctatggaggtcattaatctgttctagttaagccttaaaatgattttgatgtaccattgtggtaaggcaatgtaataaattattcamataaatgatttcattcattctcaaaatagtagggtaggttgatagaacaaaataaacaggtaagggtatgtagctgattatatatatatgtatatatatatatgcacatatataacattatatattaagttagttatataattagtgatagactagtgtcagagtgagattcaaaattctagacacaagttatattggttttctagcacatacactcaaactctaaaaccatttctgtaacttcaaagaaccatttttaatgtcaaacaaaaaaagcagcttttttataatgtattaatctctttataacatgttttaaaaattaatatattacagagaatattccaagtaattaaaaatcactgctatcttttaagtgttcatgaggaaaataaaaatgcccttctaattgctgtc

SEQ ID NO: 771081 - DNA, 548 bp, Homo sapiens
cgatcttgaaattcttctttagaaggactattttacgtgggcaactctatatatagttgcgacatttattcctttttttttttaaacaaagaaaagtttttgcaatactttatcacaaaagttaaccgtactgacattctacctgttttaaaatacttatttaaaactctatatcctctcatatttgtgacaaatatatagcatagtagttaaaagcccaaaagataaagctaaactatctatgctcatagtcttttctacattcagtagctctgtgtctttaggaaacttacctaacttccctgaacctcagtttctttgtatgtaaaaaggaaataataacaatacctacctcatarggttatcatgaagtttcaacgaattaatacatatgggatatagcacaatgcctacctcctgggaggtagtcaataaaggttagttattactttagttagtaccttttagacctagaaaacttactcaatctttttaagtttcatatttctcatatattataatgtaaatatttactcttttttccttaa

SEQ ID NO: 771082 - DNA, 558 bp, Homo sapiens
atatatatatatatttttttttttttttttgagacggagtcttgctccgttgcccaggctggagtgcagtggcacgatctcggctcactgtaagctctgcctcctaggttcacgccgttctcctgcctcagcctcccaagtagctgggactataggcacttgccaccacacccggctaatacttcgtatttttagtagagatggggtttcaccttgttagccaggatggkctcaatctcctgacctcgttatccacctgccttggcctcccaaagtgctgggattacaggcgtgagccaccgtgcccggcctcctttccaatatttataccatcttcttcttacctcattgcatcttttgccagggcttccaacatgacatggaaaaacagaggggacagtgtcctgcttgtcttgaacctgactttgatagaattacttctaatgaatttctattagatataatatttctaggtaattggagtgattataaagttccaaaagtttccttctattctagattgctaaggattttcaccagatattagatgttattaga

SEQ ID NO: 771083 - DNA, 581 bp, Homo sapiens
tgatatacagaattcaaacctgaatatgtgagtgcaggtcaagggaaggaccctcaggttggtatcctcagcaaggactttagagttgggtgtgtaagaagcactcaacctccttgtatagtgccacggacagagcagccagggcagctggaaagcaacacccagctggggtgggtggaggaagaatgcatgtccccatggaacacgataaagcaaagttcaaggctcatgatgactaayaggttcatctaggaggatgggtgaccaagcaacctttgtattatttcctacaggtggaaatgagaggtgccatgttcattctatcctaaagtatctcttagaggacattgctgtggagaaagtgtagtgccttggagtttggctgggtcagattccagccctgctctctattgcagtgtcgactcaagcatagtaactaaggtttcatgagcctcattacgctcatctataaaatggaaacatgattacacttcagggttgtcataggagggaaggtcataggagttacacagatgaggggactcaacagagcaagtgttccacctctcccaggctctgag

SEQ ID NO: 771084 - DNA, 581 bp, Homo sapiens
tgatatacagaattcaaacctgaatatgtgagtgcaggtcaagggaaggaccctcaggttggtatcctcagcaaggactttagagttgggtgtgtaagaagcactcaacctccttgtatagtgccacggacagagcagccagggcagctggaaagcaacacccagctggggtgggtggaggaagaatgcatgtccccatggaacacgataaagcaaagttcaaggctcatgatgactaacaggttcatctaggaggatgkgtgaccaagcaacctttgtattatttcctacaggtggaaatgagaggtgccatgttcattctatcctaaagtatctcttagaggacattgctgtggagaaagtgtagtgccttggagtttggctgggtcagattccagccctgctctctattgcagtgtcgactcaagcatagtaactaaggtttcatgagcctcattacgctcatctataaaatggaaacatgattacacttcagggttgtcataggagggaaggtcataggagttacacagatgaggggactcaacagagcaagtgttccacctctcccaggctctgag

SEQ ID NO: 771085 - DNA, 588 bp, Homo sapiens
tgcaatcaaaaaagagcctgcatagcctaagcaagactaagcaaaaagaacaaatctggaggcaacctattacctgattccaaactatactgtaaggccatagtcacccaaacagcatggtagtggtataaaaataggcacatagaccaatggaacagaatagagaaccaagaaataaaaccaaatacttgcagacaactgatctttgacaaagcaaacaaaaacttaaagcagaaaaagaacaccctattcaacaaatggtactgggataattggcaagccacatgtagagaatgaaactggatcctcatctctcatcttatacaaaaatcaactcaagatggaccaaagacttaaatctaaggcttgaaacsaaaaagattttagaagataacgttggaaaaacccttctagacattggcttaggcaaagacttcatgaccaagaaccccaaagcaaatgcaacaaaaacaaagatatatgggacttaaacttaaaaagcttctgcacagcaaaagaaacaatcagcacagttagcagacaacccgcagagtgggagaaaatcttcacaatctatacatccaacag

SEQ ID NO: 771086 - DNA, 522 bp, Homo sapiens
tggaattggagaccattgattctaagtgaactacctcaggaatggaaaaccgaatattgtatgttctcactcagaagtgggagctaagctatgaagatgcaaagacataggaataatacaatggactttggggatttggggagaaagagtggaagagggggtgagggataaaagactatacattgagtacaatgtayactggttgggtgatgggtgcaccgaaatctcagaaattaccactattcatgcaaccaaacaccacttgttccccaaaaacctattgaaatagaaaagagacagaaatctgcagattaaaatattgcactgagtatccagcacaatgaattttttacaaacccacattaacacacatcattgtgaaaattcaaattcaggggaaaaaaaatagtatatataaaatattgtgaataatatcagccttctttacaggaactcttgaagcttaaagacaaagaagtaatgtcttcaagattcggagaaataatcggtttccacatagaa

SEQ ID NO: 771087 - DNA, 611 bp, Homo sapiens; identical to SEQ ID NO: 739431

SEQ ID NO: 771088 - DNA, 611 bp, Homo sapiens; identical to SEQ ID NO: 739432

SEQ ID NO: 771089 - DNA, 511 bp, Homo sapiens
ctctctggaagtgtctgtcttatgcagtttttgataagggatgaaatatgccctggtctcccacagtgcccccaggcttgctaggattcggaaattccagccaggcaaaattctagtcagaccggttgtctgctctcaaaccctgtttcctgttaagatgtttatcaatgacaatgtgtgcccagcaggacatggaccttcatcagtaattctagttttgccctggccttgtgatctcattctgcctctctgcccttgtgatattttattgcctttgaagcaagtgatctctgtgacccactccctattcatacacccctccccttttgaaacccytaataaaaacttgctggttttgtggttcaaggggcgtcatggaacctgctgatatgtgatgtcacccccggagtcccagctgtaaaatttctctcttttgtactctactctttatttctcagactgaccgacacttagggaaaatagaaaagaaactacattgaaatattggggg

SEQ ID NO: 771090 - DNA, 600 bp, Homo sapiens
aaatcacatttattgatttgtatatgttgaaccaaccttgcaacccaggaataaagcctacttgattatgatgtattaattttttgatgtgctgctggatttggtttgctaatattttgttgaggaattttgcatctatgttcatcagggrcgtcagcctaaagttttcttttttcattaccagattcaggtatcaggctaattctggcttcatagattgagttagagaggagctcctcttccttgatattttggaatagtttcagtatgattggtatcagttatttgcacatctggtaggatttggctgtgaatgtacctggtcctgggttttattttggttggtagtatctttattactgattcaatttcagaactagatattggtctattcaggggttcattctcttcctgattcattcctgggaaattgtgtgcttccaggaatttatccattttctctagattttctaatgtgcatgcatagagctgtttataatagtttctgatgatctttgtatttctgtggggtcaactgtaatatctcctttatcatttctgattgcacgtatttggatcctctcctttttcttggttaat

SEQ ID NO: 771091 - DNA, 600 bp, Homo sapiens
aaatcacatttattgatttgtatatgttgaaccaaccttgcaacccaggaataaagcctacttgattatgatgtattaattttttgatgtgctgctggatttggtttgctaatattttgttgaggaattttgcatctatgttcatcagggacrtcagcctaaagttttcttttttcattaccagattcaggtatcaggctaattctggcttcatagattgagttagagaggagctcctcttccttgatattttggaatagtttcagtatgattggtatcagttatttgcacatctggtaggatttggctgtgaatgtacctggtcctgggttttattttggttggtagtatctttattactgattcaatttcagaactagatattggtctattcaggggttcattctcttcctgattcattcctgggaaattgtgtgcttccaggaatttatccattttctctagattttctaatgtgcatgcatagagctgtttataatagtttctgatgatctttgtatttctgtggggtcaactgtaatatctcctttatcatttctgattgcacgtatttggatcctctcctttttcttggttaat

SEQ ID NO: 771092 - DNA, 600 bp, Homo sapiens
aaatcacatttattgatttgtatatgttgaaccaaccttgcaacccaggaataaagcctacttgattatgatgtattaattttttgatgtgctgctggatttggtttgctaatattttgttgaggaattttgcatctatgttcatcagggacgtcagcctaaagttttcttttttcattaccagattcaggtatcaggctaattctggcttcatagattgagttagagaggagctcctcttccttgatattttggaatagtttcagtatgattggtatcagttatttgcacatctggtaggatttggctgtgaatgtacctggtcctgggttttattttggttggtagwatctttattactgattcaatttcagaactagatattggtctattcaggggttcattctcttcctgattcattcctgggaaattgtgtgcttccaggaatttatccattttctctagattttctaatgtgcatgcatagagctgtttataatagtttctgatgatctttgtatttctgtggggtcaactgtaatatctcctttatcatttctgattgcacgtatttggatcctctcctttttcttggttaat

SEQ ID NO: 771093 - DNA, 600 bp, Homo sapiens
aaatcacatttattgatttgtatatgttgaaccaaccttgcaacccaggaataaagcctacttgattatgatgtattaattttttgatgtgctgctggatttggtttgctaatattttgttgaggaattttgcatctatgttcatcagggacgtcagcctaaagttttcttttttcattaccagattcaggtatcaggctaattctggcttcatagattgagttagagaggagctcctcttccttgatattttggaatagtttcagtatgattggtatcagttatttgcacatctggtaggatttggctgtgaatgtacctggtcctgggttttattttggttggtagtatctttattrctgattcaatttcagaactagatattggtctattcaggggttcattctcttcctgattcattcctgggaaattgtgtgcttccaggaatttatccattttctctagattttctaatgtgcatgcatagagctgtttataatagtttctgatgatctttgtatttctgtggggtcaactgtaatatctcctttatcatttctgattgcacgtatttggatcctctcctttttcttggttaat

SEQ ID NO: 771094 - DNA, 583 bp, Homo sapiens
atagtataaaaacagtcttttaagtcaataatgactataggccaatctcgaggaatcaccatgggggaagggagcccctgctgaagggacccccataagtttcaaattagcactgatagcacgtaagtcatgcaaaagtctccatttaccagacttcttgggaatgacaaaaatgggtgaattccgagggctgtttgatggttgtatatggccagcttttaattgttcctcaactaattcatgggcttgttgtaatgtctctccctttaaaggctactgctctatccaaataggattttgagagagccacttcgggggtaggggaggaataacagtggctattattagaaagaggtttgctgttcacataatccattaaattctgccatccagaggaggtattgactgctctttaaagttgttttagttatyactgaccagtcccatagggttatacagaagttgtctgctatggtctcaattaatcctttcatacatgggctagtggcttcattttctctaatagttttccttatctccttataggtgttgaaaatgatggctttatatacctgattgcctt

SEQ ID NO: 771095 - DNA, 630 bp, Homo sapiens
caaaggaaaatgagtaattatattaaaaagacacctgcacacaaatgttcatggaagcacaatttatgtttgcaaaaatatgaaaccaagctaaatgcccatcaacaaatgagtggataaataaaatgtggtatatatattcaccatggagtactactaagccatgaaaagactgcaataatgtcttttgcagcaactttgttggagctggagggcattattctaagtgacgtaaataaggaatggaaaatcaaatastgtatgttctcacctataattgggagctaagctgtgggtacaccaaggcatacagaatggtataatggacattggagattcagagggggtcaggatgggagggaagtgagggataaaaaaactacatattggatacaatgtacactatttaggtgatgggtgcaataaaatttcagacttcacactatacaattaatccatgaaaccaaaaatcgcttgtactccaaaactattaataacatatatatgatatgttttatgtgtgtgtgtgtgtatacatatagatatatgtataaaaaatgtcttcaagttcctgataaatttactcagggtcatctcacttagttaagtgtttgctgatacacctcattc

SEQ ID NO: 771096 - DNA, 519 bp, Homo sapiens
aaaggattccctatttaataaatggtgttgggaaaactggctagcaatatgcagaaaattgaaactggaccccttccttacaccatatacaaaaattaactcaagatggattaaagacttaaacataagacctaacaccataaaaaccctagaagaaaacctaggcaataccattcaggacataggcatgggaaaagacttcatgactaaaacaccaaaagcaatggcaacaaagccaamatagacaaatgggatctaattaaactaaagagcttctgcaaagcaaaggaaactatcatcagagtgaaaaggcaacctacagaatgggagaacatttttgcaatctatccatctgacaaatgtctaatatccagaatctacaaagaacttaaacaaatttacaagaaaaaagcaaacaaccccaccaaaaagtgagcaaaggatataaatagatacttctcaaaagaagacaattgtgcagccaacaaacatattaaataaagctcatcatcactggtc

SEQ ID NO: 771097 - DNA, 512 bp, Homo sapiens
caaacagaaatgagcttcggggtaagcctaaatgttttggagtctctttgccacagcagcttagcttaacacactttctagtataatcttgggttttttcattggccccagtcttttacattttcctgtgcacttcctctgaacattttactgctttttctgctayctacttctgggaaattttcatgtgtttctgccaccattaagtcatatccttcctaattctcattgctgttttcgtaaattcttgtcctgtttttccttctgattttcatccacttctccaagttcttcaaggaacactcctataggcaggaagcgttagctcttcagaaatattggcactaaaaatatgtttttttaaaaaatctccagggccactcctagggtgtgcagtgccctgcaaagatagtttttgtagggtacttgcctatgtaaacaacacaattttagaattcattccaaaacttacaggtctgtgtgaggtatagtgattaatggatagagaagag

SEQ ID NO: 771098 - DNA, 550 bp, Homo sapiens
aacagtgtgactacacaggtattttagtctcaggccagcgattggagtgcttgctctggagtttggtaggagcctccagagccagaattgagcaggaaatgtagaaagtgccccaggagtaggcactggaattgtaccctccccttgccacaggtstagggcaagagaagaactactgtagccatgatttctcctgggtgagaagaaaccaacttggtgacctggaaactctgtgtgtgtgtgtgtgtgtgtgtgtgtgtgtgtgtgtgtgtgtgtgtgtgtgtgtgtggtgtgtgtgtgtgtttgctgggtgccccagcctgctcccctgagatgaaggtacagaggggtcctctctactccatgcccaggcatatctccagacattcagagaacatgctcacctggattaacagtctgatctgtcccatcgttcttacgcagagaccacagtgcagcaaagcactctctgttttatgcccaggcagatctccaggcattcagagcactcactcacccatatcaacagcctgagtgtccaccatttctg

SEQ ID NO: 771099 - DNA, 473 bp, Homo sapiens
tgtttgaagaagtggttatatatatagatatagatatccttattataaatattatatgccttgcaagaaaagtcatcagcaaacaatttaaaaacatgtatgtaagtgggccaggtgcagtggcgcatgcctgtaatcccagcactttgggaggccaaggctggagaattgcttgaggccaggagttcaagaccagcctgggaaacatggagagacccagtctcyataaaaatgaaattaaaaaaattagctgtttatggtggtgtgcacctgtagtcctagctgctcgagaggctgaggcaaaaaggtcttctgagcccgggaagttgaggctgcaatgaactgtgattgtaccgctgcactccagcctgagtgacagagtaagactctgtctcaaaaataaataaataaaattttaaaagttaaatttgtttccaaaaaacccatgtaagcataatcttttgaattcagag

SEQ ID NO: 771100 - DNA, 627 bp, Homo sapiens
cgagaccatcctggctaacaaggtgaaaccccgtctctactaacaatacaaaaaattagccgggcacggtggcgggcgcctgtagtcccagctacttgggaggctgaggcaggagaatggcgtgaacccgggaagcggagcttgcagtgagccgagattgcgccactgcagtccgcagtccggcctgggcgacagagcgagactccgtctcaaaaaaaaaaaaaaaaaaamagaacgggttagctgcttttaatcaatgcaattagatcaccaaaaaaaggtgggaaaggagctcataaattaaaataaaactacctcccccctgaaaaaaataaaataaaataaaataaaataaaataaataaaaacacccacgcccctggagctaacctgacaactaccttcattcacagtgctttacacttaaaccaggcttggggaaatgaataaaagcagagaggggccactgcttttaaacgtttcccaacagtccagacgatacttctagcctctgctcatactttttgacagtgaatcagaacaaaacatagatttgctaatgtgcatttaatcaccaaaggactgaagaagtctgggcttttattctgtagtgtttctaagaccttgt

SEQ ID NO: 771101 - DNA, 466 bp, Homo sapiens
acatttaaaaaaaaatcaaaggacaaaaaaaaccaaaaaaacccaccctgatcactgatatgctgatactcacttagcatgacgaatatctggcagagacctctctagagcaatattgttgctgacgaaaatattaaaaccattttccctgtaagctgagtcatcatggtcctcttcagtaagggggtaaggtttcccatgttcacctttccctagcaggagaaaacaaaatgagattatcatctctataaaagccattttatcttctagaacagataggaagactggaatgtgtatyatcgcctattgctgtgctctgcagaaggagctagtactaagattttattatattattttaattgcctttaagtaaatgaaatatactcaatataaaaagcaaaccacacagaagtagaaagtgtaatctcacattgcagagagaaccactgccaagatttttagtgta

SEQ ID NO: 771102 - DNA, 581 bp, Homo sapiens
atgctgatactcacttagcatgacgaatatctggcagagacctctctagagcaatattgttgctgacgaaaatattaaaaccattttccctgtaagctgagtcatcatggtcctcttcagtaagggggtaaggtttcccatgttcacctttccctagcaggagaaaacaaaatgagattatcatctctataaaagccattttatcttctagaacagataggaagactggaatgtgtattatcgcctattgctgtgctctgcagaaggagctagtactaagattttattatattattttaattgcctttaagtaaatgaaatatactcaatataaaaagcaaaccacacagaagtagaaagtgtaatctcacattgcagagagaaccactgccaagatttttagtgtaygtttattaatacttgtatgcagattttaatacacacactgatttgtaacttgatttttccagaataattgtatactttttatttacttccaatagttgatgttatttgattgtattccaatttacaccattccactgaaaatatactattatttctaatttttccattacaat

SEQ ID NO: 771103 - DNA, 617 bp, Homo sapiens
attatttcagctctgcgtttaaaacatattcagaattcaactactccctcctccacctcatagctaccactctggtaaaagtcaccatcatctctcacctagattattgtaacagcttcccaggtagcatcactgcttcttttcctgtaccacatttagtttattataaactattataatatgttataagtttattcagattatgtcatttcattgctcaaaaatttctagttgcttcctatctacttagaggaaaaaacaaattcctcactctcacctacaaaaccctgcatgactaggctctcttcactcttgttttatcttccccatctcctttcctcttaaaaaaaaaaaagttttcctttttaaacaatgctccaggcaaaatagcttccctgatgttaccttgaatgctcatgctcctatctcagctcatttgaacttactttgtcctctgcctgcaataattwcaatcatttgtatatctatatggctaactgcatcactttcttgaagtatttagttgaaagtcacctttcctgtagttctcttctgaccatctatgagaattttaaactccatgcctacaacgtagcagcttaaaacagaaatgtatt

SEQ ID NO: 771104 - DNA, 613 bp, Homo sapiens
attgttgcttcagtcatgaaaaaagtcctgaaaaactgtggcatgaggaccaagagaacctaaaattaaaagggcagctaaaatgactttctatgtgacggggtaccagtgtgtgttttaatatacaggcaattagaagtcaagaaaagtatttaaataaattacatttgtgttttttaagaaagtctgccagctgtgtgttctggaataagtgagttaactgatggccataggggtgaggattatttagaaacactgctgtattcaagcagttcttagaacaagtgaatatttccacatgatattatgtgtttaaaaagggcaacaacaaaaagcagttagatctsattccactatttgtattatatctcatatccactatttttcaagataccaggttagcattatatgctgtgtatacataaatataaataattatacttatatacataaaatcatatatatacatgtgtatatctatgtatacacatgtatatatatacatacatatacatatatacacatatatctctatatatagatatatcgctaagtatctgtatataaagatatatctctgtggatatatatggatatatagagatatatctat

SEQ ID NO: 771105 - DNA, 610 bp, Homo sapiens
aaagcttaaaaagaatagaaaaaactttatagaatttattgtatatatacatatattctataagtatatacaaatatacttttgtatagctgtacaatgtgtttgtgttttaagctgttgagtccaaaaattaaaaaaaaaataagtttataaagtaaaaaggtatagtgggctaagcttaagctattattgaagagagtattgtttaaataacttcagtgtagcttaagtgtagagtgcgtataaagtctacaatagtgttcaggaatttcccagtccttcacattcactcaccactgctcactgactcacccacagcagcctccagtcctgtaagctccattcatggtcagtgctctaaaaaggtgttccatttataaaaatcttttatattrtattttattgcatcttttctatgtttagatatgtttacatatacaattcccattgtgttaccattgcttatagttcagtacagtaacctgcagtacaggtttgtaacctaggatcaataggctataaacccatatagcctagatgtgcagtaggctatatttctaggtgtgtgtaaatataccctatcatgttcacacaaggaagaaatggccta

SEQ ID NO: 771106 - DNA, 602 bp, Homo sapiens
tcctatttacttcttaatgccacataataaatattacttgattttctaatattagacaatatctagtatcttccaaatacaaaagagaaacatatatctctcttatattagtgtcccttttcccccaaaacatatggtacctttgttctccttgtaatgttaggtaaaaatttaccataaaattattattcagtattaacattattttactaataagtaatgttcaatgcagacctatattggataagataattaaaatttccttcttgcccatcatttttttctgaagttactaattacctcatatttttttaaattcaggggatacatgtgcasgtttgttacatggctatactgcaggttgctgctgaggtttgggcttctaaagattccatcacccgagtagcaaacatagtacccaatgggtagtttttcaactttttccccctccttccctaccctcttttggagtttacagtgtctattgatcctgtctttgtgcctggtatacccaatgtttagctcccacttataagtgataacatgtagtatttggctctctgtttttgcatgaattcacttaaggtaatggccaccagatg

SEQ ID NO: 771107 - DNA, 602 bp, Homo sapiens
tcctatttacttcttaatgccacataataaatattacttgattttctaatattagacaatatctagtatcttccaaatacaaaagagaaacatatatctctcttatattagtgtcccttttcccccaaaacatatggtacctttgttctccttgtaatgttaggtaaaaatttaccataaaattattattcagtattaacattattttactaataagtaatgttcaatgcagacctatattggataagataattaaaatttccttcttgcccatcatttttttctgaagttactaattacctcatatttttttaaattcaggggatacatgtgcacgtttgttacatggctatactgcaggttgctgctgaggtttgggcttctaaagattccatcacccgagtagcaaacatagtacccartgggtagtttttcaactttttccccctccttccctaccctcttttggagtttacagtgtctattgatcctgtctttgtgcctggtatacccaatgtttagctcccacttataagtgataacatgtagtatttggctctctgtttttgcatgaattcacttaaggtaatggccaccagatg

SEQ ID NO: 771108 - DNA, 623 bp, Homo sapiens
tttagtctcagctactagggaagctgaggcaggaggataacctgagcctgggaggttgcagttgcagtgagtcctgatggtgcaactgcactccagcctagatgacacggtgagaccctgtctcaaaaaaaaaaaaaaaaaaaaaaaaaaagtgatggttcttgttttcccatttaaatgtcttttattttctaaatttttattaattggtctggcaagaatgtccaataccatgttgaataaaactgtcaagagatggcattcctgtatttttccaaatctttgaggaaaggctttcaaatttttaccattgaatatactgttaactgkggccttctcatatatggtctttattatgtgtaggtaaagaggttttttaaaaattattacgatgaaaggatgttcaattttttaagtgcctttctgcatctaatgaaataatcatataatttttgtctttcattctggcaatgtgatatatcagatttattgatttgcacatggtgaatcatccttgcatctcatggaaaaatctcacttgatcatggtaaatgatacttttaatgtatcattgaatttggtttgctagtgttttgttgaggatttgtgcacctatgctcacc

SEQ ID NO: 771109 - DNA, 656 bp, Homo sapiens
ataattatggtatgtgtatatatattggttataaaaatatattacataattatatgttatatataatatatacttaatatttaatttaatatataattatatgttgtgtgtgtatatatatacacacacaagtaaaataagtaaatgaatgaatgaatgtcagccaggccctgtgataagtagactgtgcagaaggcaagctgccctgtttgcctggcaacccacctcacatcctcccctaaggactgcaacactcacagatgacccaaagcagccgagaagcagaaggtctcacactatttctcagtgggtcggcactttgtttggcatccccatcagtaggcaattcttccagaaaacaaaatgcactagacccacaagatacactggagcatctcagaagctaagctcctctgcaaagagaggatgagtcacaagaaggctttcctctctctttcgtactatgccatcttaagcaagaaccctcttctctgagcttacytatggtacagtgcaaatacctaccgtgcaagactactgtattcttgtgcaggtaaaaaatgtatgatacctcaaacacttgtaatggtgttcggtgcaaagcagaccctcaacaatggtagctgtcgttattttcatattacctttatttcaca

SEQ ID NO: 771110 - DNA, 645 bp, Homo sapiens
ctatcccttgtaacaatagctgtggccaaaaattccgtgtcaaagataggggtacagtaatctgactttattttttgagttcccattttactaaggtacttgattttagtaaatttggatttccttctttttcattggttatatctaagtttgggggggttatataaagccaacaccttatgagggggtccccctggttcttgtgtcaacattcatacaggtgtcccccaggctgcacacagctgccccaacggctgagaggatcccacacttccatgtgttgaggcacgccaagagaaccctaataaagtgagtcaaatctgggaagctgtaacttcaactttaggccaatccaaatattttccccwaaccaaacattaagtgttctatccaagtctaataaattcagtaagtgaaagactctacctaagaagggaaaaattatttcatacattctgtaactagttattatttcccttatccaagtgtttttcccagatctttttgtgccttttagctcacttttattcaactcataattttctttttttacttttccgtgattctaaattattctggagtgtaattaatgtatatttagcacgtgtttgtctttaagtcacactggtatgtatgccactttcc

SEQ ID NO: 771111 - DNA, 612 bp, Homo sapiens
tgcacacctgtagtcccgactactcgggaggctgaggcaggagaattgcttgaacctgggaggtggaagttgcaataagccgagatcacaccattgcactccagcctggatgacagagcaaggctctgtctcaaaaaacaaataaataggccgggcgcggtggctcacgcctgtaatcccagcactctgggaggccgaggtgggtggatcaagatgtcaggagatggagactatcctggctaacacggtgaaaccccgcctctactaaaaatacaaaaaattagccaggcgccgtggcaggcacctgtagtcccagctactcgggaggctgggcaggagaatggygtgaaccctggaagcggaacttgcagtgagccgagatcttgccactgcactctgtctgcctgggcgacagagcgaaactctgtctcaaaacaaaaaaaaacaaaaacaaaataaataaacaaacaaataaataaataaataaagagtgttaggagccttctctcctgtaagctgtgaacaactaagcttgtttaggtcctgaaatgtcactgtcattgtcagcatgataaatgctttgtgctgtaataatacagagaaacaggatgt

SEQ ID NO: 771112 - DNA, 612 bp, Homo sapiens
tgcacacctgtagtcccgactactcgggaggctgaggcaggagaattgcttgaacctgggaggtggaagttgcaataagccgagatcacaccattgcactccagcctggatgacagagcaaggctctgtctcaaaaaacaaataaataggccgggcgcggtggctcacgcctgtaatcccagcactctgggaggccgaggtgggtggatcaagatgtcaggagatggagactatcctggctaacacggtgaaaccccgcctctactaaaaatacaaaaaattagccaggcgccgtggcaggcacctgtagtcccagctactcgggaggctgggcaggagaatggcgtgaaccckggaagcggaacttgcagtgagccgagatcttgccactgcactctgtctgcctgggcgacagagcgaaactctgtctcaaaacaaaaaaaaacaaaaacaaaataaataaacaaacaaataaataaataaataaagagtgttaggagccttctctcctgtaagctgtgaacaactaagcttgtttaggtcctgaaatgtcactgtcattgtcagcatgataaatgctttgtgctgtaataatacagagaaacaggatgt

SEQ ID NO: 771113 - DNA, 614 bp, Homo sapiens
agccgttccatcatttgacaaatatctactactatgtgtcaggccctattccaagtgccagggaatcaagaatgaagtagtcttaagagctgctcctgccacctctggttagacttagtactggttattttagcccttttactgatattttcaatttcttccattatatttaaaaggttaaagtctgtttatatacaaacaagctatatatttttgcttctaatagttattaccaatcatgttggtatattcttttattatttctaattttttttcagttgacaatcttgttcttttttctccaggttggcaatcttaccgtctacaattttgataaatttagcacttttataacttacatttccaaaatttgtgttggcttgtacctctagagtggtattaaagaattacagtcatgatyattctttccttgtgtgtgtttatgtctgaatacacacacaagcacacataggcatacacaaaatcatgttaagcaatatccatctattcctatgaagtaagagttaaaatcagagacatgttgaattttatcaaatgcattttagacatttttagcacttatgaagttccttgtatgattttttatttctttt

SEQ ID NO: 771114 - DNA, 644 bp, Homo sapiens; identical to SEQ ID NO: 734524

SEQ ID NO: 771115 - DNA, 636 bp, Homo sapiens
tttgcttggtaaatcacatctcagctggaagcatggctctccttattgaaaggaaaagaaagaatagagacaggaaacggagcccacatgagattgctccggccccaccagtgctgccagtgcttctcctgggcttcctttctcccagttctttttctccctgccttcctctctggcttccttgtccctttcttgtgtctgtgtttatatcccttctttgttgtargctaggctggcagctccagaaggctgagaacagcccacacacacagttacggagtgagtaggcttttccagcagagccacattctttaagacaaagacccgccagaaaagctgctgggcctgatcaggagctaagagacttggggacaagctgacctaagggagtagtctaggagttttgtttcgttttttaaaaacatactagaatctagcgtattctaaaattaaaataatgatacacatttaaaactctgcatgttgtgtaatgtcttgattatggctgcttggttttagatatttttcttttgagagtctgattccacctctgtcattagacagtgtgatcttgtacataattaaccacaatggatatcagtttcttcatctttaatatgaagggtttatgtgaaa

SEQ ID NO: 771116 - DNA, 636 bp, Homo sapiens
tttgcttggtaaatcacatctcagctggaagcatggctctccttattgaaaggaaaagaaagaatagagacaggaaacggagcccacatgagattgctccggccccaccagtgctgccagtgcttctcctgggcttcctttctcccagttctttttctccctgccttcctctctggcttccttgtccctttcttgtgtctgtgtttatatcccttctttgttgtaggctaggctggcagctccagaaggctgagaacagcccacacacacagttacggagtgagtaggcttttccagcagagccacattctttaagacaaagacccgccagaaaagctgctgggcctgatcaggagctaagagacttggggacaagctgacctaagggagtagtctargagttttgtttcgttttttaaaaacatactagaatctagcgtattctaaaattaaaataatgatacacatttaaaactctgcatgttgtgtaatgtcttgattatggctgcttggttttagatatttttcttttgagagtctgattccacctctgtcattagacagtgtgatcttgtacataattaaccacaatggatatcagtttcttcatctttaatatgaagggtttatgtgaaa

SEQ ID NO: 771117 - DNA, 615 bp, Homo sapiens
ttgtgctagtaaatactagatcttattcattctgttttttgtacatattaagcatccccactccccaccaccctcatatccttctaagcctctggtaaccatccttctactctctatctccatgagttcaattgttttaatttttttgcccccacaaatagctggaaatatgtggagtttgttatttctatgcctggcttagaaaggtctctgtcttccaggcatttgaactagggagaccagsacctgcccagggacctgagccaactccgtgagcctgaacattttggtgagacaccaatgcagagcctgccgtccctggcatcacattcctcaggcatggataacagtgggaagggcaggtgaaaatgggaggtgtccggtagctacttgaacttatctgcaaggtggttgttctctcaaaagatcattcattttgccttcagacctcacctctacctggaaacccttcacttccattcgagaaaagtagactcattcatccattcattgatgcatttgaatatttggtgggcaactgctttatgctagacaaatgcaccagtgaacaagataaataaaaatccctcccttgtgggattctactggggagac

SEQ ID NO: 771118 - DNA, 615 bp, Homo sapiens
ttgtgctagtaaatactagatcttattcattctgttttttgtacatattaagcatccccactccccaccaccctcatatccttctaagcctctggtaaccatccttctactctctatctccatgagttcaattgttttaatttttttgcccccacaaatagctggaaatatgtggagtttgttatttctatgcctggcttagaaaggtctctgtcttccaggcatttgaactagggagaccaggacctgcccagggacctgagccaactccgtgagcctgaacattttggtgagacaccaatgcagagcctgcygtccctggcatcacattcctcaggcatggataacagtgggaagggcaggtgaaaatgggaggtgtccggtagctacttgaacttatctgcaaggtggttgttctctcaaaagatcattcattttgccttcagacctcacctctacctggaaacccttcacttccattcgagaaaagtagactcattcatccattcattgatgcatttgaatatttggtgggcaactgctttatgctagacaaatgcaccagtgaacaagataaataaaaatccctcccttgtgggattctactggggagac

SEQ ID NO: 771119 - DNA, 636 bp, Homo sapiens
tctgttcaatacctcagccaaaggatttagaggttaatttgagaaacacaacactgtgggaggtggcaataggtcatgagcctgcaaatgtacacgaggaaagcaagccttgcggtgtctcttttctcctctcccctttaccctctgcccctacttctgccctctctcttctactgtcttccttttcccttctcttcactcccctgtcccctctcccctctggtgagttcatttcgttacccattggaaaaagcctaatcaaatgtgcctttgttagcagtttacaaagcgaatgctgaatgtggtttgtgtgccttgaatttgtaatggaattagagggcagccagaggactgtgaatctccttatgggtggaaaccattctgtttagtaaacttgaagcttttgtcagttgaaacctctsagaaaataaagctgaagtgggtgaggccagtgttctttgcccatactttattcactgtttggatcacctgtttcagctctccaggcagtgacttcttatataattgtttttcatagggcagtccagatgaaaagagtaccaatgaatctgcctccagctgaataaaccatggagaggaaaaacccatccagagagagccccagaagactctctg

SEQ ID NO: 771120 - DNA, 657 bp, Homo sapiens
ggaaggatacaactgcaaagagctgttgcagaaccctcagcctagccgagtgtcatggtggtgtatgttccctgaacacacaccaacaggcgaacagctttgctgcaggtgctgggtgaatggagctgtggtgaatcctcagcacattctagaacatgggctgcctacactccatggggcaggcaccacacttgccttggtcactgtcatatccttgatgcgtagcaggggctaggcacacagtaggtgctcaatgaatattgcctgaatgatgcagatttagcgctcacatgcttactccacatctcttattcccatgctggacccaggactgcactttgcacatygtggggctagaaaacagatgagaccactctctcttcgaggagttcccattctggcagaggtttctgggagtgctcagaggagggagagagcacattctgctgctaggtctggggcctttccatgatacggggcctggaaagatggatgagatttcagcaggcaaagagggacagggagggctttccagggacagagaacaggcctgggccttggggtataagggatatcacaaagaggcagaggaggttaaggctgagagtagggacccaagcagagagggctctgaatgccaagctaagggacctggag

SEQ ID NO: 771121 - DNA, 561 bp, Homo sapiens
atccatctggtgttgatttttgtataaagtgagagatgaggatccagtttcatccttctacatgtggcttgcaagtatcccagcaccatttgttgaatagggtgccctttccccactttgtttcgctttgctttgtctaagataagttgactgttaagtgtctggctttatttctgggttctctattctgttccattggtctacatgtctatttttataccatgtaktttataccatgtatacaacatgtttataccatgttgtttcagtggtcttatagtatagtttgaagtcaggtaatgtgatgcctccagatttgttctttttgcttaatcttgctttggctatgtgggctcttttttggttccatttcacttttagaatagttttttctagttctgtgaagaatgatgattgtattttggtgggaattgcattgaatttgtagattgcttttggcagtgtgctcatgttcacaatattgattctacccatttgtgagcatgaaatgtgtttccatttgtttgtgtcatccatgatttcttttagcagtgttttgta

SEQ ID NO: 771122 - DNA, 647 bp, Homo sapiens
tagtaacttaagaacaatttcttattttccattgggtaagcaggcctgatgggcagttctgctagcctggtctgcaatcagttgaactcactcaagagtctatggttggcagcagctctacaaggcagcactgcaaatcttggctgaattctctcacataactggggcttcagctgggataattgggcagccttgctctctgttccatgtttcatcctctagcaaactgtcctgagcatattataatgatgaaaacataggaacgggaggagaataaaaaatgtgcatttttttaaaagtctgtgctcatgtcaagtttgctactgtcccactggctgatgcatgtcatgtggcgaatcccagagttactgtgggaggagacagactaacaataattgtggacacatggagacatgaaaaattggggccgtacatgcaatgaacacatsacaagaaggagaattgttccatctgaattattgatgcaataggcatgattagggtttattttgaagtattttattatggtctgtttctttgaaaatcagtcatccaaaatcaattaaaaattaattttcagatgaaaagaatgctgataatttaatgtagataatgagattaaaatactttgctccttataacactga

SEQ ID NO: 771123 - DNA, 563 bp, Homo sapiens
ttggcccgaattgggttgtatgcccatttctcattggttcaaattgggtcacgtgcccagtcactgacatggaggatacgatttccctaaactaatcaggcctcccactacaactagaaggagactcagctcccacaaacatatgaattgatggtgcgggagagtgtagtgggaattctgttaggaaagagaaggaagtcaacaatcgggtacgctgtgtctaatttaagtccatgactttaaaagtgagcttttttttttgttacaaaaawaatgtaggcttaatttttttttttttttttgagacggcagtcccgacacccaggctggagtgcaatggccatgtctcggctcactgcaactccgcctcccaggttcaaacgattctcctgcctcagcctcccgagtagctgggattacagatgcccaccaccaagcccagatattttttgtatttttagtagagacggggtttcaccatgttggccaggctggtctcgaactcctgacctcgtgatccgcccgccttggcctcccaatgttaggcttaatttttaattttc

SEQ ID NO: 771124 - DNA, 621 bp, Homo sapiens
ttgagaatatgtttcttattctcaattgatctaacagataatagtttattcaaaataatagcaacaatgtgtttggttgtgtatgtttatatatataagcatacataagcatatatagagtattttttgttataaggtactcatactactcatgaagtgatacagtgttatttgaaagtggatttgaattagttataaatgtatattgtaaactctaaagcaactactaaaaaaagattttttttaaaaaagcatgactgatatgctaaaatgaagaaaatgtggaatcctataaactgctgttcaatgaaaccacaaaagccaggaaaaagtgtggaatacaaacataagaataaaaaataagggaaacaaatagaagatgataacaaatacggtagacattaatccaaccatgccaatactcactttaaatgtaagatggtctaaatgagccarctaaaagacagagattttcacagtggatcaacaaacaagacccaaccatatatgttgtctacaagaaatccactttcaatatacagacacatatacactaatagtaaatggatggagaaaactataccatgatagcagtaatcaaagtaaagcagaagtagctat

SEQ ID NO: 771125 - DNA, 582 bp, Homo sapiens
aaaaatggttaactcctctgcccttaaaacataaaagaaagaaaatatttaatatagaatgtttggcatttcccactagttagtagggaggaaaggaaaatttcttcatacaaccacagcagtcctaaaacagttcattttaaaatggacgaaccaattagcattgatgaatgtggctccttctggatggtttattgaaggaagtagtacaatgggggatgaagaagacaatgagtgacatttgccttagtggtaacacacagaatagatgtccccttccaaagatcctggtcctcaaagcttgctccactctagaaaccaaggtcagctcacgtgaggarctccccaggtgtgctgggaacggctattccttgtgtcaccaccgcaagtatgcacagaaaggacagctgggcacctgtgcgaacgtggtggctcaaaggcatgactggaaactaccacctggacaaaaagccagtgtgctttggctctctaggaggtcattgcctggaacaatgttccaatgtagtggctgctcatgctcaacaaacggttcttgaattgtacttcctataatccaacctg

SEQ ID NO: 771126 - DNA, 613 bp, Homo sapiens
cttcagcctctgcttccctggaaactcacatggagacactaccataccaaaggaaccaaaaagacaacaacgggaaagggtgaaggaaaaaggaaagcgtttggtttcaggcaggcctgcgcctacccataaaactgccagagcagagtctcgcagagggttttctacacgtctgctaccttctcttcctaaccaggaagctgaagtgctccttgaagacagaagcaatccctgaaattctgaacctgggaacacagaaaagcattctacaaactgtggattgcccaaaagaaaatctggggaatgcaactactaaatttggtgattgaattattggattaataccaggcttttcagatggaaactgagaggcatcttccatgtgacgtgttctgaggtcgcagcatccctgggtgacccctgaaatctgtgcattgttcatccctgttttgcagccaggtgacacccmcaggtaaacagctcctgggaaggcttgggtcaactgtcctaaggggatcaaggtatctgcagtattagcacacttaggatgtatttagcctgcaaggtaccagtaacatgccaccggttactttaaacgatcgttcattgtatt

SEQ ID NO: 771127 - DNA, 485 bp, Homo sapiens
aaagagaagtgaaaataaaaaaatctttgctgaaaattgaacgtactatgaattcacagtctagcccttgggaagaaaacaactgctaacagggaattgggaataattgccctgaaacttaaaaactcaaagacatagaaattaggagcaaaaggcagatcccaaggctttggacaatgaaaagcttgctggcactagagcagcccattattcccagctgacatttagaggggtcagtgtgctaaacagaagggggagatgaggaggataaygacagctcaaaataggcaagtgccaggtggagaagggggagactgcagctgactctcgacttgcctgaaacctaaaaatataaacgtcttagatagagcaatgtttttccacattctatgattgctccctctctgccatgcaggccaccacctcttcatgctaacaacttaaagtgtatttcccccatctttctccaaactttcatgcacaga

SEQ ID NO: 771128 - DNA, 606 bp, Homo sapiens
aattcagtaaaatctcattataaaatctacacaaatcagtagcaatgctgtccatcaacaatgatcaagctgagaatcaaatcaagaattaaattattttgcaatagctgcaaaaaataacataaaacacctaggaatatacttagccaaggaaggaaaatatctctaccaggagaactgcaaaacaccgctaaaagaaatcatagatgacacaaacaaatggaaatacatctcatgctcatgaattggaaaaatcaatatcatgaaaatcaccatacccccacagcaatctacagattcaatgcaattcctatcaaaatgccaatgtcatttttcacagaattwaaaaaatatattaaaactcatatggaaccaaaaaagagcctgagtagccaaagcaatcctaagcaaaaagaaaaaatctggaggcatcacattactccagaattacattcaaattctactacaagactatagttaccaaaacagcatggtactggtataaaagtaggcacatagaccaagggaacagaacagagaacccagaaataaagccaaacacttacaaccaactgatctttgacaaaacacacaaaaacattaact

SEQ ID NO: 771129 - DNA, 615 bp, Homo sapiens
gttaaatacatgtttggaataattaagagcatggcttttcaataaattaaaaagtaacagcgtattttaggaagctggcaaaagtcaaatgagcaaaattgattattgtagcaaagaattggataaagttgttggaagtatgaggctggattagcacttacaaagatttttcaaattatttcttatactttcttgtttctgtttttttcacagttaactgccaatattctcacatacttgtataactgtgatagtcattgaaaactcttcacaaaatatttttattctcattccaggtaaatagtgaactgaagtttcacccccgctttgaattaaatgacatgcttcaaaataagctgatgtggtatttatcactttcaggtgaaagttctatgaatcagggcacaatytgccaccctctctttctccccaccacagggactgaccatttttttcaatagtaagcagctgctatgtcacctcatgaactcacgaggatgacaaagaaaatggccaacagctgatggagcaaaagctggaaatagtactttctttaaaaatatcaaggctcagggttcttactgcagtataaccagtccatcctcacagatataa

SEQ ID NO: 771130 - DNA, 634 bp, Homo sapiens
cttacactaaaggccaaaggtgataattccaaaggtatcaaatctgaaataaaactgtcctgtccacaaaaatgaaagccccaaattcaaaattcttagatcagattaaaatacaaagtcattctctctggtctgttattctgttcattcttattcagaggtcttaatacctgggaaactctgattcctcccacagctacagcctggaatataactcattggaatgaacattgtttkagggcctcagaaactgcattaatacaatggattcaaggttagtcctgctagaatatattttgtggccttggatgaagttgatgactgttgctctgacaagcctgatcaataacagttaaagttagaacctcattagtgccttgtagagtagtttggggtcagccctctggcttttcaaagaaaatattgtcccatctctgagatacagcagacctgactcaacttttcctgtggctgcatctctccataaggctcactctgtacatcattcccatttctgctcagaggtcacctcctccgagagggctttcgggaccctcatttcaaatcacccttaaccgcatctctatcttttcatcacatattactgtctaatgttatatgtacatctgattta

SEQ ID NO: 771131 - DNA, 581 bp, Homo sapiens
taattaagtattttttagaattctattttaatttatgttttttttttttttttttttttaagacagagtctcactctgttgcccaggctggagtgcaatagcatgatcttggctcactgcaacctctgcctcctgggttcaagtgattctcctgcctcagcttccctagtatactgggattacagacgcctgccaccacggccggctaatttttgtatttttagtaaagacggggtttcaccatgctggccaggctggcctcgaactcctgacctcaggcgatccgcccaccctggcctcccaaagtgctgggattacaagcgtgagccactgagcccggcctgttttgactttttaattgtatctctttgtattgctattttagtagttactttayagattctattgcacattcttagcttttcacagtctacttagaattaacattgtttttcttcatggaaaaaaagtgtaagaactaggcaatcctatgggttcatttaccactttccatcctgtatgtgatggttgttagatatttactacatccatacacattgtaaactagacaatacaataag

SEQ ID NO: 771132 - DNA, 629 bp, Homo sapiens
tgtcccagacttggaatgagtcattttaacaggaacgcctgggttcaatcgggatgttagagattctctttgtaatgggctgctcattgtttctaagtaaattcacttaaactcaccacacatacacatttaaagataaaaatacctcatgaattcatattaaccttccaattcaaatctgagactacagggcttcttctttttttttttttttttttttttttgagacggagtcttgctttgttgcccaagctggagtgcaatggcacaatctcgcctcactgcaacctccgcctcccgggttcaagcgattctcctgcctcagcctcccaaggagctgggattataggcgtgcaccaccatgcccggttaatttttttatttttagtagcgatrgggtttcacctggccaggctggtctcgaactcctgacctcaggtgatccgcccaccctggtctcccagcgatgggattacaggcgtgagccaccacacctggcgactacagggcttctatttaaccactccctgatctatcttccacacagacaaccttcaacacaggacctggggaaacctggctgaggacagcccctaattactcacttgttaccatacaaaaactcagca

SEQ ID NO: 771133 - DNA, 476 bp, Homo sapiens
gagcaaaccagaaatggtctgagccctcccttcccccatcctcagaggggcctgcccctttaggtaaacacaaggaggcaccgaggctgctgtacaagagttggttcctgctcaccccacaaactctacttccacctactgcaaaaggttctgtccttttttttaaaaaaaaaaaaaaaaaaagaaacccagtgaggggtggggtaggtgtgtgtggaggagaggagaaaaggacaagtgatrgtctccccacctcccagtaagccgcaggtgcagagactccaagcctgcctcagggcccttccggcatctgtgcaggagggtctcgcagaaaaaaccaggaccacgacctgggaggacccggtcaccccactgtctggaccaccagtgggaggtaagtgtaagaaccaagggcaagggcctccctgggcggggctagagatcccctggaaagggccatgcaccgcgcgatcccc

SEQ ID NO: 771134 - DNA, 627 bp, Homo sapiens
ctcagtctggtcttgaactcctgacctcaagcaatccacctgccttggcctcccaaagtgctgggattacaggcctgagccaccacaccccgccagtgaagaccatttttgttccagggattctccaaataccccatcagtgtgtcctcactccaggtgatgcttttgttcttattggcatctgtgtataagagaatccagcagcctgacctgtcgtctgcccggagagacrgtggagatgtggcccagtcttgtgcttgcttcccttttccatggtgtggcactgggcggcaccctttggaacaaaaatcttgcctttctcaacatcatccatgtttaattctcttttgtctctggcactacgaaggtttccattcagaagccaggtgtcctgctctctctttattctaactttttatttaaatgcagtatgtatacagaaaagtgcaaggatcatagtcattcatagatccgttcatagagttgaagcatttgatgtttagggaattatttatgcctttgctctactttgcggaaacgaaaatgaaatactataaagattattcaaactgataatgctgattttctctagagtagtaagggagatgtttctggtaccacctcatt

SEQ ID NO: 771135 - DNA, 627 bp, Homo sapiens
ctcagtctggtcttgaactcctgacctcaagcaatccacctgccttggcctcccaaagtgctgggattacaggcctgagccaccacaccccgccagtgaagaccatttttgttccagggattctccaaataccccatcagtgtgtcctcactccaggtgatgcttttgttcttattggcatctgtgtataagagaatccagcagcctgacctgtcgtctgcccggagagacggtggagatgtggcccrgtcttgtgcttgcttcccttttccatggtgtggcactgggcggcaccctttggaacaaaaatcttgcctttctcaacatcatccatgtttaattctcttttgtctctggcactacgaaggtttccattcagaagccaggtgtcctgctctctctttattctaactttttatttaaatgcagtatgtatacagaaaagtgcaaggatcatagtcattcatagatccgttcatagagttgaagcatttgatgtttagggaattatttatgcctttgctctactttgcggaaacgaaaatgaaatactataaagattattcaaactgataatgctgattttctctagagtagtaagggagatgtttctggtaccacctcatt

SEQ ID NO: 771136 - DNA, 471 bp, Homo sapiens
aaatgattttctaagaaagaaaattttaaaagtactctgtagtcatagaaaaagtgtctggatagtttgatgttcccttgccgttgaaaatcagagctcttgggcagccccagttgttcaaagtgagcccagcttatgggcagttgttcagactgagcccagcacttatgcagctcgagctgagtgagtcccagccggattcccctcatccyggcacagccttctatttccaggaccctgcacagctaccctgtcagttggtttttatttttctcgcttacagctttttggggtaaatattggacacacaccccctatcacacaaatcagttgccacttctaagaatcagaaagacttttaagcgcccctagaacacaggcgaacacatattcctgttaagggtcttagagttgtatcctcagtttcaactgggatggtgctgacaactcattccttcccctcctctgcag

SEQ ID NO: 771137 - DNA, 569 bp, Homo sapiens
atctgaagacttactagggactggaggatccacttcctagatggcttgccccatggctgctagaagaaggctttagttccttgctatgtgggcctctccatagacaactttagtgtcctcacaacatggcagctagacactcccagagcagatgatccaagtgagaacaagaaggaagccacaatttcacctgatgtgattgggactcagaaatcagrcatcatcacctttcccacattgtcttcattagaagcaagtcgctaagtacagcccactaactacagtcactaactacacttgagtggagggaattagacaccacattttgaaaaagtatcaaataatttgtggacttttttttttttttttgaaacagagtcttgctctgtcgcccaggctggagtgcagtggtgttatctcggctcactgcaagctctgcctcctgggttcaggacattctcctgcctcagcctcccgagtagctgggactacagttgcctgccaccatgcccagctaattttttgtattttttagtagagatggagtttcaccgtgttagccaggatgg

SEQ ID NO: 771138 - DNA, 545 bp, Homo sapiens
cttatactctatttcttctaacctactgctccaaatagctaaggtgtgagaaactgactacaagtgacagaactgtatgtaaattgtttctgcttggctgtctaagggtctcttataggtaggatgactaaatatagactttatcttccaaatggggacactatggagatgagaggtagcattcataaaacaggacactgggctagygggtgtaaaccgagactgtcccaggcaagccgccttgggtgatcacccttctcacagggaatgaagaccaccactcctcttaatggcagctccttgtttgttttttagggtcttactgttttacaaatggttgaaatgaacaaaagtctaaactctggataaacagatgacaatgatactgaatagcttctctttagctatggaaagtgaaagaaaaaaacagaatatcaaatattaatgtggttttaaaaggaattacatgatgatgagagatgacttatcctcctaattaatttttatgtaattaattcatttaattaatcttaacattaattcag

SEQ ID NO: 771139 - DNA, 611 bp, Homo sapiens
agtcagcttagccgcagtagaaaagaacataaggtaaactcctaaggtatttgactccagtccctggctcctggacagcatgtccrgacatgcacagggcctaggggatcttatcaccctgaagggaaggaccttggacaagactcagggcagtgctgacttcaggtctgacccatcacattcccagtggtggcagccacaggagtgcttgcataaccacacccccagttccacgtggctcagcacagagagagagagagagactccatatgtttgagagaaaggtaagggaaaagaacaagagtgtctgcctggtaatccagagaattcttccagatcttatccaagaccaccaaggcagtatccctatgagtctgcaaaaaccatagcattattgggcttggggttttgaatacctggaaagccttcccgagaagaacaggcacaaataagctcaactgtgaagactaccacaaataactaacttcaatgcccagacaccaaagtacatctacaagcatcaacaccatccaggaaaacatgacctcactaaatgaactaagtaaggtaccagggaccaattatgaaaaaacagagatatatgacttttc

SEQ ID NO: 771140 - DNA, 611 bp, Homo sapiens
agtcagcttagccgcagtagaaaagaacataaggtaaactcctaaggtatttgactccagtccctggctcctggacagcatgtccagacatgcacagggcctaggggatcttatcaccctgaagggaaggaccttggacaagactcagggcagtgctgacttcaggtctgacccatcacattcccagtggtggcagccacaggagtgcttgcataaccacacccccagttccacgtggctcagcacagagagagagagagagactccatatgtttgagagaaaggtaagggaaaagaacaagagtgtctgcctggtaatccagagaattcttccagatcttatccaagaccaccaaggcagtatccctatgagtctgcaaaaaccatagcrttattgggcttggggttttgaatacctggaaagccttcccgagaagaacaggcacaaataagctcaactgtgaagactaccacaaataactaacttcaatgcccagacaccaaagtacatctacaagcatcaacaccatccaggaaaacatgacctcactaaatgaactaagtaaggtaccagggaccaattatgaaaaaacagagatatatgacttttc

SEQ ID NO: 771141 - DNA, 611 bp, Homo sapiens
agtcagcttagccgcagtagaaaagaacataaggtaaactcctaaggtatttgactccagtccctggctcctggacagcatgtccagacatgcacagggcctaggggatcttatcaccctgaagggaaggaccttggacaagactcagggcagtgctgacttcaggtctgacccatcacattcccagtggtggcagccacaggagtgcttgcataaccacacccccagttccacgtggctcagcacagagagagagagagagactccatatgtttgagagaaaggtaagggaaaagaacaagagtgtctgcctggtaatccagagaattcttccagatcttatccaagaccaccaaggcagtatccctatgagtctgcaaaaaccatagcattattgggcttggggttttgaatacctggaaagccttcccragaagaacaggcacaaataagctcaactgtgaagactaccacaaataactaacttcaatgcccagacaccaaagtacatctacaagcatcaacaccatccaggaaaacatgacctcactaaatgaactaagtaaggtaccagggaccaattatgaaaaaacagagatatatgacttttc

SEQ ID NO: 771142 - DNA, 565 bp, Homo sapiens
aaaaaaaacttggttctttgaaatgataaacaaaattgatagaccattagtgagattaaccaagaaaagaagagagaagattcaaaaaagctcaattagaagtgaaatgggagctattacaaccaatatcacagaaatacaaaagatcatttaaggtyactatgaacatcttttattcacacaaactagaaaatctagagaagatgaataaattcctggaaatatacaacactcctgattaaatcaggaagaaatggaaactctgaacagaccagtaacaagcagtgagacttaaacagtattggtagaagggctgaggcagggcttgtttgtctgacataacgtagaagagtcttggaacatgtcctgggtccagggtccaaaaccccttgtggcctatggaacaccaagctctgtgccaaagagtggaaggctgccccacagcactacaatctaaatccagggcataaaaccccttgtggcttggatggaatcagggctcagggcataaaacccctcttagcctctggaatgtgtccagactcactggccccttgctccttgc

SEQ ID NO: 771143 - DNA, 565 bp, Homo sapiens
aaaaaaaacttggttctttgaaatgataaacaaaattgatagaccattagtgagattaaccaagaaaagaagagagaagattcaaaaaagctcaattagaagtgaaatgggagctattacaaccaatatcacagaaatacaaaagatcatttaaggtcactatgaacatcttttattcacacaaactagaaaatctagagaagatgaataaattcctggaaatatacaacactcctgattaaatcaggaagaaatggaaactctgaacagaccagtaacaagcagtgagacttaaacagtattggtagaagggctgaggcagggcttgtttgtctgacataaygtagaagagtcttggaacatgtcctgggtccagggtccaaaaccccttgtggcctatggaacaccaagctctgtgccaaagagtggaaggctgccccacagcactacaatctaaatccagggcataaaaccccttgtggcttggatggaatcagggctcagggcataaaacccctcttagcctctggaatgtgtccagactcactggccccttgctccttgc

SEQ ID NO: 771144 - DNA, 597 bp, Homo sapiens
caattgtgtacaatttatgcctcttcacatataacaccgtggttgccttcgagcatgtgacaccgtttgtcagagaattaaaagaatttgacaagctcagcaaccttctgaaccagacatttgctgatattgagattcctccaatgtcataaccacataaaatggtgaactactcttggttaaagatttgactgtcaagaaagatagacttcttatatttaccactaaatctaacatagaaaaactagtgcgtgtttcgctttggctattggatggcactttcaagactgtccctactttttaaaatcartgatatacaattcatgcccctgttggatctggaaattctaaaacttatctacttctttatatattaatgactggaaacaaatgaagtattttataatcacttatttgaagatttggtggactgtgcagaagaaaatggatttcttggaactcccaaaccaaaatgacaggtttggaattaagtgtaatcaaagcttctaaaagtgaacctgaaagagttatcaataaaaattttttttcatgtagtctaacacatgtggcagaaattcagatgaatggattggtcat

SEQ ID NO: 771145 - DNA, 585 bp, Homo sapiens
gaagatttggtggactgtgcagaagaaaatggatttcttggaactcccaaaccaaaatgacaggtttggaattaagtgtaatcaaagcttctaaaagtgaacctgaaagagttatcaataaaaattttttttcatgtagtctaacacatgtggcagaaattcagatgaatggattggtcatgagatttggcaatgacagaaacttgagtttaaaaatgaatmatttcatgatcctacacccagaaaaccttgaagattcatccaaaagactcctagacctgataaacgacttcagtaaagtttcagaatatgaaattaatgttcaaaaatcagttgtgtctctatacattatcaatgctgaagctgacaaccaaatcaagaactcaatatcatttacaattgccacaaaaaactaaaatacctaggaatgcatttaatgaaggaagtgaaagacctccacaaggggaactacaaaacactgatgaaagaaatcataaatgatgctaataaatataaaaacattccatgttcatgtaaaggaagaatcaatattgtcaaaatgaccatactatccaaagcaatcta

SEQ ID NO: 771146 - DNA, 644 bp, Homo sapiens
ttcagccagtccctccgctcagggtctctgacttcccacaacaggtaccttagtacatgaatgatacatgaacacaaagacgcatatggtcattctcaaaagaaatgaaggtaagtgttcatcacagttgttaaaaatatagtcttaaaatttatatttcttgyaaacccatcttttgtctttatacataaatgcatagatgtgaaagattttttagaatgaactcctttagaaatagtctcctgtattttagaatttgtttaaatgtgtggaaatactgcttatttttagataatgcttattttaattttctttcttttttatgtaacaaaagaaaataattgaattgttatacatacacataaatgttcatacattcccccaaaaataaatcatcttcctgggaaaaatcacatgcctgaattaatatgttccttaaaatgtaagcagtcatttaaaactcagggtagaaaaggatgttagacatgaaactttaatcttttcatttttagagctgggaaagacccagaaaggtaaggtgatttgcctactgtcacagagctagtagcagagccagaggtgaacctaggactccatactcaacagtcaagtgtaagtgtgccaactgtacaatagtcaatgaa

SEQ ID NO: 771147 - DNA, 629 bp, Homo sapiens
agttaataattttaagtatgcaatactgcacacttgaaatttgctgaaaaagtagatcttaaatgttctaaccacacacacacacacatgcacacacacacaaggtaactataaaaaacaaaagacatgaaggaaactactactattgaatttttatgtattatcaaagaagaatatatgcaattatctgaaatggctattaaaatatttctcacttaggcaatcttctattggcatgatgccagaatttcttcatctacttaaaacaattgcaatggaatgcaatggactgaatgcagacacagatatgggaattcaactgttttttttaattaatctaaatcttaaattgttttttattaatctaaataataaaaaggtttcccaaaatgtaaaataatgytattcttaccaataatcttttggttttggaaaatgtagttatttttcataaaatatgtttcttctattaatggacaatgggtttattatttttaatcaataaacattttaatttctcagttttaatttctgattgatagattgacaattataactcatacaaacaaaagctctatggggttctcaataatttttaagaatgtaagaaggtactgagacccaaagat

SEQ ID NO: 771148 - DNA, 646 bp, Homo sapiens
gtcccaactcaaggagaagaaaatgctttgcatcctgaaattcccactctgccctcccctgcaaaaataaaatcaaacaaaaatccaacaagatcactctgtctagtgagccattttctgtaaatgactaactccttgatagaatgatacccctgacttaaaatactgatatatgttcctataagaaaatagctgctttctaccaggaagagactataaacttagaaactttagtaatttggggtcttttctttaaactatctagtgagtttttttttaatttggtgagaaaagttagcaactaaaaatcctctctctttgtaattcttccaygcctgtgtcttcttaatacagttattatcctgtaaagaaaaccaaagaactaattatggtaaaagttaggacgacttttagtgagagagtgagttttgcttaggagggaggaatcactggagatgtggcttagtgaaagaagaaaggtaaaataatacatattttcaccttagaggaaaggtgaaaatacatattaaaaaaggagagaaaaataaataaaatctacacaaaaacaagaacaaccaccactcatatggagcccttgcagaacttgcaggatcctggcctgtgatgagggtctatactctgggct

SEQ ID NO: 771149 - DNA, 645 bp, Homo sapiens
ggctgaaactcaagtttcctgactattattactctgttatctggatataaaagctagaacagatggaatcatattaaactgtttatcaagttcctatttattaatatatattgtgaggcttccatcctccctccaacctctggtgctatttctcagagtagatccactggacactggtttctcaggttcttaatcattgttccaggagaaagaatctgtgatcaaattagcttaaggctggatgtaaaaggttaagcagtttttatttctctagagccttcagtatgctaatgttcattttraatctcagaaaaagttgcagaacatagttgtattagtcagggttctccaaagaaacagaaccaataggatatatatagctatacatgaggagattatgggaattgacttagggttatggaggctgagaagtcccataatatgctgcagtttgccagctggagaaccaggaaagttggtgctgtaattcagtctttctgaaggccagagaactggaaaagccaatggcgtcattctcagctcaaggctaaaggcctaagaactgggactggttgggaaggccctatggtgtaagtcctagagtcaaaaggctcacgaagcaggatccctgatgtctgagagcag

SEQ ID NO: 771150 - DNA, 613 bp, Homo sapiens
  misc_feature 1, 2, 3: n = A,T,C or G
nnnaggaaaatgagtaattatattaaaaagacacctgcacacaaatgttcatggaagcacaatttatgtttgcaaaaatatgaaaccaagctaaatgcccatcaacaaatgagtggataaataaaatgtggtatatatattcaccatggagtactactaagccatgaaaagactgcaataatgtcttttgcagcaactttgttggagctggagggcattattctaagtgacgtaaataaggaatggaaaatcaaatastgtatgttctcacctataattgggagctaagctgtgggtacaccaaggcatacagaatggtataatggacattggagattcagagggggtcaggatgggagggaagtgagggataaaaaaactacatattggatacaatgtacactatttaggtgatgggtgcaataaaatttcagacttcacactatacaattaatccatgaaaccaaaaatcgcttgtactccaaaactattaataacatatatatgatatgttttatgtgtgtgtgtgtgtatacatatagatatatgtataaaaaatgtcttcaagttcctgataaatttactcagggtcatctcacttagttaagtgttt

SEQ ID NO: 771151 - DNA, 510 bp, Homo sapiens
ccccaatatttcaatgtagtttcttttctattttccctaagtgtcggtcagtctgagaaataaagagtagagtacaaaagagagaaattttacagctgggactccgggggtgacatcacatatcagcaggttccatgacgccccttgaaccacaaaaccagcaagtttttattargggtttcaaaaggggaggggtgtatgaatagggagtgggtcacagagatcacttgcttcaaaggcaataaaatatcacaagggcagagaggcagaatgagatcacaaggccagggcaaaactagaattactgatgaaggtccatgtcctgctgggcacacattgtcattgataaacatcttaacaggaaacagggtttgagagcagacaaccggtctgactagaattttgcctggctggaatttccgaatcctagcaagcctgggggcactgtgggagaccagggcatatttcatcccttatcaaaaactgcataagacagacacttccagagag

SEQ ID NO: 771152 - DNA, 581 bp, Homo sapiens
atagtataaaaacagtcttttaagtcaataatgactataggccaatctcgaggaatcaccatgggggaagggagcccctgctgaagggacccccataagtttcaaattagcactgatagcacgtaagtcatgcaaaagtctccatttaccagacttcttgggaatgacaaaaatgggtgaattccgagggctgtttgatggttgtatatggccagcttttaattgttcctcaactaattcatgggcttgttgtaatgtctctccctttaaaggctactgctctatccaaataggattttgagagagccacttcgggggtaggggaggaataacagtggctattattagaaagaggtttgctgttcacataatccattaaattctgccatccagaggaggtattgactgctctttaaagttgttttagttatyactgaccagtcccatagggttatacagaagttgtctgctatggtctcaattaatcctttcatacatgggctagtggcttcattttctctaatagttttccttatctccttataggtgttgaaaatgatggctttatatacctgattgcc

SEQ ID NO: 771153 - DNA, 648 bp, Homo sapiens
agttgtgtgagtataccttaattaatttagcccttcatgagagaatgtaaacgaaaagaaaaaaaaacccaaaaaacagaaaaacaaaaattaacgtagcccatattgttagacatttgagttatttgccatttttcaacatttaatcaatgcgactctgaatgtaaatatttrtgtacctctcacaatttttcctggaataaattcctagcagtagacttatgggggtcaaagtacatacctttaaaaaatatattggcaaattactttccctaatggtggtgttactggaatcagtacatgtgtgcctgcctcctgacaccagtcaaagaagagattatcacataaaaatgtttcattcatgcagtacattaaaaaataggtccttattattttatattgcacctctttgattataaatgaggtcagggccttgtttgttttgtttgagtcttcacatttgtatttcttcttttacaaactatatttgtactcttttgcccatttttaaaattgcagtgttagttttctttaatgcctttaaaaaaagacatgtggactagacattattctgtgactgttatacttctctggaatatctgaaaaatctcaaactttgtaccaaatgtttccagactaaactctacc

SEQ ID NO: 771154 - DNA, 571 bp, Homo sapiens
atcagggatgaagaaggtaatttcataataaaaaaggggtcaattcattaagagactatgagaatactaaatatatatgcacctaatatcagagctttgaagtacgcaagcaatataatacagtcatatgttgcttaacgatgaggataagtcctgaaaaatgcatccttagataatcttgttgtgagaacatcatagtgtacttgcacaaaactagatggtatgrcctactaaatgcctaagctatatggtatagcctattgctcctaggctacaaacatgtacaacatgttactatacttaacactgtaggcaactgtaacacaatgataagtatttgtatatataaacacagaaaagatgcagtaaaaatatagtacaaaagataaaaaaggtacacctctatagggcacttaccatgaatggagcttgcaggactggaaattgctctaggtgagtcagtgagtgagtggtgagtgaatgtaaagacctaggacattactgtacactactgtaagctgtataaatactgtatgcttaggctacactaaatttagaaaatacaaaattg

SEQ ID NO: 771155 - DNA, 571 bp, Homo sapiens
atcagggatgaagaaggtaatttcataataaaaaaggggtcaattcattaagagactatgagaatactaaatatatatgcacctaatatcagagctttgaagtacgcaagcaatataatacagtcatatgttgcttaacgatgaggataagtcctgaaaaatgcatccttagataatcttgttgtgagaacatcatagtgtacttgcacaaaactagatggtatggcctactaaatgcctaagctatatggtatagcctattgctcctaggctacaaacatgtacaacatgttactatacttaacactgtaggyaactgtaacacaatgataagtatttgtatatataaacacagaaaagatgcagtaaaaatatagtacaaaagataaaaaaggtacacctctatagggcacttaccatgaatggagcttgcaggactggaaattgctctaggtgagtcagtgagtgagtggtgagtgaatgtaaagacctaggacattactgtacactactgtaagctgtataaatactgtatgcttaggctacactaaatttagaaaatacaaaattg

SEQ ID NO: 771156 - DNA, 590 bp, Homo sapiens
gttaaaattaacaacatattaatctttaaccaatcataaaaagtgtgaaaagataagccacaagccagaaggtatttgcaacacacattatttaagatgagtatctagaactcttacaaatctagaaaaagacaatcaaattgaaaagtaagcaaaagatttatataggcccttcataaagaggaaayacaaatagccaataaactcattaaaggatgctcaatatgactggaaaccagggaaatacaaattaaaatcactcagacatttcaagtttataatgttggtaagcattttaaggtctgattctatcaagtgttggctaggatgtgaagttactggaattcttacatacagctggaaaaacaacaatctgcttttcttggtaaaatagcagatacgcatacctgtaactcaaaaattgtcttaactataccctaaagaattcgtgtgcatgtgtgccagttgatgtgtgcaagaaagtttacagcagaactgtatgcaacagcaaaacactggaaccaactgaaatgtccatcaacagcagaaaagagaaggaaaagacgctctattcatacaaggctgtgaag

SEQ ID NO: 771157 - DNA, 617 bp, Homo sapiens; identical to SEQ ID NO: 747791

SEQ ID NO: 771158 - DNA, 569 bp, Homo sapiens
atgaacaaatgactacctgtcctcaacactgctcatactgaggcttgtaaggtctacaccaggtgccaacagagcttcagatatgaggacggcaatggtgagtgctctcccatgtcaggactgggtacaggggcaggggaggcgcctggtgctcaacgcaaggtggctcccgcctccctctggccctgctctatcagtcatcctgccscacactggagggtggccagtgaggaagccctgcacgtaggctgtcccacaggacctgtactccaagtcccatggagcaggtgaacctgcctcctcgtaagcacagtagccaccccctgcgccatctcaccaggctgcagagggagtgaggatgccagctgggcctgcctctgcctcagagcagcctctccacagctggtcaatgagtggccttaaggagctcctacttccagggtggacaggactgagcagccctggccaggtgggtcagctcggaaaactcagccaaagccagcaggaggcctgcccagcctcgctcctcaagggaagaggactgtgcttttcattctccctcagccacc

SEQ ID NO: 771159 - DNA, 553 bp, Homo sapiens
tttctataattcacaaccaaaggatccttatctaatacaatctgactctgggagatactgcgcctcctctcactgtgtattcatttcattggaacctttagagtttgaaagacgtccccttttgagacaatattatttataaaactgaaaatgagaaataacttaaaagctcaatcatagatatgcaatgagaatagtactgcattttgaaatgtactaatgttcttgtttcttttgtcttttccccttcagcacaaatctcatgggctggttattttccacctgcttcttcagatccatggtccaccattttccacyctgctttgtgcactgggaggccacctttctgcggaatatacttacctctctgccttccatttcagttctgcaaatgggaggtactggaaagaacgtgagggcaggaggagagatatgccagggtatttattgccctagctccccctctgccagaccacaggtaagaaacgactgcatttctccacctaaattcctttcgagctgtccctcacccatcgctgcagtctgtattgtt

SEQ ID NO: 771160 - DNA, 614 bp, Homo sapiens
cacacccgaccccgcccacccccagccccgggcccatattcttccacttcatttcgggtcctgggccccttacacgtcgtccctctctatctcaccttctccccttcatccctgttacccaagtcattcctaacgccamaaaccagggaacccctaaccccatcactgccttgccctgccagcacccaacccgttttgatgcccattgcccgtccactcgctctcgccttgatcctctcacctcacccagccctaggccatacacccttcccacctcatcctgcctgatcccttacccttcttccatctgtcatccccagtccacatcaggactcagcttgatatcctaggtcaacatatctgtgccttcgtcctggatctcagtaacacaaaactcagaaccctagcccctcagattaagccaccatccccgatttagggaatggcattagatctacaatcagctggtttcacttggcactggcccatttcatgtgcctcttggaggaactctcagcctggctagtctctgattctagggaaattccaactcaactcagtgattctcaaattattttctgccccaacccacttgaaggctacctggtatatca

SEQ ID NO: 771161 - DNA, 637 bp, Homo sapiens
atctcacaacttgattgatttattaggaatgctgcttataggaggaaggctttaaaaaatttcagtaattaaaatctgttgtaaaaatccaaatttacattttagttaaatttttataacttaccacttttacatggtttttattcaaaaagaacttacctattacaagagcagtaactttacatcataactaaatatttgaagcaggaaaaaatagcaacatagcatatattaatttttttttttttttttgagatggagtatcactctgtcgcccaggttggagtgcagtggcgcgatctcggctcactgcaacctcctctccccaggatcaagcaattctcctgcctcrgcctcccaagtagcttggattataggcacctgccactgcacctggctaatttttgtatttttagtagagatggggtttcaccatcttggccaggctggtcttgaactcctgacctcataatctacccacctcagcctcccaaagtgctgggattagaggtgtgagccatcgtgccaggccatcatgtattaattctaattgttatctgaataatcccctccttaagctaaaaatcacttaagatgaagaaagcttactttaggaatttttaagggtccacattta

SEQ ID NO: 771162 - DNA, 610 bp, Homo sapiens
ggcggatggcttgactcaggagttaaagactagactaggcaacatggcaagaccccttctctacacaaaatacaaaatttatctgggcatggtggtgcacacctgtagtcccagctacttgggaggctgaggcaggaggatcgcttgagcccaggaggtggaggttgcagtgagctgagatcatgccatgcactccagcctgtgtgacagagtgagatcttgtctcaaaaaagaaaagaaaagaaaaaaagggagagagaatcaacaaagccaaatttggtgctttgtaaagatcaayaaaactgacaaatctttagctggagtggcgaagataaaaagagagaagatacaaattactaaaatcaggaatgaaagtgggagctcacagaaatagaaaggattgtaaaggattgctatgaacaaatgtactccaacaaattagataaactacgtgaaatggacaaattcctagaaacacacaaactacctaagctgactcacaaagaagaaaaataacaaaacacctataacaagtgaagatattgaatcagtaatccaaaacctcccaacaaataaaagttcaggaccagatggtttcactggtgaatta

SEQ ID NO: 771163 - DNA, 560 bp, Homo sapiens
ctattatgtttctctgaggaatgttgatagcaacctgtcttaatcatccacataaatactgtatgcgttgtgaactcttaggagcactggctgttacaacatgctagaacttggttatcaaagagccataaactctcaaggttggaaatgaccttggagttcatctagttcaccttctatcatgcmcagatggccataaagatatcccagatgaatatttgcctcgcctctgtttcaatgcctccaatcactaactctagtgagatactcatccaatcgtcttgcagcttcatttgttaagaagtacataattgaggtgaatttcatcatcatacttaagtcttgtatgacttcatacataagtcatacaggccttacttccagatgtaagtcctggttctgctactagagacagacagagcacctgtgacactctttaaggacttaaaaactcttgctttcttttgtggctgttatgagttaggggctaggtcttttgccagaatcacatagacttgaatccaggcatcctcactctctgtgtgttgtcagaaatatta

SEQ ID NO: 771164 - DNA, 641 bp, Homo sapiens
tatgcacctaacagcagagtcagttatatttaagagtcgaaagacaagaggcagaaactgttagaagtaaggagtaagggtcatatccactattataatttaaaaattcaacagtgtttttatttttagtaattggtagaaaaatcaagcagaaaattagtaaggatgtagtttacctggacagctaaatmaacttgatcttattgacaattttagaaaaatcatgataaaaacttttcagcaaactaataacagaggcaagattcttcaacttgaaaaataatgtctacaaaacaaacaaacaacaacaacaaaacccactattgctttatgcttagaaactgaatacttctctcccaagatgaggaatgagtcaaggatgttctttctcagcactcctattcaatatcatactgcagttcctaactagtgcaataattaaagaaaatgataaaaattatatgaagattaggaatgcacaaataaaactgttcttgcttagaaataaggtgattgtctacatagaaattccctaagaattgacaaaaacaacagcaacaacaacactcctggacctaattagtgaatatagtaaggttgcaggaaaagggtaatgtatagaaatcaattgctttcctata

SEQ ID NO: 771165 - DNA, 356 bp, Homo sapiens
gccttgactaaagtcacttcatggtaagacttgaagttaggtagtatcagtcctccaagtttgttctcactcaatattggatcagctattctgtgtgttttccctctccatctaagcttgagaatcagttggtcaatatctacaaaataacttactggaattttaagtggaattgygttgaatctatagatcaaatttggaagaactgacatcttgaccatattgaattgtcctatccatgaacataaaatatttctccatttatttagttctctgatttcttttctccaatttttgtagttttcctcatatagatcacatacatatttattagatttacacctaagtatttcatt

SEQ ID NO: 771166 - DNA, 508 bp, Homo sapiens
actattttctagaagtgatactcttatttttcctattttatacagaaggaaattaaggctgagatagtaggtcttatctaagaagtaattaacactgggactcaaatctaggcatttgcttgtagagcccacttacttaaaactgttctaccacacaacatcctcaccagaattccattagcaatgagcactacctgttagttctctctagggtcctagtacaaagcttccagagcagtgttcttaacatggggtgatyctgtaccccagtggaaatatggccatgtctagagacatttttggttgtcactctttgagggggtgataggcatctagcacagaggtccctaaccccctcatctgtatttacagctgctcctcatagctcacattattgactgagctctgcctcctgtcagatcaggatgccattagattctcacaggagcgtaaaccctattatgaactgcgcatgcaaggaatccaggttgcacgctcctaatgagaa

SEQ ID NO: 771167 - DNA, 632 bp, Homo sapiens
tttctgattttatggaaatacatccaaccatttttacatgatgtgatggcaaacttggaagaaacttaattttatttgtccgtgtgagactttttatgattttccccatgttcctctttttctgttaacatcttgatcttggtaacaytgttttgctgattgtgatatttttcaagaatgcaactcctgtggtttgtaaaggattaggaaacggtctattgcaagaacgtccatgatagaaatattttatccttcctgccttttaacttgccataggtcagaatctcaatgtgatatagtaaaagacacagtagttggtgctcatatcatctctttattatgattgtacaggtgtcttttgagaaaatttttagcatcaaatccccgtttggggtctgttgggagctatgagcatagctgtgcattcactcacctcaacaagctggtacagcaaattctatttttcttggctcattgtgttctctgagtatgtattaagttgtatgatttttttgtgagtgtgcaaattcctaggtagctgtataaaaatgatagaagagagctaactaatttaggtctcgcgtatttagaatttggatttgtccaaagttgatgtaagccaagaattactt

SEQ ID NO: 771168 - DNA, 629 bp, Homo sapiens
tattgcaagaacgtccatgatagaaatattttatccttcctgccttttaacttgccataggtcagaatctcaatgtgatatagtaaaagacacagtagttggtgctcatatcatctctttattatgattgtacaggtgtcttytgagaaaatttttagcatcaaatccccgtttggggtctgttgggagctatgagcatagctgtgcattcactcacctcaacaagctggtacagcaaattctatttttcttggctcattgtgttctctgagtatgtattaagttgtatgatttttttgtgagtgtgcaaattcctaggtagctgtataaaaatgatagaagagagctaactaatttaggtctcgcgtatttagaatttggatttgtccaaagttgatgtaagccaagaattacttatgcatttttaagaaggcattttattagacacatcaggactgtaaataaaattgcaatgggaggagttgctacctccatgtatcaactggccattgtcaacccattttatgtgggtatattcatttaatatagccctttggttataacagaggactcttatgtgttcacacaaatggatttggtgagagatacttctaaaattacactgtcag

SEQ ID NO: 771169 - DNA, 629 bp, Homo sapiens
tattgcaagaacgtccatgatagaaatattttatccttcctgccttttaacttgccataggtcagaatctcaatgtgatatagtaaaagacacagtagttggtgctcatatcatctctttattatgattgtacaggtgtcttttgagaaaatttttagcatcaaatccccgtttggggtctgttgggagctatgagcatagctgtgcattcactcacctcaacaagctggtacagcaaattctatttttcttggctcattgtgttctctgagtatgtattaagttgtatgatttttttgtgagtgtgcaaattcctaggtagctgtataaaaatgatagaagagagctaactaatttaggtctygcgtatttagaatttggatttgtccaaagttgatgtaagccaagaattacttatgcatttttaagaaggcattttattagacacatcaggactgtaaataaaattgcaatgggaggagttgctacctccatgtatcaactggccattgtcaacccattttatgtgggtatattcatttaatatagccctttggttataacagaggactcttatgtgttcacacaaatggatttggtgagagatacttctaaaattacactgtcag

SEQ ID NO: 771170 - DNA, 476 bp, Homo sapiens
actccctaccccctttttcttccaaagagtgtggatctagggtagggtcagccactccagtatatgtctggtcatcatcccttggtggggtgcccttgtgacaatacttaggacctaagacaattaggactttgaggaaaagtctttttttcagtggagatcttgtactttggaaccacttcttctgcaggtcgctctctcctgaaatctggatggtgctatggtcgtgagagcttcgtgttttccactagtccacctccagacattccgttgaawacctatggaatctcacttcaagctcatacaaattggttgttgacggttattgccatgcagctcccctggtcccattgcttcagtaaaagattttggatattctgtgccaggatgtaccaggctctggcagcacctgctgagttgctcagtacccagagccagttctcttctagtccagcgtccccactgaggctatccag

SEQ ID NO: 771171 - DNA, 591 bp, Homo sapiens
aacacggcaaaccccatgatatggtttggctgtatccccacccaaatctcatcttgaattatagtttccataatcctcacatgtcatgggaggaacctagtaggaggtagtggaattatgggggccgttactcccatgctgctgttctcatgatagtgagtgagttctcacgagatctgatggtttcataaggggcttttccgacttttgtttggcacttcttgctgctgccatgtgaagaaggacgtgtttgcttccccctccaccatgattgtaagtttcctgaggcctccccagctgtactgaactgtgagtcaattaaacctctttcctttataaattaccagtcttggrtatgtctttattagcagcatgaagacagattaatacacaccatctctacaaaaaaatacaaaaattagctgggcatgatggcacaagcctgtagccccagctattccccaggcaggaggatcgtttgagcccaggaggtcgaggctgcagtgagccatggtcacaccaccgcactctagcctgagcaacagagtgagaccctgtctcaaaaaaaaaaaaaaaaaaaaaatccttcct

SEQ ID NO: 771172 - DNA, 591 bp, Homo sapiens
aacacggcaaaccccatgatatggtttggctgtatccccacccaaatctcatcttgaattatagtttccataatcctcacatgtcatgggaggaacctagtaggaggtagtggaattatgggggccgttactcccatgctgctgttctcatgatagtgagtgagttctcacgagatctgatggtttcataaggggcttttccgacttttgtttggcacttcttgctgctgccatgtgaagaaggacgtgtttgcttccccctccaccatgattgtaagtttcctgaggcctccccagctgtactgaactgtgagtcaattaaacctctttcctttataaattaccagtcttggatatgtctttattagcagcatgaagacagattaatacacaccatctctacaaaaaaatacaaaaattagctggrcatgatggcacaagcctgtagccccagctattccccaggcaggaggatcgtttgagcccaggaggtcgaggctgcagtgagccatggtcacaccaccgcactctagcctgagcaacagagtgagaccctgtctcaaaaaaaaaaaaaaaaaaaaaatccttcct

SEQ ID NO: 771173 - DNA, 496 bp, Homo sapiens
tattaaagatgcattgatatgcctacagcatgatagatgcacatgaaatactcctataacagataacacaaagaagatagctttttataactcaaacaaaatgtttctaagtcccaggcaataacctgctaacttgaagacatgtttatttctgctataaataccagtgtataaaatgggttaagacccctctggagatttttttccatgtgaattgaattttgaataatatatggtacgtactawagtgaaagtttcttaactgatcttgtaacagagaaaatgtacaaaacacatattttggtgtctgaatactgatattctcttctcaaactggaaaactaaccagagtcacggtcaaagataaaacagtaaaaactcatatttgttgattcatccattcattcattacatgtttattgagcacctatttgtgctagccaatgtactaactacttactaaattcccattcttcttagttactgagagaaaaag

SEQ ID NO: 771174 - DNA, 505 bp, Homo sapiens
taaaatgaaatgatgaagatgatgatgatgatgatgatgatgacgaagatgatttgggtagccagtttcttttgagatcaggggaaagggtagtggacaaagaaccaggaagtgggtgaaaggaagaagcagcagcctctctgcttctgcaactgttaacctctgtctgtgcacctaaccctacctggatgttctataaatacaatcttattgaatcccatcagcaacacgttgrggtaagaattcttaatcccattttataaataggtaaagtgaggttttagagagatgagcgaatgtatcccagccatgcagtggaacagtgatttgaacccagttgtattggactctgaatcacatttctttgtgctctgctgggccagcttctaagtcccagcatcgactaactttctgataactgtcaaaagcacttaactcttgtatatcttggttttcctttgtgaattaggtcattgactgagcatcaaaaggaagctaaaagaat

SEQ ID NO: 771175 - DNA, 497 bp, Homo sapiens
gtagagcactgtcagtgggactgagcaggcaatgaaattttcagaaagatcactgcaaactgctcttcgacttgaactgagatgggggaaaaagtcgagagttaattctgtaatgtattgctcgtgttaattctgtaatgcattgtcatttactaatgggggcacctgaacatatagcataattccccccaccccacaggtctggctatggctgtcaaggtgactttctgatacttgggattcctttcccacttcccacccccaacacttgtgttaaaataggggcaggcagaatatgaccgaaggccaaatccattctactgtctatttttgtatggcccctggsgtaagaatggtttttacatttaattcctaattaagtgaaatgttattcccccaaaaaagaatcatattattctcattaagtagatatatattttgaaaattgttctcagttattaatagcatttcaaatacagttaataagattgtgaaag

SEQ ID NO: 771176 - DNA, 497 bp, Homo sapiens
gtagagcactgtcagtgggactgagcaggcaatgaaattttcagaaagatcactgcaaactgctcttcgacttgaactgagatgggggaaaaagtcgagagttaattctgtaatgtattgctcgtgttaattctgtaatgcattgtcatttactaatgggggcacctgaacatatagcataattccccccaccccacaggtctggctatggctgtcaaggtgactttctgatacttgggattcctttcccacttcccacccccaacacttgtgttaaaataggggcaggcagaatatgaccgaaggccaaatccattctactgtctatttttgtatggcccctggcstaagaatggtttttacatttaattcctaattaagtgaaatgttattcccccaaaaaagaatcatattattctcattaagtagatatatattttgaaaattgttctcagttattaatagcatttcaaatacagttaataagattgtgaaag

SEQ ID NO: 771177 - DNA, 628 bp, Homo sapiens
aaattcaacaaatcatgcctgtgagccacaatggggcaaagtgcaagtaaccactactctaggccaatgtaagggttcattggacaaccagatgtctgctaggtttgtgcctattttggtgcttttggggggcaacattatgaacttcatatctaagcacagcaaaggcagagagaaagccaaaattaccaggaataatgggcacatgttgagaacaaaaaaagaagcatggatagtgaaaaattgaaatggtaaaaaaaaattattctagtacatgaagtaaatcagcatctggactactggtatctctgcagaacttggccttgcctaggcctgggcttttgggtcattctctttgtgtcactctgaataatgaatatgtgggtttataagcaccaagtcagagyatagcctttttacaagtagaggagttcaactctttttggccgttatttgtgggaccatgacagtgaggttctagtgcacaggagaagattgtgtttattatgcttaacacagaaactagtaccactcctggcatcgaatagatgttgaatagatgacaaaccgttcttcaatactaaaatgtaagatgccaggtttgaatttggaaatatacaccaagatt

SEQ ID NO: 771178 - DNA, 659 bp, Homo sapiens
actggtcagaaattcacaggttttaagtgtcttaagaaaatttatattgaacattgctctttgtctaacaaataaaagatgttaatttattcctgtttttaaaaaataggcctagaaaatataggaaacaatttttcttttcttttcttcttttttgctgtctaaggcagagtctcactctgtcacctaggctggaatacagtggcatgatccggctcactgcagcttccgcctcccaggttcaagtgattctctggcctcagcctcctgagtagctgggattacaggcatgcaccaccacgcctggctaatttttttgtatttttagtagagacggggtttttccatgttgcccaggctggcgtcgaactcctggccataagtgatccacccacctcggcctcccaaagttctgggcaatttttattttctagataggaaacaatctcttasaaaacaaaacaaaacaaaacaaaagcaaaacaactcagagaattaaaattgatagctctcattacaaaaaaaaaattgaaacttctgttagtataaacatcttaagtgagagaaggtagaaattacttaaagcatgcataagaaaagactagtatccagaatagcaaaatatctaaaaattagtaagaaaaagacaaactatgcga

SEQ ID NO: 771179 - DNA, 586 bp, Homo sapiens
agaaacataggaataacactttgtgaccagtgattaggcaataatttcttagatatgatacctgaagcaccagcaccaaataaaaaatagaaattagacttctttatcaaagtttaaaacatatgcttcaaagaacacattaagaaagtgaaaacacaatccactgaatgggaaaaatatttgcaaatcatgtatccaatatatagaatatataaagaactctataattcaacaacaaaaagaaaaccaccaaatttaaaaaygggcaaaggacttgaataggcatttctacaaatgacatatccatacagccacaaagcacatgaagagttacaacatcattagtcattagggaaatgcaaatcaaaaccacaatgataccagtttacacatactaggatagctataaaaaaagaagatggataataacaatgtttaggatattggaaaatctgaaccctcatacattgctggtgtgaaagtaaaatagcttaggctctttaaaaaatagtttggcagctcctcaaaatattaaacatagagttactcataggtagagaagtgagtattatcccaccctaaaaag

SEQ ID NO: 771180 - DNA, 594 bp, Homo sapiens
tgcaaaactgaaactctttacccattaaacaaccccctatttccctccctgccaggggttatgaactcctggcaacaaccgttatatcttctgttatctatgattttgactactttaggttcctcacttaagcgaaatcacatattatttgtcttttgtgattggcttatttcacttaccgtaatgtccttcaggttcactcctgttgtagtatatgtccaaaacttctgtgtgtattaggtctatttggtctaygtgttattcaagtcctctatgtccttatcgatctcctgtctggatgtcctattcatcattaaaagtgcggtactaaaatatcctactattattgtattgttgtctatctcttcctgcatttatgattctcttgaccttggtgagcattttcgtgacggttttctgtggggtatgttatttaactctattttattaggattggtttctgaaaatgtatcttattcctttgtttggaggatctttgcctgattcttcattttccttgactctctgtgtaggtgtttccacattaggcaaagcaggcacttctttcattcttcatgacctggtcttgtaaag

SEQ ID NO: 771181 - DNA, 555 bp, Homo sapiens
tattgtactgatgcaaacaactataacggcataaattaagaatactcagaactagtttccaaattctgaagaagccatgcacagagagagagagacaaatatgctccaaattttgttcataggagtataacttactcaattattaaaggtcataaatagctcaaaataagcttccttgactctgaaaaacaaaacaaagatcagcaatgttccaatcaaaagtcattactgaaaacattacttcagttttctattaattcagtccattcagttaactcttgttttgcttgatatttgtgaacatttcaactcttcctgagtcctgtatgtttttcctttattccaatgtcacaatctccagagttttcagaaacctgcatttgagactgcctgtcagagttttgtggctgattataraccatcctttgaagaggattaaaataagacaacaattatctgtgaataatagaatgtccatggtagttacagttagaaacatgactaacaaagaaatttggttatctctgtggtttataataacttagcataacaacc

SEQ ID NO: 771182 - DNA, 491 bp, Homo sapiens
aggctcagatacaagaggggaaaagatgctttgatctgcattttactcacctttcttcatgtccccacatgggccaccaaaatgatgcaagatattttgctccttagttcagctaaaatctaggtccttatcacacaaccaggaaaaattaggtgcayggacacattgaaagtttgaggagagcagaatttattaaagaacgctctcagtgaaaaaaaaggggttctgccagcaggctcccaactcacagattgcataccaggtcaccacacacaccagctgaaggggccaggtctcttctcactgcttaaggcatgaatccccagtggctgcaccccattttcccagtgtgcaggcaggcccccagtctgttgccagcatgtgcagacaagacccttggcaggttcccacatctgcacaaaagcatctgatgtaaacacttgtggggcgggttggggattctccagggatcctcccttatctgcctcctg

SEQ ID NO: 771183 - DNA, 594 bp, Homo sapiens
ggtaagtcttcatgattttagattttgcaatggtttcttagatatgacaccaaaagcataagcaataaaaaataaatataaactggacttcattttaaaactgggatgaaatggacaatattatggatgtgaaaagaaaagcagagaacaggtaaaaatatttgcaaagcatatatttgctgagaatctaatatatagactatctaaagagcccttactactcaaaaacaaacaaaatcccaagtagaaacactggcagaggatttacgtagacatttctccaaaaaagatacacaaatggccaccaagcaaacaggaaaaaatgctcaacatcattacatcattcaggaaatacaaataaaaactgaatgagacactatttcacatatactagaatggttaaacttttttttttttttttwaaaaaggaaaatagcaagtgttggccaggatgtgaagaaacaggtactctcatacatcactaatgggattgtaaaatggtatatgtcttgtgaaaaatggtttggcttatactcaaaaagttaaacacagaataagtggaaaataaagtggaatgaccctgtaattccactc

SEQ ID NO: 771184 - DNA, 536 bp, Homo sapiens
tttaaatgaagttcaagaataggcaaattaatttatggtgattgatgtcacattaataattacttctgggccaggatgggctgtaaagagacctgatggaaaaattactgtaatagtgaaaattttccttctattaawgtaaacttgtgattagtgatctatatttatatatttagtatttatacatatttttatacatacatatataatacaataaatagaatatgatatatagaaaatatactatataatatttttatagccaatatatatctaaatgttcttgtagttgcccacataagatctatgtatcttaagtagtaagttataacataacaagttttcaattatatacctgaatgtaatgatccattaaatttaaatttaagatggaattgacaattaagagaaaatataacaaaactgacacaaaatatacaatcttaatgatatcataaccaatataaagagaagattatttcttcaaattaatcttccaaaaaagaaaacctatctcagataacttcaatagtatg

SEQ ID NO: 771185 - DNA, 613 bp, Homo sapiens
catccaaatcccccacaaaaaacttaggaataaatttaacccaaatgaatataagacctttacactaaaaaatgcaaaaagaagataatttttttcaaattgatatatttaattctgcagagataaaattattacatagaagactgttccaacccaagccctattattttataatatagttatttaaattattttacagtatagttgttataatgtcacttgatgtatgaagttgaaaaagagaaatataaaaacctgcataatgtaacagtgattgaagaaaggcatcacatttctctgactgtaaagaayagagtaatttccatgggagagctcatgaaggagaccaccatgtaatgaagttcttttggcatgtacagaagttcaacattacacaaatataaatatattgcaaataaaatttctgtctaaagccatcagtagcaaatgtcttcttatatttattattatactatttccaattctaggtaataatagtctattttgaaaaacataagacaatggcatttctcctttcaaagactaatttttattaataatattgtaaagagatgaaaaaataatggattacgaattttccaatataaacttt

SEQ ID NO: 771186 - DNA, 676 bp, Homo sapiens
cacgttttacatgccaccggcatgcccctggctccacacacaaaacactgaactcctcttgctccccagtatcctctcctcctttgcccttgatgacccaccaagtgcagtcattggttcagcatctatttaataatgttcttctaggtgcagagcccaggacaggagcccagttctctagatgagaaactcagaattcaccattgcttctcccaggggtcatcagccttgagtgaatctatggctctaatgaatggccctggtgccatcctggaaggcaggctagcaggcagaatcataaaactcagttatgacccaggcttgaggaacgttctctactgagaatgtagacttcagagcagcccagcttggcgcaaatcatgctgtttgtcacatttagtgtgtaggtggcctttagcaagttacttaatccttcttagtctatttcctttctgtaaaataggactaataaccatactgtggaggccacagcaactccatcttggatgctgatcctccatattgacttccgattaacccagtttcgggaaagcctctaagatttctccttyatctactgtttactgtaagtcctgcccttaggcaaattgcttctgaagcacatatacccctttcctctggtatttaatccctgggactagggggtcgtggtgca

SEQ ID NO: 771187 - DNA, 451 bp, Homo sapiens
atcctgctgggctagaaaaacatgtgtgacccctagatctctatcctcacacagaaagcaaggacagctttcagaaggggactcacaactggaaattctaacaggtaaatattagtatcattaagaaatcttgcaaaggtgattattagccatctcttgtctgtcgagttctgttgcttttctttcttctctccttttctcagtttttctctctcccctgtgtctttctcctcctttgccacatctgtctgyctctttccttctcgtctgtttttctattctctggtctcttgttctcgctctttgtctctttctgtctcttggagcatttctctgtctctcttgctttgctacctttctctctctgtctttctctttcttgtatctcttgctgaccttggggtcactcccttggttttctccatttaatggagccccaacttgcctttga

SEQ ID NO: 771188 - DNA, 615 bp, Homo sapiens
ggttgattgttagaattcttagtaacaaagcacaaagttgctgaattacttccctgtggtcacatagaacaaggcaggaggttttaggaatagaatttgaggactcttgatatttaggttcttgcagtaattattaagcacatatcccgtctattaaccatacagaaggcatatctggtgttgttaagtaaaccgtatgtttatcaggcagaaaatgtgcagcacagtttctttccttttgctgtcagtgagtgcagtgccacaattctgaatcagaaaacatttgaaatgccatgaggcttttgcagataatcaggcttggagccctggagggttgaagagaggaaactgctaccgttaaatgartttactaaccggcacaagctgacatttcacccccctgccttctggcacatcctatggaaataagaaatcaatctggacatgcaaataattttagaaaatgtatattattgtaattgattttataatgctgtcacctatttcccatttaactcattctgtttagtaaaaataaaataatacgtagccacaatgctgtgagaagccactgattacagggtatagtaacaataataccccagttagactctg

SEQ ID NO: 771189 - DNA, 624 bp, Homo sapiens
ataaacaaaattgagattagtcaggaaaagaagggagaggatccaaataatctgcattagaaataaaatgagagatattacaaccaataccacagaaatacaaagaccatttaagactactgtgaacacctttatgcacataaaccagaaaatctagaggagatggataaattcctggaaatatacaaccaccatagattaaaccatgaaaaaatggaaactctgaacagaccaataacaagtagtgagattgaaacagtaacttaaaaattgctaacaaaaaaaaaaatctaggaccagatggattcatagctgaattctatcatatattcaaataattggtacaaatcttactgaagctatttcaaaagataaagagggaaccttccataaatcattatatgaagctattattaccctaataccaaagccaggaaaggatataacaaaaaaaggaaaactacagaccaatatccctgatgaacatagatgcaaaaatcttcarcaaaatactagctgagtccaacagcatatcaaaaagataatacacaatgaaatagtgggtttcatactagggatgcagggatggtttaacatatgcaagtaataaatgtgttatatcat

SEQ ID NO: 771190 - DNA, 343 bp, Homo sapiens
ggaagggagaaaaaaggaaagaaagcaagaacgtgagaaagaaagaatatgagaaaagaaggaagaaaagggagggagaaaggaagggagagaggagggaaggaagaataagaggaaagaaagaaagaaggaaagaaggaaggaaggagaaaaaaagaaaaagaaagaaaggaaaaraaaaaagaaaagaaaaggaagaggaaaagaagaaaggaaggaagaaggcaagggaagggaagagaagacaaaggaagatggaaagaaggaaggaaaaccacaaatattagaaattctgtgtttgttagagaatatgccatactgttttttttttttttcacttgaa

SEQ ID NO: 771191 - DNA, 579 bp, Homo sapiens
tagagaatatgccatactgttttttttttttttcacttgaaaggaaagagtatctgccattgaagattggatgtcttgttggtgatattgttgttcttatcttccacatgattactgagtttgtgcctagtctttccattactaagacgaaagtgttgaagtctgcaaatataattttggatttttctagttcacctttgatttctttcatgttttacctcacgtatttggaggctctgttgttagctgcataccctaattagtaggatgtttacatcttcttgagaattgattattctattrtctctcatctctgatactatttcttgttccgaactctgttgtgtctaatatcaatgtagtccttccacagccttattttagtgtttccatgatatggctttctccatatcttgatgataacctatttatatctctatatatttggagcaagatataaaatttagacttgattttttaaagatttttcaaagatgtttcaagatggaattcttatttctttttgttctatttgacattctctgagttttctatatctgaagtttgattttctgtcac

SEQ ID NO: 771192 - DNA, 633 bp, Homo sapiens
agtgtctaattgtgaaattcctaataaacggcaagatatgttctgaaaatgtgaaacataaatgaggttgaagaaattgtgaaaagtttagcagaggaggaataattcgtcaggttccttaaatacaagtaaaggggaaaggaaggrccatttttaagtttagatgttccaagggttagtggtgaggttgattatggtatgtcttctcgttgatgagggaggagactgccgaatagtggaaaataaagttaaatagctagggtggggccaaattctgggttttaataaaagccaggcatagaaatttagatcggggtggtagaaaaaggaaggctttaaaagtttttgagccaatgaatgacatcatacaagttctatataaagagcagtgattgcaggatgggaaaggatggcatcaggaagacccacttgaatgctggtaagtaatgttactaacagtgccattagtaacattaatgttactagggcctggactgatatgctgatggaagtgagaatgaagaataaggtgggatgaaagagattttgacaagagttttttaatgaacctgaaatgggaaagggtgagattaactaagcctgcttgccatggacagcaatggggttgctaga

SEQ ID NO: 771193 - DNA, 608 bp, Homo sapiens
gatattttaaaaggtgtttctatattacacaattttacactgttaacacaagaccactagatttgtagtccaaagctctgggccacaatttagtcttctctcttagtgtctgttgtgtggccttagacataaactctaaaaagttaaaattaaaatataaatggccttatgtgccagtgaagctgagaatatgtcagatgtgaatggactctgaaggtgctttatgaatttccaaaccatcttgggcagttctgggtgaaggggaatcaccagagcatagatcattcyttactgttcaaactgaaaaacgtgtaactttgggaaaaatatgtatttattataaatcatccatttcattgggtggtttcaaatttagaaaccaatatatgcttgtcataagaagaccaatgaatgcaaatgtatataaccccaaagctctcttttcctaccctattctgtctctggtctcccagctagtgaagtcaacagattagtgtggatccttccatcactttctcctatctcattcatgcataatcaaataaaaggaacatacataaggttcaatcttttctgaatacaatcctagtatgcatgttactctgtat

SEQ ID NO: 771194 - DNA, 608 bp, Homo sapiens
gatattttaaaaggtgtttctatattacacaattttacactgttaacacaagaccactagatttgtagtccaaagctctgggccacaatttagtcttctctcttagtgtctgttgtgtggccttagacataaactctaaaaagttaaaattaaaatataaatggccttatgtgccagtgaagctgagaatatgtcagatgtgaatggactctgaaggtgctttatgaatttccaaaccatcttgggcagttctgggtgaaggggaatcaccagagcatagatcattctttactgttcaaactgaaaaacgtgtaactttgggaaaaatatgtatttattataaatcatccatttcattgggtggtttcaaatttagaarccaatatatgcttgtcataagaagaccaatgaatgcaaatgtatataaccccaaagctctcttttcctaccctattctgtctctggtctcccagctagtgaagtcaacagattagtgtggatccttccatcactttctcctatctcattcatgcataatcaaataaaaggaacatacataaggttcaatcttttctgaatacaatcctagtatgcatgttactctgtat

SEQ ID NO: 771195 - DNA, 639 bp, Homo sapiens
tattagcaagaaacaattgtgaaaagacaattaaaaaaacacttatgttagcattgaaaaacacaaaatacttgagaagaaattcaagataagatatgacagtcccacacaatgaaaactactaaatttttctgagaattaacaaacagaaagatagtctgtgttcactgaggtgaatgatgttgtgagaggctaccacaaggcaatttcttattcacttccctggttctratggcatgggattctccttgcccttcctctgcctctatgtcccttgcttcccaccgcacttcctttggcacagctgcagactataaaattatctaacacataattgttgctctcaagtaatttaaatctttgcaaagacgcaaagttttcttgattctggcaataagatgtatatgttaatttttctagtgttggccctgaaggcaaaataaatatctcaaaggtaggtcttcatctacttcctctattgaaaatctccattgttaaatctaaattaaaaacctgtatcaaacaaaaggaaaatcaacagattatttgcagttttaatgattattgtaaagttggaaataattcatttgctaccaagctaaaaaatgcaactgcttcattcaataataaccaaggaca

SEQ ID NO: 771196 - DNA, 557 bp, Homo sapiens
aaattaaactattataaaaatttctattcaggtgtttgtgtaacataaatttttatttttctaggatagataaccagggttgtaattgctgagttgtatggtaagtgtatggttaactttttaagaaaaaggtagactgatttccacagtagctagatcactttacattcacaccagcagattccactattctgtacagcactggtgttattagttttgtttttttgtttrttgttttttcattttagccattctaataggtgtgtagtgtcatatcatggtagcttttaatttgtatttctctaatggctagtgatattgaacatctttcatgtgtttatttactacttatatatctgttttagtgaagtgctcaagatttttgaatattttctaactgggttcctttttttctgactgtagagttgaaagtttattttctggattcaagtttctgtcatataggtgatttccaaatattttctcccagtcagtggcttttattttatcagctaacttaacctaatagacatttaacggagtctttacagagcaaa

SEQ ID NO: 771197 - DNA, 548 bp, Homo sapiens
cgcatgaagcatcacaaggggaaaaaaaatgaataccaaaaagaagtggtggaatttgaaagtttatatacagccttaagaggagaatgggaggagggaaaagtaggtcacttaggggagagtaaatgacttttaggaaaagtaaatgggtcctgatattgcttggatatttatcccctccaaatctcatttgaaaatgtgacccccagtgttgggggtggctggtggaaggtgtttgggtcatggggatatatctctcatgaatgctttggtgccctctyatgataatgagtgagttcctgctcagttagtacacacaaaaactggttgtttaaaaaaatcctggcgcctccacttctctctcttgctccttctctcaccatgtgatatgccagctccccttcctctttcaccataattggttgctctccgaagccctcaccagaagcagatgctggcaccatgcttcttgtacagcctgcagagccgtgaaccagataaacctttctttataaattacccagtttcaggtattcctttatagcaat

SEQ ID NO: 771198 - DNA, 592 bp, Homo sapiens
gatggctattaattgtacactataaactagccttgaccaatcgccaagtcaacagtatgatagcttgtaccagtctctacttgtgaactctgtatgattaagtgaacaagtcagaaaaactcaaataataaccacctttggatcctcttatgagaatwaaaaaaggttcagattttaccataacatttagtcacaagtaattaagtcaggctcttgtaaatttcctctgtgtatatactggttatagaatctttttaagttcctggtctagaatattaaagaatgctacccaacctgccaagacagttttagttttgtgctctagagaagatgctatttcagaaaaagtgatcacaatatttccacttcacagatctgttataaaattaaattaatctttataggcactcacgagaaacacaaatattgtttctctttaaaaaatgatcttacatggagaatacaaagctaatgataattcagctgtatttaagtgtaaagggtaaatgtattttcaaataacagagtttggggggtttttttggttatagagtttgtgaaaatataaaagaaaaatattaaaattactctt

SEQ ID NO: 771199 - DNA, 566 bp, Homo sapiens
aagaaaagaatcaagaaacacaaaaaaatatttagagtaatacattataatcttgtaagtaaattcagtggcatgtgtggagtgaaaaaggatacggggaagagtggtttgggcttataatacggaatagcctagyttagaaaaatcttatgctagttctacatatatttactaccttgtatggaatattataacactgttagttttaattacctatgttattaagattatttactataactgtgtccagaattggttccttccggtgggttcttggtctcgctaacttcaagaatgaagctgcggacccttgtggtgagtattacagttcttaaagatggtgtgtccagagtttgttccttcagatgttcagatgtgttcagagtttcttccttctggtgggttcgtggtctcgcttgacttcaggagtgaagccacagacctccgcagtgagtgttacagctcttaaaggtggtgcttccggagttgttttttcctcccggtgggtttgtggtcttgctgacttcaggagtgaagctgtagaccttcacagttagtgttacagc

SEQ ID NO: 771200 - DNA, 537 bp, Homo sapiens
ttctttcctatagctggagtggagatgactagagtgataaccactgtgattccatgaaccaagcctcccaccagcctgaaacattagcttttaagccatttgtggacatccattagatactgttatccaaattctggtccacagatattactgatcccaggtcaaatgatgattttataatacttggaaagtgacttatcacctacagttgagcttcttaaagttggatggcaaattatccataactgctgtgaaaagttaacatttacttacacggtctgaagttatcatatgggcaaagtagtcatcttyaagtacacaatttacatgaaatcccataaatgttattcactctataacatatttacatgtgtcttaatataaaataatatttttatttattgtcaagaaaaatatcataaactctctttttccagaaatccttgagtacattgacccagatataccataatgaccctggccatatgtagctgtaatattgatttacttgcagtccccagtatacacaatgctctt

SEQ ID NO: 771201 - DNA, 611 bp, Homo sapiens
caaaataaattactataaagtattctgaaaactgactccacttcttagcttaatgttatattcttctgatatttattgttaatcatagaaaataattttagcatctgttatttatgtatacatttaaaacacattgcatctcacacatcttatcagaagattaatctgaaattcagattttgaaaaacacattcttcctttagcaaaaataaatattagctttctacataaaacaaatggattgaaagcagaaatatcaaaacaattaaattaagtgtattgtaaaaatattatagataagacagagtgctctattaaaggaggtagtcaatctcaaggtggcttctcatgtttgtttttttaatctaaaaaatcatttaaaatacaacaaagaataatattatgtaataaytgattcagaaatgcaatttctccagttaatagactacatgattcatatgaaaaataaaacatgaaaacatttataaaatggactatataaagcaatgaatgcagaaagtgataaaatgtttgtggttctgtgatcagataagaagcaaagactttttgaactatagtcttaaagtattttaaaaactactctgaaaatg

SEQ ID NO: 771202 - DNA, 618 bp, Homo sapiens
taatagctgctgcatgtaaaaaagttacttgaaagaaagagaaaatcttaacaaatctatgatgacaggaatgagtaataagcagtggttactaacagagaaaatagtttgttggaaactgctgaagtaactgaatggctgtatcttgagagtacaggtatttcttacatgatacacagtccacagatcctcctgccatttcactccatggtcatactgaaaaaatgaatcaaatgaaaactgaaatgcagacaagtgattgtgtaaacaagcaagtgcatgcaaaagtattagaaataaaatacatagttaagaccaatagtctgatgagaaccttaaaaatgttcagaaagcattktattcaagcagtgtacaaaacttcattttgagcgattatttcacttaatttgccacaccattgtgtagcaaatggtgaagtccaggagttaagaagaacatagatatataccttggatagttactaatcaagtaataagcttggtgacaatgtcatacatatacttgcagaaaaagccaaaagatatgtcaacgaaaagagtcaaactaaaatatttgaagagatttattgtgagccaaatatgaatgaccatggcccat

SEQ ID NO: 771203 - DNA, 629 bp, Homo sapiens
atagttttacaatttattgcttagggaataatgacaaaaaaagtctgtacgtgttcagtacataagcaatatttttttttcctgaatccacatttggttgaatcgatgcgtatgaaacccatggatattaaaagctgactgtacatgctgctgctaaatggccctataaaattattttgccaatttacacaacttccagtagtatatgaraaagtttgacttcccaaatatgtgctaactcttgacatcactaattcttaggttttacctgatgggcaagtaatgatatttcatgcttctactcattcaaatgtatgcaattcgcagtgtgttaacacaatatttgtatttctttcccttttacttattttttacttttgtattgattgtccttttcatgttagtgtataagatatctatattttcttgatattaattcactatgtgttatatagaacaaacatacccttccaagtattttttctggagggcatggaactttttcttaattttcatttgataaaatcagtcattcttttcctttctaatgtctatgtctttcttacccgaagattataagaatacacttttacttttatatctggcttctttaagtttagctttttcta

SEQ ID NO: 771204 - DNA, 629 bp, Homo sapiens
atagttttacaatttattgcttagggaataatgacaaaaaaagtctgtacgtgttcagtacataagcaatatttttttttcctgaatccacatttggttgaatcgatgcgtatgaaacccatggatattaaaagctgactgtacatgctgctgctaaatggccctataaaattattttgccaatttacacaacttccagtagtatatgagaaagtttgacttcccaaatatgtgctaactcttgacatcactaattcttaggttttacctgatgggcaagtaatgatatttcatgcttctactcattcaaatgtatgcaattcgcagtgtgttaacacaatatttgtatttctttcccttttacttattttttacttttktattgattgtccttttcatgttagtgtataagatatctatattttcttgatattaattcactatgtgttatatagaacaaacatacccttccaagtattttttctggagggcatggaactttttcttaattttcatttgataaaatcagtcattcttttcctttctaatgtctatgtctttcttacccgaagattataagaatacacttttacttttatatctggcttctttaagtttagctttttcta

SEQ ID NO: 771205 - DNA, 629 bp, Homo sapiens
atagttttacaatttattgcttagggaataatgacaaaaaaagtctgtacgtgttcagtacataagcaatatttttttttcctgaatccacatttggttgaatcgatgcgtatgaaacccatggatattaaaagctgactgtacatgctgctgctaaatggccctataaaattattttgccaatttacacaacttccagtagtatatgagaaagtttgacttcccaaatatgtgctaactcttgacatcactaattcttaggttttacctgatgggcaagtaatgatatttcatgcttctactcattcaaatgtatgcaattcgcagtgtgttaacacaatatttgtatttctttcccttttacttattttttacttttgtattgattgtccttttcatgttagtgtataagatatctatattttcttgatattaattcaytatgtgttatatagaacaaacatacccttccaagtattttttctggagggcatggaactttttcttaattttcatttgataaaatcagtcattcttttcctttctaatgtctatgtctttcttacccgaagattataagaatacacttttacttttatatctggcttctttaagtttagctttttcta

SEQ ID NO: 771206 - DNA, 582 bp, Homo sapiens
gtacagaggaggaggtttacagtgtaagtttagtcattattattattccttactttttacaggtggcatagagagaatatcagttctggtagaagaggttgtagatttgatgacagtaaaatagagtatgaatatgatgaaggattggaaaagagaaaagaagayaggaaatagacttttcaacaagtagcacagcaactttaccagcgagagaagtcacatttgctaggcaacagtgatgaaggcccacttagacagtggttaggaattctgataggatttaagaatagttgaaatgagggtaatagaattatgagctagaaacatagatgactgtggtcatgatgtttgagttcagattaaggatattttccaatatgaatgaggctgagtaactaggagtgtagtatacaatgactgctaaaataataaactaggaattgtgatgtctggagcaatgcaattcaaagacctgtggcttttggtggagaatgaaggtaaaatgatctggaagttgcaaggacacctaccttaccttgaggtcctataagtagcatataagagggatgcagaaaaaaacca

SEQ ID NO: 771207 - DNA, 583 bp, Homo sapiens
ggaggggaagcatgcaggtgagcaggtacagaggctgggatgaatgctactgggtgctggcaggagtggaactctgtgtggccccatggcagcgtctaggggttgcctgtgacccctggagccccagaagatgtatgttacagtgtgctcctttagctttgtcatccgtggatggcttaagtgttaaatagctcagtggagggtcagtgtgacagcccttcgcacctgyacccaggtctttgtccaatgtccaggaggaatgaggtcacatgaacaaatttgagggtggtgaattcagaggattttactgagggtggaagtggctctcagcaggatgaggagctggaaaggggatggagtgggaaggtggtcttctcctctctggggaacccctttctgatcgtccgcagctgaacctctctccaacagtagtgtctgatgtccagctgctgcttctcctgacctttagatgcttcttttcttttctactgctctgctacaccactgtgctgctctgttgctctgctgctctgctgcccttctgccagtggaaactgggggttttatgggtacaagatggggg

SEQ ID NO: 771208 - DNA, 615 bp, Homo sapiens
tatcttcatagatatgttagcaggaagttggaagctctgtttcaaggaatgctaggtagatcttgttctcaaccagacctgccctcagaccattataataattgtattgtgatatttcttcatgtgtcttgaagataaaatgcatagctytaggagaatggtgtgtttgagtgctgtctaggagaaaggtgtgtttgagaaaggtgtgtttacagctataaattttcctctgagcactactttctcaccatcctgtaacttttgttatattgtgtttttgtttttatttatatcaaagtattgagtttaatttttcaatgaaaacgagcgtgagttcatttttattctatctacaaattgtataagaaaggagtcacagctataaagaagtacagaaataaactcatatatttgtgataaactgactttcaacaaggctactaagacaattcaaagaggaagggatactctttcaatggtgttaggatgaatggatagctacatagagaacaaggaatttagacccctacctcaccccatacacaaattaactcaaaatgggttaatgtaagaggaaaacataggggtaaagtttcaatttccttggattagaca

SEQ ID NO: 771209 - DNA, 599 bp, Homo sapiens
ctattgaatcaagagccaagagccacacacacacatattaccttttgtgtaagaaaacagggaagatgggggggaaatgcaatctctgcttatctttacaagaagaaacaaggaagggtaaaccagaaaacagtgaagttggttacctacaagggtagggatgggggtgaaatggggtgaaacgacacaggaaggagtgacatttccctgagcatactttttgcatagtttgactggaaacatgttgatagtctacacattgaacaaagtaaaataaaatcagtgagaatgtgaaagtggggtgaggactcaaacactgaaagcaagctgacaataaacacaaatatatgtcaaaggaatgccataatcacacagaaggaaaggagggagggaggcagagagggagattgagaaaaaaggaaggagggaggatagaaasaagaaaagaaagagagagagaaaaaaaaatagagggagaaaaggacactaatccaaataacttacggaccagaattttgactatataccctcagtcatgagtggatagataggtgtgtaggaggggtaagaattgcaaagaaatcatgaactcttttgaa

SEQ ID NO: 771210 - DNA, 575 bp, Homo sapiens
aagagaaggggaaaagtaaatggaaagaacttggctatgccagatagtattattaatttggataggaaaacttttccagtgctttttaaaacaatgtaagccataagttgaatttaacaagccttctattagacttgaatgcctgcattatgataattataagcacacctttcaccagtrtaatatttttcctcttaggagctgtatggcaaaaagaagttttgtgaaattttattgcattgttatataaatttgaaactgcattatagatttgtttctcctactgtgaattaaatacactttatgaaaggaagtgatgcttttgatctttcaggggatctcggctattagacaatttcaagagttttagagatagactgaaaggacagaatagaacaggacaaatgtaagccccgtgagggaaaggctctttccattttgttcattgcagtgtctacagtgccttaggcagtgcctggcctataaataaatacatggtttatggcaaataataaacacagatgtgaattaaggactctgaatatacagaggaaagagcaatttactcagcctag

SEQ ID NO: 771211 - DNA, 610 bp, Homo sapiens
aagcttaacacaaggaattcaaaccagatgacttctaaattccttccacttctaacatttcatgattcaagcattgcctattatccataacttactaaatagagtttgaaaaatcttgactaaatattgcagtaggtttgggaacatttccctcagaagcttcccaactataaatccctgataccttttcactataacgtggctgtgttctaactttcaaatctcagatccagcattttccctcacttcagtcctaactgccttatcagagtagaagttacagcagaaaagcctatgcagaaggaaagaactatgagaagcaagctggtgcatcttgcagggycctagaaatgctcagacttggagatacggttatcacaaacatgtatgtgtgtgtatgtggtgtgggagatgggtgtagggtattgatgagtggtgttgacatcaggctaacgagttaaaattcctcatagagtattataggacctgaagcttctctctgtaccttgtgccagacaacttcctttcacacaggagatcaaaaggatgttttctggataaattgtaccaaagaaactgaatttgtaggcacaaaaaaaccccacatcag

SEQ ID NO: 771212 - DNA, 636 bp, Homo sapiens
ttccattgctttctgtcacttttaggtattagaaaagagatttttttcagtattaataattccagtccagcataacaaaatttctgtttcctgtttaattcaaagctaaggtctgggaggaaggtggaggtggggtcatagcctttctttttttttttttttttttttttttttttttcagattttycccttcccctttagatccttcaagttgtggtcagaaaagaagggagagagaaaaagtgcagtatttgtagctctctatggaataatcctaatgttaactcgatctctagatgtgctctttgggacatgctgtgtggccctctgctttgctctgttccatgactcaggaaatgctcatccacctcagttcctgtctttccatgatagattttctgtcacttttacctgggactcctctccctagcagggacctcttttggggaatggtccattagagatgactggaggtaggttaccttctttagcatccatgtggcccatgacaaaatacacccattctttccctaccagatgggcttatttgagggaggttagccactgagtcctcccttcttgtcctgcctacattgctaggcaccagcatctgtcttcgtcatttgatccctttac

SEQ ID NO: 771213 - DNA, 618 bp, Homo sapiens
gtgaatcaaaactgtcctagaaatgacaatatgaaaaaattaatagtcagaacattaaaataattattatatctatgttcatatatatatacattcatgaagccgagaaatgattgaacataataagtacagttgtgagggatacagaaagtttcatctcaaactttcagagattaaaactaccatgtctaagattttaaaaaaacaacctggatgggattaacaatgaatccgatgctgcaaatgattaaggaacttgaatgcacagcaacagaaaataccaaaaaatgaaacacagasagaaaagaaactgaagaatataaaataagcagagcatcagggagctgtggtacacctttaaagtcacagtattcattttattagggtctctaaaggagaggagaagcagcaggaacagaacaaataattgaagatgaagtagtcaaaaatcttccaaatttgatgaaaactataaactcacagttccaagaagttcagtgaatcagaagcacaagaaacatgaagaaaccacttaagggcatatcataatcataatcaaattgcttaaaactaatgatacagagaagaacttcaaagtaacgagaaaaagtacagtag

SEQ ID NO: 771214 - DNA, 617 bp, Homo sapiens
acttaataatatgcatttaagtttcctccatgtcttttcatgacttgctagttcacttcttcttagcactgagtaatattccattgctggacgtaccatagcttatttatccattcacctgctaaaggacatcttggtcattcccaagtgttggcaattataaacaaatcttctataaacacctgtgtgcaggtttttgtgcagatataagttttcaactcctttgggtaaataccaaagagtgtgactattagatagtatggtaagaatatgtttagttttgtaagaaaccaccaaactggcttttgaagyggctgtaacactttgcattcccaacagcaatgaatgagagtttctcttgctccacatcctcaccaatatttggtgttgtcagtgttctggattttgacaattttagtagatgtatagtaatatgcaattattgttttagtttgcatttccctgatgacatacaatgtggagcaacttttcatatgcttatgtgccacctgtatatattctttggtgagatgcttgttaagatctttagcccattttttaatcaagtgttttcttgttgttaggtttctttacattttataaaatatggtcacata

SEQ ID NO: 771215 - DNA, 521 bp, Homo sapiens
aagtaattgcaaatacttataattatatgagcaagactatgtctctgagtagttaaaatagctaaaaatgttctacttgttatctagtatcagcaggcagacgaaagcaaattaataatcactccacagatttggacatttaaaggtatttttcattgagtttttcaaacgagttatacgtataactttacgtggmttgtaaattagactggctacccaccatcagattattaaaactggaaaaccaaaaatcacaatcctgaaattctcgaaatgtggtgttcttatttcattgagtttgaaaattctgttgggataagccaacatatttattatggccttctgcattatggtaacatcttaaaagccgaaactgaattgtactgatagaagaactaatctaacctctattaataagactttaactcagaaagagatagaatttttcacttactttcttccaatggctttatctggcttattttcatcctcctaagattgattaaaagctgttgactatc

SEQ ID NO: 771216 - DNA, 521 bp, Homo sapiens
aagtaattgcaaatacttataattatatgagcaagactatgtctctgagtagttaaaatagctaaaaatgttctacttgttatctagtatcagcaggcagacgaaagcaaattaataatcactccacagatttggacatttaaaggtatttttcattgagtttttcaaacgagttatacgtataactttacgtggcttgtaaattagactggctrcccaccatcagattattaaaactggaaaaccaaaaatcacaatcctgaaattctcgaaatgtggtgttcttatttcattgagtttgaaaattctgttgggataagccaacatatttattatggccttctgcattatggtaacatcttaaaagccgaaactgaattgtactgatagaagaactaatctaacctctattaataagactttaactcagaaagagatagaatttttcacttactttcttccaatggctttatctggcttattttcatcctcctaagattgattaaaagctgttgactatc

SEQ ID NO: 771217 - DNA, 679 bp, Homo sapiens
tgtcccaaaacaatgtttcttcttccagtgtgacccagggaagtcaaaagattggacacccctggtttgcatggcctgggtatacattttcagcattatcatatgaaacatggcttcaattggtacatgtaggctagctaatttggacactcagcatattaaatctattaacccttcttagagaaaaacactttaaataaatactacagttataatctgyttaatatccacaaaattatgttttcacaggaaaaacaaaggaagttttttcacctgttaaacaataaaattgaaataaagatactgaatagatgtgaaaattgattaaatgatctgtaattaaaaattctttcaatgaggcatggtgctcctttgcttattatcattccatttcagtctaatatttgcatgattttataaacaaaattattgttgattcaaagaaacatcaaaatacattactgtcaaaattagaagctagtaaatgttctttcattaactagatcaatgtgttttaattgtgaaatattaactcaccctcccataattgcctttaattttacaaagatagtttaacaagtactttcttccataaaatacattacagaaattaatagttattatccctatatagtatataaacagaaataatactctttatctttgcttattaattcac

SEQ ID NO: 771218 - DNA, 620 bp, Homo sapiens
caagctgcagtacctaacacactggacttgttacaaagtgtacagtatatactgtgtattcatcatgtcctctttctagactttgaaaatttctgaatgccaaaacatatcttatatatgtaatttcaatactaactttattcaaaatgcaataaaatataaaatgtaatatatatgcatgtttaaaatggcagcaaaacctgagatctcttagggacattgtttaaygtaaagaacttattaatctcttctctaaaacaagtatattattctggaagttctttgaagcaatgctagaataatttagccattatatactttattttaatacatataaattaggtgaatatataatgatttagaagggcagaagaaagaaaagacacccggaatgaaattgctaaggatttatggtgctccaaagcctacagcctataaacaaagctatcataactagctttatatgtataatcaaccatagagggtaaaattattgttttaggatgttactttgttgttttacccaagcattgccttgatctttattattaatgcctgctacttgccttctttcttgttatttttctcttctctctaaatctctcttctcacaaatcaat

SEQ ID NO: 771219 - DNA, 628 bp, Homo sapiens
atgtggagtggttgtcacattttatggtacttaatatgtgcttaatgtatgtcactgattattgctattcctgacttttgagtttttctaacttttttattttccaagtttaccttaattcatttacttgattctctctcttctccccttccaccttcccctccctcccatacattatwtcaaaaagagactgaatctttctccatcacgagatacatttcagtactgtggcacaaatcagcatattttagcatacgtataaatgttaactaattcctcaatctgattaaaactcgtgttttgggactatatcttaggacaggaagtctgacctacatctgagaaatgtgaatcgtggctttcagcagtggaaggaatttttgtatgaatcatgccagggaacagattcttcatcacccgaactgcacgactgaatgatggtacaccttcttttgtctaggcatgtttttctctgggaaatttaggcaaagagaaaaagatttcacatatttttttcttccttttcaataacgactatattttctagttaccgttattttagctctgccctttagttaacatgagattaaactgtcaagaagttgaaggtcactttaacattttccta

SEQ ID NO: 771220 - DNA, 624 bp, Homo sapiens
gctattcctgacttttgagtttttctaacttttttattttccaagtttaccttaattcatttacttgattctctctcttctccccttccaccttcccctccctcccatacattatatcaaaaagagactgaatctttctccatcacgagatacatttcagtactgtggcacaaatcagcatattttagcatacgtataaatgttaactaattcctcaatctgattaaaactcgtgttttgggactatatcttaggacaggaagtctgacctacatctgagaaatgtgaatcgtggctttcagcagtggaaggaatttttgtatgaatcatgccagggaacagattcttcatcayccgaactgcacgactgaatgatggtacaccttcttttgtctaggcatgtttttctctgggaaatttaggcaaagagaaaaagatttcacatatttttttcttccttttcaataacgactatattttctagttaccgttattttagctctgccctttagttaacatgagattaaactgtcaagaagttgaaggtcactttaacattttcctagatggcacaaaagacttgaaaaaatatctgcccatcctttcttctctttggtgagtcac

SEQ ID NO: 771221 - DNA, 470 bp, Homo sapiens
tctagtattttttcattttcatatacattttataacaatcttttctatatccacaaaatagcttgctgagaattagaatttgttggcaatgacattaaacttgtataccaatttgaggagaattgacatctttattatgctgagtattccaatccaggaacacagcatgtctccatgtgtttaaacrtgttttaaatttttcatcagtatgctgtagttatcgtcatatgatttgcatgtatgatttattagatttacatctaggtgtttcatgtctttggtgattataagtggttttgtattttaaatttttctttccatgtgtgcattgctagtatatagaaatgcaattgatttttgtatggctaaccttgtaaccatgctgaaattacttactcgttcttgggggtttgttttgtttcggggttttaaattccttgggattttctattgaggtgatcatgtgattt

SEQ ID NO: 771222 - DNA, 611 bp, Homo sapiens
tttgagaggccaaggcaggaggatcacgaggtgaggagtttgagaccagcctggtaaacatggtgaaaccctgtctctactaaaaatacaaaacttagctgggcatggtggctcgtgcctgtaatcccagctactygggaggctgaggcagaggttgcagtgagcggagatcacaccactgcactccagcctgggcgacagagtgagactccatcaaaataaataaatacataaataagattaactgttagagcaggacttgggggcagggggcagggcagtgagatatgctaaccctattctcccactcaggtgacaggagggcagctgctgatgcagacggagggtgctccctgtctcagcaagagcagagtccacgggttgaggcaaggggggcctgctggaagtcaggccaagtggagctccgggtgtactagaaaggtggatgcagctcacagcacggtgagatgtggaagtacaggcatttggtgtgtgtgcaggaggagctggtgacaacaaggctggcccaggcccaggagaccaatggggcattaggatgcctcctacataaggtctagggaagaaatgcagctgtgagaattaggctcaga

SEQ ID NO: 771223 - DNA, 608 bp, Homo sapiens
tctcccaaactgaagacctggcccctctccttcaagtttacagtggctgatgcagctgagcgaggagcagctctggggcctgggaggggaacatctcactacaggcaacgctggctccccactgctgaagaagctggaaatggatctctgtggttttgagccattgcagtttcaagtctgctgatgacagtggctgarcctacactaacacacagaattctgccaacaacaatagctctgggacaaaatacagactgccttttactgagacatatgtgaggtctgtgtgcctgcaatagcttcacctacattctaaggcctggaagagcagggctgtgatttgtgcttcagtatttaggacagcatttgccttttcccctagtttagttatggaagcatttgtgtaagtcctgggttccttcttccttaaatgtttgaaaggattcactggaaaaccctttctggcctgaatttgtgtgtgtgaaggttttcaatcgagtatttaatttctctaatgcttgttacaagtgatctctttgtctgattattctatgtcattctaaagcacaatctttaaaaagttgtgcttttctgggaatctgtctgtc

SEQ ID NO: 771224 - DNA, 474 bp, Homo sapiens
tagtgattaaaacaattgcagcagctgcagctgccgtgtactgagagacgactgctgttttccatccgttttctcatttaatcctatagcagcacttttctcatgaggaatattcccagaacctgccaaggtctcccagctagtcatggagcaggtggagccaggaacaagcctgtccaggtgcccacaactcattgtaccgccctggggaccaaatatagcttctaacccaaagggctgctgtgagcaccawggaaatcatgtgggtgcatgtaccagctacactaagcagaggtcttgtgatggttatgtattaggaaggaggacatgagttctaagctcactagctttcttttctcccaatgcaaacccctcccgattaacttggttcttcagttggaaatgtttgcaatgggagttgctgatgaagaaacttgctttcgtgatgggctggctgattgatcaaaaagacca

SEQ ID NO: 771225 - DNA, 637 bp, Homo sapiens
atcatgtggtgtttgaatgacaggatttattgtcgaggcaatgggtaagtacacaaaggtctggataggatgtggccatatcagagatctgccccaggaagactgctctggcatcgatgccaagatagagtcagtggaccaggggaagcagagaccagctcagagcaggattcccagtgaaggaaaggacgaagaggcaaacgggagtctgtgagggggtggtgatatttgtgctggaagaggtgtctgagttgcttatctgggaatcactgtagagaattgtcaggccaagttttgaatyaagcataaggagaaataatttatgtagctataaaagcccagagtgggtgactgagttggtggcttacatggtctctaaattgagtaatgctatgtcagagacaggaaggcaaaggcatctcagccgtgggattcatctgcaatgtcttcttcaaggcgtaaatatgtttttattagctttatgcatataaccataaggaattagaacatcagagagaagaagaccctcataaaattgggatcttttttagcacaggtgccaggatgtcaggtatcaggtcactttcagatgattcaccacagcgtccctttccttgctgctggtggtcactctaca

SEQ ID NO: 771226 - DNA, 568 bp, Homo sapiens
aatataaactttcctcttagtactgcttttacaacatctcataaggtttggtatgtcatgatttttaaaaaattgttatcaaagcaattgcatatttatattatcatctcttttttgacctcctggttgttcaaatgtatattgtttaatttacacatatttttgaacttttctattttcttctggtatcaaactagttttatcccactgtggttgtcaaaatattagcttgatatcaatcttattaaatgtgttaagacatgttttgtggcctaatatttgctgtatcttgaagaatgtttcgtgtacacttcagaaraatttatgttcttttgctttggggtaaaatgctctgtatatgcctgttaggttcattcgctctatagtgttgcttacatcatgtttccttaagtgtggtattgtagttacctacaattattgtcttcccttcaattttgtgaaatttttaatatatttatatgttttaatgttagaggcatacatatctataattgttataacttcctagtcaatttattcttttatcattatgtaatgtccttctttg

SEQ ID NO: 771227 - DNA, 518 bp, Homo sapiens
ttagctcctaaagtgagagtcggcctgttcttcaaagctttaaaaaccaggcatttacttctctctacatgaaagttttagatggcatgatggaagcttcttccaatataagacggtttccctacattgataatctgttgttttgtgtaaccattttcatcaaagatcttagctgaatcttctggataacttgttgcagcttctacatcagcacttgctgcttcactttgcgtatctccattatggagacggcttctttcctcaaacctagtgaaccaacttccactagcttccaacttttcttctgctgctttctcacctctctcagtcttcatagagttgaagagcgtttaaatccttgctctggaatgggmtttggcttaagcaaatgttgtggcttgtttgatcttctaagcagaccagtaaaactttcttcatatcagcaatacagctattttgctttcttatcattggtgtgttcactgcagtagcactttttattttccttcaagaacttt

SEQ ID NO: 771228 - DNA, 544 bp, Homo sapiens
tacaatgaaatgacacaaatgaatttcaagcaagggattaatatgacataatttataattttaaataacactctggtcaatatgaacaaattaatgttgtagttaattactggaaacatcaaaaccagttatggaaatggaatactccaattgatgaatgatgataatttggtctagtttcttagcagtgaagaaataagaaagtaatatggagattttgctagtgggttcatcagaacatgctgaaggattgtgtggggaaagacgaaaagaaaacaagacattttctattttataatttgatcaactaagtatrtaagtgtgtggtttctttatgtgagaaagaagaaaagaggaatgtggttttgaaggtgaggaaatacaggtttatcacttggtatataaagattcagaaaccatgttcaggagaaagacacagagacctatttaacaatttatgctaccgtatgtagaaagcataggatttgatgtaaggtaaaagttggaaactcaacatttgtatactttttaaccattttctcaa

SEQ ID NO: 771229 - DNA, 596 bp, Homo sapiens
ttttaaaaactaacaaaattaagtttgggtgaagataaagaacaaccagaatctgcggacactgctagaggaaccacaaattaatacccttttaacactgtttattagtatctattaaagcaaacatatatgtctctataactygtcagttccaatcctgtgtatacacccctccaaaaggtgtgcttatttcacagcagctctgtcatcatatcccctaactagaaataccaagagcaggatggatgaatctcacggagagtattagacaaaagaaactagacacaatcagcttcatgctgtatgaatccatgtctatgaaattcaaaatcacaaaactaaaccatagtgctagagatgtccttccaggtggtgtgtgttggtagtaagagtcatgaacaagccttctggggcactggaaatgttctatgtcttgatctgcatgataatcccataagtgtgcatagatgtaagagtttattgaatcctatgcctaagatctgtttacttcactgtttgtgaattaggcctcagttaaaaggtacaaaacaaaagttatgtattatttaaacattccttaaacaaacaaaaacaag

SEQ ID NO: 771230 - DNA, 621 bp, Homo sapiens
ttatttaaagtgaagataaatggcttgtacatgataaatatttttggatggatggatgggagaattaaacaaagagaattaaacaaagaattaaacattgaatagaaacccagtggtagatcactgtccatgtctcctatgggtctgtcaggactggctgtcttactggtaacatgcaatacggtgttataattaagtgcactgtctttggattaggtggcttaggctcagtcctccttctaccacttactagctgtgtgatcttgggcaagtgacttgtccyctctaaacttcagtgtattgtctttaaaactagaaataataatagcacttaaactaggggtaataacagcatcaacccacaaaggtgttgtgaaataatgtacctgctaagtacaatgttcaatgcataaaaatgcccaattaatagcaattatttcacaggaaataatatcaggtttggtggcttgaaacttgccttccaatatcttttggggtaaaacttgacaggcatttttttcttccaaaaggcaagactttggggaacatgagaggcaaatggcagattttatttagactggcaaggaagaaagaaagggagagagggaggaaatataaaaa

SEQ ID NO: 771231 - DNA, 597 bp, Homo sapiens
agcaaaagtctctcattttcatttttgcagtacacatcacacagtcaattttgttgacagctgtcacttagtgaagatttttctctaagttagaccttgagcttctcttgcatcatctaatttaatacttacaatattcagttattcaacaaatattgagccactcattaggtaccaagcactgtgctaagccccagggatgctagaataaacaagacaggcgtggtctctaccttcatggaacttacattcaaacagtataatcaaaaataaatcaaaattgtaataactgttctcaaggaaaaaacaataataaaagaccaaggtaaatatattaraaagggttcatttaaaataaagtgacaaggaagggcatttctgagagcctaagaggtaacaattcttgtacccattttacagataaagaaactgaatctcagataggttaggtgacttagccaaagtcatagagccagataatggcactggcaagctctgaaatcaagtctttctgacccaggggccagtgtgttataaaaaatcttttcaaacttcaaataatagtaatcactggggattgtattaaactatagattc

SEQ ID NO: 771232 - DNA, 551 bp, Homo sapiens
cagctacttaggaggctgcagtgggaggatcactttaatcgggtatggtggtgcactcctgtagtttcagctacttgggacgctgaggtaggatcaagggaggatcacttgagcctgggagcttgaagctacagtgagctatgaacatgccactgcactccagtctgggtgaaacactgagaccccgactctaaaaaatataagttcataacagtacataatagaggaggctcaaaacacatgccagtgatgaaaatgaaccctcgcttctgragagagcactgcagtgtcaacaggtggctgcaaaggtggtgagcatgaccctggaccagggaggttaggcagggtcccagcccagctaagacttctttttggaaaccaacatggggtctgacaagctgtctcagtaatgaggctctgcacttttttcattctccccttgccagatggaggcacccccgtttagccatgctgctcccaggccctgctctctgagaaggacttggtcaaacactgcatctctggatcctgagaagtcagaccagttattt

SEQ ID NO: 771233 - DNA, 625 bp, Homo sapiens
agacagggatgcatcccattcccatccctgacatgggtcacacaccaggctaaagtcagcatttttcagatagttcatcagcaatactaggagacctttccagcaaggttactatatcactaaagcaatcatgtgtgtgagtgcccccagccagattgagctaattcaatgtgaagtaatcagagataagaaaaagccactggagttataaaagtatacacatcaggtactttacccaagaggaaggggaagtttactgggaggtgaagggagtgcttcaaartgataagaaaagtgaactagagaataaaatgaagattttattagaagttaagacagataatagaacaactttttttctactataaaaggaataagaggccaactaaggactcatcagggttttgccaagataggaagagtggtcgtttgccagaggagttggacattacagaaaaaatggaggaatgtgttttttcagtgctcaccagggaggaaaatgcactgtgtgccaatgcagaagtaccttccttaaagaagaaaatgcaatcatgaaaaccactggggcaaaaacatctccaggaggaagaagccttggaagtccatttggaaatactcaagccag

SEQ ID NO: 771234 - DNA, 625 bp, Homo sapiens
agacagggatgcatcccattcccatccctgacatgggtcacacaccaggctaaagtcagcatttttcagatagttcatcagcaatactaggagacctttccagcaaggttactatatcactaaagcaatcatgtgtgtgagtgcccccagccagattgagctaattcaatgtgaagtaatcagagataagaaaaagccactggagttataaaagtatacacatcaggtactttacccaagaggaaggggaagtttactgggaggtgaagggagtgcttcaaaatgataagaaaagtgaactagagaataaaatgaagattttattagaagttaagacagataatagaacaactttttttctactataaaaggaataagaggccaactaaggactcatcagggttttgccaagataggaagagtggtcgtttgccagaggagttggacattacagaaaaaatggargaatgtgttttttcagtgctcaccagggaggaaaatgcactgtgtgccaatgcagaagtaccttccttaaagaagaaaatgcaatcatgaaaaccactggggcaaaaacatctccaggaggaagaagccttggaagtccatttggaaatactcaagccag

SEQ ID NO: 771235 - DNA, 631 bp, Homo sapiens
  misc_feature 595, 596, 597, 598, 599, 600, 601, 602, 603, 604, 605, 606,607, 608, 609, 610, 611, 612, 613, 614, 615, 616, 617, 618,619, 620, 621, 622, 623, 624, 625, 626, 627, 628, 629, 630,631: n = A,T,C or G
tcttcacaataagagaataatattttaataatgacacacaataattgctaaacaggcttgatgggacagtaagcgtagttccacaaagatgccaagcagcctgcgtggcctggggcattatataaaaatgagctagccattcaagtagaatgtacctctgcaaggctgcaatattacttacattaaagggcccatcatcaaggggacaagggctatttccccaagtctaacgtggattggaaaaataaggaatactcatctgagaccatattgtgtttgtgtttgggcatcactaaacactctgccgaactttggctgggcrtggtggcttacgcctgtaatctcagcactttgggaggacgaagtgggaggatcgccagaccccaggagttcaagaccagcctggccgacatgatatgactccatcgctactaaaaatacaaaaattagccaggtgtggtggtgcacacctgtatttccagctactcgggaggctgaagcatgagaatcacttgtacctgggaggcggacgttgcagtgagctgagattgtctcactgtagttaagcctgggtgacagagcgacactccacttnnnnnnnnnnnnnnnnnnnnnnnnnnnnnnnnnnnnn

SEQ ID NO: 771236 - DNA, 647 bp, Homo sapiens
gtgtacaggggtttcttgcccattaaataaagaaagaaaaagaatactgggcaaccaaattagaaaagaagaaataaaaagttatttttttccacaggtgaaatgattatccatgtagaaaaattgattgaaactataaaaaagtagtatacttmataacaagtaaatttgcaagatataaaatcaaacacaaagaaaatccatttattttgtgatatcaacaaagactcagaacacaaaatgtcttgccatttataacgaaattaaaaatatgaagcatttaaggataaatctgataaaatatataaaatatctgtactacaaaaactataaaacagtgatgagactaattaaataacacttaaataaaatgagagcaaaaccttgctcctgtgtcagatgtaacacgtttaagatatcaatttttcacaagttcatctacagatgcaacacaattccaattgaaattcaagtaaacttttcctagaaactggcaaactaaaaataaaattcacatgaaaatttgaagaatatggaatagtcaaatcataataactataacaaaactaaagaaaaataacactatctgatttgaagatttattattaacctacattaaataagagactatggtattggcataaaca

SEQ ID NO: 771237 - DNA, 608 bp, Homo sapiens
aaatattacatgttgtcttgacagtttatgattttcaaaatttgaattgtatgtgatttgacaaaatgtattattttgttatcaaatacatgttgttgcttgtaatgtcttttcctctgcattcaacttgaaaaattatatgccagtaagayaaataaagatcctagtgaaacaatctcctaaatcaaggaaagagagagaaagaaacagacatatctagtttgtcttttctttattctattcagcctttaaacaacagatttaatgtctgagtttaactgcaaaaaataatagttcacaagaaacctccaaacttaaaaatcttatatttgacttggtatccctcttgctgatttactggcacccaagagttgcattaaatcagaagctaacagccattttttagtagatatgtcctcagttctataaaatggcttttcttttccttgcagagcaggcttaataaataaaaccctctttcacactggaattagacccaaactttattttaccttcatacaaaacaatctggatacaccatttctgaaataatgttgaaaaagatggcattatattgtagcacattccagtttgaagcgagtgaagct

SEQ ID NO: 771238 - DNA, 566 bp, Homo sapiens
aatttttttcacaaaacacacccacccactgtatttttgccataatgaagaataatgctcacaccgatagataaaattatgcttatctgtaataacatgattgattgattagataattaagccatgtatgctacaaaatctttcataatatgctttttatatcttgtttattgttacaacatgttttcctgcatccaaaaagtattttcaracaaaaaaattgtatttgcaatagggatatgttctgagcctatgtaatagaaacattcaaccttgctaagagtttgtaatgtaatcaaggttggagtattttgaggagcattgaagaaacatgcagtggtgggggatgaggcaggagggagctacagttaaaaagtggatggccttgtatctttggattgaatggattgtaatttggtttatattttgctgttgctgcattgcatttcatatattaccaaaaggaaagatccgtatttcaaattaatgttcaaaaataataatgagcacattacatgaaaaaatagatctgatttgagaatatctaatgttttgcaataccagca

SEQ ID NO: 771239 - DNA, 566 bp, Homo sapiens
aatttttttcacaaaacacacccacccactgtatttttgccataatgaagaataatgctcacaccgatagataaaattatgcttatctgtaataacatgattgattgattagataattaagccatgtatgctacaaaatctttcataatatgctttttatatcttgtttattgttacaacatgttttcctgcatccaaaaagtattttcaaacaaaaaaattgtatttgcaatagggatatgttctgagcctatgtaatagaaacattcaaccttgctaagagtttgtaatgtaatcaaggttggagtattttgaggagcattgaagaaacatgcagtggtgggggatgaggcaggagggagctacagttaaaaagtggatggccttgtatctttkgattgaatggattgtaatttggtttatattttgctgttgctgcattgcatttcatatattaccaaaaggaaagatccgtatttcaaattaatgttcaaaaataataatgagcacattacatgaaaaaatagatctgatttgagaatatctaatgttttgcaataccagca

SEQ ID NO: 771240 - DNA, 636 bp, Homo sapiens
tcatctcacaccattcagaatggctttgattaaacaataaaaaaggaacagatgttggcaaggctgtagagaaaagagaacgtttacacactattggtgggaacctaaattaattcagtcagtgtggagagtagtttggagatatctcaaataactgagaattgaactaccatttgatccagcatcctgctattgggtatacacccaaagaaaattaaattgttctaccaaaatgacacacatacctgtatgtacatcacagcactgtttgtaatagcaaatcaatggtgcactgaataaagaaaatatggtacatatacatgatggaatactacacagacataaaaagaacaaaatcatgtccttcacagcaacatggatgcagctggaaaccattatcctaagtgaactaacacagaaacatgttctcacttacaastgaaagctaaccattgggtatacctggtcacaaaaattggaacagtagacactgggtcatacaagaggtgaggagggtaagtgttgaaaatctacctgttgggtactatgctgactacctgggtgacagaattatttgtactccaaacctcagcatcacacaatgtacctttgaaacaaacctgtacatgtataccc

SEQ ID NO: 771241 - DNA, 627 bp, Homo sapiens
atactatacaaactcttccatgaatttgagagtgattattcctcagtttattttatgagacaggtattaccttgacaaatatatcaccagacacatatattaccagacactgatattacaaatcaaatataacagtttcaaataacatgctagcaaatcaaatyctatagctcttacaaacaaaaagaaagaaaagaaaagacagtgcattaagataaagatagcttatttcaggaatgcaagctagatttctcacagaaaaaaatcaatcaaaatgatactctacatataacaaactactaaagctcaatatagttttttataaaggggctttaataaaacccactatacattcctaatgaaaattctcaagaaattagaaatagaagagaactacagcaaactgacaaagggcatctacaaaatgccaaaagaaaaattatagttcatggtgaaagatacaatgtttttctttcaccctaagaagaggaaaaagcggggtatatttgctctcattaattcattcaatagtgtacaggggtttcttgcccattaaataaagaaagaaaaagaatactgggcaaccaaattagaaaagaagaaataaaaagttatttttttccacag

SEQ ID NO: 771242 - DNA, 627 bp, Homo sapiens
gtacatattaggccttttatgaacactaaaacaatgaggaaatgttggtcatggggcaaagtatcacttaaaattgaattcatccatttttaaaaaacacttcatgaaagcattctggtgtgaattgccatttttttcttactggcttctcaattttcttccttctctgcccctacctaaaacattctcctcggaaattacatggtgctgaccacaaagtttctggatgttttattaaatattgtacgtgtttacagttgggaatttaaaataatacatacactggttgataaagggaagctgcaggaccaaggtgaagattgatagtccaaatgcttttcttttttgagttgtatattttttcacaccatcttagatataattaggtagctgctgaaaggaaaagtgaatacagaattgacggtattattggagatttttcctctstgtagagccatccagatctctgtatcctgttttgactaagtcttaggtgggttgggaagacagataatgaagtaggcaaagagaaaaggacccaagatagaggtttatattcagaaatggtatatatcaatgacagcatatcaaacttcctatgggaaaaagtctggtgggtggtcagct

SEQ ID NO: 771243 - DNA, 627 bp, Homo sapiens
gtacatattaggccttttatgaacactaaaacaatgaggaaatgttggtcatggggcaaagtatcacttaaaattgaattcatccatttttaaaaaacacttcatgaaagcattctggtgtgaattgccatttttttcttactggcttctcaattttcttccttctctgcccctacctaaaacattctcctcggaaattacatggtgctgaccacaaagtttctggatgttttattaaatattgtacgtgtttacagttgggaatttaaaataatacatacactggttgataaagggaagctgcaggaccaaggtgaagattgatagtccaaatgcttttcttttttgagttgtatattttttcacaccatcttagatataattaggtagctgctgaaaggaaaagtgaatacagaattgacggtattattggagatttttcctctcygtagagccatccagatctctgtatcctgttttgactaagtcttaggtgggttgggaagacagataatgaagtaggcaaagagaaaaggacccaagatagaggtttatattcagaaatggtatatatcaatgacagcatatcaaacttcctatgggaaaaagtctggtgggtggtcagct

SEQ ID NO: 771244 - DNA, 579 bp, Homo sapiens
ctctctaccttcagtttactaatgaataaggaaggactgaaaggaaaaagagcaatggtttggcctatcttttctttccttctacatccttatttttccctgaaagtggctggcaaatgcaagggagtaagaaaaggtgagaggtttccttggtcgtttttgtttcttagaatgccattgccttctttccgcattcataacaagttctgatttgaatggacagcatgaccttttggcagggacccagcttgctcagtgatagaaacaccttcatcttgtacttactttgcccaaactcccacgcattgtgggtacacccacrttatgtggtccatgaggcatgacgaatgctacatgcaaatggaacagcaaggaatggcagacccatgtattgcatgcatctcctcaacatgcatgctccatcatcccatcagacttcacttacaagacacaagttcaaagagaaaattattaagaatttcaagatggtgatagcacaacattaaaccaagcacatggtccttttgcagacagggcctggtgagactgcacaggttgcatacctttgaagctggccct

SEQ ID NO: 771245 - DNA, 681 bp, Homo sapiens
taaggattcgccacactgttttccatagtggttgtactagtttacattcccatcagcagtgtagaaatgttcccttttcaccgcatccacaccaacatccattatttttttatttattgattatggccattcttgcaggagtaaggtgatatcatgttgtggytttgatttgcatttccctgatcattaatgatgttgaacattttttcatatgtttgttggccatttgtatatcttcttttgagaattgtctattcatgtccttagcccacttttgataggactgtttgtttttctcttgctcatttgtttgagctctttttagattctggatattagtcctttgtcagatgtatagattgtgaagattttctcccactctgtgggttgtctgtttactctgatgactgttccttttgctgtgcaaaagttcttcagtttaattaagtcctagctatttatctttgtttttgttgcatttgcttttgggttcttggtcatgaaatctttgcctaggccaatgtctagaagggtttgtccaatgttatcttagagaatttttataatttcaggctttagatttaagtccttgatccatcttgagttgatttttgtataaggtgagagatgaggatccagtttcattatcctgtatgtggctagccaattatcccagcacca

SEQ ID NO: 771246 - DNA, 499 bp, Homo sapiens
ggtgatatcatgttgtggttttgatttgcatttccctgatcattaatgatgttgaacattttttcatatgtttgttggccatttgtatatcttcttttgagaattgtctattcatgtccttagcccacttttgataggactgtttgtttttctcttgctcatttgtttgagctctttttagattctggatattagtcctttgtcagatgtatagattgtgaagattttctcccactctgtgggttgtctgtttactctgatgactgttccttttgctgtgcaaaagytcttcagtttaattaagtcctagctatttatctttgtttttgttgcatttgcttttgggttcttggtcatgaaatctttgcctaggccaatgtctagaagggtttgtccaatgttatcttagagaatttttataatttcaggctttagatttaagtccttgatccatcttgagttgatttttgtataaggtgagagatgaggatccagtttc

SEQ ID NO: 771247 - DNA, 565 bp, Homo sapiens
atttgagttgggtgcaacttctcactctgggagaaatggggagtctctggtcagttgtacggtgaactcagaataggttcccagaacaactttcaaataattttgctcatctctctctccatgaatgtccctactaaaggacacaccccgcccccccacacacacaccaaaaaaaaaaaaaaaaaaaaaaaattgcctgggaaagaaagaaatgacaaaggaaaagttagtggaagtcttatccccctttccactattatatatataaatagctgacacactgtcttagaacctcctatctttaaggaatttattaacctaggatagaaataaagcagaccgggtgtggtggctcatgcctgtaatcccagcactttgggaggttgaggygggcagatagcttaagtccaggagtttgagaccagcttgggcaacatggtgaaatactgtctctacaaaaaaataccaaaaaataaaaataaaagtaaaaaggattagctcagcatggtggcacatacctgtagtcccagctaattgggaggctgaggtgggaggattgcttgag

SEQ ID NO: 771248 - DNA, 526 bp, Homo sapiens
atagtcctcatttccatctaagacgttatcagaatagcctttactctttatatttctgccagcattctgatcacaaccatttagataacttctgagaagactgaaatcctttctatagctctccctttcttttgtgtttatcctagtccatttcctgcttattataacaaaatgcctgaaactgggtaatttataaagaaaaaaatktatttattacagttatagagtctgaaaagtccaagatggagaggcgccatctggtgagggtcttcttcctgctgaggattttctgcagagtcccaaggcagtgcagggcttcacatggtgggagggctaagtgtattacattaggtctcgcttcctcttcttataaagccaccagttccactcccatgataacccattaatccattagcctattaaccctttaatccattcatccattaatcatctatttatgagtgcaaagccctcatcagccaatcacctcttaaaatttcacagcactgccacattggggattaaa

SEQ ID NO: 771249 - DNA, 433 bp, Homo sapiens
tgaaagacgcaggagtggtgattcccaccaaatccctcttcaattctcccatttggcctgtgcagaagacaaatggatcttggagaatgacagtggattatcataagcttaaccaagtggtgactccaattgcagctgctggaccagatgaggtttcattgcttgaacaaattaacacatctcctggtacctggtatgcagccattgatttggcaaatggctttttytccattcccgtccatgaggcctaccagaggcaatttgtcttcagctggcaaggccagccatatacctttactgtcctacctcagaggtatatcaatgctcaggctttgtgtcataatcttattcagaaagaccttgtttgctttttgcttccgcgagatatcatactagtccattacattaatgacattatgctgattggatccaa

SEQ ID NO: 771250 - DNA, 433 bp, Homo sapiens
tgaaagacgcaggagtggtgattcccaccaaatccctcttcaattctcccatttggcctgtgcagaagacaaatggatcttggagaatgacagtggattatcataagcttaaccaagtggtgactccaattgcagctgctggaccagatgaggtttcattgcttgaacaaattaacacatctcctggtacctggtatgcagccattgatttggcaaatggctttttctccattcccgtccatkaggcctaccagaggcaatttgtcttcagctggcaaggccagccatatacctttactgtcctacctcagaggtatatcaatgctcaggctttgtgtcataatcttattcagaaagaccttgtttgctttttgcttccgcgagatatcatactagtccattacattaatgacattatgctgattggatccaa

SEQ ID NO: 771251 - DNA, 602 bp, Homo sapiens
aaaaaagaatcctaaaacttatagggtccacaaaagacccagaattgccaaacctgtcatgaacacaaagaacaaaactggagtaatcacattacctgacttcaaattaaactacagagctatagtagccaaaacaacatgataatggcatagaaacagacacatagaccaatggaacagaatacaggaccaagaagcaaatccatacatctatagtaaactcattttcaacaaagcaagaacatacattgagggaaggacagtgtctctaaagctgctgggaaaatgatatctatatgcagaacaatgaaactagatccctatctctcataatatacaaaaatcaaatcaaaatggattaaagacaaatctaatacctcaaactatgaaactgcttgaagaaaatattggagaamccttccaggatattggagtgcgtaaagatttcttgagtaataccccttaagcacaggaaaccaaagcaaaaatgaacaagtgggatcacgtcaagttaaaaaacttctgcacaggaaaagaaacagacaatcaacgaagtgaagagacaatccacagaatgggagaaaatatttgcaaactacttt

SEQ ID NO: 771252 - DNA, 510 bp, Homo sapiens
tctgtgagcacatgggagagatctttggtgtttcttcctcttcttaaaaagacactgtcttgtgcctggcgcggtggctcacgcctgtaatcccagcactttgggaggccgaggcaggtggatcacgaggtcaggagatcaagaccatcctgactaacatggtgaaacmccgtctctactaaacaaaatacaaaaattagctggatgtggtggcgggcgcctgtagtcccagctacttggaaggctgaggcaggagaatggcgtgaacccgggaggcggagcttgcagtgagccgagatcgccccactgcactccagcctgggcgtgagagcaaaactctgtctcaaaaaaaaaagacaccatcttgtcagacagagccccattcctatgacttcatttaaccttaattacctctttaaaggtcctgtccttaattactgtcatattagaggttagggcttcaacatccgaattttcggatgacatattcagtccagaacactaatttaa

SEQ ID NO: 771253 - DNA, 510 bp, Homo sapiens
tctgtgagcacatgggagagatctttggtgtttcttcctcttcttaaaaagacactgtcttgtgcctggcgcggtggctcacgcctgtaatcccagcactttgggaggccgaggcaggtggatcacgaggtcaggagatcaagaccatcctgactaacatggtgaaacaccgtctctactaaacaaaatacaaaaattagctggatgtggtggcgggcgcctgtagtcccagctacttggraggctgaggcaggagaatggcgtgaacccgggaggcggagcttgcagtgagccgagatcgccccactgcactccagcctgggcgtgagagcaaaactctgtctcaaaaaaaaaagacaccatcttgtcagacagagccccattcctatgacttcatttaaccttaattacctctttaaaggtcctgtccttaattactgtcatattagaggttagggcttcaacatccgaattttcggatgacatattcagtccagaacactaatttaa

SEQ ID NO: 771254 - DNA, 489 bp, Homo sapiens
gctaatcctcatttttcccagaaagggaaaacgataaagttaaatgattactggaaagatttagtattgataagacctgtaccagataagaaagaaaataaatagtctgtaccttgatgactcaatcagattttgcaaattgacttaaacttcaaattactccccagtagcatcattcatgagatttgtttatgaaattagtgtatattttcaaatgttttttcttagctcrtagatatatacaagcagaaaacaaactacatataaggattcatgtaagttggtgataaaattacctcatcttatttggaaacagaatctcttctaattaaattattttctgcaaggtttgatttggtgtaattcctaccaccatgtagctgctggtaaaagagggcaaacaaaaattcatgaattgaatttttaagtatgaaagggatgtggaacttagaacaccaaaaatcaaaataaatgaaagtcttcatttct

SEQ ID NO: 771255 - DNA, 634 bp, Homo sapiens
aaagtctgcctgctaagacccttcttcaaaaccagtaatacctaagccaggatgttgataattactaaaacatttttgaattcaaaataacgtccaaagactaaaaaaaaagaatagcatagcataagcatttttgtttgaagtttcaagtatcactgtgtctggctgatgccccaaggaagtcctgtggtaaagctgtcaggggaagctgtagrtaagcacttgaaaaacatggtaaaaacaggttccagctgaggcagtcttaacacagctcctaatggccaggctccctttggctcaccttgttaagcatctgcctgaagcccacaaagaacccagtttgaggctcagctgctgtaataagcggaatgaacacatggagactccaactagcagatggggacttgctgattgagagagactgatctagtgtctggccacctgttggcagacacagcactcctggcacccccctctccacctagcaaattcagacagaagggagacaggaagagaactgatttcttaaaggaatagatgcaagaaaaacatttgttaagccaaacatcacgtgtgagagcggatagagtcaatcaatgatgttgttttcgtcacagcatatgggagtatgagt

SEQ ID NO: 771256 - DNA, 619 bp, Homo sapiens
agaggatggaaaatgaaagtaaataaagaagcaaagagaagcagggtaagcaaaaagcagaaaataagatggtagatataaacctaaatatatgaggaactgcagtaaatgtaaatggattaaaatctctagttaaaagataaggatggtaatattgggcaaaaataaacaaatatgtctatctaccccattttggctgtatgctatttaccccaaacacacttaaaacataaggacccagaaaggttaaaaataaagtattggaaaaggatgtcgtgaagataaataagactaacgaatgatcccttaatygccaaatccagcagtttactaaaacattgtgactagttgtgtttatttcattaatgcaaagattatgtaacattttgaaatctattaactcaatcccaaatattagcaagttaagaggaaaaaaaaccaatggtcccaatgaattaagaaaaaggatttgatgaaattccatatccatttatgataaagatctcagcaaactagtaatataagggatatttctaaacctgaaaagaggtttctaccaagaacttacagctaacacagtatgtggtgggaaaatatttgaagcactttctttaaaatt

SEQ ID NO: 771257 - DNA, 585 bp, Homo sapiens
gagcacctactatgtaccaggcatgtacctgtgttatcttatttggccctcaaaatatcttggcaggatccccctgctttactgataaaaaatctgaggatggagagtttaaggaacttaccagcagtcccagctagaatgtggtagagctaggacatgccaccatgtctacctgatactgacccatgctcttctttttgttccaacaacagttccttcagccgcagcccgaggtcacttaacrcttgcacatctctgctgttgcactgagtgcatcatattaatttttacttgctccttctgtagactaaactccttgagggccagcactatattagtcatctttgtatctctactacctagtatagggttgggtacagagtgggagaagaagaaagttttgacaacaatgagtttgagggttctgggagggggcttgttcatggtatgaagtttgagttttaagagtcagataagacatctggaagatggaaccactggagtgtaggaagaagattaatttttttttttgtttagccttttatctaatataacacactacagaaaagtgcagaaatgaagatg

SEQ ID NO: 771258 - DNA, 597 bp, Homo sapiens
atattagatcattatcggcgtattgtgtttccctctcaggcagaggaggggttggcaggccccagatgcctttcgtcaagaagacaaggatggctttgaaggctccttggaaggttgccgcttgcccacggacaatcccgggagctagggtgggtgaagggagtgggtcagaagctggggagggcagtggggaccgccagcctagcctaccagctctcctgtgtgaggatgctgtccaccaggttgtcaggggagtggcagcagcggcctaaccagatggatgggacggaaaaggccagcaggagcaggccggtggggatgactgtgtgaccctgtccctctctgaaggtccccctcacttcacagtactgatgccaccttgtgctargtccaggggacatagtggtggatacagccccacggggcacactcagcagcctcagggccctcctggatgggcattcttgttgcagagctctttcctatttaccaagagcactgagtgtctccatttcctactgcctgtgcacctccaacctatgggagcatttgcgagccaactgcaagcagcactcttcaggaagcggggcctagaca

SEQ ID NO: 771259 - DNA, 398 bp, Homo sapiens
tgatacaattatctcccactgggtccctcccacaacatgagggaattatggaagatacagttcaagatgagatttgggtggggacacagccaaaccataccattccacccctggcccctcccaaatctcatgtcctcacatttcaaawccaatcatgccttcccaacagtcccccaaagtcttaagtcatttcagcattaactcaaaagtccacagtccaaagtctcatccgagacaaggcaagtccctcccacctataagcctgtaatactaaaagcaagttagttacttcctagatacaatggggatacaagcaatggataaatacagctattccaaatagaagaaattggccaaaacaaaggggctacaggccccatgcaagtccaaaatccaat

SEQ ID NO: 771260 - DNA, 617 bp, Homo sapiens
aaaaactgaagaataaatctgacaaaagatgtgtaatacctctatgctgaaaattattgaacaatattgagagaaatctcaactcctaaatcagtggaaagatatagtatgttcacagtctggaagattcaatatttttgtgatgtcaattatgtacaaattaatctacatattcagtacaatctcaatcaaaattcaagcaggtttttcattggagattaaaaagttgattttaaaatatttatattcagggatctagaactgccaagaatactttgaattaaaaaaaaaagttcaaggacttaactaaaacctcactataaagctataataattaaaagttcatgttggtgcaagaaaagacaaacagaccratggaatggaaccgagagcccagaaacagatctatacttatacagtcactttatttatataaaactactgcaattatagggagaaaggatggtcttttaaatacatgatgctggaacaaatgcatatttctatattttaaaaaaataacctgggctgttcttcacagtgtccacaaaattaatttcatatgaatcatagtcgtaaatgctaaagggaaaacaatacaaattttagaagaaaat

SEQ ID NO: 771261 - DNA, 658 bp, Homo sapiens
ctctaggtcttgctttcctccactgggggattttaattctgtttaagaataaacaaagttttgtgtcctttcggagttttgaagattgccctagcatatttattttgaactagtacagatggaagatgacaaaatgactattatctaaaataccagaattactttgagtttgttatagtgttaaagaatgagtttagctttaggtagggaatgagagagaaagatagagatagacagacaaagacgtacagagagagagagaaaagaaagcccaataaattcatcttaagttcagttatatctattgataatacatataasttattagtgacttcctacaattattaaaatatattttacaagccttgatgcctagtcaaacatagataagggcagatttttaaaataaaacaattgaacattacgagagttttcattggtttgccttgaccaggaggaaaacatcacagccaggaaaaattgatagagaagatagcgtaaccaatttaatcctacttggggtcagcaaatggattctaaatctctagctttagattcagctactttgtccgccctggcctttacagtatagcatctgtataaactaagtgctttcaggagtacttagctgattcccttcttcatgggacattgctat

SEQ ID NO: 771262 - DNA, 612 bp, Homo sapiens; identical to SEQ ID NO: 749290

SEQ ID NO: 771263 - DNA, 562 bp, Homo sapiens; identical to SEQ ID NO: 749287

SEQ ID NO: 771264 - DNA, 553 bp, Homo sapiens; identical to SEQ ID NO: 749288

SEQ ID NO: 771265 - DNA, 605 bp, Homo sapiens
gctgggattacaagcatctgccaccatgcctggttaatttttgtatttttagaagacacagggtttcaccatgtgggccaggctggtctcgaactcttgacctcaagtgatctacccatcttggctttccaaagttctgggattacaggcatgagccactgcgcctggcctctcatttaaattttaaaagtaacttgcaaaatatcatttataagatttttaaacataattataatatctgtaggatctgatatcatggatattagtaatttatgctgatgcttgccatgagtatttacattattattctctcttaacaattattttttgttttgttgaatacctatttgtattttttttctatttcattagtgcctgcatccaatacttcctttttttttkttttattttggcttttgggtctctccttatctctcatactttctctctttcttcctaaactttttctaaattcttgatctagattcctggattacagatgttgagacttaaaaaaatgcatatatataagatataaaagcccaaggttagcctttgttgaatccctcaagtttgatatttcatatttcattgtattttagttc

SEQ ID NO: 771266 - DNA, 628 bp, Homo sapiens
aaggaaaataaaatttcattgttggagtcagaaatgacttttatttcatttaggaactgtaagacagaaaaaaattagctgtagatatgtgttagcatgttaactaagttgacactattttgacagatgaaatcacaactcagattagattgaggagacataaaattgccattgaagaatcttgtatttgaactaaaaggaataattttattaatcaartagataatatgaagggttatgatattcttaaataattcttaaatgtgacaaaattagtgatgtaatttttttaaatgctatacctcatgtgagctcactggcattgtttgactaatactatttgtctacttaagtatttcaatatttgagtacatcgtgaaccaacccatgtaacatatatctaaatcatatctgccaagatgtagcaactgagagtcttgatcacacttccattcttaagtttataaggacttataattcttaattctgtgtttcgaactgagtttctgttattaagctgcagaaacatcttaagactttggtttatttagtttgactgtttcttgattttttaatttgtcttcctttgtaaatgaagacatgatcatctttaaatatattacggatc

SEQ ID NO: 771267 - DNA, 530 bp, Homo sapiens
cattaccttcattagctaaaaaatgagaatagtaacagtgcagacaggagaaatagccgttttctgcattttctacatttatggaggaaatgcaaactgctatgacacgtttcctggtgaactgaaatcccaattagtcagcaactccacaatatatttttaaaagtgtccttggcacctaaatgaaaacagctctatagagaggttgggaaggtaaagaaaagaacgcaagtaaagtggtttccttcacttttttttttttttttttgagatggggtcttgctccttgccctgcctggagtgtagtggtgtgatctcggctcactgcaacctctgcctcccgggttcaagtgattctcctgacycagcctcccgagtagctggaattacagtcacatgccaccacacctggctaattttgtatttttagtagagatggggtttcaccatgttaaccaggctggtctcaaactcctgacctcaggtgatccacccttctcaccctcccaaagtggcatgagccaccacgc

SEQ ID NO: 771268 - DNA, 652 bp, Homo sapiens
gaccaagccaaaggatgccagtgccaagggtagaaattgacaaggaagtaagaattacataatgaattttggatattagagtcttactaaggatgttatccactattgtggaaatagatagttcacccattaatagtaaagttgtctattatgtaactaaatcttctttttctgattccacattcactcagaaactggttttaaattggttttctacgcaaatctatctataagaagtgaccattgtggttattctggaaaaagtattgcaacctatatgacatttaaaatacattgatgttcagcctggccaacatggtgaaaccccgtctctaataaaaatacaaaaattagccaggcatagtggtgggcgcctataatcccaactactcaggaggctgagggaggagaatcacttgaacccaggatgcggaggttgcagtgagccaagattatgccactgcactcctgccwgggcgacagagcaagactttgtctcaaaaaaaaaaaaaaaatggtgttctgggctaatgctgttctgagtttgattaatgtgaaatgtctgcattttctgtgcagtgtcaaaattgtgtcgtttctcagcaagccaagtatctttgaatggagcttagccattggacatttatatatt

SEQ ID NO: 771269 - DNA, 585 bp, Homo sapiens
gtttctgaatcaactgaatattcaattcaaaaaaattgaaccatgacctttgtctcacaccatatacaaaagtaagacccctgggtgtggtggttcacatctgtaaatctcaacaatttgggtggctgaggcaggaggcttgcttgagtccaggagttcaagactagtctggggagcaaggtgagacccagtctttacaaaaaaattaaaaaaaaaaaaaacacatggtggtgtgcacctgtggtcacagccacattgggaggctgaggcaagaagatcacttgaccccagggggttaaggctacagtgaaatatkatcatgccactgcactccacactgaagacagagttagacactgtctctagaggaaaaaaaaagcaagtcccagatggattgtagagctaaaggtgaatattaaaacaatacaacttttggggaaaaagacacatgagaataacatcatgattttgtttcttaaatagaacgtaaatcactattaaagaaaagttaataaatctattttaaaaatctattcatcaaaacagatcatgaggagagggataaagcacaggagatatatcaaa

SEQ ID NO: 771270 - DNA, 487 bp, Homo sapiens
tcgaaacattaaaattaagagaatcatgaaagacaacaggcaacagacaaaataatgtaatcatgagtaatgtaatcactataaatttcaggcttatgtgaaattacaataattatattcataatgaagataagatactatctttctaattttcaatgtgaaacaaaatccagtgctggtgacattgtgctgaagtgggtacactccatcattgccagtggcatcacaatttcacaactgatattgaccaataacatayatacagttatgtgccagataatgaagtttaggtcaataacaaacctcacatattatggtggtctcataagattataatgtagttggctgggcacggtgtcacgcctgtaatccttgcggtttgggaggccgaggcgggtggatcacgaggtcaggagtttgagaccagtctggccaacatagtgaaaccccatctctactaaaaatacaaaacaaattagcgtgctgg

SEQ ID NO: 771271 - DNA, 487 bp, Homo sapiens
tcgaaacattaaaattaagagaatcatgaaagacaacaggcaacagacaaaataatgtaatcatgagtaatgtaatcactataaatttcaggcttatgtgaaattacaataattatattcataatgaagataagatactatctttctaattttcaatgtgaaacaaaatccagtgctggtgacattgtgctgaagtgggtacactccatcattgccagtggcatcacaatttcacaactgatattgaccaataacatatatacagttatgtgccagatartgaagtttaggtcaataacaaacctcacatattatggtggtctcataagattataatgtagttggctgggcacggtgtcacgcctgtaatccttgcggtttgggaggccgaggcgggtggatcacgaggtcaggagtttgagaccagtctggccaacatagtgaaaccccatctctactaaaaatacaaaacaaattagcgtgctgg

SEQ ID NO: 771272 - DNA, 607 bp, Homo sapiens
gcaaaaattagacatcagcattcaaccaagagaacagacttagtaaataacccctgcactaagtggaaatgcgtgaaggtcaacctctaggagaaagaaggaaaaaagaaataagtattttatcacaaggactgaaaattaagtcttgaatcagctgaatgtctggtggggtcaaggaaatttgcatatactattactctttcagaaaaatattaaattttctctgagcaaaattcatataattcagacactggcaattgtctggcaatcaatctcaaaattacaggttcaccargacataggaacaactgagagaaaaccagagaaaaaaatatataaataaaacagactaaaaatcattcctcaaaatggaaacatcagctataaacttcaaaataattgctgctgacaagaccaataggtgctaaaattactggacaaaaagtatcatggaaaagaagatacttatgttctttcaaaatatccctttacatctcaaattatcaaacactaattacaaagagacaacataacttcatggtggagaaactcgacaagcaccaccccaaagttagtattaccagaaataagatattaggatgacatc

SEQ ID NO: 771273 - DNA, 706 bp, Homo sapiens
gagaaacaggaaggtttgctcttgaaattattattcctcccctcatttattgcctgttctaaaatggcaccaggtcaaaacaatgagacactttgctgatagtatcgctataaatacatagatttattgatggaattatgacactgcagaagcttttcaattagtattagagtcattaactaggcaggaaatatatggatagtggcacttttttcaattatacttataaacatgtattactgcacataagaagaagtaatagaaacacttgtatataacagtgtttaaatgaaataccaataaaatgctgttttwttttctctcaaacaatgtagctgatagcactttgctactcccacaactttaaatcttgaggattggatctgttccctgagtgttcttggcttcctgcaagtcattgagtttagtggtattaacaaagtcatgtaaaattctttgtgccagcttttcatagcttgttatttcatattattcaaatatctgctcaaatatcagttcatcaaagaaacttcctcttactagcctagcctaccaaaaatgtccacaactttatgaatactacttactcactgttccgctgtttgaactcttaggggtaaacgtatccaggtttgtggaatttagcaactcttacctttgacacattgtgaggtaagcgttacacagaattcaaattacttgcttt

SEQ ID NO: 771274 - DNA, 528 bp, Homo sapiens
catgccatgtggaactgtgagtccattaagattttttcctctataaattacctagtcttgggtatttctttattgcattctgagracagactaatacagtgcttggtactgcagagagtggggtactgctgtaaagatacccaaaaatgtggaagtgactttggaactgtatgacgggcaagggttgaaacacagtttggagggctcagaagaagacaggaagatgtgggaaagtttaaaacttcctagagacttgttgaattgcattgatcaaaatggtgatagtgatatggacaataaagtccaggctcaggttgtctcagaaagggatgagaaacttgttggaaactggaataaaggtgactcactatactttagcaaagagactggtgccattttccccctgccctagagatctgtggaaatttgaacttgagagagatgatttaaggtatctggcagaagaaatttctaagcagcaaatcattaaagaggtggcctggttgattttgaaagtcttcaatttta

SEQ ID NO: 771275 - DNA, 605 bp, Homo sapiens
cctccatacctaccttacaagaagtcttgaagggaatgctaaacatagaaaggaaagactattaccagccactacaaaaatacactgaaatgcagagaccagtgacactataaagcaacctcccatacaaatctgcataataaccaactaacgacataataggatcaaatccacatatattaacactaaccttcaatgtaaatgggctaaatgccccaattaaaaatcacagagtggcaagatgaatagagaaacaagacccatgggtatgctgtcttcaacagtctctctcatatacactgacacccataggctgaaagtgaagggatggagaaaaatctaccaagcaaatggagaacagaaaaacagcagagattgttactttaatttcagacagaacagactttaaaccaacaaaaatcaaaaaacataaggaagggcattacatartggtaaagggctccattcaataagaagacctaactatcataaatatgtatacacctaacacaggagcactcacattcataacacaagttcttagagacctatgaagagacttagataagtacacaatgacagtgggaagactttaatactccact

SEQ ID NO: 771276 - DNA, 608 bp, Homo sapiens
tgaatgttgttactttagaaacagaagatgtaaaaggtattcggtaatggaaattttatatgattgaaccagacttcatattctgcagattctgttgttttggggggataaaaatatgacagaatctaaaatgaattcagcttgcattgtgcttgagctgttgcctattcctgttcagataaatgtgtgtgttactgcttaacagttagttgttagatgcctaaactaagactctgagttcagcagcacgagttttgcaccrtggtgcaagagatgcagaaacaaggaagtacgttgtgtttggctcaacctaatttagtggtctaaactgtggatgtccttcatacgaataacctaaatgtgagaaaatatactcaaccagtatacttattatcatttcacccataaactgagtcaaaaaaagataaataacctctaaaaagagtacatcaaaagataaggctaatgccagaacccacattcaattttcggattcaaaatcccaaactctctcttcttgaccacactgttttaaatgagatcatttcagacatgttatttatatctctctgtaatgtaaggaatacacatctccaccgcccccccat

SEQ ID NO: 771277 - DNA, 608 bp, Homo sapiens
tgaatgttgttactttagaaacagaagatgtaaaaggtattcggtaatggaaattttatatgattgaaccagacttcatattctgcagattctgttgttttggggggataaaaatatgacagaatctaaaatgaattcagcttgcattgtgcttgagctgttgcctattcctgttcagataaatgtgtgtgttactgcttaacagttagttgttagatgcctaaactaagactctgagttcagcagcacgagttttgcaccatggtgcaagagatgcagaaacaaggaagtacgttgtgtttggctcaacctaatttagtggtctaaactgtggatgtccttcatacraataacctaaatgtgagaaaatatactcaaccagtatacttattatcatttcacccataaactgagtcaaaaaaagataaataacctctaaaaagagtacatcaaaagataaggctaatgccagaacccacattcaattttcggattcaaaatcccaaactctctcttcttgaccacactgttttaaatgagatcatttcagacatgttatttatatctctctgtaatgtaaggaatacacatctccaccgcccccccat

SEQ ID NO: 771278 - DNA, 610 bp, Homo sapiens
ttttaaaaattcttcaactcctcatgctgttaattttttattacagctaatacttttaaaattaaatcgtgtcatttgacagagtaacactaatttagtcatttataatgaaagcatgttcttctacatataaaatattagggaaatattacatttgcatcttgtcattggaaaactcaatgaacattaattaaataatgtttcttagaacttactattttcaaagtaaatctgtccctacatttagaactgaagatatattctaattttgaaaaaaaaaaaagaaaaaagactggrtcaattgattttgctttcttatcctgagaaaaagatgaaatgggacatgtaaatgaaagcacgacgaaaagtattaagtcctttaaaaatgttaaatattattttgagatcttaagaacccaagaaccaaaaggtactaaaaaaggaaataatgttctatcccttgcatcagcaacagttagctttgtgtaaatagctaggtagtgaggatactgtggaaacaattctgaataattagccatactatcatcgtgtaattaaaccctgcagtggttacgtgcatatgtgtgtattcattctatcaaaaggtgcc

SEQ ID NO: 771279 - DNA, 670 bp, Homo sapiens
tgcatttttcacttaaaatcactttcacatggtgtaagtagacgttttttaaaaagatgtagaaacacttttttaacatgaaaaaattgtattacctatttattgaccctcttctcacaataggatagaaactccatgagagtggatatcttattaactgagtgtcttattcactaccatgctgaatgtgatgatagaattatgtctggcacttaataattatttcctgtggacagactctgtgactaatcccgctattaaatgaatgaattaatgtgggtttgaaatgatgaccttagggtgggaaagagtaatcccttgaatgtcaactctggtcaactggtattgtttccagggaatacaaaacagaggacagaggactttaaccayggattttaacagttatctaactgaactttcaaaaaatttgaatgtggcacctggcatagctggattctgataacacagttatcataacggacacattagctggcattgaccagaaaatgtacctcaggtaactgaaagactcagtgacctgaattatttagcactgtccgtctaaatgccagggaatgcttgcctacctcaaaatcgtggtttcagttttacctactggatgttgtgctgctctttctgacagtaatttgtggctaaagttcaactgttt

SEQ ID NO: 771280 - DNA, 612 bp, Homo sapiens
agcactgtccgtctaaatgccagggaatgcttgcctacctcaaaatcgtggtttcagttttacctactggatgttgtgctgctctttctgacagtaatttgtggctaaagttcaactgtttctgcaacttatgaaaaataaagaagggtacttgtattagtctgttctcacattgtttttaaagagcatatataaatatacgtgacacygtatatttataaagaaaagaggtttaattgactcacagttctgcaggctgtagaggacgcatggctgggaggcctgaggaaacttaaaatcatggtggaaggggaagcagatatgtcttatatggttggagaaagaggaagagagagtgaaggaggaggtgctacacacttttaaacaaccaggtctcgtgagaacccactcactatcacaagaacagtaagggggaaatctgcccccatgattcaatcacctcccaccaggcccctcctccaacactggggattacaattccacatgagatttgggcagggacacaaatccacaccatcactattcatcttcctatttgctgcagaagcagagaatgtacatgttgtttgttcaaaagtgatacatatttaa

SEQ ID NO: 771281 - DNA, 597 bp, Homo sapiens
ataaaatattttacacatatatagctaaacaagagactggagttctattattactcaaatcagcttccctgaaaattcagaggatagggattttcaaggatagtttgggggaagtggggggtggcttggcaatgggtgcttactgctgattggttgggggtacaatcatagrgctgtggaaatggtccttatgtgcactgagtcacctctggtggggccacaggagcagtagacgggtccaaatggagccatggttggcaggtccaggtggagccattggtagtaagacatgcaaaaaaacctgaaaagacatctcaaaagaccaatcttaggttctgcaattgtgatgttatctgcaggagtaatcagggaagttgtgtagcttgtgacctcccaaataatggctggcaatagtttacgtctacaccttagcaaaattcaggcttctctcatcctcctagcctggtagtctgtcattaactttacaaaggctgttgagttttggagaagggctattatcatttaaaatataaactaaatgtctcccagagttatcttggcccaagcccaggaataattaaggccagtttgaaggct

SEQ ID NO: 771282 - DNA, 549 bp, Homo sapiens
aagcttctacagtgtgtaaaggcacccaagcgggttgccaatgctggctccagcagcctgcgtttattctcttatctggccccacctacatcctgctgattggtagagcccagtggtctgttttgacagggtgctgattggtgcgtttacaatccctgagctgcacacaaaggttctccacatcctcaccagattagctagatacagcgtgtcgattggtgcattcacaaaccctgagctagacacagggtgctgattggtgtatttacaaaccttgagctagatacagrctgccgactggtgtatttacaatccctgagctagacataaaggttctccaaggccctactagagtagctagataacagagtgtcccattggtgcactcacaaaccttgagctagacacagggtgctgattggtgtgtttacaaaccttgagctacatacagagtgccaattggtgtatttacaatccctgagctagacataaaggttctgtaaggttctactagactcaggagcccagctggcttcacccagtggatcc

SEQ ID NO: 771283 - DNA, 656 bp, Homo sapiens
gcgaaagctcagctcgagccagaacaaacatggaccagaagagtgtgcagttgcaaggtttaatatagtgaaaacagagctcccatacaatgggaagggacccaaagggggttgcccactcccagctcggatgcctggggtttatatcccaatcattgtccctccccctgtgctctcagatgatagatgatttgactacttctttacctcctgcttttagcctaattgatattttagtgagccctctttactacctgattggttgggtgtgagctgagttacaagccccgtgtttaaaggtgggtgcagtcaccttccccagctagccttaggaattcttagttggcctaggaaatccagctggtcctgtctctcartttgagatgtgcaaatcaaaaccataatgagatgccatctcacaccagtcagaatggctattagtaaaaagtcaaaaaataacagatgctggtgaggtcatgaataaaaaagaatgcttatacactgttggtggaagtataaattagttcagccatcatggaagacagtgtggcgattcctcaaagacctaaagacagaactacctttcaacccagcaatcccattatttggtatatacccaaaggaatataaattgatctattatgaagaagacacat

SEQ ID NO: 771284 - DNA, 567 bp, Homo sapiens
gggtcagattcatactgttacaacttacaaaagctaacatataagacacaatggtgctttattaaggtagacatacttgagtccaaacctggggcagttttacatgcacagtactcccacctagtgggtaagtttgttaatgagaataaaatttagatttttaggttgcttagtggtgatttggagtaaatgaatagtcctaaggattatttcccataagccacgagagtttgatgamctgcttttctctttagaaatgcatgagttgggaatatagaagctgagtatattcttttggaagagtaaggaatctgcactgattatcttgcatggactcccctttttctagatccatccatcagttcgaatacatttctgatacatcatttctgatgctgtcagtttgtttgaagacatactcgtccatgtgtaattaagttctaatagtggtttaaattcctgcttcaaagaacactatagtcctgccagtgctctgtagtgaacttataagcactacctcctggatccccctcttagtgtgttaaaggctttgagaagtcctacatt

SEQ ID NO: 771285 - DNA, 567 bp, Homo sapiens
gggtcagattcatactgttacaacttacaaaagctaacatataagacacaatggtgctttattaaggtagacatacttgagtccaaacctggggcagttttacatgcacagtactcccacctagtgggtaagtttgttaatgagaataaaatttagatttttaggttgcttagtggtgatttggagtaaatgaatagtcctaaggattatttcccataagccacgagagtttgatgaactgcttttctctttagaaatgcatgagttgggaatatagaagctgagtatattcttttggaagagtaaggaatctgcactgattatcttgcatggactcccctttttctagatccatccatcagttcgaatacatttctgatacatcatttctgatgctgtcagtttgtttraagacatactcgtccatgtgtaattaagttctaatagtggtttaaattcctgcttcaaagaacactatagtcctgccagtgctctgtagtgaacttataagcactacctcctggatccccctcttagtgtgttaaaggctttgagaagtcctacatt

SEQ ID NO: 771286 - DNA, 537 bp, Homo sapiens
gtgcatctgagtttggaattctagggaagcgtaagatctggacatagagtagggagtccttggtaagcacttgcggtcacttagagaggatgtgtagaaaaggaaagcagccctgggtctgtgtcctgatggcactccaacattttgaggtttgaggttgggcagaatgaggaggagacaggagaaactgaggaacttgtagggcaggaagaacacctggaaagtgtggagtcatgaaagtgaagagkagagagctttgtaagaagggagtcgtgaactgagcagcatggtgcggagaggtcaggtacgataaggacagagaagaccattggattcagcctcaaggagatccttgttgcccttaagtgttgaccttgacaagagcagtgtcagcccagggatgaggacagaagcctagctgcaaagaggtgaggagggaatagcaggggaggaagcagtagtgcctccagacatctccttcagggaattgtgctgtaaagaagagcagagaaatgaggatgtagctggaaggagaaa

SEQ ID NO: 771287 - DNA, 537 bp, Homo sapiens
gtgcatctgagtttggaattctagggaagcgtaagatctggacatagagtagggagtccttggtaagcacttgcggtcacttagagaggatgtgtagaaaaggaaagcagccctgggtctgtgtcctgatggcactccaacattttgaggtttgaggttgggcagaatgaggaggagacaggagaaactgaggaacttgtagggcaggaagaacacctggaaagtgtggagtcatgaaagtgaagagtagagagctttgtaagaagggagtygtgaactgagcagcatggtgcggagaggtcaggtacgataaggacagagaagaccattggattcagcctcaaggagatccttgttgcccttaagtgttgaccttgacaagagcagtgtcagcccagggatgaggacagaagcctagctgcaaagaggtgaggagggaatagcaggggaggaagcagtagtgcctccagacatctccttcagggaattgtgctgtaaagaagagcagagaaatgaggatgtagctggaaggagaaa

SEQ ID NO: 771288 - DNA, 566 bp, Homo sapiens
ctattctctttattatttcattaagaaaaaaatgctggtctggatttactgagttattttcataattcacactctaggttcaaaggcacagtctctctgttcacagcttcatgatggaatcctgagcataagttagaggttagcctttaattatagcaaggacagttgtttcatggtaagaacaagggaaatagatcataagtgcacagacaaggtataytggtgcttggaagatgacagagtttctgttagaatgattctatatttttcaaagtagtgtgaggccaactaagaggggccacatggggagtgtcgaatatttgaatgaagagaagaaagtgtgagatagatattttggagaatagtagagcaaactttactagagaaaggtgcaagagttttatagcagtattgaatgcccatttgagaattatgatcatgaaattaaagtgtcactagtcagttcagggctagatgaataagcctgtagtgaacattagccataactgttaaactctgttcttcatccacatttagctggttggctatcataggtgatatgatgg

SEQ ID NO: 771289 - DNA, 564 bp, Homo sapiens
aatgtttgattcaagatctggatcaaggaaagtaaaaagtaattggggattttttttggtccagaaaacaaggaagtgctcaatggaggtcacattaaaaggacacaagaaagtatgctccctggccaaatttgggacaatttaagtattctaaaaaatagtgatggtaatgggtaatcacaattcagttaaaaattacaaaaacaagttcgtataaatgttaataaagggtgagagtgggggacaggaagacagctcttctttacaaaagaatgcctgctgatacacagagaagaaatgacataattagaaagtcacmgttttgcaaccccagtggaacaattaatttgggcaaaaatcatcactggatgctaaaaccattgggtgaaacatgttgggcactacatgcacacggtcgtctcagagtatcatcttgacacttcgagtatcatttcacagatcatacttattacaaagtagggggaaaatacctttataatgtagagatctggaggccaacaccttgacccagtgatcaaggttggcatcaccagcagcaggaca

SEQ ID NO: 771290 - DNA, 616 bp, Homo sapiens
aatgataatacctcagtgttcacataactgtaagtatgttttgttcctgtgagttagtaaattgcgatttttacatgaggtagtgttaatttaacaccaaagatatgtgcacatatttatgtttcacctttagctcttctatcttgtagtttttcagaaggtctttttcactgccttcctcttgaatattgaaggtttttacaaggcttctatattttctacctcgttcctctttgatatttttatgattcttatagcatttatggcagtaaaatttttggtcacaataagtggttctttatttgccaagtgytttttgacgttaagtttcagaatttttgtttttaacaggataacagataggtggttccaccaagtagtacttgatatagaatttcaaagtttaaaaatctgtaacaataagaatattgccccagtgggagaattctaccactgactttattacagacagttttataccttaactgctatgtgacgctggaaagactcatgttggaatttgtttgtacttctctttaagagtctagtatataagcatttaaaaatatcgtaccttaagatatttagtgcataggggttaccctatcattgttga

SEQ ID NO: 771291 - DNA, 578 bp, Homo sapiens
gttctcactcggctagtaaagacataccggagactgcgtaatttataaaggaaagaggtttaattaactcacagttccacatggctggggaggcctcacaatcatggcagaaggcaaaggggaagcaagacatgtcttacatggcagcaggtaagagggcatgtgttaggggaactcccatttataaaaccatcagatctcgtgagacttattcactaccacgaaaaagagtgtggggaagctgccctcatgtttcaattatctccayctgaccccacccttgacatgtagggactattactattcaaggtgagatttgggtggggacacagccaaaaaccatatcacatactaaatactcaataattattattactactaattcatttttttgagataggatttcacttttgtccaggctgtagtgcaatggcacgacagggctcactgtagcctcaaactcctggactcaagcaatcctcctgcctcagcctcccaagtagctgggatgacaggtgtgtgccaccaggcccggctaagtccaatgtcacatattgtcattattactgttactttta

SEQ ID NO: 771292 - DNA, 222 bp, Homo sapiens
ccacagtctacaaaaccccacagctcctaagaagtctctcgcctgacttctgctcttagactccgctagattgcaaatgacctgctttctttctgatcctgggctgcgttccgacccctgtsggatagtaaatcacaagtaaggtacctgctgtcggcagatctgagctttcttcttggacgccttatacccacagtcctccaggtgctggtgtagggcatc

SEQ ID NO: 771293 - DNA, 577 bp, Homo sapiens
tgggatccacagtctacaaaaccccacagctcctaagaagtctctcgcctgacttctgctcttagactccgctagattgcaaatgacctgctttctttctgatcctgggctgcgttccgacccctgtcggatagtaaatcacaagtaaggtacctgctgtcggcagatctgagctttcttcttggacgccttatacccacagtcctccaggtgctggtgtagggcatctgttcccttgggacacccgactgcaatggggtgtcccagcagaaggtcatcaacctactggagcaacacgcagcctaggtctctggtgggaaacttctgatggtctcgagccaacgccttcccgaagatggtgggggagttcttgaacccttggggaagcccggtccaagtgtactgaktagtgacacctgactccggatcttcccactgaaaggcaaacagcttctgcctctcaggggataatctgataggaaagaaagcgtctttcaggtccaagcaggtgaaccagctgtcctcagctggcagcaaacccaacaatgtggacgggttaggtactgttggatgtaaa

SEQ ID NO: 771294 - DNA, 549 bp, Homo sapiens
agtctctggtagaattgtgctggacttcttttccctgaatgacctcagagaccttgttaacgtttgtggccttttgagctcccgtctttaatgcttccaagagagcttcccggtctcagtttagcctttgcatatcctctctttcaygtgggtccaacaggtgttcggttcctggtaactgagtccttccatactcttgggggttttgataatcagctggtctggtgcatgttcctctagccacttagttgctgcgtggagccctctccgccttttgcctttcatctctgttaaagaggaacatgagcaaccgatggcaatcaacccaggtgtggttgtgggtctggataacagtctggagcaaatcaattagggcttgcggcttttcgctgtaggatggggtattgttttcccagttgagaaggtcagcagaggtgaagggctggtacacaaaaacatgcctctccaccacctgaccatcctcctttatcccagtataccgctggtctctcagtggcatttggatccccgttttgcatcgtaaacgag

SEQ ID NO: 771295 - DNA, 549 bp, Homo sapiens
agtctctggtagaattgtgctggacttcttttccctgaatgacctcagagaccttgttaacgtttgtggccttttgagctcccgtctttaatgcttccaagagagcttcccggtctcagtttagcctttgcatatcctctctttcacgtgggtccaacaggtgktcggttcctggtaactgagtccttccatactcttgggggttttgataatcagctggtctggtgcatgttcctctagccacttagttgctgcgtggagccctctccgccttttgcctttcatctctgttaaagaggaacatgagcaaccgatggcaatcaacccaggtgtggttgtgggtctggataacagtctggagcaaatcaattagggcttgcggcttttcgctgtaggatggggtattgttttcccagttgagaaggtcagcagaggtgaagggctggtacacaaaaacatgcctctccaccacctgaccatcctcctttatcccagtataccgctggtctctcagtggcatttggatccccgttttgcatcgtaaacgag

SEQ ID NO: 771296 - DNA, 509 bp, Homo sapiens
tgtaggacattacaattaatatcacagggtgtgcagccactgtgatattaggagcaacatctttctaggatattacaaacaatatcacagggtgtacgcccactctgatgtcaggagcaatatctccctaggatatccaaaataataccacagggtgtccaatctctgccttccaggctctaagggattctcctgcttcagcctcccgagtagctagggttaccccgccaccacrcccggctaatttttttttattttcactagagacggggtttcaccacgttggccaggctggtctggaactcctgacctcaggtgattcgtcggcctcggccgcccaaagtgctgggattacaggtgtgagccatggtgctcggccaagagttatatattcaattcatttggaaacacagctcccatatttgagtgtgcatgtactttatgaagaaatgatgtcagaaaacctaaggatgataataaatatgaaaagtaactggcatgttaaaagg

SEQ ID NO: 771297 - DNA, 509 bp, Homo sapiens
tgtaggacattacaattaatatcacagggtgtgcagccactgtgatattaggagcaacatctttctaggatattacaaacaatatcacagggtgtacgcccactctgatgtcaggagcaatatctccctaggatatccaaaataataccacagggtgtccaatctctgccttccaggctctaagggattctcctgcttcagcctcccgagtagctagggttaccccgccaccacgcccggctaatttttttttattttcactagagacggggtttcaccacgttggccaggctggtctggaactcctgacctcaggtgattcgtcggcctcggccgcccaaagtgctgggattacaggtgtgagccatggygctcggccaagagttatatattcaattcatttggaaacacagctcccatatttgagtgtgcatgtactttatgaagaaatgatgtcagaaaacctaaggatgataataaatatgaaaagtaactggcatgttaaaagg

SEQ ID NO: 771298 - DNA, 373 bp, Homo sapiens
gcaaagtgacatttcaaaatcctgctgttggtattgggtaaccaatatttttgcaagtcaaatagattccaattttttgtttctatcaaaattgaaggaaaattcaacagatgatcagctggtcactaaaattattttctcatgttcatcatgtratttttggaaaatagaaagaattaaaaacattcaatgtcactgcaatagaatttcttctagcctacttgttcatttatgtgaacagtatttcatagcccttacatttataatacaatctaaaaaatacaaataagtgatatataaacctttagcttacataagtctcaattctaataggaagtaataattatctatggatccatgaatcatttggaaa

SEQ ID NO: 771299 - DNA, 607 bp, Homo sapiens
ctggaatctcatcaggaggagtagatatcaaattaataaggagcactgtgggcattcagttgcatagggttcactacatgtctataactgcaataaatacaactccacaacaatttgattttgggaaagtcagtttatatatgttagctcactgctccttacaacaactctgtgataaaggttaatgttctcttcccttggctgataaaactgaagttcaaatacagatagtaggtgtcaggatcttagtttgaacacaaatctctgattcctgtcctgatgtgggtgytaccataccacaggtaccttgctgcaaatgaaatctgttaactttgagggtggattttggtgaagttttatctccatgaacaaactgcaaagggcagagcagagcaggtcagcttgaatctcagccaaaaatactggtgggccagctgcatcttttccctccttctccagaattaaaagcaacaagaagcctctgtcatgatggcaggtgggcaatctagttattttgcaattaacaaagtttaaagggcactttctgaaaaatgtgccaaagggcctaaattaccagttttacactaatgtgagtaatctattattc

SEQ ID NO: 771300 - DNA, 624 bp, Homo sapiens
gaataactgtgcaataggatccatgctgcaatggccttgtgcaagaacagccacctgtgcacaaaggtaggagcattgcatcagccaggcaggagcagacaagattatttccaagctgattatagaagcgcagaagaggagcaccacccacaggcaaaacagcctttactatacatgcctctgctgctatttttaataaattatttttccttttaaaaaatcatatgggtttattctagaaaaaatacaaaatatagatgaaagaaaagagaagtaagactcttccataawaccccacccgagatgactactgttaacattacgatatgtacatcccgcttaccatttttctgtacatgtacaagtgtatgtgtgtgtatatacacacacattctgtacaccacatacattctatataccacattgtgacattttcaaaaaataatacgtcatgaatatttttctaggtcatattccgtagtagtacattatgggctacctatattctgttatatggataggcataatttatttagccaatcctgtcttttagggcattttggttttatttcagtttctcacattacactcttcccatctatttgtataaacttgttgacgaag

SEQ ID NO: 771301 - DNA, 604 bp, Homo sapiens
ttacattatttacccaggagtcattcaggaacaggttgttcaatttccatgaaattgtgtggttttgagtgagtttcttaatcctgagttctagtttgattgcactgtggtctgagagactgtttgttatgatttcagttcttttgcatttactgaggagtgttttacttccaattatgtggccgattttagaataagtgccatgtggcactgagaagaatgtatattctgttartttggggtagagagttctgtagatgtctactagatccacttgatccagagctgcgttcaagtcctgaatatccttgttaatcttctgtcttgttgatctgtctaatactgatagtggagtgttgaagtctcccactattattgtgtgggagtctaagtctctttgtagatctctaaaaatttgttttatgaatctgggtgctcctgtattgggtgcatatacattcaggatagttagctcttcttgttgcattgatccctttaccattcccttctttgtcttttttggtctttgttggtttaaagtctcttttgtcagagcctaggattgcaacccctgctttttttttgctttccatttgcttggtaa

SEQ ID NO: 771302 - DNA, 620 bp, Homo sapiens
ggcaataatgccagctcatgtgatgttttttgttactttttgggggatacagacagttcaggagaaaatgttctcttaggagactttaaattagtttttgacaatcaaatcttcaaagatgcactccctgatggcaaaagctacagcacgtatatctcctaacacaaaggatattgtgtggaaaagtcaatgtttgtgtagaagaagaaaaaagaaaaaaaawtgaagcaattagcaagttaatctttttaaaacatttgcaacttgatactttcaggaataaaaaaacaaaaaagttgtaaaagccctgtagatgaggccctcatattctacaagctgtttctcttccagtgttcaggaaatggcgcttcaacacacattcagctgcatgagcagaaactgcagagtcattcttgctctcacacgatctctcttccccgacaactgatccatctccaggtcctgtcactgttgcctcttaaatatcccttgaatctctctgtttttctccatcttcattagtgcaagctcctcctatttattaactctcccctggactactagaatcaaactcctaactccacctgagtcctctctggcaacatccctttgcaccccca

SEQ ID NO: 771303 - DNA, 527 bp, Homo sapiens
aatgtgggaatatttgtacagcagttgttgtgtgcattgcccagatgtcctagaaggactgaaagatgtattcatctaattgctgagagtgctatcagccttcctacccaagacctctttccagggggcagtctacatccactgactggttgatgcagaaatctaaagaccctgtccgcagctacaacagactggttgatgcagaaatctaaagaccctgtccgcagctacaacatggagccaccctaaaaagctgccttggcttcagagctacctgcrggttggctgaggtcttcgttgagatttcattgcagcccaactcctcctttgcccagcctgcttcctttccttccattccacaggtgggaatcctagcagcagctcttgatcttcctgtgctccaattttcctcccagagactgcttccttgggtaccccctgagctgtggggcatacctcacaaggaaaatgggacaagttgagactttaaagaggatggggaagaagtcaatcagtgatgaagggag

SEQ ID NO: 771304 - DNA, 645 bp, Homo sapiens
tcatatagtatgcagcctgttcagaatgacttctctcacttaacagtatgcatttaaggttcatacaggactttctgtggctcgatagctcatttctttattgttgaatagtattccatcatatggatgtaccagtttgtttatccattcacttattgaaraaatgtgtgttgcttcaagttttaaccaattataaccttgttatgaacacgtgtgtgctgtttttatgtggacaagttttcaaatcagtaaatacctagaagtgaaactgttccaactgtcccatagaaatgacatttaaaagttttggaacacacatggaaattgacccttcaggtcttaaaacttgaaatttacatttgtctcatctgagttcctccctcagggaactgatcctcaggcaagggacttaaactcaccagatcaccacatcgaaataagatgccagaccccctcattcatcataattgcttctttaccccccttaattccttccctcactatgtaagcctccccagttgtagttggtcagggatttgagactttatctcccattctccttggctgcagcacccagtgaaatacttctttcatggcaacattcattgtctcagtgattgacattctgtgtggtgagcagcagga

SEQ ID NO: 771305 - DNA, 645 bp, Homo sapiens
tcatatagtatgcagcctgttcagaatgacttctctcacttaacagtatgcatttaaggttcatacaggactttctgtggctcgatagctcatttctttattgttgaatagtattccatcatatggatgtaccagtttgtttatccattcacttattgaagaaatgtgtgttgcttcaagttttaaccaattataaccttgttatgaacacgtgtgtgctgtttttatgtggacaagttttcaaatcagtaaatacctaraagtgaaactgttccaactgtcccatagaaatgacatttaaaagttttggaacacacatggaaattgacccttcaggtcttaaaacttgaaatttacatttgtctcatctgagttcctccctcagggaactgatcctcaggcaagggacttaaactcaccagatcaccacatcgaaataagatgccagaccccctcattcatcataattgcttctttaccccccttaattccttccctcactatgtaagcctccccagttgtagttggtcagggatttgagactttatctcccattctccttggctgcagcacccagtgaaatacttctttcatggcaacattcattgtctcagtgattgacattctgtgtggtgagcagcagga

SEQ ID NO: 771306 - DNA, 617 bp, Homo sapiens
ggtggatccaaggttctagcctattcaatctgattccaaagtctgcacccttaaccagatgacatgctgcctcatagtttttctttctgtgcccccatctccttattgaagctatactttggatagattttcaaaaaattatgaatgatcatcagaatttactttagccaggcaggccgggcatggtggctcatgtctgttatctcagcactttgggaggccaaggcgggaggatcacttaaggtcaggagttcgagaccagcctggccaatttggtgaaaccccatctctacacaaaaattagctgggcgtggtggcacaagcctgtaatcccggctactcaggaagctgaggcaggagaaatgcttgaacctgggaggcggacattgcagtgagcctagatcatgtcactgcactccagcctgggtsacagagtaagattctgtctcaaaaaaaagaatttactttagccaggcaaactggtgttggcccatgatcaaaaataagtcatcatctaaaaaagaaaattttttaaaaaatgaattataacattattctttctttttatggatttttttccttttattgattttcacctatgccatgaacattgcttt

SEQ ID NO: 771307 - DNA, 473 bp, Homo sapiens
tgccatccattgtcatgtggcagattaacaagttctaggggtaaggataaatacagttttgaatttcataaatttgaggcacctgttcaggagaataatactaggctagaccagagatacagatttgggagtcaccagcatatcaaaggcaaaatcaagtagggagaaagtactaagaagaaaatacagcataraagaaagcccttaggataaccaattagtaaatgactaaattaaccattatacaactctaaattacgcaagtgctaaaaattataattaggaaaaatgctttacgatattctgttgcatttaagagatatatcataaaaccaaatgtattacctctatgtacttacaagggaacatcctaggcccttctctggacattcctagagaacctcatgccctcatatttcttatggcagtggaaggttgggacaaggagtcaggaaaactatctgctgatattt

SEQ ID NO: 771308 - DNA, 691 bp, Homo sapiens
gagagatgaggatccagtttcattcttctacactgggcttttcaatgatcccagcaccatttgttgaataggatgtcctttccacactgcatatttttgtttgctttgttgaggatcagttgactgcaagtttttggctttatttctgggttctctattctgttccattggtctatgtgcctatttttrtaacagtaccatgttgctttggtgactatggcctcagagaaaaaggtgaagtcaggtaacgtgatgcctcccagtgtgttctttttgcttagtcttgctttggctgtgtgggctcttttttggttccatgtaaattttaggattgtttttgctagttctgagaagaatgatggtgctatcttgatgggaattgcactgactttgtagattgcttttggcagtgtggtcattttcacaatattgattctccccaaccatgagcatgggatgtgtttctatttgtttgtgtcatctatgatttctttcagcagtgtttcatagttttccttgtagaggtctttcacatccttgattagatatattcctaagtgtttgtttgtttgtttttgcagatattgtgaaaggggtggagttcttgatttgattttcagcttggtcactgttggtaggcagcagagctaccgatttgtgtactttaattttgtatctggaaactttggtg

SEQ ID NO: 771309 - DNA, 691 bp, Homo sapiens
gagagatgaggatccagtttcattcttctacactgggcttttcaatgatcccagcaccatttgttgaataggatgtcctttccacactgcatatttttgtttgctttgttgaggatcagttgactgcaagtttttggctttatttctgggttctctattctgttccattggtctatgtgcctatttttgtaacartaccatgttgctttggtgactatggcctcagagaaaaaggtgaagtcaggtaacgtgatgcctcccagtgtgttctttttgcttagtcttgctttggctgtgtgggctcttttttggttccatgtaaattttaggattgtttttgctagttctgagaagaatgatggtgctatcttgatgggaattgcactgactttgtagattgcttttggcagtgtggtcattttcacaatattgattctccccaaccatgagcatgggatgtgtttctatttgtttgtgtcatctatgatttctttcagcagtgtttcatagttttccttgtagaggtctttcacatccttgattagatatattcctaagtgtttgtttgtttgtttttgcagatattgtgaaaggggtggagttcttgatttgattttcagcttggtcactgttggtaggcagcagagctaccgatttgtgtactttaattttgtatctggaaactttggtg

SEQ ID NO: 771310 - DNA, 691 bp, Homo sapiens
gagagatgaggatccagtttcattcttctacactgggcttttcaatgatcccagcaccatttgttgaataggatgtcctttccacactgcatatttttgtttgctttgttgaggatcagttgactgcaagtttttggctttatttctgggttctctattctgttccattggtctatgtgcctatttttgtaacagtaccatgttgctttggtgactatggcctcagagaaaaaggtgaagtcaggtaacgtgatgcctcccartgtgttctttttgcttagtcttgctttggctgtgtgggctcttttttggttccatgtaaattttaggattgtttttgctagttctgagaagaatgatggtgctatcttgatgggaattgcactgactttgtagattgcttttggcagtgtggtcattttcacaatattgattctccccaaccatgagcatgggatgtgtttctatttgtttgtgtcatctatgatttctttcagcagtgtttcatagttttccttgtagaggtctttcacatccttgattagatatattcctaagtgtttgtttgtttgtttttgcagatattgtgaaaggggtggagttcttgatttgattttcagcttggtcactgttggtaggcagcagagctaccgatttgtgtactttaattttgtatctggaaactttggtg

SEQ ID NO: 771311 - DNA, 691 bp, Homo sapiens
gagagatgaggatccagtttcattcttctacactgggcttttcaatgatcccagcaccatttgttgaataggatgtcctttccacactgcatatttttgtttgctttgttgaggatcagttgactgcaagtttttggctttatttctgggttctctattctgttccattggtctatgtgcctatttttgtaacagtaccatgttgctttggtgactatggcctcagagaaaaaggtgaagtcaggtaacgtgatgcctcccagtgtgttctttttgcttagtcttgctttggctgtgtgggctcttttttggttccatgtaaattttaggattgtttttgctagttctgagaagaatgatggtgctatcttgatgggaattgcactgactttgtagattgcttttggcagtgtggtcattttcacaatattgattctccccawccatgagcatgggatgtgtttctatttgtttgtgtcatctatgatttctttcagcagtgtttcatagttttccttgtagaggtctttcacatccttgattagatatattcctaagtgtttgtttgtttgtttttgcagatattgtgaaaggggtggagttcttgatttgattttcagcttggtcactgttggtaggcagcagagctaccgatttgtgtactttaattttgtatctggaaactttggtg

SEQ ID NO: 771312 - DNA, 520 bp, Homo sapiens
catgtatttgcctggttttgaaggatccttttggagttgatttccaattttatttcactgtggtctgagagagtacttgatataatttcgattttcttaaatttcctgagacttattttgtggcctatcgtatggtctatgttggagaatgttccatgtgctgatgaatagaatgtgtattctgcagttgttggatagaattttctgtaaatatctgttaagttcatttgttctagaatatagtttaagtccattgtttctttgttgactttctgtcttgatgacttgtctagtgctgtcagtggagtgttaaagtcctccactattattgtgttgccatctrtctcatttcttaggtatagtagtaattgttttataaatttgggagcaccagtgttaggtgcatatatatttagaactgtgatattttcctgttggactaatccttttatcattatataatgtccctctttgtttgtttaaactgctgttgctttgaagtatgttttgtctgatagaa

SEQ ID NO: 771313 - DNA, 630 bp, Homo sapiens
tagaagacatcagcagtagcaatgtagtttttaaaagaaagtttctttagaatactggtgatctgggaggagggccaatggttttgctgttaaaatacaatgatggggattccttcactctggaggataagaaaaacacaagttaatggtagattgaactgaatgaataggcactcttcctccagtgtttcttaaactttgacatcataatattcacagtccactaataactgatgaaagaaaaataaaaggtgacggctaacaaaaatactaactgagaaactcggaagccactggactgcattctggatgtaacatttgcatatttcagatgtgtaatatagccatgttttctgcaagttaggttcctagtacttatgatagaaataagtttatctacactttcragtattccataaatctaaccataatccccagctactctgctctttccataggtaaaacaataattaatcaagatagctcagttaacaaaaaaaaaaaaaaaagcctgacttacatttttgtttgttcatttctagtgctctttgctgaggttgttgaaacaaaattatcccactaggcattccttgttaccttaatcagttccactctttcttcttctgtacc

SEQ ID NO: 771314 - DNA, 582 bp, Homo sapiens
cttgaggtaactggaatttcaccaagctacagtctgcaggaataaatggaataatatcactcgaccctaccaagccccagggacactttcccacatggctcttgcagtatgtccccaaaggttgtccacctacttctctcatatgagtctactgattgcctcccttccttttgaggaactgctctcttcttctgggatcctctggccacagtagcactgccaagacactgccaagtagcatgttttctactgaccctggaagcccctcytttgcattgctgccaagacaccgcatgtggtgtcagagctgttcagacatctgtggcaaagtaagggacagggcatcgctcatcatttattgcccgctgttaaaaagttccaaagcactgctcctagtgtcctaaatgctaccaaaggtttcagttaaacagagcttgagggagacaggactcagattcatcaatattcagctctcctttattttcataaacaagctccttgaaaggaaaatttgctatgactttgttattggttaatgatagaggaggagaaatcatggacatttcttacaggtaaaagcat

SEQ ID NO: 771315 - DNA, 582 bp, Homo sapiens
cttgaggtaactggaatttcaccaagctacagtctgcaggaataaatggaataatatcactcgaccctaccaagccccagggacactttcccacatggctcttgcagtatgtccccaaaggttgtccacctacttctctcatatgagtctactgattgcctcccttccttttgaggaactgctctcttcttctgggatcctctggccacagtagcactgccaagacactgccaagtagcatgttttctactgaccctggaagcccctcctttgcattgctgccaagacaccgyatgtggtgtcagagctgttcagacatctgtggcaaagtaagggacagggcatcgctcatcatttattgcccgctgttaaaaagttccaaagcactgctcctagtgtcctaaatgctaccaaaggtttcagttaaacagagcttgagggagacaggactcagattcatcaatattcagctctcctttattttcataaacaagctccttgaaaggaaaatttgctatgactttgttattggttaatgatagaggaggagaaatcatggacatttcttacaggtaaaagcat

SEQ ID NO: 771316 - DNA, 582 bp, Homo sapiens
cttgaggtaactggaatttcaccaagctacagtctgcaggaataaatggaataatatcactcgaccctaccaagccccagggacactttcccacatggctcttgcagtatgtccccaaaggttgtccacctacttctctcatatgagtctactgattgcctcccttccttttgaggaactgctctcttcttctgggatcctctggccacagtagcactgccaagacactgccaagtagcatgttttctactgaccctggaagcccctcctttgcattgctgccaagacaccgcatgtggtgtcagagctgttcagacatctgtggcaaagtaagggacagggcatcgctcatcatttattgccckctgttaaaaagttccaaagcactgctcctagtgtcctaaatgctaccaaaggtttcagttaaacagagcttgagggagacaggactcagattcatcaatattcagctctcctttattttcataaacaagctccttgaaaggaaaatttgctatgactttgttattggttaatgatagaggaggagaaatcatggacatttcttacaggtaaaagcat

SEQ ID NO: 771317 - DNA, 631 bp, Homo sapiens
aaatcttgccttatatagaaattaactctaaatggataatacacccaagtgtaaaatataaagctagaaaacttttagaataaaacaaagggaaaatcaatatgaccttgggtttggcaatgagtttttgaatataatatccaaagtacaatctataaagaaaaacgtgataaattggattttatgaaaattcaaaccttttgttctgtgaaagacagcattgagaaaacgaaagcacaagccagacacttggttaaaagtatatgtttgataaaagaatgtatccagtatatataaataactcttaaactcagcaataaacacacaaactttcaaacagaaaagatctgaattcacttacagaagagcttgtgaagcacatttctgatcctcacttctagagattcttagtcagtttgtgtaaagcctgkgaatttgtaattggaacaggttcccaggtgatgctgatgctgctagcttagggcccacgctgctctaggtgaaactgctgcaggtggtcagattttgaggcatattcacctgggtgtctccatattggttgtagcctactcaggtagaagtagaatttgttcaatgatattctagccaaacatttttctttttttttttt

SEQ ID NO: 771318 - DNA, 488 bp, Homo sapiens
gcaatataggcatagtattgcttcagttaaaagaaaaagttcaggtgtggaccgaggtcagatctgttttgacaaggactctggccctgtccacctgggtcacccactcgaacatgtggcagcctaattgtcagacagaaagamaatggttgtgggaaatctaggcctcgtgtcagtatttaaagttcagaggaggagagatgatctctttcagtggttctctcttaggaactgagattatctcttccagacattctctcttaggagcaagagcatctctttttcatgcccagagcaaaaatctactgagttttgtcagctaatattgggttacccatcaattatttaaccagtctttttggtcaagaaaatgtcatgaaatctattggcttagccttgcattcctgagtccattgtggacaaagggaaaatgattccgttagcttagtcagctctggaggttaggctggttctccctgaagcacaca

SEQ ID NO: 771319 - DNA, 544 bp, Homo sapiens
ctgcatattaattaatgttagatgttaatagtaggggagactgggtggtgtgatgtgcctgtaattgtcttcacaatttttctgtaatctgaaaccttctaaaatatagtttatttttaaaaagagaattttgcagcttggtacggtggctcacacttgtaatcccagcattttccatctcagcctcattgcatgagctcaggagtttggcaccagcctgagcracatggtgaaaccctgtctctaccaaaactacaaaaactttgcagggaatggtggcacacacctgtgttcccagctactcaggaggttgaggtgggagaaggatggctggagcccaggacacggaggttgcaatgagccgagatcacaccactgcactacagcctgggcgacagagtaagactgtctaaaaagcaaaacaaaacaaaagaaaagaaaacaaacaaacaaaaaaacacaaaaaccaaagaaacttttctacatcaccctccattgaggttatgtgcatctttactctcatctgcagtgtaaaaaatgtttt

SEQ ID NO: 771320 - DNA, 595 bp, Homo sapiens
cagaaatctcctaattttaaaatacaccaaataaacatgtctattgggcataattttaaccaaatgacttacggtttgtgacctctaaaatagtttttatttttgcaatatgtttagagtaatttaaaatatgaatgaaggaattatacaactactaagatatggttgaatattggcatatatcaaagatctaacttgttagaagaggcatatgtctcaggcttcaaacctgaaatattcatctcccatttttaatacagatataggatttaaaagtctgtttcttttttccattgcttttcgggaagatttcagtctctctactgactgtcaatcccttccctccccctcttccacmtgaaggtagcatggtttttagcatagtgcctggcacataagtaagcccaaatgtagacacatgcagcataacaatgtttcagtcatctgctgaccgcgtatacagtgatggtcccataagattataatattgtatttttactgtacattttctatgtttagatacacaaatacctaccactgtgttttaattgcctacagtattcgggacagtaatatgctgtacaggtttgtagcc

SEQ ID NO: 771321 - DNA, 593 bp, Homo sapiens
ttgcattttttaattgtgctttctttggcctttataatttctttatcatttcttgttgaaggtaaataagaaggaagagttgaagatttctctgtattactttatcagccacacacctagagacaacatggaaatgtgggtaggaaatattttgaatgcttatattaaaaactatagtggtatatgattttttgaaaattcatatagtttaacgacagaaactgtctctgatamgggaaacaaaattggatgtagaagtaaaaagagcatgactaaacaaatgactgcatcagcaaaatgaaatgtattgaaacagacaaatcatcacatcagaatgaagttacttcctgaatttaccacatgaaaaaaaaactgtggaaattaacaagaaattagccatctgtatttgttacaatatagatatagctgcatgtgagagagaccaaaaatagcttaataaactggcttatctgtcttgtctgagtggctttgcctgcaagtcatcaggggcctgcactaatactatcttctctgcaatctcaagtgtgttgagattggtaccaggtgataccaggtctgcattcaaaccagga

SEQ ID NO: 771322 - DNA, 552 bp, Homo sapiens
cctccccagttacatcatcaccgcctagacaaatatcaaaaataaatcaaaactatgtaacagataaatatgagaaaaaaaacccatcaggaaccaagggctctagctcccaactttaccattaataaaggcacattgcagtgtaccagacttgatctaggaataagctgttctcagctccatatttaggttagttccttaaagtttcttccakaatttacttcctgaaaatattggggttgttgttgtcactgcaacctacaactaaccttccacgaataaatttgatttagatagtaattattagaaaagtatttcaaaatagacagttaacaagcaaaagaaaaagggtgcaacctcactagcgttcaaaattataaatcaaaattataatgaagtaacttttttttttaaccaatcacaataggcaaagactttgaaaagataattccacatttagctgagaatagagtgaaatgggccttcctatattttactcttgggaatgcaaattaattattcctttctgggaagaaaatagccagactgtcc

SEQ ID NO: 771323 - DNA, 665 bp, Homo sapiens
ttagacgttatccatatgctgatggatcccaaatttgacctctagtctctgtctttctcctaaactttatactcatactcagttcctactcagcatctttgctcacctgctattaaccacttcaaagttaatatgcctcatattgatcctttgattaccatgccacccccaaatatgcatgtttttaaggattttctgttctattaaatgttccaacattatcagttgttctgtgtaaaaacctaggactcatccytggtcctctctttctcttacagcttacatcagatttattagtaagcccaactgggtccaccttaatggatacccactagtcacaatctcaccactaccatcctcgcccgaggagccaccatctttttcctgcactaaagcaagtgccttctaactagtgtactgcatctcttcttaatattgccgcctaccacctattctccacacagcatccagaatgtatgtcagatcacaacattctccaattcaaaactctccaaatttccccatcatacttagaataaagccaaagtaagtgacaaggtacataacatcaaggccctatgtgacctgtgctctcatgctcttcttgtattctctcccttttgcctcatttgctaccattctttactgaccttgctttctctgag

SEQ ID NO: 771324 - DNA, 666 bp, Homo sapiens
gagaataaatagggattttatacaaaagaaagtacaagtggctcataagtacataaaaacttgctcaatctcaagttattagaaaaggcaaattgaaattacaatgagaaacaattttatacctagagattggcaaaacttagacaatactacatgttgatgaggtgtggagcaactagaactattaaaatgctggttggtgagcaagttatwacaaatgctttggaaacagttcagcattacttattaaggtgaaacttacacacatatcatacatactatatatgatatcatgtgatatatatgatagatatgttatgtgatatatagggtatatatgtgtatactatatatgtatatactacatatatacgtgtatactatatatacactatataagatatatagtctatatcatatataggatatagatacacacacgtatatcatatatatcccatataaaggatattaatgttttacatgttacaagcgtataaaaattttcccccaatgtgacaatttgtgtcaacaggcagggaagaagtgaggcctgagttcactccaagagcctcggaggacctgagtcttactaacaactactggagtgaactggaaggggatccttccccagcctacgctggaggtaaaacttcagccttgtga

SEQ ID NO: 771325 - DNA, 645 bp, Homo sapiens
taactccatttttgttgtctgactgttgacagatttcaagcaccccctgttcttctcttccccttgctccttatctgggcaagataacaagaaagtccaggtgcactaggttgatttaaaaaaatcctgggtgtatctaggcaagctgatgggaaaattgggtgtacctttagcaccagtgggaagttcaaaccacccaagtcctagcccttatgagggagctctctctgagccccctctagcctccatcaaactccaaactagtttttcttccttcttctcaagccatattcagacctgcctggaggccttccctgctcttcccagaaagcctcattatgtgattaataaaccttttcatgctctcttggtgcatgtgtgctatcatttgtcttaacatctgaaccaaattttgagtgaagagtcawcctgattaaggtgagtgaccacagcaacattgaatatttcactcactattttagacattggtattcgagaacaattgttccataataagagaatttattgaagtagctagatgcaagataaacaccacaaaagaagccacactttccctttacactatttacttacactagattaatttatcccaagggcgtttattaaatacttactgtgtaggca

SEQ ID NO: 771326 - DNA, 645 bp, Homo sapiens
gacctacaccattcccaagagaagacaaaggaatggagagactgaaaacagtagtcatgagttctagccagagcaggtacctgaaatcgtctcaatctagagctttggagataacttgctctcctggaagagctgtccatgtgagttggcagggccatgtgtaagggcctctgtcctttgggcttcactcaaggccagcatcttctcagatctcagtatcccttcccgaggagaagkggaaaaaatggattcccagaagctgctcctataactcaaacgtgtgaactaacaatgaatgctttgaagatcaccctgcatgaaatacaattctcagtggttaggaaggtcagttcttctaaaacattttaatggtgtgactttttttccattggaatgtttttgcaggcacgattttgttctgattctctacttctcttccagaccccaagtgttgtcatgtttttcttctgcctgcacaggaattagcatcactgagggaaagacataccctgagtgtaaacttcacttaacgtcccgagataagcaggacagggtccatgtacattgttgttcttgcaataggcaacagtgagctggtcttaacctactctgacccaagaattttggtttttatttttacacaag

SEQ ID NO: 771327 - DNA, 616 bp, Homo sapiens
tgcttgatatggtttggctgtgtccccacccaaatcttatcttaaattataatcccataatccccacatgtcgtgggagggacctggtgggaggtaattgaatcataggcgcggtttccccatgctgttctatgatcgtgagcgggttctcacgagatctgatggttttataagcgtttggcattttccctgctgacactcgtttcttgtgccaccctgtgaatagacgccttccgccatgaatgtaagttttctgaggactccccagccatgcagaactgtgagtcaattaaacatctttccttcataaattacccagtytccagtattcttcatagcagtgtgagaacgaactgatacagtgctagttaattcagtttccacatgagactactaaattaattggcaaaagtaggcaacatgttcaaataaaaattgggaaaacatttctcccggtgctgaacttactctatagagttatttctgaaagaataattgcgaattgcatgttgcaattacgggctgctccagcagccttgagacaggccagctgacagttgatgttctaaaacagaagtaaggaatggcgaaattttttttttaattaaaaatgagt

SEQ ID NO: 771328 - DNA, 616 bp, Homo sapiens
tgcttgatatggtttggctgtgtccccacccaaatcttatcttaaattataatcccataatccccacatgtcgtgggagggacctggtgggaggtaattgaatcataggcgcggtttccccatgctgttctatgatcgtgagcgggttctcacgagatctgatggttttataagcgtttggcattttccctgctgacactcgtttcttgtgccaccctgtgaatagacgccttccgccatgaatgtaagttttctgaggactccccagccatgcagaactgtgagtcaattaaacatctttccttcataaattacccagtctccagtattcttcatagcagtgtgagaacgaactgatacagtgctagttaattcagttwccacatgagactactaaattaattggcaaaagtaggcaacatgttcaaataaaaattgggaaaacatttctcccggtgctgaacttactctatagagttatttctgaaagaataattgcgaattgcatgttgcaattacgggctgctccagcagccttgagacaggccagctgacagttgatgttctaaaacagaagtaaggaatggcgaaattttttttttaattaaaaatgagt

SEQ ID NO: 771329 - DNA, 523 bp, Homo sapiens
catgtatttgcctggttttgaaggatccttttggagttgatttccaattttatttcactgtggtctgagagagtacttgatataatttcgattttcttaaatttcctgagacttattttgtggcctatcgtatggtctatgttggagaatgttccatgtgctgatgaatagaatgtgtattctgcagttgttggatagaattttctgtaaatatctgttaagttcatttgttctagaatatagtttaagtccattgtttctttgttgactttctgtcttgatgacttgtctagtgctgtcagtggagtgttaaagtcctccactattattgtgttgccatctrtctcatttcttaggtatagtagtaattgttttataaatttgggagcaccagtgttaggtgcatatatatttagaactgtgatattttcctgttggactaatccttttatcattatataatgtccctctttgtttgtttaaactgctgttgctttgaagtatgttttgtctgatagaagaa

SEQ ID NO: 771330 - DNA, 575 bp, Homo sapiens; identical to SEQ ID NO: 766531

SEQ ID NO: 771331 - DNA, 614 bp, Homo sapiens
tatcttcattaggggaagaacttcagcaaggtcttgctgggatttagccccctgaagtatcgaagatgacacttgctgacagtggaggaaaccgaggaggcagcacagaggatggtgtttgtgcacagagatgagaggggtgcagctttcaccgacaaggggaggagggcacattcccaaccccagggagtgttccatgccagagacggaaagggacagctcagacattgtcccagacccgtccctgtctcctccaaataaggaggcctccaactccagttcaggaagttagcggctcataaaggatgagttgatttagagcctttccctgtgaagaagcttggaagagccagggttcaaagcctttgagataaacyaacaactgtgcccctgctgggaagtcattagtgtttgagggtcccacccattacttttgtaaagacacatgctttgtggacttataaataaaacttcaaaggtgatgacagtccagcagctgtgtagatggttgcatccttatgaactgtggacagaagctgaagtgggtaggagtcagggcaactttctggacagcagattaaacctgtgagtgtgttgctgatttcagtgttaac

SEQ ID NO: 771332 - DNA, 481 bp, Homo sapiens
accaggcttgtagggggcccaggtgcccaggctctctgtatggtgtcagcagcatcttctggccaaaattgacccaggggtcacaagtcagctggtttagtgggggtcgctccctggggtagagggtgaaaaattgttttactagtgtttccagtggaaatgaaaaaaaataggtggggtgtcatactgtcatatagcctgaggtgggaaggggccacaggtggggctggatgttctttcagcctctctggcagagatcacagacagagtggtcagsttggccaagcttttgagggctggctctgatgtaggggagggaggcagtccccagagcagaaatgccttccctggggctcatatccttgcaggggaaaagctggccatcctcccctcagagcctccttcactgcagcccgtgggaggcgaatgacctggggaatccgtgccccaggggcaaacctctgggttctggcttcagccc

SEQ ID NO: 771333 - DNA, 432 bp, Homo sapiens
tacgtaatttatacctccagtgttgaaaataatgcaatgataaaatacatagcataggggactggtgctctgtgtgaaggagcagaaaccatatatgactgaataatttgacaggggagttttcttgtattcttggcctgcattttcagttgtataatcttcgaaacacttgctgcacttgtatttggagagtggctatggtctacaaattttctaagtmcacgacatccatttaaaagtctggttattgcttggttgttgcaattaaggaattttctgcttttgcagcactaataataattagcttttaaacttttatctttcaccattaaacagcctcgtatacttaacttatcacaacctttttgtgagaaataatttcacagaactcttctgttgtgttttaacgaatacagtaagaaggaatgatat

SEQ ID NO: 771334 - DNA, 621 bp, Homo sapiens
cttggcctcccaaagtgttgggattgacccacaacgtgactcacaggcatgacccactgtgcccagcccctagaatgttgtttttattctgctcagaggttgtttaccttttcccaaatcttgagctatgcatcacaaagcctaagaaggcctctgtaacctcgttcctcgttcgtacstgcggagttctccacctggttgggggagggagacagacatgggcgagggtatccccaccactgcttcaaatcactatgccctactggatccccaccctctgctctgcttcatgcttgaagccaacagacagatgctgtacacccagctgctgcccctggcctccatggtcatggcagccacgctgtcgggggctgtacccagaggctgctttcatggccgccccattttggaggtgaggggcctgcggctgagcctgcacagggtcacagtggtccttctggtctcctgagtctctcttgggggctaactagcccggtctctggagcttcaggaacccgccagccagagacaggagatgtgaaactcgtgagtgttgggaaatcagcaaggcctggggaagaggaaagcctccaggcctgaagcaacatgcttccccttgca

SEQ ID NO: 771335 - DNA, 642 bp, Homo sapiens
aatcagtgctcacttctgtgcaacaggggacaacagacacggcccaaatactttctcaacttctgagacttgtctcctaaaacggtttctctgttgtgataaaactcatctcaatttaagaatttttaaatttctcatgcttttctagaaacgaaccttcccattattcaaaatagggggtacggctggatcactagggtttgaataaagttggayggcaaaagtgagagaacgttctagacatcctccaaccagctgttgtgacagagagaccctgggcaccaggagaaaggttgatctgcctctgccagcctcatgaaggactcaccacgggccccacatttggtcagcgcccttggtgggctatcagaagtgacccctcctggactgtcactaaacagtgccactgtcatgataacaaaaccacattttatgtggaaactgaaaacgtgttcaccctactgagagactgaaaagcacattcactgacattatctcatgtaatcacatcaacccccacgatgaaaacactggcccattttacagatgagaaaaccaaggctcagaggacgggagcagcgttcccaacgacgcgcctggaaaaggcgaggcctggagtcaccatcggactgtcaattccaa

SEQ ID NO: 771336 - DNA, 521 bp, Homo sapiens
gcatgcgtgcagactggactcagccttcaccagcccccgcagtcattacgcctggctccccagcacccaaacccaggtccccactggtcagcacgttcacacccagcctgccacatctccggcctggcccacagaatgcctggtcccagactcctaatgtaggaagactgccctgcctgatctcaaggcttgcttctctgcattcaggccactcctgctgcccagcctgacggctccyggagcagccggtgatcagtcaacctccccagccttctgtttgccttgcagagccagccgactcccaggagagctgtagaggctggtcagcagcctcactgtccctgccctgcctggtgagggaagggaggccacggaggaaattccctcccgctccatgtctgcctcgtgtccttctctctcctgctgtgctcctgggcagcagctccctcctccagccttccaggtctcccaatcctggccccagccacttccttgggaaccctaagcctgcctggagtcca

SEQ ID NO: 771337 - DNA, 458 bp, Homo sapiens
tcacagttgttctagtgataccctttatggtttttctttctctttttaaaaatcaggaatcaataaaagatcacatattgcattcgattgtcgtatgtctttagccttcacttccagctttcccacttgggacagtggcatttttgtatagtttaggccagttttgtagatgttctccattttggatttgtcaaataggtgtgatgatgtttttttgttgggtttttgagatcgagtctcgctctgtcacccaggctagagtgcagtggtgsgatctcggctcacctcgacctctgcctcccaggttcaagtgattctcatgcctcagcttcccaagtactgggactacaggtgcacaccaccacacccagctaagctttttttttttaaagtagagatagggtttcaccatgttggccagggtggcctcaaattcctaacctcaagcaatccaccca

SEQ ID NO: 771338 - DNA, 623 bp, Homo sapiens
ccaccttccatcctttctctttcctttccttccagtatttactgaacgtctgccgagaccctggcacgttactaggtgcctgccttgaagccatttaggagaaatggcgttctccaaacaaaagtattccgttgccattcacgtttctctctctccccctctctggccacatggagctgggcagaggtgtttttttttccttttctctttttctctgtctctgcttgtttctctgagaagataaaagctggcctttggctcccygctaggggacaggcccattacagccctctgttcctttccctgctttctctgacactgtgaggctgagacacagtgagtcctgctcagctgggcctgtgttcatcccattagcattgtggccacttcagggcctctgggattgagttctctggagccagaacagtttcataacccctagaggaggccaaagtcgtcccagccttctgggtccaaaggttctctcccatgtggctcctgcctcaataacctacctccattttttttttttagtttgtttctgcctcaggcacattttctctgtaatttttggaacccaaatataagggaaatctcatttgctccgttctgactcatttaca

SEQ ID NO: 771339 - DNA, 622 bp, Homo sapiens
aaaccctgcatgtgcatcttcaatgcctgtattccctcactcattcaaaccactctgtgtagcccgagcccagcccttcctggctttagagccttagcctgtgctgttgtgttgcctgggattcctttccctccaccctttgtacactggctcctcctaacccttctggtctaagtataaaggcactaccccagagaagtcttccctgactaccccatctgagtcactggccactctcaccaaagcaccctgtctgctatttgttaccccttcttcaactgtggttcacctgttcgtattccttctccccagccggcatacagtcaccaccaagtcaggtacccaacatagtacctgggatggattagacactcagtcaacacttgatgaagaaaacaataaagccttatagactcatgtccccctcatgaggggtgccctagccaactgacaccaagtcratcatttacaccattttttttcaatttgtgttattaaccacagaactcttttccaccctaaaataatcttatcccacaagaccccatacctagtgatttctgtggatgctgttgccaaacacctcagggcaagggccaggcacaggacagggttcccgcta

SEQ ID NO: 771340 - DNA, 638 bp, Homo sapiens
ctgattggatctgccagaggctagaaacacgaaatatccattgagtgttgacctgaggttaagacacgtgcattgtgcctgtggctgactgtgggtcacagcacagaaaaccagctgtaggtgagcctctgcaggaacaagaagcctatactcagcatcttcctgtggccctgccatgcacatagccctacagattccaagatcaagaagtcctggcttctgacctcaggagtggagaacactgaggactccatcagccgtgactagaaatgagggactggtcaatcagaaaggaggggtgtggggggaacaatgcaatacaaccttgaaagcctggagagtgtgctctgagtcctcagacctgagccctcactattaaacaggagtcaggaagccgggagcctgggtcctgctgagctctggtggggaatttcccctgacaggtgctagagctccaggagcttsagtggtggttcagggcagccagtgatattcatataagttatagaacgtttataccaagcgtctctgtctctcaagctctaccccacactgcactctctctttctctctgggcctgagagttctgccttaaggcattgatgcttttggcagtttcagagtttctgaaagccaca

SEQ ID NO: 771341 - DNA, 566 bp, Homo sapiens
gcattttgtattttttgtttgttaaagttgacaatcctagctggttgagaactctgggatgccctccagggagaagaactgaggaccaggtggcagcagcatgcagacaggaaggtagtgggtgacacctgggcaaaaggtagggagcgtccccccaccctcctcctgggaggcagcgtatggccgtgcagagcaggactccagagtcagattgcttgggtttgaatctcagctctgccacttggtagttattttgggcaacrtacttaaccttctcctcagtttcctcatctgtaaaatggggataacctactttgtgtggttatgaaaattaaataaattaatatttgtatagcacttagaacagtccttgagacatagtaagcattctataagcatttcataaatataaagcaaaagaaattagccaagccaacccacagataaggggagtgagtctacgagatttaataatcataaaacaagaatgaacatttatggaacacttactatgtgacaagatactgtgcaacatgtttgttctatatcagctcatttaatcctta

SEQ ID NO: 771342 - DNA, 515 bp, Homo sapiens
tctaaaaattcctaaaacagtaattttgaatgtgtatgaaaaatgtatgaagaatgtattagtcagggctcaacagagaaatagaatatatgtgcgcgtatgtgtgtttatgtgtgatatatatatgtgtgtgtgtgtgtgtgtgtgtgtgtgtgtgwgatatatatatatatatatatatatatagacagagagggagagatagagagagattgattttaaagaattggctgaaatgattatggagttttgaaggctggcaagcccaaaatctggagggtaggctggcagactggacacccagagaagagttgcaattggagtcagaagacattctgctggtaaaattccctctgcttcaggggaagtcagtcttttttctctaaagggtttttcaactgattggatgaggctgacccacattatggaggataatctgctttactggaagtctgccaatttacatattaatttcatccaaaagtactttcatagaagcatctagaataatattt

SEQ ID NO: 771343 - DNA, 654 bp, Homo sapiens
cagtatgttaaattatagtacattcatgttttacgggggatgattatctgatcattataaatgttgggtttggagaatgtttaaaatgaaaaaaattataaatgctgtcttagtcagctcatgttgccataacagaataccatagaatgggtggcttaaacaaaaacttatttatcacagtttggtaggctagaaaatctaagatcaaggtgctgtgtaattcagttcttggtgaaggctctattcctgttctcactgtgtcctcatatggcagagagagacagagaaaacgcaaactctctggtatctttttttatgagggcactaatctcatcatgaaggcctcacttttttgacctcatttaatcctaatgaccttccaaagacccagactccaaatgccattatattgagggttagggattcaaaatatgattttggggtgggaggaaataacacgaacattcagtcaataacaaatgttatatcaaaaaaagagaatattcttgatstcttaggcatgagaaaaagaatagaaaatgtatatacattatacctatgtgatatatatatatatatatatatatatatatatatatatatatattagcatgtatggagacaaatcatgaagaaatgataaaaagttagccg

SEQ ID NO: 771344 - DNA, 580 bp, Homo sapiens
agtcttgaactcctgagctcaaaggatcctcccgtctcagcctcctgagtagctgcgattacagtcgcatgccaccaacccagcgttcttgactttccagttaaataggccaatacctgcctttctgagcttagttcgattttagttatgttgcagtcacctttagcctaaagaatcctatagctttcttctctttttaaacagctctttcaatccctctgtcatttgctaaaccattcactcttgtctccaagcataattattttatatatccgygcttttgcttgtgttgttctttctatctgggacacatctgggagatgaaggcatctccattggcccaatcttctaagatctattttggatgttactctcacatacgatgtcttttctgcccttcagccacataaagtcttatccctatttgaatccccccataccctgctgagtcttcttcatcattaaatatttaacatctttcaccagtggtccatattagatgctcagtaaactagtgtgaattgaatcagagaaaaggaaaatgaagctaatgcttgttggattcagtcgacttaaggtt

SEQ ID NO: 771345 - DNA, 614 bp, Homo sapiens
tgaagaaggccacacagacctggtttttcccagccacagcctaggggcagaaggcagcccatgcaggctaattcctcccagaatagaatagatgtccctctgacaaatatcaaggaagccagacaccaccagcaagagagattaactaggaacctcaacaaaaacaaayagccaggggaaacactctccttcaccataaggcctgagactccccacttttttttttccagtttgttcgtttcttaatttctaaagctctgccataaacttctagcaggtgcccatgtcacctgccacactcacaccaggttgtctgtgtagccagcaaacaaatgaccaccaacagaccaggccagggaggtacactggggtggttctgccttgctgccagtactaataacttcttgcttcagttcatctacgatgatatttacccctaagtcccagatcttgatgctggggcccatggcagcacagagccagtagcagttggggctgaagcacagggtgttgataatgcccccaccatctggcatataaaggtgtttgccttcgttgagatcccacagcatggcctggccatccttgcctccagatgcacagagggatccatt

SEQ ID NO: 771346 - DNA, 642 bp, Homo sapiens
gctggaaatgcataactaagccatagctctgtgtttaaaacccaggggcattaacctcccgctttgcttttgcctctgttttttgttgtgctgtttcctggttgttttctttggacttagtagatatcatttcacattargctttttctttctttcctcttcttcctttactttttttctttcttttctcaatcttgtctacattaagaggagacacttcaaagtaactttttaaaaatatgaactcagctgtgtcaaacattccattttatgattagaaggactgaattatgccacgagttttatgaccttgccagcgtcgacacaggacataacagtcagctaaacacaggggatctttggatgttgttttggtatcaggccacgccccctccttctatcctcttatcttggtaaatattactgtgcatttaaaataggtaattctgtttgcctagggagcgtgagagtggaatagagaatcactcttaaatatcattgtagtattagtatgtgatttactttgaacattttgtttaccttgaaatgcaaaattactctaaaatggacatagctaactttacattcactcatggagaaagctaattctgcagtctttgagtaaattcaacttctagccac

SEQ ID NO: 771347 - DNA, 609 bp, Homo sapiens
aactccatctcaaaaaaaaatatatatatatactttgttgatttccatcgtttttattcgtatataaccatatatataatatcttaatgtagatcatagaacttcatttttttctgattttaaaatattacttcaggagcatttcccatttattacatattttttaaaaatatcattgttttagtttcttctggttactataacaaattataacaaactagcttaaaactagcttatatttatttattctcttagaattttaaaggtcagaagtccgaaatcaatttctgtgmgctgaaatcaaggtgtcggctgggctgagctccctctagaagcgctgaggtggaatctgtttccctgccttctccagctcctagagctgcattccttgcagttttttggctcttgtccccttcctccatcttcaggcccagcagcctagcatctcatttcagtgccacattgctgccttcttcaagtatccctctgcctcactttcatagagacacttgtgattatatttaaggcccacctggataacctaggaccaactcctcatctcaagattcttaattacatctgcaaaactcttcttgctatataaggtaa

SEQ ID NO: 771348 - DNA, 432 bp, Homo sapiens
caaaaaaaaaaaataaatttaaagtatatgtagttaaaaatactcatgtctttacccattcctttgagaatttctgtagaggctttctcaaaatgcagagagtggaggcagtcataacatatgatgcctgcagattggggtatctgtcatttaatcaaragaagaaataaacattttatgtcattgatttatccattttagttgctatcatctttataggttatgccccaatacatgggcttttctagaaaaactatagagaatatgagagttgggaggtattggagtcctcaggtcttcaaaccacctacaggttgtgttctactcactgtatctccttcaagttttctctgctcaaacagctctcagaaaatccactcttgtgtcagctctttcatctttggatccaaacactctttcacatagttctca

SEQ ID NO: 771349 - DNA, 605 bp, Homo sapiens
gcatctgtcccctcacctgggctgtttccacattttgatgattttcttttctttttttctttctttctttctttcttttttttttttttgagacagagtttcactcttaccgcccaggctggagtgcaatgacgcgatctcggctcactgcaaccactgcctcctgggttcaagtgattctcctgcctcagcctcctgagtagctgggattacaggcacccatcaccacacctggctaatttttgtatttttagtagagacagggtttgccatgttggccaggcttgtctcaaactcctgaccccaggtgatccacccacctcggcctcccaaagtgttgggattacaggtgtgagccacagtgcctagccctttttgtaaaaaaaaaataaaaattatttttccataagtgattgrggaacaggtggtattcggttacgtaagttctttagaggtgatctgtgagattttggtgcacccatcacccgagcagtatacactataccctatttgtagtcttttatccctcaccccttcccactcttccacacaagtccccaaagtccattgtatcattcttttgcctttgcgtcctcatagcttag

SEQ ID NO: 771350 - DNA, 684 bp, Homo sapiens
acggttttcagacagtcctttggtctccttgtttcgtcttcaatctggagtacctgaaagctggtttcctgcccaattagcattctgcatggttcatttggctcatggcaaccaataatcacaacaccatttgtacatcacagttctgtgatccaatttgggcttaaaaactgtagggaaaaattattgtgaaaaaaaatttgggtgtagaaagtcaatacaaattagtttcagatgaacctaaatagacctgacaaattcaccaagcagatgcctattaaaatgaagaatgttcttaaggttttctgtgaatttgggggtttggggcaaattaggattataactttgtagtaatggtatgttttacaaaggccatttcacttcaggctaaggagagtgaaaggctgagacaagtagatggaaaattcagatatwataggcttacttatgaagtaaatgttttcatttagaatccttatattgacagtcttcctttatctaattttctgaatagctgcttaagtctaagttatatttagcctatataagcacagtcacagacagggaaatcgactaaatgtttgcagatacctataaatatgctacatgtgggtagcacttttcaaagttttgaaagtgacttaaacagcctcttaaattgcagcaacactgctcactcaaggt

SEQ ID NO: 771351 - DNA, 609 bp, Homo sapiens
aggcatggcctgacgccgatgtctgtagccgtcagaaaacttcctcttaggataccttccccaagtcctgtcttcctcatctgccatgtggtcatttgtttaagtgaagaaatatttgtggggtgcccactacgtgccaggcactgttctgagcaatagggatgccacagtgaactagatcttgtccctgttcttgaggagctgataggtactgaaggagacagagaagaaaatgcttacagattaatccagcccggtgatgtgggggcaggggtgaggtctgtcgggggaggctttctgkaggaggtcatatggaaaccaaggtttggatggtgagcaggtaaggaggcatgatccaggctgtgtgagtgtgagtgtgtgtgtgtgtgtgtgtgttcttggggtgtgggtgggaaccttccagactgaggcagacacctgtgtgcaacaggtgtgagtctcaacccataaactcaggcatgcatttaatgagcttgtcttcccaacaacttcatttctattttgagactgcatttcactggggtgccttccctttcactcaaggtcatggccaagttccagaggtatagtgccaaggcgttgatgggg

SEQ ID NO: 771352 - DNA, 574 bp, Homo sapiens
atacagtgaagaatcagtttctgtactgaatggacatgatacaaaacagtttgaattatttttcaggatgagtgccacaactttattaaagttcttctaaagaaaaacgatgatgcattgtttgtctgtggaactaatgccttcaacccttcctgcagaaactataaggtaaatgctatttgtcrgttggaaccacactgccaggaggcatttcataatttactgtgattgtacctgcagcaacctaagaggggtaattcaacaccacctgagttcctctcacttgttcaacttaatgtattgctccacatgagtgatcctaagcaggcttctaagcttcctgtttgttcaggattgattgacacatctttaaagagcctgcctagcaaagttagtttctgtaagacccttttctctattgttcagaagactgacatacttaccacgtacaccatgtggatttcctctattttttttctccctcccaccccactatctaacctctgagcacaaaagcacacttatatggtgagtgatttctattctaaaaggtatctcaaaagcacggcatttg

SEQ ID NO: 771353 - DNA, 525 bp, Homo sapiens
gctaccagcttaaagtaaactgttagaagtataagatgttttatgcaaaccttagggtaaccacaaaacaaagactataataaatatacaaaagagaaacagaaaagaataaaaagcactctactatagaaagctatcaagcacaaaggaagaagggaacgaattatccacaaaaaaacactagaaaataataaacaaaattgcagaaataactccatagcctagtcaagtaataagtctacaakgtaaatagactaaattctccagttaaaagaatggctaaatggattttaaaaaacgctattcacaataagcaaagacttggaaccaacccaaatgtccatcaatgatagactggatgaagaaaatgtggcacatatacaccatagaatactatgcagccataaaaaaggatgagttcatgtcctttgtagggacatggatgaagctggaaaccatcattctcagcaaactatcacaaggaccacaggaaggggaacatcacacactggggcctgtcatggg

SEQ ID NO: 771354 - DNA, 621 bp, Homo sapiens
atttctcattcctcactcaagtgtttattctccaccatcatcccaaatgaaaatagctttataattgtttgattataatggtgatacatatttaaatactaaaacatatacaaaaaatactccccaaaattaaaggaaaatgtagtctacaattccagatatacactattaacatttaattttcttcttccagatactctctatataaatatatttttttgcaaacaatgggatattgtttatatttgtggtgatgcacatctcaccttaatatatgatcaacattttccatgctaataaacacatgtgtacacaactattttattctcatataatatcctatggggtagtaaatgtatctcagacccatctaccatcgcttctatgggaattcccatcccttacattgtgtccttccccactattttaacaccaccctcccatcccttcatatgtagtatagaagaaatgtttggaycatgaatggacactgacccaaaaataatcggaggcttcccccaaaattaactattgccaggcttaacatcatggccccaactctaatgattctctactttctatgtccccagttacctaactccatatgctcatgtcctattt

SEQ ID NO: 771355 - DNA, 503 bp, Homo sapiens
tatttgtggtgatgcacatctcaccttaatatatgatcaacattttccatgctaataaacacatgtgtacacaactattttattctcatataatatcctatggggtagtaaatgtatctcagacccatctaccatcgcttctatgggaattcccatcccttacattgtgtccttccccactattttaacaccaccctcccatcccttcatatgtagtatagaagaaatgtttggatcatgaatggacactgacccaaaaataatcggaggcttcccccaaaattaactattgccaggcttaacatcatggccccaactcyaatgattctctactttctatgtccccagttacctaactccatatgctcatgtcctatttctaatctccctaaagacacttaatcagaactactgccttatggaagctaaagctgtaaatcctttccagcatgcaaaggctctagtgagggaacactaagaaactgctgcttggccatgatcaa

SEQ ID NO: 771356 - DNA, 550 bp, Homo sapiens
gatgattcattcaattttctttgctgaacattaatcaataaaatgtttaaaatgacaataaagattatctcttatttcatatgtgagagataaatatgtatataatttattttcatgagtgtattttaggctttgtagatctttcttttttctttttattttttattatactttaagttctgagatacatgtgcagaatgtgcaggtttgttacataggtatacacgtgccatgstggtttgctgcacccatcaacctgtcatctacattaggtatttctcctaatgctatcactcccctagcaccccaccccccaacaggcaccagtgtatgatgttccccttcctgtgtccatgtgttctcattgttcaactaccacttatgagtgagaacatgtggtgtttggttttctgtccttgtgttagtttgccgagaatgatggcttccagtttcatccatgtccctgcaaaggacatgaactcatccttttttatggctgcatagtattccatgttgtatatatgccacattttctttatccattctatca

SEQ ID NO: 771357 - DNA, 636 bp, Homo sapiens
aaatagaagtggtgtaagtggggatccttgtcttgttccagttctcagggggaatgcttttaacttttcctggttcagtataatgttggctgtgggtttgtcatagatggattttattatcttaaggtatgtcccttctatgctgattttgctgagggttttaatcrtaaagcgatgctggattttgtcaaatgctttttctgcatctattgagatgatcgtgtgatttttgtttttaattctgtttatgtggtgtatcacatttattgacttgcggatgttaagccatccctgtgtccctcgtatgaaacctacttgatcatggtggattatctttttgatatgctgttggattcggttagctagaattttgttgaggatttttgcctgtatattcatcaaggatattgttcagtagttttgtttttgtctgtttgttcttgttatgtcctttcctggttttggtattttggtaatcccagctgtataggatgatttagggcggattccctttaccttttggaatactttcagcaagattgacactatcttctttgaatgtctgattgaattcagctgtaaatccatcttgtcctggacttattttttgttggtaaatttttaattactgtttcc

SEQ ID NO: 771358 - DNA, 636 bp, Homo sapiens
aaatagaagtggtgtaagtggggatccttgtcttgttccagttctcagggggaatgcttttaacttttcctggttcagtataatgttggctgtgggtttgtcatagatggattttattatcttaaggtatgtcccttctatgctgattttgctgagggttttaatcgtaaagcgatgctggattttgtcaaatgctttttctgcatctattgagatgatcgtgtgatttttgtttttaattctrtttatgtggtgtatcacatttattgacttgcggatgttaagccatccctgtgtccctcgtatgaaacctacttgatcatggtggattatctttttgatatgctgttggattcggttagctagaattttgttgaggatttttgcctgtatattcatcaaggatattgttcagtagttttgtttttgtctgtttgttcttgttatgtcctttcctggttttggtattttggtaatcccagctgtataggatgatttagggcggattccctttaccttttggaatactttcagcaagattgacactatcttctttgaatgtctgattgaattcagctgtaaatccatcttgtcctggacttattttttgttggtaaatttttaattactgtttcc

SEQ ID NO: 771359 - DNA, 619 bp, Homo sapiens
cagactaatagattcattccattctatgctaaataacacatttaatgtacacatactatgtgccagggattggttgcttaatactgaatgaggtagtccttgccattagaaaaattacagtttggtggaagaggtagtcaagaacaccatcacagagcagagtgycatggtaggagagttataggaacacagtgggagaccttaggggagaagtagcttatttcatctggttattggccacaggaggcttctgtttttttttttttggttgagatggagtctcgctctgttgcccaggctggaatgcagtggctcacttggctcaccgaaagctctgcctcccgggcccacgccattcttggccacaggaggattcgaaaagaagctgttttagctgagatttagaggctaaaagtgatttctccaggaagtaagcaagtgatcagaatgtaggtcaaaaaatgagaatgtgctaagacagtctttttcaaactgatatctgtcctgcctatcttccagggatcctctgaagcactatacaaggttatggtgtaattattattgtgatccagactattcggtttatatgtacatgcataattatcatagctaatacttt

SEQ ID NO: 771360 - DNA, 632 bp, Homo sapiens
ttcatatgaatttgcatatatgtggctgcacaaccattggattggacacatggaagatgataatgtgtgctcttgaaacaagcagtgccatttctgccctggtccaaactcaaatggttctcttttgtcgtaggagtcaaatttatttttcctgcccttcaaagatacaatacttccttacaaattacctcgcaaggatagaactgggtatttcagattttcatatatagaagctgccctgggtcttgctgctgcctctccccttcaaagcagctgtctccagatacaggattgccagcttccagaagaccaaaattgttgtgccttgctttgattttccagaatgtgggaccagcctttgtggttacttagttcatgtgttttggggaaactgaagctatctcttgcacccaggaatagacataaatgtgtgggtaaagatagggatgctctagaaacagctgctgaactaacaatgaaaacmaatgaatacaatttctcatctttaggaagtcattgctagccaaactattactatgcaaactatgtaatatttgtcatagcgtataaaatattattccatctacccatatttgtggacatttgtagcaaataagtggggtaaaggatag

SEQ ID NO: 771361 - DNA, 611 bp, Homo sapiens
taaggtgtccacaacggttaagtgaaaaggggggaaaaagatttaagtaaagcttgtatctggtaagcatcatttgggcataattagattgttattaaagcttgtatttcttttaccttgtggtcttatttggctgtacctctttttataagagcacctgctttaatgaatatgtgttttcttaataagagagattgtaagctccttgacaaatgagccagggagatcgaactagtagtttattaattcactattatatgtatatatatacactgtatatatatgtgtagatatatatatacagtgtatatatatatactgtatatatatgtgtgtaratatatatacacagtgtatatatatatatatatatacttactatgtgtgtgtatatgtgacttgttttattgcaataattgtttttttaaaaaaatttttatttccataggtttttggggaacaggtggtatttggttatatgaataagttccttagcgttgatttgtgagattttgggtgcacccatcacctgagctgtatacactgaactcaatttgtagtcttttatgtctcacccacttctcaccctttcccctgagtctgcaaagtcc

SEQ ID NO: 771362 - DNA, 653 bp, Homo sapiens
cgtaacaagcagtcagctaaaaatttgaagagacttctctggagctctctgaggctttctcattttgaaacttccttctgtttggcagtgtgcaagatagatgccttgacctctcaaactcttatctctgtgtatttatctcagttagatagctgggttcagtttgggttcctccctgcttctctgtgggcyggaagacgccttgaagtactaatcaggtgcaaatgtagcgctcacccggattgtgttccacttctcatgtatcatagtcctgtgctgtttattgtacaatgttgaaaatcgttatttcatgtgtcttatccagtattgtagttgcttaaggtaggaagacatattagtttgctaggattgccagaataaaattccacagactgagtggcttagacaacagatatttatttcttacagttctggaagctgggaagtcttaaatcaaagaagcagcagatttagtgtctggtgaggatctgctctctggttcatagatggcatcttctcattgcatcctcacatggtggaaggtacaagcaaggtttctccattccctttagtaagggcactaattgcattcatgagggtcccattcttataaccataactaccttccaaagccacctccaataccatcacat

SEQ ID NO: 771363 - DNA, 595 bp, Homo sapiens
cattttgaaacttccttctgtttggcagtgtgcaagatagatgccttgacctctcaaactcttatctctgtgtatttatctcagttagatagctgggttcagtttgggttcctccctgcttctctgtgggctggaagacgccttgaagtactaatcaggtgcaaatgtagcgctcacccggattgtgttccacttctcatgtatcatagtcctgtgctgtttattgtacaatgttgaaaatcgttatttcatgtgtcttatccagtattgtagttgcttaaggtaggaagacatattagtttgctaggattgccagaataaaattccacagactgagtggcttagacaacagatatttatttcttacagttctggaagctgggaagtcttaaatcaaagaagcagcagattyagtgtctggtgaggatctgctctctggttcatagatggcatcttctcattgcatcctcacatggtggaaggtacaagcaaggtttctccattccctttagtaagggcactaattgcattcatgagggtcccattcttataaccataactaccttccaaagccacctccaataccatcacatta

SEQ ID NO: 771364 - DNA, 610 bp, Homo sapiens
ctttggtatgtaaaagtcacagtgaaccatagattaatatagtgttttttggcctgcacaccctgggcttgtgtgcataaccttatgtacaccataggttgtgaacacaaacaatcaggagaagatatttgcaattccttctgcatagtgccctgcagggttaagactttattgacaatgatggcactaaaagtaactgacttagcccaaaagataggaacgtttgcctcttatttctaaaggaggatgctctgggaaggaaaaggaagaaaaaggtattctactgtttcctaatctgtacttagtacctaaattataaaatttaagtcactctttagatkgttaaatatacttcacaaaattttgctgtattcagacaaatctattacatactaaaggcagtaaactggagaatctctttttcttattgcatttcacttttcacattagaattttagtaaaaatgcattttccatttgaaatactaaggaatgcagagaagttagactaactatagaaataaacaagattttggatatgtagctaaaggcagaaatataggagtacacttagaagtgtgtttgaaaattgataatatgatgattactcg

SEQ ID NO: 771365 - DNA, 615 bp, Homo sapiens
attgactcaccattccacaggctgtacagaaagcacggctgggaggattcaggaaactgacaatcacggcagaaggttaagaggaagcaagcccatcttaccatggcagagcaggagagagagagagaagggagaagtgccacactctcttaaacaaccagatctcatgagctctcactcatgatcatgagaacagcaaagaggaagtcaacccccgtgatccaatcagctcccaccaggcctctcccacaatattgggaattacaatttgacctgagatttgggtggggacacagagccaaacctgtgtcaaatgggaagtatccacccaggctctgagccaaccaaggggccgagatggttcagtcattgctttaatagcaagtagggatgcctgggcattggtaccctctacattagaytcttagttaagtcttcatagtttagggacaagattatcatcagtcacaaagagtttcatgtttttcaaataacacctcttgatgactattaaatcctcaactgtgatgaattatcaagccagaaggttcacatttgttctttaaagagcaaagcaaaataaacacccaccaccattttagccttttgtgtaga

SEQ ID NO: 771366 - DNA, 551 bp, Homo sapiens
attcaatcataagtgaacattttgaacttcaaaacttgtccaaaaataagtgctcaagttggaggggacattaaatgaataaaatgactcatcaattattccccaagtgatccaaaattaacccagaactgtcagaagggccacagggaagtactgaagttcactttaggtgcatttggtaggtacatttggaaaagaggattctctgagttgcttaacttaaatcaaggttttaattttcgatggtgaatttaattactcattatataatggttaacaatctggcatctttaaaaacagggactktttgttaggtgtgttgcttgatttcacatgaacctataaaacaaaatttaaagctcatagccatttagctgaaacacgtatgactgagaggactatttgtgttgtttccttaagtaaaatttgggaattttggttgttctcatcagggactgttttatcctaaaatttattaaatacacacatacttcacttttacaaaaggaagcctctgttatatttgaaagtaacttaattttgcaattcat

SEQ ID NO: 771367 - DNA, 627 bp, Homo sapiens
gtgagctggggccacagtgtgtgattccgccagtggagggaatagtggagaggctttgtttatgaccttgttttttttatggaagactagttgatagggttggtttggttttcctttctgtctcacaagtaaacttttccrtatcttgttaacagtagtggaatgacaactggaatatcagtgcctctgacaatcgaggtgtaaggctttctgttctctaaaagtttcattcagagataggagtgaaaaatttcagggccactgctcttggatataaaacctatcccattgggcggagttcttccgtctctgaaatttcaagatggggtggtgcccactgtgctccttcactggggaagcctctactcatggggccctgggcccaggttctgtgtgagtgtgtgtatgtgtgtgtgtgtgtgtgtgtgtgtgtgtgtttctttcatcacttgtctttcaatttcaccaatctaaagtatatttcttaaggatctgaataagtaattcatgctaatgtcctaatggaatgtacattttaaatgagagacccccttggagcaaatctccacttttacaatctacgtgtttaacgatttggtgttgctggggaaagagaatttaatctca

SEQ ID NO: 771368 - DNA, 458 bp, Homo sapiens
actgttcccccttcagcctgtatagaaattcacaggacaccgacaccatttcatcttcctttgacttctgtacgtggtagagggccacgggcatggagcctttagtcagcaacctctgcctcttgctcaggcctcaggttcacgcatcagtgtgggatacacacactaagccagcagcaccctcagcccagcagcctccgcgagtgagctggggccacagtgtgtgattccgccagtggagggaatagtggagaggctttgtttatgaccttgttttttttatggaagactagttgatagggttggtttggttttcctttctgtctcacaagtaaacttttccgtatcttgtkaacagtagtggaatgacaactggaatatcagtgcctctgacaatcgaggtgtaaggctttctgttctctaaaagtttcattcagagataggagtgaaaaatttca

SEQ ID NO: 771369 - DNA, 627 bp, Homo sapiens
gtgagctggggccacagtgtgtgattccgccagtggagggaatagtggagaggctttgtttatgaccttgttttttttatggaagactagttgatagggttggtttggttttcctttctgtctcacaagtaaacttttccgtatcttgttaacagtagtggaatgacaactggaatatcagtgcctctgacaatcgaggtgtaaggctttctgttctctaaaagtttcattcagagataggagtgaaaaatttcagggccactgctcttggatataaaacctatcccattgggcggagttcttccgtctctgaaatttcaagatgggrtggtgcccactgtgctccttcactggggaagcctctactcatggggccctgggcccaggttctgtgtgagtgtgtgtatgtgtgtgtgtgtgtgtgtgtgtgtgtgtgtttctttcatcacttgtctttcaatttcaccaatctaaagtatatttcttaaggatctgaataagtaattcatgctaatgtcctaatggaatgtacattttaaatgagagacccccttggagcaaatctccacttttacaatctacgtgtttaacgatttggtgttgctggggaaagagaatttaatctca

SEQ ID NO: 771370 - DNA, 627 bp, Homo sapiens
gtgagctggggccacagtgtgtgattccgccagtggagggaatagtggagaggctttgtttatgaccttgttttttttatggaagactagttgatagggttggtttggttttcctttctgtctcacaagtaaacttttccgtatcttgttaacagtagtggaatgacaactggaatatcagtgcctctgacaatcgaggtgtaaggctttctgttctctaaaagtttcattcagagataggagtgaaaaatttcagggccactgctcttggatataaaacctatcccattgggcggagttcttccgtctctgaaatttcaagatggggtggtgcccrctgtgctccttcactggggaagcctctactcatggggccctgggcccaggttctgtgtgagtgtgtgtatgtgtgtgtgtgtgtgtgtgtgtgtgtgtgtttctttcatcacttgtctttcaatttcaccaatctaaagtatatttcttaaggatctgaataagtaattcatgctaatgtcctaatggaatgtacattttaaatgagagacccccttggagcaaatctccacttttacaatctacgtgtttaacgatttggtgttgctggggaaagagaatttaatctca

SEQ ID NO: 771371 - DNA, 596 bp, Homo sapiens
gaaatattcaatctgactatcctatctttcagtttcatctgctgtctcttcacccacaactgcaggtcatttcaatgtctccccctttccagaacaccccaagactttctagagctgcatgctttgcatgttctgtgctctctctgccaggcagccatctccccatcccccaagagccagctcccaggcctctgatytgggtggagggggaaccttttctcacctcccaggccagctcagtgctcccaaagtccgtgtgctcacggaaggtattcttccttcaattaagatactgtattgggtcaatcgcaggctaaatgtctgtcttttgtgtgatgtaagcttttctttgcatgacttgctgagtcgaatcgtcatccatgacaccttcatactctatggacacactaggctattgatcaagccttaatgaatgaacacataaggatttcacaagtgtagagtcatgcctgggaagtcaatctttgcgctcagggttgaaatttatctttcaattttcctggttatcaccaaggaacagcagaataatcatgtttaaaaattctattgtgtataggtgtccagagcagacaggt

SEQ ID NO: 771372 - DNA, 626 bp, Homo sapiens
ctggatataggcttctaatctcatctggctaataagggttctgctgaaaatacgttgttagcctgatagcattccctttttatgtggcctgccccttctctctaggtgcctttataattattttttcttttgcattgaccttggagaatctgatgactaygtatcttgggggtggtcatcatgtatagcgtctctctgggggttctctgaatttcctgagtttgcatgccaacatttctagcaaggttggagaaattttcgtggccagtatcttcaaatatgtttccaagtttcttgctctctctctatctccttcaggaatgccaatgattcataagtttgttctctttacataatctcctatttctcagaggttttgttcatttttaaaaattctttttttaaattttttgtatgcctgtgttgatttgaagaagtgatcttcaagttctgcgattctttcctcagattggtctattctattaatgcttccatttgcactatgaaattcctgtagtgggtttttcattttcagaagtttagtttggttctttcttaaaatggctatgttgtctttcagctcttgcatcattttactattttccttggattgggtttcaaccttt

SEQ ID NO: 771373 - DNA, 626 bp, Homo sapiens
ctggatataggcttctaatctcatctggctaataagggttctgctgaaaatacgttgttagcctgatagcattccctttttatgtggcctgccccttctctctaggtgcctttataattattttttcttttgcattgaccttggagaatctgatgactatgtatcttgkgggtggtcatcatgtatagcgtctctctgggggttctctgaatttcctgagtttgcatgccaacatttctagcaaggttggagaaattttcgtggccagtatcttcaaatatgtttccaagtttcttgctctctctctatctccttcaggaatgccaatgattcataagtttgttctctttacataatctcctatttctcagaggttttgttcatttttaaaaattctttttttaaattttttgtatgcctgtgttgatttgaagaagtgatcttcaagttctgcgattctttcctcagattggtctattctattaatgcttccatttgcactatgaaattcctgtagtgggtttttcattttcagaagtttagtttggttctttcttaaaatggctatgttgtctttcagctcttgcatcattttactattttccttggattgggtttcaaccttt

SEQ ID NO: 771374 - DNA, 630 bp, Homo sapiens
tcctttccatgtttgcctggaagatggcctgacagcacctgtctacagtacagtattgaggcacacaggaccttggaaataaaagggaatattacaaatactgcagagacacaaggattagttgtttgtttgtttaaggtaagcagagatgagcaatttgcttttcggattccaaaaaagatttgttctccttctttaaagcagcaattcacgccagagacctaagtgagctgtcattttctctgagtgttttctttttttcataggcaccagtctacatctcctrgctgactaacgcatcaaacaaagcaggcttaggtaaattgaaagagagaagctctcctgagtccaacttatgtttttctggcaacaactgagctcactcgattaatacttaaggagagcactgcattgaggcacaagtgctagcccagccagggatgctctcagccatggctgcacacgacaatcatcagaaagccctttcacactgggcagggtgtgctgctttttaagtattccttggcgattttcacctgcagtccaggttagccattgtataatttgaacagcactgaaactcaggaaaaattaaccttcagtatctaatataatcgggtttattcaaga

SEQ ID NO: 771375 - DNA, 643 bp, Homo sapiens
tacgaggaagattggaaacaaatcgtggggtaaaggtggttgtgggccacctttggagtctggatctccgtgggtcagcagctgctgttttccagcaaaaggaagcaaggtttgctttagaaggagagtggcctctcctacatagaggaagagggtctggaggcagacgcgctggcggcagcaaaatgaagaaggaggcgtgcctgaaggaagtggacttggggtcaagatgacattagatgggtcacattcaagagtgtgctccaaggtagactcagggttttctagaattaaagagaaacaaagggcgaaatacaaaggcagtgccccttttgaggcctggtcttcagcagaattcaggggaaagcttcatggggagaagagagcaggcgtggggagaggagsctacctgtgaggcttctctccatgcccttcctgccacagagaagttgctccccctctaagaccttggctgccctcccggatgagggagcagctgccctggctcggctttcagggaccaagtccagtgttctaactgggctgggctccactcaggatgccagatccaaggagcatgagtccatagaggagggggctctgaagccagggaggcagtgctggaccaggccactcctgagca

SEQ ID NO: 771376 - DNA, 579 bp, Homo sapiens
tactttttggaaaggagtttggcgtagtttcttcaggttgaatggtcacatgcccccttccttaggagtatatccaaggaacacttcctaagggaggagtgtgcagtaatgttcgtgccaacactttttcagtggcagaaacctacagcccgccttgaatgcccatcaacttgagagtggacaagtaaactggggtatattcacctaatgaaatatgcgacagcagacaaaccaatgaacacagtggcacaacaaggtgggtaaatctaaagcccaacacattctttgacagttcattttatgtgcctaattaacaaggttatggtgcctaartcatttggtcaaatacgagtctagatgttgctatgaggatactttttagaagtgtgtaacatttaaataagtacactttgagtaaagcagattacccctcatcacatgagtgggccttgtctaatcagtcgacagccttaagagcaaagattgaggttgtgaagcagaaaggattctcctgcagactgcaatatagaattcccacgtgacttcccaggctgcacgctatgaaattgactcaagact

SEQ ID NO: 771377 - DNA, 498 bp, Homo sapiens
cccctccacacagcgagaaccagcggggaagccaggtgtgcaagggaccctgatggatgacaagagctgttatccttcccagcagccccagaagaaaaatggatgacttggcttgctagaggcttgaaggataaggaaacctatgagctctatggaaacataggattttgagggwtcaaccccaattagggaggtgacttaagccaaccagcaataataacaaattgtgaaaaataaaatatcagaaagtcattggaaaacgaggaagaaattttttccctttatggtttaagtattagaaagctgagagatctattagagaagattgcaaagagtcaatctaagccaccatattttcttgagttatgttatgtaatcactgtgaatattgatgatctacatttccatttgattttcagcatttgcttttttacaatctttttctctgatcatctgagctagcaaaatgaaaatatgcagcaataggcttaagttata

SEQ ID NO: 771378 - DNA, 544 bp, Homo sapiens
gtataaatattttttaaaatgatagtttacctcatgttaaaatggcgcaaataaattttgagttttctttagtggaagttgaattagcatattaagttaactaagccattggcaacgtttatttacaaagagcatgtactcaatgggggagatattcgctgttttattgttgatgttttartttgctttgctttgcttttatctataatgaataattcatgaatcccaatccatcttggttgaccattaatgctcctaggcatgatcataaacacacaaaacatgggctcagggatataaaataatttgctgaagccagttggaaagcgcagaatcaggaccgaagcccaggtctctagaccctgttctttctacttgttgatctcttcggaaaaattatcaatcttccaagcatgatttttagtgttttctattttatcaatattttctactgctgtggaagacacactcaatgttttaactaaaagaggtatatctttaataaatcggtcacgtaatttctttcacaaaatcacttttttgc

SEQ ID NO: 771379 - DNA, 544 bp, Homo sapiens
gtataaatattttttaaaatgatagtttacctcatgttaaaatggcgcaaataaattttgagttttctttagtggaagttgaattagcatattaagttaactaagccattggcaacgtttatttacaaagagcatgtactcaatgggggagatattcgctgttttattgttgatgttttagtttgctttgctttgcttttatctataatgaataattcatgaatcccaatccatcttggttgaccattaatgctcctaggcatgatcataaacacacaaaacatgggctcagggatataaaataatttgctgaagccagttggaaagcgcagaatcaggaccgaagcccaggtctctagaccctgttctttctacttgttgatctcttyggaaaaattatcaatcttccaagcatgatttttagtgttttctattttatcaatattttctactgctgtggaagacacactcaatgttttaactaaaagaggtatatctttaataaatcggtcacgtaatttctttcacaaaatcacttttttgc

SEQ ID NO: 771380 - DNA, 762 bp, Homo sapiens
tgcatgcatgcaatgctatgtgttgtgttatttaatgaacttcatttttagtagcagaaaagcagatgagttggacttttgaagtcttttcttggaaaacaccatttttctagtgccttctgttgttcacaattacacactgcattcaaccaccaagtttttgacctctgctctggataaatcccataatctgaagtggttgagagcatgtgcctggcaccctttcgcttcctggaatgcayacccatgccttcgtggctgtctgtggcacacacccatagtgatggagagctcaggagctccaccgtggagctcctcctgcctgccccaccgtgtggcctgagtcgctcactcacacgaggatttccttgggtccaatgtggtggtttttgtgggctcagccttgtcattgtggaattctgctttctgaatttcacagaggtggatttctgcacagtagatgctaagacacccgccgccctcagccggaatggaatgtgtatctttgcagctgctggaaaaaggactctggtttcagtaggtgagctgtggaggtgggagttcccagatcaagttttagattccttcagggcttggatgcggagagaaaagacgccctcctgtcgggggccagctggcatttcctaggatgcccaactcatccagatgaatagggaatacgagaagggagagaaggaaggattagttttgtgcagagtaaatgttgatctttcctcacctgcttttcacaagtcttcgtct

SEQ ID NO: 771381 - DNA, 762 bp, Homo sapiens
tgcatgcatgcaatgctatgtgttgtgttatttaatgaacttcatttttagtagcagaaaagcagatgagttggacttttgaagtcttttcttggaaaacaccatttttctagtgccttctgttgttcacaattacacactgcattcaaccaccaagtttttgacctctgctctggataaatcccataatctgaagtggttgagagcatgtgcctggcaccctttcgcttcctggaatgcacacccatgccttcgtggctgtytgtggcacacacccatagtgatggagagctcaggagctccaccgtggagctcctcctgcctgccccaccgtgtggcctgagtcgctcactcacacgaggatttccttgggtccaatgtggtggtttttgtgggctcagccttgtcattgtggaattctgctttctgaatttcacagaggtggatttctgcacagtagatgctaagacacccgccgccctcagccggaatggaatgtgtatctttgcagctgctggaaaaaggactctggtttcagtaggtgagctgtggaggtgggagttcccagatcaagttttagattccttcagggcttggatgcggagagaaaagacgccctcctgtcgggggccagctggcatttcctaggatgcccaactcatccagatgaatagggaatacgagaagggagagaaggaaggattagttttgtgcagagtaaatgttgatctttcctcacctgcttttcacaagtcttcgtct

SEQ ID NO: 771382 - DNA, 544 bp, Homo sapiens
gtcaaatccaagagcattttcacgagaccgtaacctgcaggcccaagccacaagtttagtaaggctgtagtttacagctctcgcagacatgatgtcaccagccttgtgtgagtgcatggtggcacagacagaggtcacacactgtcacacactgatacacatgtacaggatgacaraatcacagtgtctcacttacacatgcaggcacacacgtgcacaggcttgcacaccatacacactgtcacacactgatacacatgtacaggatgacaaaatcacacagtgtctcacatatgcagacacacacatgcataggcttacacaccttatacactgccacacttctgtgtgcacggacacgcactgccacactcacacaccaagaaacactcaagcatactctagtgaaccagtcacctggggagatggggcatcctctgcttcaagtagatttaaatgctgttagtgaaagtgagtggaaaacttgaagtctgaggaactgagcaagtgtggctcttggagtctgcatccttagattcagctg

SEQ ID NO: 771383 - DNA, 476 bp, Homo sapiens
aaaaaacaaacatctccttaatatgtggataaaggacatgaacagacacttttcaaaagaagacatacatgtgggcaatgaacagatgaataaaaaattcagcatcactgatcattaaagaattgcaaaacaaaaccacaatgagatacaatctcacaccagtccgaatggctattaaaaagtcaagacataataartgctgctgaggttgcagagaaaaaggaacacttatacactgtggttggagtgtaaattagttcaaccattgtggaaaacagtgtggtgattcttcaaacacctaaaaacagagttatttgacacagcaatcccattattgtgtatatacctaaaggaatacaaatcattccattacaaagacacatgcacacatatattaattgcagcactattcacaatagtagagacatagaatcaacctaaatgcccatcaatgatagactagataaagaaaatgc

SEQ ID NO: 771384 - DNA, 578 bp, Homo sapiens
gcttactaagtgtgttcggtatgccacacacttgtgtgcatgcggaatgctgactgcatagcttactatacgtgttctgtgtgccccactctcctgtgcatgtggaatgctgactgcatagcttactatgtatgctctgtgggctgtgctctcatgtgcacgtggaatgctgaccgcacagcttactaagggcgtcctacgtgcggtgctctcatgcacatgcacaatgccgatggcacagcttactaagtgtgtactgygtgctctgctctcgtgtgcacgtggaatgctgactgcacagcttactacatgtgttctttgtgccacgctctcatgtgcgtgcacaatgatgactgcacagcttactacgtgtgttctgtgtgccgtgctcttgtgtgcatgcagagtgctgaccgcacagcttactacgtatgttctgtgtgccacactcttgcctgcacgtggaatgctgactgcacagcttactacctgtgttctgtgtgtgacgctcttgtgtgcatgtggaatgctgatggcacaacttactctgtgtgttatgtttgccacactctcgcgtg

SEQ ID NO: 771385 - DNA, 454 bp, Homo sapiens
actaagtgtgttcggtatgccacacacttgtgtgcatgcggaatgctgactgcatagcttactatacgtgttctgtgtgccccactctcctgtgcatgtggaatgctgactgcatagcttactatgtatgctctgtgggctgtgctctcatgtgcacgtggaatgctgaccgcacagcttactaagggcgtcctacgtgcggtgctctcatgcacatgcacaatgccgatggcacagcttactaagtgtgtactgtgtgctctgctctcgtgtgcacgtggaatgctgactgcacagcttactacatgtgttytttgtgccacgctctcatgtgcgtgcacaatgatgactgcacagcttactacgtgtgttctgtgtgccgtgctcttgtgtgcatgcagagtgctgaccgcacagcttactacgtatgttctgtgtgccacactcttgcctg

SEQ ID NO: 771386 - DNA, 518 bp, Homo sapiens
tgttcggtatgccacacacttgtgtgcatgcggaatgctgactgcatagcttactatacgtgttctgtgtgccccactctcctgtgcatgtggaatgctgactgcatagcttactatgtatgctctgtgggctgtgctctcatgtgcacgtggaatgctgaccgcacagcttactaagggcgtcctacgtgcggtgctctcatgcacatgcacaatgccgatggcacagcttactaagtgtgtactgtgtgctctgctctcgtgtgcacgtggaatgctgactgcacagcttactacatgtgttctttgtgccacgctctcatgtgcgtgcacaatgatgactgcacagcttactacgtgtgttctrtgtgccgtgctcttgtgtgcatgcagagtgctgaccgcacagcttactacgtatgttctgtgtgccacactcttgcctgcacgtggaatgctgactgcacagcttactacctgtgttctgtgtgtgacgctcttgtgtgcatgtggaatgc

SEQ ID NO: 771387 - DNA, 527 bp, Homo sapiens
cttactctgtgtgttatgtttgccacactctcgcgtgcacatggaatgctgactgcacagagtactaagtgtgttctgtgtgccacgcgcttgtgtgcatgcacaatgatgactgcacagtttactgtgttccatgtgccgtgctcttgcttgtacatggaatgctgaccgcacagcttactaagtgcstactgtgtgccatgctctcatgcgtatgcacaatgctgactgcacagcttactatgtgtgttctgtgtgccacgctcttgtgtgcatgtggaattctgatggcacagcttactgtgtgtgttctgtgtgccacagttttgtgtgcacatggaatgctgactgcacagcttactaagtgtgtaccgtgtgccatgctctcgtgtacatggacaatgctgactgcataacttactaactgtgctctgtgtgctacactcttgtgtgcatgtggaatgctgaatttatctcagctgatgacttactttcattgttcatttaacgctagaaatgttaggact

SEQ ID NO: 771388 - DNA, 527 bp, Homo sapiens
cttactctgtgtgttatgtttgccacactctcgcgtgcacatggaatgctgactgcacagagtactaagtgtgttctgtgtgccacgcgcttgtgtgcatgcacaatgatgactgcacagtttactgtgttccatgtgccgtgctcttgcttgtacatggaatgctgaccgcacagcttactaagtgcctactgtgtgccatgctctcatgcgyatgcacaatgctgactgcacagcttactatgtgtgttctgtgtgccacgctcttgtgtgcatgtggaattctgatggcacagcttactgtgtgtgttctgtgtgccacagttttgtgtgcacatggaatgctgactgcacagcttactaagtgtgtaccgtgtgccatgctctcgtgtacatggacaatgctgactgcataacttactaactgtgctctgtgtgctacactcttgtgtgcatgtggaatgctgaatttatctcagctgatgacttactttcattgttcatttaacgctagaaatgttaggact

SEQ ID NO: 771389 - DNA, 527 bp, Homo sapiens
cttactctgtgtgttatgtttgccacactctcgcgtgcacatggaatgctgactgcacagagtactaagtgtgttctgtgtgccacgcgcttgtgtgcatgcacaatgatgactgcacagtttactgtgttccatgtgccgtgctcttgcttgtacatggaatgctgaccgcacagcttactaagtgcctactgtgtgccatgctctcatgcgtatgcacaatgctgactgcacagcttactatgtgtgttctgtgtgccacgctcttgtgtgcatgtggaattctgatggcacagcttactgtgtgtgttctgtgtgccacagttttgtgtgcacatggaatgctgactgcacagcttactaagtgtgtaccgtgtgccatgctctcrtgtacatggacaatgctgactgcataacttactaactgtgctctgtgtgctacactcttgtgtgcatgtggaatgctgaatttatctcagctgatgacttactttcattgttcatttaacgctagaaatgttaggact

SEQ ID NO: 771390 - DNA, 616 bp, Homo sapiens
atttgaatatatgtagataataaaaatgtaataccaatttatttgttattctttgaaaaaaatccctatggagaaaaaataggcacttaaaaataggcttattttcttcacagaaatatttgctcttaaatatattgttgtttcatgaaatttgtttacctctctctaatcagacatgagattttctaatcatggattatgggtgagactgactacmcacaaacccccaactaaatcagagaatcacattcctgtcatcacagtaactacttagaggttgacaagggaaccgggttggtttaaccaaaagaaagttcaacattttatgtggtagttgcagaaaaagagcatatttatgttcccgagtattatggacaaaaaagcctctaattctgattgaagctggtaactaatctgagaaaccaagaaaatccatattggggaaaggagtggagagttagtacaaaattcagaactcattaacattattgagcaactacatcttccatgtttcagttaactgagacaggaaatggtttctattactttcaactgaagccaatttacctgctataaaattaaacaggaataaaatctcctgctttttccaatgcct

SEQ ID NO: 771391 - DNA, 616 bp, Homo sapiens
atttgaatatatgtagataataaaaatgtaataccaatttatttgttattctttgaaaaaaatccctatggagaaaaaataggcacttaaaaataggcttattttcttcacagaaatatttgctcttaaatatattgttgtttcatgaaatttgtttacctctctctaatcagacatgagattttctaatcatggattatgggtgagactgactacccacaaacccccaactaaatcagagaatcacattcctgtcatcacagtaactacttagakgttgacaagggaaccgggttggtttaaccaaaagaaagttcaacattttatgtggtagttgcagaaaaagagcatatttatgttcccgagtattatggacaaaaaagcctctaattctgattgaagctggtaactaatctgagaaaccaagaaaatccatattggggaaaggagtggagagttagtacaaaattcagaactcattaacattattgagcaactacatcttccatgtttcagttaactgagacaggaaatggtttctattactttcaactgaagccaatttacctgctataaaattaaacaggaataaaatctcctgctttttccaatgcct

SEQ ID NO: 771392 - DNA, 617 bp, Homo sapiens
gtccttccaacaatgttttttcttcccaaatgtgcaagctaggactgtttgattttctgtaaggaagtcttatacagaaagataagttttatctgaaggctatagagctctctcaaaacctaaagagtatcgggtgtggaaggggaagtagataagcctcaggattacacacatgtgaatctaagtgatactggaggcacagaaacagactcttaactctgctttttgcacatacgtttttactctttctacagacgggtttcttctgcacaccattgcatttggtatacagtatctgtttgaagctcctgaaattaccagttatggttatacaaaatactgacaatctctatctctccttctctctgtatatatgtgtgtgtgtgtgtgtgtgtgtgtgtgtgtstgtaacatatatcgtagacatttacacacacccactatgggaaaaaaaaaatctaactggcttacttgggtcaggtgcacaattttggatgaagtacctataattagatgactaagatgacttagtaaaagcatagcttctgtgggtctcctctagccctgtgagtctacagggtgtaagtttatctaaaagacaaaatggaagattgaaa

SEQ ID NO: 771393 - DNA, 660 bp, Homo sapiens
agagaggctgagctctgaaatgcatatccctgcccccacctgatggtctttctctacccaccctggtagccaaagacaaaggtcataatctcttgggagctctatggccctgcccaccgtcttaaccaggtgtccctagggcaaatttgcattctccttataggactgcagcagatgtgctcttgaaagcaccacctcctgcatggaggccaaccaacacaaaaccaagtaccctcacagagtccatttcactcccctgctacctccacaggagcaggtgctggtatccatggctgcaatacctgaagatggatcatatcacaggactctgcagacactccccagtaccagcctgtagcccagtagctcagctaggtggctagacccagaagagcaaaaacaatcactacarttcagctctcaggaagccccattcctaggggaagggggagaacaccacatcaagggaacaccccatgggacaaaataatctaaacaacagcccttgaattccagacctgccctctgacatagtctacctaaatgagaaagaaccagaaaaacaattccagtaatatgacaaaacaaggttctttaacacccccaaaagatcataccagctcaccagcaatggatccaaaccaagacaaaatctctgaa

SEQ ID NO: 771394 - DNA, 383 bp, Homo sapiens
tctcgctctgtcacccaggctggagtgcagtggtatgaccttggctcgctgcaacctccgcctcccaggttcaagcaattctcctgcctcagcctcccgagtagctgggactataggcgcccgccaccatgcccagcgaatttcttttgtattttagtagagacggggtttcaccatgttgcccaggctggtctygaactcctgagctcaggcaatccgcccaccttggcttcccaaagtgctaggattataggcgtgagccaccgtgcccagccagcaatttttaaaattaccatttaaatctcactgcttgttatcggtctgttgagagattctatatcttcctagtttaatctaggagggttgtatatttccaggaactt

SEQ ID NO: 771395 - DNA, 618 bp, Homo sapiens
atagtagccttgaataatcttttgtatttctgtggtattgaagtggcttcattgtctggggaaataccctaggttcgtcttgcactgagaagattaacaacacagacacacacacgtgaagcaggttaaggaggggaargtttaatagacaaaaaagaagagagagtgagctttctcatacagggcaggtgggatgcgatccatttatagagaggcttgaggaggcggtgtttgatttacacaggggccaggggattggtttgaccaggtgtaaatggttacatagcccgagaagaaattggccatcccaccttaatcttttattatgtaaatgtgacctctacctgtccggtgccatttgaaccttgattcctcattgtaccacacataaaattaatttaagatggatcatagactgaactatgaaacaatcaagcttctaaaggaaaccatggaagcatagtttcatgacctctgggtagggaaacatttcttaaatgggacatagaaagcactagccaaaatataaaagattaatatgttggatttgtaagaattaagaacttttatttatcaaaagatcctattaggagaatgaacaagccaaagcacagattg

SEQ ID NO: 771396 - DNA, 618 bp, Homo sapiens
atagtagccttgaataatcttttgtatttctgtggtattgaagtggcttcattgtctggggaaataccctaggttcgtcttgcactgagaagattaacaacacagacacacacacgtgaagcaggttaaggaggggaaagtttaatagacaaaaaagaagagagagtgagctttctcatacagggcaggtgggatgcgatccatttatagagaggcttgaggaggcggtgtttgatttacacaggggccaggggattggtttgaccaggtgtaaatggttacatagcccgagaagaaattggccatcccaccttaatcttttattatgtaaatgtgacctctacctgtccggtgccatttgaaccttgattcctcattgtaccacacataaaattaatttaagatggatcatagactgaactatgaaacaatcaagcttctaaaggaaaccatggaagcatagtttcatgacctctgggtagggaaacatttcttaaatgggacatagaaagcactarccaaaatataaaagattaatatgttggatttgtaagaattaagaacttttatttatcaaaagatcctattaggagaatgaacaagccaaagcacagattg

SEQ ID NO: 771397 - DNA, 544 bp, Homo sapiens
  misc_feature 447: n = A,T,C or G
agcctggatgcatgtctgttgaggctggcccatgggatatttctctggcctgggatgagggtgcacagctgctcagtcaatcttggggtatgcctgtgaggcacagcccatggggctgtttctgtggcctgggacacaggtgcacggctgctcagctggcctgggaacatgtcttctgggcatggactgtatggttgtttctcaagcctgagatgtgggcatgaggcctttgggcaggctagggatgtgtccaaggcgggcaggtgatccactgggctgtttctcaggccctgagcacaagcatgaaactacaccactggctttgggggcatatcagcttcttggtaactcaggtacttctcccactcaggggaggacacacagtagttcggctagctcaagkgtgggtttgtcctgggtgggactggcagactgttcctctagctngaagtgtatgtgtatgggtttgttccctggtgtgtaggaccagagtctcagctgatgatcggctcaggctggggttgtggcgttcagccacccatgt

SEQ ID NO: 771398 - DNA, 647 bp, Homo sapiens
agtcagtgttgctctcaaaagatttccctctgtttagctgcgtgaaatttttttgcactgattttcagaggctgacatcttccttagactctgtctaaggtattccaatggaaacctcttggttcgaaaacaaaaagctctgtcagttcccacatgtactctgaagagtcagacattttagaatcaggagggactgtaagagtttttcatttaagtttccatttctaaatgttgaagtcttgagtgttagcctctggctgcacaattcaaaccctgtcctgttaccccctgctccttaactgcagagaaggcaaagacggacacaggaaaggaatcatgttgacatcttatggccacattcagacttgaggactaaaatatggagagaaggggaggtgaatcaccagtggagtggttgtaggytgaggacacttggcagctcagtgacactggaaatgtcaggggcatgactaggcttggggtgggggtatacatccacatgggaattggatatgagttgcagactaatgtgggaactgatatcaaatggctacagtgtctttatgaataaggtacaaaagatatctgccttgaaagatcagggatggaagtgactaaaagcaatatgaattaatctcaagaggata

SEQ ID NO: 771399 - DNA, 599 bp, Homo sapiens
ttttccattggttagtctccaatggcctaccccacttccattttctgtccttctccatgatgatgggccccaaaagaggaactcccatggactgcatctgcaggctcccttgttagattggatttatccattggaaagcaaaggagattgaagaaaggcagaagagaaagtatgatgtgctaggcagaaaatgccttcccaaagatgtccatgttctaatccccagaacctgtaatatattaccttatatgacaaaagagattgcacagatgtgattaaagaacttcaaatggggagattgtctgggattatctgagtgggcccaatgtcatcagaagggttctcataagaggaaggcaaaagggtcatggttagacaaagggatcagaagatgctacactgctggatttgaaggtggaaaaagggaccatgggtcaaggaatgcaggyggctcctagaaagtggaaaagtgaaggaaatagattctctccccagaacttccagaaggaatgcagccttgccaacaccttgattttagcctagtgaaatctattttgcatttatgatctccagaactacaatataataaattttaagtt

SEQ ID NO: 771400 - DNA, 621 bp, Homo sapiens
gtcacccattccaggaaaataaaacttctaactccaaatatataggaaacattttagtcattaatttatattcaagtaacatttattgagaacctaatattcaccagtattgtgctaagcactgaaacaaagaaccaagacgcaggattatcaggccccttgccctccaagagccctcaccagtggggaatataaacacataaagcaataatgacgatctgcaataagtcaggttatgctggctgctataacaaaccaacccccatcagatctcagtgacttaatgtaattaaygttgatttctagtgtatgtaacaaaatgatgcaggtgtttctgatcagttggtaggtttttgccaaaaggttatccaaggacctaggttcattgtgtcttgtggcttcaacatcttctgcacttggtttccaaagttacattaagaacacaaccagtatcagggacggaagaaggattattaccacagattctacaaacatcaaaaaacacaaaatgaagtaaaaattttgaatagccttgtagctattaagtaaattaaatctgttatttaagcccttctcacaaacaaaactccaggcccagagggtttcactggtgaattctat

SEQ ID NO: 771401 - DNA, 621 bp, Homo sapiens
gtcacccattccaggaaaataaaacttctaactccaaatatataggaaacattttagtcattaatttatattcaagtaacatttattgagaacctaatattcaccagtattgtgctaagcactgaaacaaagaaccaagacgcaggattatcaggccccttgccctccaagagccctcaccagtggggaatataaacacataaagcaataatgacgatctgcaataagtcaggttatgctggctgctataacaaaccaacccccatcagatctcagtgacttaatgtaattaatgttgatttctagtgtatgtaacaaaatgatgcaggtgtttctgatcagttggtaggtttttgccaaaaggttatccaaggacctaggttcattgtgtcttgtggcttcaacatcttctgcacttggtttccaaagttacattaagaacacaaccagtatcagggayggaagaaggattattaccacagattctacaaacatcaaaaaacacaaaatgaagtaaaaattttgaatagccttgtagctattaagtaaattaaatctgttatttaagcccttctcacaaacaaaactccaggcccagagggtttcactggtgaattctat

SEQ ID NO: 771402 - DNA, 561 bp, Homo sapiens
ctagcaagaagtaaactgaaattaattaatcttttctcccagtctcagctctgctaaactccatgataggatatggataaaaatatctttcccaagcttttgcactgaagaaagggaaggttctctctaggaaaaataaaaccaaaataaagaatctagtccctattggtctctcatttaaaatgtcacacacacacacacacacacacacacacacacacacacsatgagacatgtaaagaagaatgaaaatatgacccataatcaaaaaaagaaaacagtcaatagaggcaggcccactgatgactggatattgcagtcagtaggtctctaaaataaatatcttaaatatgttacagaatttagaaataaagttggacacaataggtgaacagagaagaattttattggagaaactgaagctctaaagaagacccaaagagaaattatagaatagaagaatttttctgaaacaaagaatgcagggaataaacttgagaacagactggaagcaaaagaaggattagaaacatgaaggatgaggaactcagtaaaaaataa

SEQ ID NO: 771403 - DNA, 673 bp, Homo sapiens
ctcattatcctctactgaagccattgctgtttccttcgaaatgcctaccacaatttggaattgtttcatgtatgtctttttcataaaagaatgttaattgtaagaggggccacgccgagtgatcttatatatgcctgtggcctcagcccctggcacattctgggtacgcagcagccactgcaggcccaatccagccacagacatgttctacaagtgtgaggtaggaaaagcaaacattttcctgtatattcccaccactctcaatacttcacttctgacaccaatgtgtgggattttttcccacactgaccaattctccgacagacaccagcttcaattcaattcaattctgataccatccggagttactgcagatcctataggttaaaggctcagtcctacaagactgtgccctacttcagacaccagtcacaagcaggaagtctctggggaaccacaacttttttcctgtttggctacaaatcaaaagttcccatgatccctttttcaggtttgataatttgctagagcrgatcatagaacccaggaaaactgtttacttactattgctgatttcttccaaatgatgttttaaaggatataaatcaacagccggataaaggaacacatagagtgaggtctggaaggatcccgagtgcaggagcttctaccc

SEQ ID NO: 771404 - DNA, 673 bp, Homo sapiens
acacatgtgcacacacacatctatacctctatgataattttggctatgtgatacagtgctattgtgcttttgttctatcccaacttttccttattgataaagctaactaatcttctccctatgtttttttttttttccatctggcacatcttgcttttgctggcaattgcttcttcgaccccccagcaaaccttcactacccaacacattatacactcagaaagtgccactaaagcccattactgacataatgaaattctctgactccctctttccatttcaaccaagtggtctgtctatccaaatattttctcccccagagtcctcctgtctgtcttacgaatggtgtcccacttcccagctgacatcaaacctgtgcagattaccttttcaagcaaatgtaaataaacaataaagcacaaaacaaagaagcccacttgatttttttagttcttctagaaatggctcaataaaacttcactggccacaggagacttcccctaattcaactaaacaaacactsttccttcttctgttaagaatgtcatcgggcagtctaatgggctttgaaaaactctttggagctctgcactggaaaggaagataaaaggaagccacggatgagcagtgaagcagtcaggctcggatccctgccctcacctctgagatcagc

SEQ ID NO: 771405 - DNA, 673 bp, Homo sapiens
acacatgtgcacacacacatctatacctctatgataattttggctatgtgatacagtgctattgtgcttttgttctatcccaacttttccttattgataaagctaactaatcttctccctatgtttttttttttttccatctggcacatcttgcttttgctggcaattgcttcttcgaccccccagcaaaccttcactacccaacacattatacactcagaaagtgccactaaagcccattactgacataatgaaattctctgactccctctttccatttcaaccaagtggtctgtctatccaaatattttctcccccagagtcctcctgtctgtcttacgaatggtgtcccacttcccagctgacatcaaacctgtgcagattaccttttcaagcaaatgtaaataaacaataaagcacaaaacaaagaagcccacttgatttttttagttcttctagaaatggctcaataaaacttcactggccacaggagacttcccctaattcaactaaacaaacactgttccttcttctsttaagaatgtcatcgggcagtctaatgggctttgaaaaactctttggagctctgcactggaaaggaagataaaaggaagccacggatgagcagtgaagcagtcaggctcggatccctgccctcacctctgagatcagc

SEQ ID NO: 771406 - DNA, 595 bp, Homo sapiens
gttcaatagtaaacagccactccatcaacaaggaattagagcagctttaggaggaggcagatccacagacaagggtatatccagaaagcccaggcttacagcggggaggcccctaggccaggtctgagaatctgatatgggactggtccctgcagatgggtcaggagagcagcaccagaaaaaccacatcttttgggctcacagacctcttcayaagtcattcccaacctcctgaggagcagcacgctggccagctctgatggagttcacaagttcactccactaacaaagcctgaacctctgagtccagcccacagtcatgtttcactcaggctttcaaggagctggtgttcattgaacatttccacagctgagaaaggtcccaagtcctcagagctgttgttgtttgtgtgttaacctctcagggactccaagaagagtaatgttacaaagaactccagctccagaggcaggagaaacctgagttctaatcccaactttgccacttattagctgtttgaccttgaacaagtcgcctcaccttttaaaatatcaattcctcatctgcaaaacagcgcctaccttgcggccattg

SEQ ID NO: 771407 - DNA, 638 bp, Homo sapiens
gtcatggttgaatcaaatcactgtcactcaaaatagggtatggttgagtaatagagtcactcaaaagagggtatggttgagtaatcagggcaaatatccccaaatctggaatttctgggttttcagccactgaatgactaagtggctttagactagatctttcctccacctcatgagaacaggtcaaatcctgtctgtgctgattgggactgggtagagccgaacacctcaagagagaactctacctgcaactgggctctccatgggctccctggaaaatggggacagcagcactgacctcagaagatggagaagggaattagcaaataatgggaaagcttaatacaatgtcactttcacaccagggtggaaattgtaaaagaccaaaagggagccctgtttaaagatgtctttactcaagcagtataaataatcaggtttctcagagaaaatcatttccattctcaccactagttctacttaaacaagtttgaagrccaataaaaacacagtgctggtttacaagggttaggagaaatgtaagaagatggtggatcttgcctgagttcagaagtttaaagagaaaatcctaagaatgggaaatgacaaattgtattgatgctaatttttttaaataa

SEQ ID NO: 771408 - DNA, 565 bp, Homo sapiens
aaaaactctatagtcttttctttcacatctatgtctttaattgacctggaattgcatgaggcagggctctggtttagctgtttccatattaatactcatttgttccagcatattttttgcaagacttcttttcctgctgatttgcattgctgactcttatwtttcacgggttcatagatacgtgggtgtgggtctttctctgggttttctattatgttccattgctctatttgtctctccttaaactaatatcacattgtcttaaatattctaactttataatacatcttggtatctacaagagcaagttctcccaccttgttctttttctttaagaatgtcttggctattctttatccatattcattttaaactagcttgtcaacttttcccaccacaccccaaaatgctgggactttgagattgcactgattctataaatcaatttcagtagaatgacatctttacaatattgagacttctagttaacaaacacagtattttcactttgtgtgtttgtgtgtgtgtgtgtgtctcccaataaagtttaaaattttcttaatag

SEQ ID NO: 771409 - DNA, 597 bp, Homo sapiens
cccccgcaaccagtttctatcagtgttgatctctatcttgtcatattggaaatgtttaataaatgtagactaaatatagcagagcacattttcccttttcttaccaaatctctggttctcctcaacttttagtactatgttctgtcaccatcatttattggacagttcttcattctagtccactcccataggaatgactttaagactgctgagtctgggaagattctctgttcaaatatttgtccattttcttattgaggatttgttttcttattattgmgttttcatagttcttcatattctggtttttctttctttcttttttttttttttttttttttgtagagacggggttccactatgttgctcaggctggtctcaaactcctgggctcagatgatcctctcaccttggcatcccaaagtgctgttattacaggcatgagccactgtgccgagccagttctttacattctggatttcagtccatttgcaaatgttttctccctatctgtagcttgtctttttttttttcttttttctttttttttggatggagtctcactctgtcaccaggctggagttcagtggccgatct

SEQ ID NO: 771410 - DNA, 597 bp, Homo sapiens
cccccgcaaccagtttctatcagtgttgatctctatcttgtcatattggaaatgtttaataaatgtagactaaatatagcagagcacattttcccttttcttaccaaatctctggttctcctcaacttttagtactatgttctgtcaccatcatttattggacagttcttcattctagtccactcccataggaatgactttaagactgctgagtctgggaagattctctgttcaaatatttgtccattttcttattgaggatttgttttcttattattgagttttcatagttcttcatattctggtttttctttctttcttttttttttttttttttttttgtagagacggggttccactatgttgctcaggctggtctcaaactcctgggctcaratgatcctctcaccttggcatcccaaagtgctgttattacaggcatgagccactgtgccgagccagttctttacattctggatttcagtccatttgcaaatgttttctccctatctgtagcttgtctttttttttttcttttttctttttttttggatggagtctcactctgtcaccaggctggagttcagtggccgatct

SEQ ID NO: 771411 - DNA, 532 bp, Homo sapiens
gggaggaggctgtgggaggctctgtggaatccgtgctgccctgtgcttcagctgtttgttctagtctccttcacagacagtggctccccagctcaggacactgcatgcctgatcatcctggggctgggcctgtgcctggctcacagcaggtgctcaatacatgtttactgaggaacaactggacacatggatcttttcctttcaggtcatgtgccctctggtggtgtgtagggcaaggagtcctgcggaaggcaggacctctgagatgccctgaacactgggccccagggccrgggcacacagggcagacctgctgctgtgcacaggggaggctgccaggccctgggggcaccacatacccatcatctttgtcctgcatgggcttggggctggaagtgcccctcagagagaagacagggactcagggctcactggacagagagtgcaggcatgcatagagtgaccttcccgtagggccaggggtcaggggaggctgtgtggcatggtcactgcctttgtctgcttgagcttc

SEQ ID NO: 771412 - DNA, 532 bp, Homo sapiens
gggaggaggctgtgggaggctctgtggaatccgtgctgccctgtgcttcagctgtttgttctagtctccttcacagacagtggctccccagctcaggacactgcatgcctgatcatcctggggctgggcctgtgcctggctcacagcaggtgctcaatacatgtttactgaggaacaactggacacatggatcttttcctttcaggtcatgtgccctctggtggtgtgtagggcaaggagtcctgcggaaggcaggacctctgagatgccctgaacactgggccccagggccagggcacacagggcagacctgctgctgtgcacaggggaggctgccaggccctgggggcrccacatacccatcatctttgtcctgcatgggcttggggctggaagtgcccctcagagagaagacagggactcagggctcactggacagagagtgcaggcatgcatagagtgaccttcccgtagggccaggggtcaggggaggctgtgtggcatggtcactgcctttgtctgcttgagcttc

SEQ ID NO: 771413 - DNA, 572 bp, Homo sapiens
tggattgtttgtttatgtgtttgtgtcccagagtgctctttttaacaagtagtaatttttgctcaggtattttcagggactcttaaaaacaggaaattttgggatcatttcctctgactcactgctcactaaaataatagctgttactctccacagatgctgcagttggagaagaaacttgaacgtgaacttgaggatgatgcacgagttattgcttgccggttccctttcccacattggactccagaccacgtcacgggggaggggatagacacagtgtgggcatatgatgcaagcacttttagaggccgtgaaaagaggccctgtacatcgatgcatttccagctgcccattcaagcataaacttkactgggagtgtttttctgaaatattgtagtcttccctgatcttgtagagacttacagctgtgtccttagcaaaggagcataattgtctttggtttggaatgagaaattactattactttccttaactgttggagaaaacaaacgaagaaaaacaggtagatttaaaatctgcttttgatgctattttcttaaaaattgtactta

SEQ ID NO: 771414 - DNA, 587 bp, Homo sapiens
tgtgtggggtaggtaacttgtctttttactgcataactctccagaacaagaggagccacacccaggcccagtttagtgactgggtatcacctgaacaggctgaattgtgtccccccaaattcatatgttggagccctaacctccagtgcatttggagacagggcctttaagaggtcatttaagatgaaagtcaagtcataagtgggggggccctgatccaataggactggtgtctttataagaagaggaagagacatcagtaatgcatgcacacagaaaaataagccatgtgaggacatggtgagaagacgggccatctgyaagctaagaagagcggacccaggagaaaccaaacctgaagataccttgatcttggacttccaccctccaaaattttgagaaagttttattaagcttctcggtctgtggtattttgttatgggggccctagcaaactaacatgctcctgatgaagatagtaccatgcattacccagaggtacttgatccgtgactgaatgagacttttgagttgtctctcctggggagagaataaatgaattttgctcaagaaagaaacactgaact

SEQ ID NO: 771415 - DNA, 596 bp, Homo sapiens
ccaggctggagtgtagtggtgcgatctcagcttactgcaaccttcccctccaggttcaagtgaatctcctgcctcagctgtcccagtagctgagattacaggcacccaccaccatgcccggctaattttgtatttttaatagagacaggatttcgtcatgatggccaggctggcctggaactcctaactttttgtctcactgctcttacaattctttccttcatgttaacattagataacctgatgacaatgtgcataggtgaygatctttctgtgattaatttaccaggtgttctttgtgcttcttatatttggatgtttaggtatctatcaaggccggggaagttttcctcgattattcccccaaatatgttttccaaacttttacatttatcttcttcctcaggaacgccaatttttcttagatttggtcatttaacgtaatgccagacttctcaggggctttgttcatattttcttattcttttttctttgtctttgtcggattgggttcattcaaagaccttgttttcaagctctgaatttatttctctgcttgttcaattctattactgagactttccagagcattttgc

SEQ ID NO: 771416 - DNA, 652 bp, Homo sapiens; identical to SEQ ID NO: 745391

SEQ ID NO: 771417 - DNA, 652 bp, Homo sapiens; identical to SEQ ID NO: 745392

SEQ ID NO: 771418 - DNA, 574 bp, Homo sapiens; identical to SEQ ID NO: 745393

SEQ ID NO: 771419 - DNA, 659 bp, Homo sapiens
attttcccttggggaatatgtattgaaggtcttaaatctgaaaagatgaacttctgtggcttcagaagattttcctctgaccatggtgaggagggtaattgtaagacagccaagcccagtgttgcctcaacattgaatctggactattatctaaggggtccaccctgagcttagacaaaaagtggaagagcaagaattcttttattaagggtttggaaagggaggggctgatcaaaagttacttcagaacaagagcctggaggctctctctgggcacttgccagtggttccttgttgcttatacccatgtggatgaatgttgacaaagtcagaaaggaaattactagatttgggattgaaagaaatggatgcctcagttaattcttggctccattgcctgwatgtcaaattttagactgccccttttccatgacctctgttgggtagaagcaggacagaccagaatctcccggtaatctccctctgggctagcaggagagactgccatgagagatgcccaataaatatgccagttggctttaagatttccactgtaatgaccttggtggaatcaagtaatttccctgccaatcaaaagcagagatgtcagtggaggaaggaaaaagaaaaaaaaaatggaatttggcaaacaggcatct

SEQ ID NO: 771420 - DNA, 616 bp, Homo sapiens
tactgttcatgttgtattataatcaaagagtgactacattcctatatctttcacctagagcattttcacataggagttatccagacagctcttaggcaaaatggtgattgagatctttctttttttgagacggagtctcactctgttgcccagactggagtgcagtggcgtgatcttggctcactgcaaactctgcctcccaaattcaagctattctagtgcctcagtcaccccagtaactgggattacaggcatgcaccagcacgcctggctaatttttgtatttttagtggagacggggtttcaccatgttggccaggctggtctcaaactcgtggcctcaagtgattcgcctgccacagcctcctaaagtggtgattcgtatctttattgtcaacctgggattcggaaaaaaaatccttaatcaagaatctgagagtacagatcctagacctagcastgccacttgatgctaataagaacaacaaaaacaaaagcttctccaccctggttttcccacctgtgaatttatatagtaataatttttcttatttttaggtgtacagtggaaattacatgttaatataggcaaacatttttccaagaaataaaaaca

SEQ ID NO: 771421 - DNA, 591 bp, Homo sapiens
aacccacctgtcctttctcttacaagataaaccagaaaagttaagtttgggttattaattgcttctccagcatgcaatgctatttctatattacttcaatttagcattttaatgaataatcctatattatcacggatataattaaatcatgaatcacctgtgctttacaaagcgaatatatggcttaatcttccagacccaaaatgaaacaaaagctgagatataaagaataatttgttctttaaaagcgtastccctgcactgatcttcttatttatttttatttttatttttttgagatggagtctcactttgtcacccaggctgaaatgcaatggcgtgatgttggcccactgcaacctctgcctcccgggttcaagcgattctcgtgccttaacctccgggtagctgggattacaggcatgcaccaccataccaggctgatttttgtatttttagtagagatggggtttcaccatgttggccaggctggtctcgaactcctgacctcaagtggtccgcctgccttggccttccaaagtgctgagattgcaggcgtaagccaccacacccagccatactgatcttttt

SEQ ID NO: 771422 - DNA, 613 bp, Homo sapiens
gctaactagaataatcagtttagagaagaatataaacgacctgatggagctgaaaaacccagcacaagaacttcctgaagcatacacaagtatcaatagccaaattgatcaagcagaagaaaggatatcagagattgaagatcaatttaatgaaagaaagggtgaagacaagattagagaaaaaagaatgaaagggaawgaacaaagcctccaagaaatatgggactatgtgaaaaaaacaaacttacgtttgattggtgtacctcaaagtgatgggagaatggaaccaagttggaaaacacccttcaggatattatccagtagaatatccccaacccagcaagacaggccaacattcaaattcaggaaatacagagaacaccacaaagatactcctcgagaagagcaaccccaagacacataatcatcagattcaccaaggtcgaaatggaggaaaaaatgttaaggacagccagagagaaagctcaggttactcacaaagggaagcacatcagactaacagtggatctctctgcagaaaccctacaagacagaaaagagagggggccactcttaaaggaaggaattttcttttttttttttttaaggttaa

SEQ ID NO: 771423 - DNA, 599 bp, Homo sapiens
atgtatgtgtgtgtatatgtgtgtgtgtgtgtggtaaggattaagtattaaggatacttaacatttactctcttagcaaacttaaacaatacagtattattatctattgtcaccaagctgcaatattaaatccccataatgtatttgtcttataactgaaagttagtatgctgtgtccaacattaccccatttctaccatgtcccagattctggcaaccaccattctactctctgttcctatgagttcaactatgttagattacacatataagcaagatcatacagcatctggctgtctgtgtctggtttatttcagttagcataatgtcctccaggtttatccatgttttctcaaatggcaggatttgtttttctttttactgttgaataatattccattgtrtatacaccacattttctctattaattcatttgtcaatggacacttaggttggttccataccttggctattgtcaataatgctgcaatgaagacgacagtgcagacatctcttcagcatgctcctttcatttcctttggatatatacccaaacattagagtgctggatcatatggtatctctatttttaatttttt

SEQ ID NO: 771424 - DNA, 587 bp, Homo sapiens
ctctcttatttccttgagcagtggtttgtagttctccttgaagaggtccttcatgtcccttgttagctgtattcctaggtgttttattctctttgtaacaattgtgaatgggagttcattcatgatttggctctctgcttgtctattgttagtgtaaagaaatgcttgtgattttcacacactgattttgtatcctgagactttgctgaagttgcttatcagcttaaggagatttggggctgagacaatggggttttctaaatataggatcaagttgtctgcaaacagagacaatttgactttctcttttcctatttgaatacgctttatttctttctcttgcctgattgccctggccagaacatccaatactatgttgaataggagtggwgagagagggcatccttgtcttgggccagttttcaaagggaatgcttctcgcttttggccattcagtatgatattggctgtgggtttgtcagaagtagctcttattactttgggaaatgttccatcaatatctagtttattgagagttttatcatgaaaggatgttgaattttttcgaaggtcttttctgcatctat

SEQ ID NO: 771425 - DNA, 612 bp, Homo sapiens
agttgctgcctagatctgcatgccagtctttgagattaatgtcctgtgccttgtcttccaatcagccctctgggatacccaatggttcccatatgatgggactggagtgggcttcccatgaagattcccagactgatggggagattgaacatttctcctgctctcttgagttgtcaaccatgtgtttgcatttaggcagcagatggaattattgcaaatcatttactttataaccatttgtccccttatactatcttacaatctacttttcatataattgtgatgagttttctgctgttatggaaaattccatttatggctaaagcttttagtaaatgctatgaagcttgatgactctctctrctgaatgggaataattatgcattagttcataaaatgttcttatgagtttgtttagtcactagaaaggctagaatactgatgcttaaatataaaaaatatatagtttaaagagctataatatctagcagttcttttgtttctaaagctccctggacattgagtaacaaataagttaataaagcaatagtttgttatttgattttatatcagaaagcctaaatagtattttaaaaataaagcttccatata

SEQ ID NO: 771426 - DNA, 575 bp, Homo sapiens
atatacatagtaaaatgattgctactattaagaaaattaacccacccatcacctgccattattaccttttttgtgtatgtggttaaagcacgtaaaatctattttcctagcaaaatttcagtttacgatacaatatcattaattatagtcctgatgctgtacatcagatctccagacttatttatcctacataactgcaagtttatatgctttaacctgcttctccccattttttccctttccttgtctctgataatctctgttctaataggcattttaaaaaawttcacaatataagtgagatcatgcagtatttttcttttacgtctggcttatttcactaccataatgtcctccagattatccatgttgttgcaaatggcactatatcctttttcaaggctgactcatactactatgtgtgtgtgtgtgtgtgtgtgtgtatgtgtctgtctgtatatatgtctatgcgtatatatatgtacacatatggacacatacacataccacaatttatccattgatagatagttacgcttgtttccatatcttggctgttatgaataatgctgcaa

SEQ ID NO: 771427 - DNA, 575 bp, Homo sapiens
atatacatagtaaaatgattgctactattaagaaaattaacccacccatcacctgccattattaccttttttgtgtatgtggttaaagcacgtaaaatctattttcctagcaaaatttcagtttacgatacaatatcattaattatagtcctgatgctgtacatcagatctccagacttatttatcctacataactgcaagtttatatgctttaacctgcttctccccattttttccctttccttgtctctgataatctctgttctaataggcattttaaaaaaattcacaatataagtgagatcatgcagtatttttcttttacgtctggcttatttcactaccataatgtcctccagattatccatgttgttgcaaatggcactatatcctttttcaaggctgactcatactactrtgtgtgtgtgtgtgtgtgtgtgtgtatgtgtctgtctgtatatatgtctatgcgtatatatatgtacacatatggacacatacacataccacaatttatccattgatagatagttacgcttgtttccatatcttggctgttatgaataatgctgcaa

SEQ ID NO: 771428 - DNA, 551 bp, Homo sapiens
gttggcccaaagtcgtatacataggccacctttattcatcacacagttttccttaatcctcatctctgccagccttgaccacagaacttacttttctttttctttttctttttgcacatacattttaaagtgagtgatagcccttcatttttttttttttaatatacagtgggacctcgtttagggagggatggaatttagggtctcactttagtgcaaaaggtaataatctcagagacaaggctgttcttgagagggagcgggagtgctttgggaaagtaccacattggatcccagtataacatttctaaataagtccatgatagctatgytatttttctttagcagttttgttggaactgttgctgtttctttagttaagcactcagaatacatttatgtatcttttaacattggtatcatctttagcacacatgagatcctggaaacatatgagaccttggcatacattgactgagtaaacagcagattcaccttttccatctcacagtcacttagggcttacactttttcaggggaattgtggactt

SEQ ID NO: 771429 - DNA, 551 bp, Homo sapiens
gttggcccaaagtcgtatacataggccacctttattcatcacacagttttccttaatcctcatctctgccagccttgaccacagaacttacttttctttttctttttctttttgcacatacattttaaagtgagtgatagcccttcatttttttttttttaatatacagtgggacctcgtttagggagggatggaatttagggtctcactttagtgcaaaaggtaataatctcagagacaaggctgttcttgagagggagcgggagtgctttgggaaagtaccacattggatcccagtataacatttctaaataagtccatgatagctatgctatttttctttagcagttttgttggaactgttgctgtttytttagttaagcactcagaatacatttatgtatcttttaacattggtatcatctttagcacacatgagatcctggaaacatatgagaccttggcatacattgactgagtaaacagcagattcaccttttccatctcacagtcacttagggcttacactttttcaggggaattgtggactt

SEQ ID NO: 771430 - DNA, 559 bp, Homo sapiens
gcttgacaagtaacaggtgctaacatctttttcagtcttgtcacagggactagagggtctaggtcaccatgttcattaatgtagtccaggaaattttatttctcctgtggctaatcatttacatttgacatgaatctgtcatctgtgcctctagtctctctgcttccacctttgtcttctatagtgtgttgttctcataatagtcatacttttaaaatataattcagattatttctttgctctgtatattttacaggctttccttataactcaaagtgaaacccaaaggcctgtaagaacccacatgatctaaactcakgctgcctatttgatttcacctcttaccttgtttcccagcccctccactctgttatgaccatagaagttgccttgtttttcctgacactccaaaatgctcttgcctcatggcatttgcacttttcatttcctcctctagaatgcttcttccctagatatacacatggattgctgtttcccttctgttaggtctctactcaagtatcattggagagaggcctttcctgaacatacattgcaa

SEQ ID NO: 771431 - DNA, 646 bp, Homo sapiens
ctttttgtatccccatcaaatgcaatagcttagcatacatatggcttctagcctgcttgaagatgagcatcttgtatagtttaaatgatcctgagctgggaactgttgtttctcatcaccatcatcagtggagatggtggcagtaggttctccctgccttttggcagttcttaatcttatttttgtgtcacggatccctttggcagacagtgatatctatggaccatttctcagaatgttatttttaattttataaaataaaacctgtaagctgagaaaggaaaccaattatactgaaatacgcttatcawaatattgtgacagtaatacatgtgcccaactgttaacacatcaagcaagatctagtagcatgtctaagagctactgttatcttgaagaagtgatgaacataagtaaaactttgacatctacggcaactcgagtgggatccctcgaccaaagttactgggatcaggtaactttggtccaagtgtgggtatgacagaagatgagcctataaaggttagagatggctatgatgaaccttcactgatataccagagggatgggatattattggcagagaggagtcattgaagtattttaataggaatgagataaagagattcctgatttcagaatatta

SEQ ID NO: 771432 - DNA, 646 bp, Homo sapiens
ctttttgtatccccatcaaatgcaatagcttagcatacatatggcttctagcctgcttgaagatgagcatcttgtatagtttaaatgatcctgagctgggaactgttgtttctcatcaccatcatcagtggagatggtggcagtaggttctccctgccttttggcagttcttaatcttatttttgtgtcacggatccctttggcagacagtgatatctatggaccatttctcagaatgttatttttaattttataaaataaaacctgtaagctgagaaaggaaaccaattatactgaaatacgcttatcataatattgtgacagtaatacatgtgcccaactgttaacacatcaagcaagatctagtagcatgtctaagagctactgttatcttgaagaagtgatgaacrtaagtaaaactttgacatctacggcaactcgagtgggatccctcgaccaaagttactgggatcaggtaactttggtccaagtgtgggtatgacagaagatgagcctataaaggttagagatggctatgatgaaccttcactgatataccagagggatgggatattattggcagagaggagtcattgaagtattttaataggaatgagataaagagattcctgatttcagaatatta

SEQ ID NO: 771433 - DNA, 650 bp, Homo sapiens
ctaggactctggggaggcaatgtgaaatgaacaattacatgtttactatctagaaggctgttcttcagttccacttcaattgattctctcacacctatgaggcaagtgctgactgcagagctaaaaacagggctagaaactgcatgtgtgtgatggtaaggagagggagaagagcgtgtgcagtgcggggtgggaaagaggaaaactggggcaacagcstctgcaggtgaacgtgacaaagctgttcaatatgaagtttgtgttttatagtcagtctggcagtcagacatgggtagcagatagtttgagtctcctgcctttatacgtctctttgctagatgcatttgatgaactcaggataagttgtaggacttcagactttcaaaatgttaaggaactgggtcacatagttgggcaaccctttgccagaacaatctgaggtacataataaaatgcctgcatccccctatttgagaatatatatcaaaaaattacttaaaagatcatttcagctggactaggtttctggggacactattctggtgggtgagtaggtgttactcttcctccaaagataatcatttgcatttgggactggaatgtcgaaggatagatttgggtgaggatccctggtgtcttcagagttcctt

SEQ ID NO: 771434 - DNA, 632 bp, Homo sapiens
tctgggacaaagcttccagaggaaggggcaggcagcaatctttgctgttatgcagcctctgctggtgatacccaggcaaacagcatctggagtggacctacagaaaactccagcagacctgcagaagaggggcctgactgttagaaggaaaactaacaaacaaaaaacaatagcatcaacatcaacaaaaaggacacccacataaaaatcccatcmgaaggtcaccaacatcaaagaccaaaggtagataaatccacgaagataagaaaaaaccagcgcaaaaaggctgaaagttccaaaaaccagaatgcgtcttctcatccgaaggatcacaactcctcaccagcaagggaacaaaactggatggagaatgagtttgatgaattgacagaagtaggcttcagaaggtgggtaataacaaactcctctgagctaaaggagcatgttctacccaatgcaaggaagctaagaaccttgataaaaggttacaggaactgccaactagaataaccagtttatagaagaacataaatgacctgatggagctgaaaaacacagcatgagaactttgtgaagcatacacaagtatcaatagctgaatcaatcaagcaggagaaaggatatcagagatt

SEQ ID NO: 771435 - DNA, 611 bp, Homo sapiens
cagcagaacacatgttggtagtacagtcagccctctgtatccctggatttcgtattcatggattaaactcgcagcagatcaagaatatttgggaaacaaaaaattccaaaaagtgaaacttgaatttgccatgtgctgagtactatgttaaatccacagaaatgatgtgttgtcattgtattagttattataaataatctagagatgatttaaagtataaaggaggatatgtgtagrttatatttaaatactgtgtcattttatatgagggacttgagtatctgcagttttgggtgtctgtagggggtcctggaaccagccctcgctagatactgaggaaagactgtgattctgaattcaaagagggtaagatcaatgaaataatgttaaaaaatcaaaaggtgtttatttttattccattttaaaaacttcttttttaagctttatcgaggtataattgataaacaaaaattatgcgtattcagggtgtgcaatgtgatgatttgatagctgtatacattgtgtaatgattaccataatcaaattaatcaacatatctgtcaccacacagttaccaccttttatgtgtgggtgagtgtgtgcgtgaggac

SEQ ID NO: 771436 - DNA, 611 bp, Homo sapiens
cagcagaacacatgttggtagtacagtcagccctctgtatccctggatttcgtattcatggattaaactcgcagcagatcaagaatatttgggaaacaaaaaattccaaaaagtgaaacttgaatttgccatgtgctgagtactatgttaaatccacagaaatgatgtgttgtcattgtattagttattataaataatctagagatgatttaaagtataaaggaggatatgtgtagattatatttaaatactgtgtcattttatatgagggacttgagtatctgcagttttgggtgtctgtagggggtcctggaaccagccctcgctagatactgaggaawgactgtgattctgaattcaaagagggtaagatcaatgaaataatgttaaaaaatcaaaaggtgtttatttttattccattttaaaaacttcttttttaagctttatcgaggtataattgataaacaaaaattatgcgtattcagggtgtgcaatgtgatgatttgatagctgtatacattgtgtaatgattaccataatcaaattaatcaacatatctgtcaccacacagttaccaccttttatgtgtgggtgagtgtgtgcgtgaggac

SEQ ID NO: 771437 - DNA, 611 bp, Homo sapiens
cagcagaacacatgttggtagtacagtcagccctctgtatccctggatttcgtattcatggattaaactcgcagcagatcaagaatatttgggaaacaaaaaattccaaaaagtgaaacttgaatttgccatgtgctgagtactatgttaaatccacagaaatgatgtgttgtcattgtattagttattataaataatctagagatgatttaaagtataaaggaggatatgtgtagattatatttaaatactgtgtcattttatatgagggacttgagtatctgcagttttgggtgtctgtagggggtcctggaaccagccctcgctagatactgaggaaagactgtgattctgaattcaaagagggtaagatcaatgaaataatgttaaaaaatcaaaaggtgtttatttttattccattttaaaaacttcttttttaagctttatygaggtataattgataaacaaaaattatgcgtattcagggtgtgcaatgtgatgatttgatagctgtatacattgtgtaatgattaccataatcaaattaatcaacatatctgtcaccacacagttaccaccttttatgtgtgggtgagtgtgtgcgtgaggac

SEQ ID NO: 771438 - DNA, 621 bp, Homo sapiens
atccatattgttcattacatttccatatcaaaataacaaactgtagagcaaaaggctcatggcattctgttgacttaaaagttaaagcagagggaagtgcccatcaatgcagtaagagagcaggtttagccagaatgagcacaggccagccaatgccaggaacttagccatttagaattgggaggcaggtgggtggtgccatggcagcgaccatttaattaggtacacttttctaggctaaccttggagcggaggcctggtgtcgggtggggggtgctgtgtacccccacttcctgcacttcaggtctgagaaccattagcaagtcctgttttttctccaaactcccaccttttgctgcctttgtggcctggcagaatgttttgctgccactttcttgagtgacarcttcaaagctaagcagtgagatgctttaacctacacatcccctcccactgcttggacccaaaggcttcctctgcaagtgagggcctcaaaggagacctggaacctttattcttgtcctgactttctgttttagaatcaggaccttttcaaaaccccaggagcagacagagggggtgtggcatggactctatgtgagggtctctcgcatgccaagg

SEQ ID NO: 771439 - DNA, 491 bp, Homo sapiens
cgagtgaggaggaacagattggggacttgcttaaagaagtagtctggccacattttggtaaagcagctgtgctgtgccgggggtccccttccatccctggttgttttggactctccaaagcctccaggatggaacggctgagttgcccaaacaggaaaaatggaggcccatcccttcccccaggaaatccatctcaggtggttgtgacactgttgcgggtggctggctggaattccaagtggtgactcttatcctgtgaggcactgtggaagtggggcctccagaatgtcactgcttggccccctggattcagcctctttcctaaaggtrtgcacagaggactaacctcccactttgctgggttacttttcctgggtacttttgccaggaagcccagactggagtatgtaaagctcctgggcctctgtgcatgcctgagaggctgatctgccgagactccctgtagttctgtttgtcagactgatggccct

SEQ ID NO: 771440 - DNA, 638 bp, Homo sapiens
ggcattttaattttaaaagtagttgaagaggccaggcatggtggctcatgcctgtaatcccagcattttgggaggccaaggtgggcagattgcctgaggccaggagttcaagaccagcctggccaacatggtgaaatcctgcctctactagaaatacaaaaaaattagccagtcgtggtggtgggcgcctgtaattccagcaamtcgggaggctgaggcaggagaatcgcttgaacccaggaggtggaggttgcaatgagccaagactgcgtcactgccttccagcctgggtgacatagcgagagtctgtctcaaaaaaaaattggttgaagagagagagccctccttaaacaccactccttgagaccttgggcaggtgggaggaagccgaaggaaggggatgaggactatcccattcactttcccatggaggggtgggctctatgaggctggtctttgaagttggcttatattttttctagacactatgtcattcattgagcatctactatgtgtaagacctaagccaggcattgtgaaaaccacacaatgatcataaaacgattcttgctcattgcgaactagagggcccctgcatgtagaagactgtgcaagaagtccagaaatgcaaaatttgg

SEQ ID NO: 771441 - DNA, 638 bp, Homo sapiens
ggcattttaattttaaaagtagttgaagaggccaggcatggtggctcatgcctgtaatcccagcattttgggaggccaaggtgggcagattgcctgaggccaggagttcaagaccagcctggccaacatggtgaaatcctgcctctactagaaatacaaaaaaattagccagtcgtggtggtgggcgcctgtaattccagcaactcgggaggctgaggcaggagaatcgcttgaacccaggaggtggaggttgcartgagccaagactgcgtcactgccttccagcctgggtgacatagcgagagtctgtctcaaaaaaaaattggttgaagagagagagccctccttaaacaccactccttgagaccttgggcaggtgggaggaagccgaaggaaggggatgaggactatcccattcactttcccatggaggggtgggctctatgaggctggtctttgaagttggcttatattttttctagacactatgtcattcattgagcatctactatgtgtaagacctaagccaggcattgtgaaaaccacacaatgatcataaaacgattcttgctcattgcgaactagagggcccctgcatgtagaagactgtgcaagaagtccagaaatgcaaaatttgg

SEQ ID NO: 771442 - DNA, 533 bp, Homo sapiens
gtgagagtattaggaggtggtgattttgggaagtgattaggtcatggaggtgaaggcttcatgaatgagattagttcccttattaaagaggcctaagagagacccctcaccccatctaccatgtgagattagagtgaaaagaagctgtttatgaaccagaaagtaggccctccccagacaccaaatgtgctggtgccttgatcttgatcttgaacagaataaagttctgttatttataagmcaccgagtttatggtattttgtggtagcagcccaaacagacgaagacagtcagtcagcattacttatgaaacacatactgtatatttgagctttttgcatttgagtctttaaggcctccttattgattaatctgcaaggtggttctttaaataagttatcttctaatcaccactagtgacttcagggttggtagactttgtaaggaggataacacctctcataggaagcctgtaaaagttgtcagatatggtctattatcctgattaacaaacatttagtgggtgcttataa

SEQ ID NO: 771443 - DNA, 585 bp, Homo sapiens
cctttcattgctgcctcttgcttaaatctcaagttctctgatttaacttctttatgttttagtggccatgctattatttttatttttaaaaaagagcttgattattaatgaaaagtaattttgttctcagttttaaagtctataaaatatggaagtttctgctttcttaggtttcctgatattattggttttatttgattgatttatattgaccatgatattgataagataaatgaatctttaaatgagtgcttattcagacttctgacctgcacaggaaaacctcaggacatttttaaaaattttatcagtcataaaaaaaaatcagttatttaggtagggcactaattccattgataatgtattttatgtaatatatttactatttagcatatatttataaaatacttaacgtrttggcataaaaaatgactaggcaaaaaagagaaattctcctctgatttatgtggggcaaaaggaaaagtaatggtcagggaagtagttgcatatggcctcaacattaaaaaaagctagtaaacccaaattttgttgttttgtaaaagaaatgtctgcattcaaatggct

SEQ ID NO: 771444 - DNA, 635 bp, Homo sapiens
tataataaataattggaggcaaagtaaatgaagtaaaatatggactctcacccagctcctcctcaaagttttctatgtgtcatttatatattgaatttataaattttttttacaaaggcaaccatattattcatatacacattaytctgtaccttactgtgttcactaatatgtcttggaaaatatttttttagcccttagatatttacttcctttatttaatgaatgcaggttttttttttttgcttttttttaactatagataactcataatgtgtttaattggttgacttcacttgaatacatgttcatttttttttaacagtagtaaaatgattattctctactcacttcttatgatcactaggtcaaaaatagagcaattacaatattgctagatattggccaggtacggtgcctcaggcctgcaatcccagctgggaggtcaaagcaggtgaatgacttgaggtcaggagttcgagaccaccctggccagcatggtgaaacctcgtctctactaaaaatacaaaaattagccaggtgtggtggcacgcacctgtagtcccagctactcgggacgctgaggcaggagaatcgcttgaacccgggaggttgcagtgagccgagatcgtgcc

SEQ ID NO: 771445 - DNA, 635 bp, Homo sapiens
tataataaataattggaggcaaagtaaatgaagtaaaatatggactctcacccagctcctcctcaaagttttctatgtgtcatttatatattgaatttataaattttttttacaaaggcaaccatattattcatatacacattattctgtaccttactgtgttcactaatatgtcttggaaaatatttttttagcccttagatatttacttcctttatttaatgaatgcaggttttttttttttgcttttttttaactatagataactcataatgtgtttaattggttgacttcacttgaatacatgttcatttttttttaacagtagtaaaatgattattctctactcacttcttatgatcactaggtcaaaaatagagcaattacaatattgctagatattggccaggtacggtgcctcaggcctgyaatcccagctgggaggtcaaagcaggtgaatgacttgaggtcaggagttcgagaccaccctggccagcatggtgaaacctcgtctctactaaaaatacaaaaattagccaggtgtggtggcacgcacctgtagtcccagctactcgggacgctgaggcaggagaatcgcttgaacccgggaggttgcagtgagccgagatcgtgcc

SEQ ID NO: 771446 - DNA, 635 bp, Homo sapiens
tataataaataattggaggcaaagtaaatgaagtaaaatatggactctcacccagctcctcctcaaagttttctatgtgtcatttatatattgaatttataaattttttttacaaaggcaaccatattattcatatacacattattctgtaccttactgtgttcactaatatgtcttggaaaatatttttttagcccttagatatttacttcctttatttaatgaatgcaggttttttttttttgcttttttttaactatagataactcataatgtgtttaattggttgacttcacttgaatacatgttcatttttttttaacagtagtaaaatgattattctctactcacttcttatgatcactaggtcaaaaatagagcaattacaatattgctagatattggccaggtacggtgcctcaggcctgcaatcccagctgggaggtcaaagcaggtgaatsacttgaggtcaggagttcgagaccaccctggccagcatggtgaaacctcgtctctactaaaaatacaaaaattagccaggtgtggtggcacgcacctgtagtcccagctactcgggacgctgaggcaggagaatcgcttgaacccgggaggttgcagtgagccgagatcgtgcc

SEQ ID NO: 771447 - DNA, 616 bp, Homo sapiens
agactgtctcaaaaaaaaaaaaaaaaaaaaaaagctagacattggcctggcgcggtggctcacacctgtaatcccagcactttgggaggccgaggcaggtggatcacctggggtcaggaatttgagaccaggctgaccaacatggtgaaaccccatatctactaaaaatacaaatactagccaggtgtggtggcaggcgcctgtaatcccagctactcgggggatcaagkcaggagaatcacttgaaactgggaggcagaggttgcagtgagccgagatcgtgccatcacgctccatcctgggggacaagaggaagacatcgtctaaaaaaaaaaaaaaaaaaaaaaaaattgctagatatcatcaactgttctctagaaaagttgcataatttatttaaacagtgaccaaaagattataacatttgcatttcccagactcttgatattactggacattatggaacttcttaaacatctctgctataagtgaaaaggttagatcccactttcgtttttatttgcagttattaaataatgagtaatttttgagccacacctccaaagtttggattaacaagactgaaaataatattacaccacaatttttgtctgta

SEQ ID NO: 771448 - DNA, 543 bp, Homo sapiens
tggctcatacatatatggtacagagatcggatcacacaagcccggagacagcgcagcttctccattgactctggtcgcagacgcaaaggcagggaagcatccagcgtgtagtgccttcggtacaaccttgtccaaaaggcagcagtgcaagtgacagtccaagcattcttacaaatcagggaaaaattcacaatgtcctcaggactgatataggaggccagcaatagccaaatatccatgggatactcttctcctccagccccgtccagttcttctttgtgcctcttgcttttcttttttctggagacagttctctcacagatgctttcctcctgggcatcgtctcatcaccgctgtcgatgatgtcacagggctcaccagccccagaawgagcttcctctgcaggaacctgagaggcttccaagccacaaagagattttacttcctgctgaacagcgttggctaaggctttcttgactcatccagacctcacgaccgctggatccgagttggcgtaatccacctcagtcacttgtccagagc

SEQ ID NO: 771449 - DNA, 555 bp, Homo sapiens
atggaaaagagtctgggctcctcaaaaaattaaaaatggaattactggccaggtgcggtggctcgcacctgtaatcctagcactttgggaggccgaggcaggtggattgcctgagctcagcagttcgagaccagcctcggcaacgtggtgaaatcctgtctctactaaaatmcaaaaaaaaaaaaaaaaaaatagctagacgtggcggcttgcacctgtagtcccagctactcaggaggctgaggcaggagaatcacttgaactcaggaagtggaggttgcagtgagccgagattgcgccactgcactccagcctgatgacagagtgagactctgtctcaaaaaaaaaaaaattaaaaatggaattaccacatgctctaccaatttcacttccatgtatatactcaaaatgaattaacaagcattgattgcagatttgttctttttagacagagtttcactcccgtcgcgcaaactaagtgcagtggcatgatcttggctcactccagtctcaactctctgaactcacgtgatcctcccacctcagcctcatgag

SEQ ID NO: 771450 - DNA, 590 bp, Homo sapiens
gaggccgaagtaggtggatcccttgagcccaggagtttgagaccagcctaggcaacaaagaaagaccctgtctctaccaaaaaatttaaaaatgagctggagcatcttttaagcctcagagatccaggctgcagtgaacagtgttcatgccactgcactccagcctgggtgacagaaggagaccctgtctcaagaaaaagaaagaaagaaagaaaaaaggtccaggcatggtggctcaygcctgtaatccgagcactctgagaggccaaggtgggcagatcacctgaggtcaggagtttgagaccagcctgaccaacgtggagaaaccccgtctctactgaaaatacaaaattagcctggtgtggtgacgcatgcctgtaatcccagctacttgggaggctgaggcaggagaatcacttgaacctgggaggcggaggttgcggtgagccgagatcgtgccattgcattctagcctgggcaacaagagcgaaattccgtctcaaaaaaaaagaaaagaaaagaaaggaaaagtacacatatccatgaaaactgaaattggcgatcataaatgtggaataaggccaatcagc

SEQ ID NO: 771451 - DNA, 597 bp, Homo sapiens
caggggtagaggaagcagcaggaaaacccctgggagctccctgggtcccctagcaacctgtttctgcctggtctcacaggggtcctccaggagagcggccagaggtgctgggccaaggccacagggagaaggaaatctccagctgaactctgtaacaatttgaactgatagagaagcctcctggccagaactcaggggagggtgtgaatccagtgtgcagactccacaggctggggtagaaggaaaggcatatttgctttcacagctaggaggcgggtagcctggggcaagtttttagctctgctctcccactgcctggaaacagactargtgctgttgtagggttgcacagtgggagtgagaccagccctttggattgcgtgggagctgggtgaggcctgtgactgccagctttccccaacctctctgacaacgtgcatgacacaaaagaggcagccataatcctcctaggtacacaactccattgacctgggaacctcagccccatcccctacagcagccacagcaagacccgcccaaggagagtctgagctcagacacgcctagccctgccccatctgatggtccttccctacc

SEQ ID NO: 771452 - DNA, 581 bp, Homo sapiens
cctgcctctcatcagtatacatacagagaaaaatcaaagagcatgtctcacttggaatcctgccatcagcactggcatggcacaacctctaaccctaaacacctgctcctatgagtaacactcttctggtcccaggggaatacatcttctcatggctcttccatcctccaaacaaaagccagctgtgtcaaaataccaagaagatttgtagagtgttccaccactgacmttggaggccagtgccttttaggagttcaggacagatttgagcagcagatctgcttaggtaacaaaaaagactgatttgttagtttgtcaaatccttctcagagagcatgaaagcaacaaattttccatagtgaagcatgtcccaatagcaccaagcattcttatttttttggtgtgttccaattaatggttctggagtaactgacgaattaatgctgtattcacaattgcatatggtggcagaggcacattttgtaacaccgaataaatcgttttactcttaaatgtgtattatccctcagatctgaatccacctatatttttttttgtgaggcgttactgaagctctgcaa

SEQ ID NO: 771453 - DNA, 611 bp, Homo sapiens
atacttgtccctgaacaccctttaactgtgacttgtaggataatttctgaacccatttaaattctggaaacctgagagttgcctgtctaagcagtagctgtgctccttctgtggcatcttcttgtaaaatattggrttctaaactggttgcagtggaaacccagggccactgagggaagagtggaagccagatagagtgtcccctccttctgtgctggctgggacaggcaatctcagcccaggggtcggggagaggaactcgggattcatacccgcaggattttgtttgagatttcatgcctatcaagttcatcctcaaagaacccaatgtcattctgatttattattattatttgaatgagagtcaaccaccgactaattgtgtctgggatatgtcagccccaagcctgccttagggcaaaaggttggacaagataattaggactgtgaggaggaattgagagacttcctgtggaagtatcagagtagaagaagccaacacaaaaatctggcatcagtaatggtctttcttttattctcctctcaggacggtttggaactttgggatccttgaaggaccccgtggcctagcagatgagcaccctgcctgc

SEQ ID NO: 771454 - DNA, 661 bp, Homo sapiens
tttaatataacattatttcatttaaatctcaaaacaatcctatgaagtagggtccttttccacagtttatggatcagaatgcagggagactaagttttgcccaaattcacatcatttgttcagtatgtcctcacctaatgtcaccaataggttcttagaaattgggacaggggccaggcacagtggctcatgcctgtaatcccagcactttaggaggccaaggcgggtgaatcacctgaggtcaggagtttgagaccagcctgcccaacatggtgaaaccccatctctactaaaaatacaaaaattagctgggcatggtggcgggtgctactcaggaggctgaggcaggagaatcacttgaccctggaggcggaggttgcagtgagccaagattgtgccactgcactccagcctgggcaacagagcaagactccatcttaaaaaaagaaaagaaaagaaaaagaaaaagaaattgtgacaggaagctaaacgctgtacagcaggtgccgaaataacawcatttagctcagtgtcatttcattataacattgatgaggaaaaaaatggttataggtctttttgcttaaagtcacaatttccaagaacttattgaccatgttaaatgagggctttctgtaattggaagacttgagattccaat

SEQ ID NO: 771455 - DNA, 642 bp, Homo sapiens
ctctgtttcctttactctttttattgctctattggaatctgtccagcctgtatccttctggtaccaaagtgcccctggttgaagcccatactgctggacttagtctctgggagttgaagggagaagaattgcagtgtccctcakcccactgtgctacagaccttttgaaacttcctctcagtcagctggtcagtgaatcacatttaaaacccaagctcactgtccacttcttttcaatgggtctctctctcagagtgtcatttttctatgttcaccctgtttttctcagtgaggactttggtgcctggaagccatgagtttgaattcctacatcctctattattttgcttatagaccttgccaagtttgtcgatccatctgagactcagtttccccatcttggcaaggagataattcccatttctgggtgttgagtgaggatttggggctgggtaagacagccaagagcattcaggtgctcttcattcggcctctctcaacccgcatgatccaatgacttatttttccccaggggcaatccccttacccctcaccaccaaaagtgattttgtgacaattttccactcattttttgtcacaggaggtctctctatattttttcctccatcttcgccaggatta

SEQ ID NO: 771456 - DNA, 584 bp, Homo sapiens
ctaattttctctatggctcttctatttcattgatttctactttgatctttattttcttctgcttatttgggtttaatccatttttcttccagttccctaaggtggaagctgaggtcattgatttgaggcccttcttttctgaatagacatttagtggtataaacttttcttaaagtcccgttttataggcaccacaattctaatatgttgcattgtcattcagtgcaaatcctttataatttctcttttgctaccttctttgattcgtgggtcatttagaagtaagtgagtttgtaaatacttgagattttttttttcttcttgttattgatttttaatgcattctatcacggtctaagaacatattggatataacttgaagccacttaaacttatttagatttgctttcataaaccaggttatggcctaatttggcaaataytctatgtgtacttgaaaagaatgtcttctgttgttgggtggagtattttataaaatgttaatcaggtcaagttagctgttagtgttgttgaagtctgctacgtactggctgattttcttcccacatgatctataaagtatt

SEQ ID NO: 771457 - DNA, 628 bp, Homo sapiens
ctgcacatgctctgcagcttttcattgctgtcccattgctggttcttctctccatcagaacttttcccctcttctttacctggttaatgacctatcacctttgcagggtcaactcacaaagtatttcttctaggatgctgacctgctttggttgcatccctacccaaatctcatcttgaattgtagctcccatacttcccacatgttgtgggagggacctggtgggagataattgaatcwtgggggcagtttcccccataatgctctcatggtagtgaataagtctcacaagatctgatggtttaggggaaactcgttttgcttggctctcattctctcttgtctgctgccatgttaagatgtgacttgctcctccttgccttccgccatgattgtgaggccttcccagccatgtggaactgtgagtccattaaacctctttttctttataaattacccagtctcaggtatgtctttattagcagcatgcaaacagactaatacagatgctttgcctctctttcctaaagattcttcccttcaaactacccccgctggcttagctagttcctttttgtgtttccctcagttgtacatttattacaatgattcaaaatgacctgtctct

SEQ ID NO: 771458 - DNA, 628 bp, Homo sapiens
ctgcacatgctctgcagcttttcattgctgtcccattgctggttcttctctccatcagaacttttcccctcttctttacctggttaatgacctatcacctttgcagggtcaactcacaaagtatttcttctaggatgctgacctgctttggttgcatccctacccaaatctcatcttgaattgtagctcccatacttcccacatgttgtgggagggacctggtgggagataattgaatcatgggggcagtttcccccataatgctctcatggtagtgaataagtctcacaagatctgatggtttaggggaaactcgttttgcttggctctcattctctcttgtctgctgccatgttaagawgtgacttgctcctccttgccttccgccatgattgtgaggccttcccagccatgtggaactgtgagtccattaaacctctttttctttataaattacccagtctcaggtatgtctttattagcagcatgcaaacagactaatacagatgctttgcctctctttcctaaagattcttcccttcaaactacccccgctggcttagctagttcctttttgtgtttccctcagttgtacatttattacaatgattcaaaatgacctgtctct

SEQ ID NO: 771459 - DNA, 619 bp, Homo sapiens
aaagagtttctctaaatcctgtctattcttcttcagttaagtctttttataggaaaatcccagaaaaaatctggagtcttcggggatagaaatcacagatcttttactgttccagcaacagaatatatccggataatgaatatctagtcatttagagagagagtgagtgatagcaggagagacaaagggaaagaggaagacagaagaacaaaggaagaagaaaagcaggtaaaaaattacagaatacagcttgaatgttcaacacttgtwttgtttgattttctttcttgagttcaggaagccagaaaggcttactaaaagattattaaaccttttggttttccaaatatgacacttttgtgacatcagggatggggaattggaagagattattaaaccattcaaactgaatagtaaaaaaaaaaaaaaaaaagttctttgaaataaaaaaaaaatgataatgctctctcaacatgcccattctttccatggttactttccactaattgtgaatttaacaacaacagcaacaaataactaacctattattaaaagtttctttcctattcatgcttccaattttcatatgctcctcatcaggttttccaaaattttttat

SEQ ID NO: 771460 - DNA, 539 bp, Homo sapiens
taggcttcttttctatggagtactgtcttaatgtcaacaaccattttaggttaatctgttcacttgttattccttacctgaaattattttctcaatattcttctgcctcaaaacaaattctcaatgttcactgtctcttgtgagggaaatctcatactggmaaagatgactctgcttttttggtgctgataatattcactgttattcaacaaaagattttactttatcccatgaataataatgctgagcctttgatttactgagtcggatgagtgattgaggttgagaggcctgggttatacctccacagtctactttgtgagtatctgggtactcagagatctagttatggaagagtccaggaaagaacttaatggtctgccttgttctccacacaggctccaacagcaggagaagaccattttgtatggctcgatccttccaggttgggagccaaacaacctgctgaacatgccatgtggcataactatgaactaaagaaacatcctccacccaatctcccaggccaggaataagga

SEQ ID NO: 771461 - DNA, 632 bp, Homo sapiens
tgttacagagcctgaattccaagcatggctgagagttcctgagctccttttctccaccaggccacacttcataggcagggcagaggctctaccttaattgcagcaggctgagaacataagagtcccactctccttcaccccaatttgctcatgggtcagaggtccacaccaaaaaggcaaactaagaagaccagaggctcacacccccaaccaggcccagcagcccatccctaaagcagagggtcactcagaagcacaccattgcccctgccgtcagctctggagtcattgttcagagattttgccaaagaggagagacaggctataaaacagagctctgaagctttccccaaatagactgactttttaaaaactagccggtggggaagttgaagcctaaggatactctcaaaaacaacggaggtcttggtggtaagcaattaagaggaggctggtagcttcrtgagaaagaaaagctacaccagaaccagctagtttcccagagaaaatctggaaaagagacagttaataacagcactcctgggggaagaacaaactccaaagactggcctcaaaaaccatccctgaaaagagatccacatttaattggatccaactgtggagcaatttat

SEQ ID NO: 771462 - DNA, 522 bp, Homo sapiens
ctgtattgttgggtttttatatcgagttgttggatattgttatatataacaataatgaccccaaaacaaggaagaggtaatagagctatataagctctataggagtatcatttttttttttgagatggaatctggctctattgcccaggctggagagaagtggcatgatcccggcttgctgcgamcttcacctcccaggttcaagcaattctcctgcctcagcctcccaagtaactgggattacagtgcacaccactgcgcccagctaatttttgtattttttgtagagatagggtttcaccaagttggccaggttggtctcaaacatctgacctcaggtgatccgcccaccttggcctccctaagtgctgagattacaggcgtgattcacagcgcttggctaggagtaatatttttatatgtaactggaattaagttagcataaatctgaagttgagtctgataagatatatatggtaatgtctaaagaaaccaatttaaaaactcaaaaaatagtgaaaa

SEQ ID NO: 771463 - DNA, 427 bp, Homo sapiens
gagctttaacctctttgagcctcaattttcccacctgtaaaatccagttgacataccagcgcgaggctataacagggactaactgagatgaactaggcaaactgcttagcatagcatggcagtcagctcaggatgccgtcaccaaatcccacagacttggtgcttaaataccagaaatttgctttctcacagttctggaagccacaagtccaagattaaggtttggtttcttctgacgcctctctccttggcttgcagatggctrccttctcactggatcttcacatggtcacccctcggtctctgtgtgtcagggttctaatctcttcttacaaggacaccgatcatatcggattggagcccacacatatgacctaatttgaccttaactacctctttaatggccctgtctccaaatacattccaa

SEQ ID NO: 771464 - DNA, 537 bp, Homo sapiens
acagttttgagaaggtgaaattcaagcaggaagaccttatctgttctgccaggaggctgaatcatgcagattgcattttcaggttaagcagctagaaggaggaacgggcctggcaaactcaacataacacattcaactccaccccagtttcaccctaatggcatcttttcttggtagtatttgaaaaagagtgactaaagaaatattttcctttctgttttatttattcttatctatttgatttttattctttgatatcataagatagccccgtctaaattttctccaaactatcatttatcgagtggcaccaatgtttgggaaaattcattgccagcaatcaagcatgatgtgctctttttagaaatgttcattgattttcctctaaatcattgcmagggtggatacgtacattttacaacatgaataaccagaaatgagagtcaaactcctggaaaattcattgacttggttcaggttaaacagtggatcctccacttgaacattcattatgaaaacacagtgatgatattactc

SEQ ID NO: 771465 - DNA, 585 bp, Homo sapiens
agagattacctttagccctggtcagaaagaaggcaaattagtccttcctccctctcacctctctgtcatactccattcatgacttctgaggcagacagtggttccaaagatggccacaaaaacatcccatcccacatgctcatccttcagtgtgagcttgacattcttcccattgagaggtggggtctccacttctcaatgcagagtggaggagagactgtcactgctttgacaaatagattacagtggaagtgacgtccaaggctgggtcataaaagtgatgcggccaagcctygctctctggaatactctctctttgaagctttcagccaccatgaaagcagcccactgccctgaggccaccctgctgggagcaggcccaaagtgacccatgtgaagacaccacatggagctgtctgagattacacaaagagagagaggtgctggatcagccccagctattccagcctcccaagccccataggagagacccccatgccagaaccacccaactcatcccttccccagtttcctgacctatggaaatcggaagagaaaatacaatgattgttgctatttcaagtc

SEQ ID NO: 771466 - DNA, 585 bp, Homo sapiens
agagattacctttagccctggtcagaaagaaggcaaattagtccttcctccctctcacctctctgtcatactccattcatgacttctgaggcagacagtggttccaaagatggccacaaaaacatcccatcccacatgctcatccttcagtgtgagcttgacattcttcccattgagaggtggggtctccacttctcaatgcagagtggaggagagactgtcactgctttgacaaatagattacagtggaagtgacgtccaaggctgggtcataaaagtgatgcggccaagccttgctctctggaatactctctctttgaagctttcagccaccatgaaagcagcccactgccctgaggccaccctgctgggagcaggcccaaagtgacccatgtgaagacaccacrtggagctgtctgagattacacaaagagagagaggtgctggatcagccccagctattccagcctcccaagccccataggagagacccccatgccagaaccacccaactcatcccttccccagtttcctgacctatggaaatcggaagagaaaatacaatgattgttgctatttcaagtc

SEQ ID NO: 771467 - DNA, 553 bp, Homo sapiens
gaaggaactctgcccttgctctcactctcccgccctccaccgctcctccgcggcctgcgtggctccaccctggtggctggattgactgtgtgccctactctctgctcacggtgccctcacccccacccttcccaggcaccaacagccacgggatcctcagcggcttcaacaagacggttctgcggacgctcccgcggagcggaaacctcattgtggtggagagcgtgctcatggcagtggccttcctggccatgctgctggtgcggcccgggatgggggcaggacagtcagtgaagcagagtgtggttctggggaccgagtctgcgagaaagggtctggatcggatggcrtggcctgggtcgggttgtggcctcggggcaggccgtaggcctgggagcgcgatctgagttggggagctagggccgagtgctgcagagcgggcatgaggctcggaggcggggctgaggcctgtggtccgaggcaggcgtgggcatccagaggccaggggaaggagggaacaggcttggtccacagtttcgagctggagacaaga

SEQ ID NO: 771468 - DNA, 530 bp, Homo sapiens
ctgctatcaccctgagaacaagcccaggccagcctgctgcttccagcagaagataagagacaccaagagcaaagtagagcttcccagacatgctcatgctagattaaccaacctcagctgacccatagatccatgaaaataaatgactgttgtattaagccactgagatttggagtgacttgttatgcagcattttgtgacaataagtaactgatacaagggtcaccatcctttatctctgtagattttaaccaatttttaatagctagatggagatcttctagttgcctttatttataatgaataagactgtagagctagtttggcctgacactaccagttacctacccagaaattcagaaatactttcttytccaacccaccccaaccaaccattaccatttttttttttttgaaacggagtcttactctttgcctaggctagagtacaagtggcacagtcagagctcactgtaccctcaaaatcctgggctcccctgatcttccccttcaaactcctacgtagctaa

SEQ ID NO: 771469 - DNA, 632 bp, Homo sapiens
tctaaggtgtgagtacatgcattagttttgatcttccagatatttacacctgggtgggactttgcatactgaatgtcaatgactcaggagcaagttagaaaactcttacagtggcaaggactgtgagacatatccaggaggagctggaggagtggactcggcaatccatctgtgacagaagtggtatccaaagttgggtgccttttggtatgatttttgatcctcacgctgcctcacttctgttaacttctgtatattttctaagactattcatgaatcatctaatgtccttcaaaaaatcattctgctaaaaaccttcaagtctattcctgtttgcaactatgaaccataactgacatatttggtcttcagagtgcartgagaaagataaaagataaagaaactcttaatactctttgatatgattttatgtgaaatattgtagttttattttaaacagttttgttcaactataacccgtctaacttcttacatttagtgagtttctcccctatttagagactgtgtattagttttcaatagttgctgtaacaaattgccacaaatttagtgacttaacacaaatttattactttaatttttgaaggaaagaaatctgaaatgcatctccc

SEQ ID NO: 771470 - DNA, 613 bp, Homo sapiens
tttgtacctgttggattcactggcatgcatgcaatccctctccatgtagaacataatattctttgttttcagctgagatggtgaaatccacatcctatcagaggtggatgaccagacatactgtattttgactataactatattcatctttgcaatgggatactaccaacatcagcatgatttagcagacaattatgcagaatattgcacatgtcaattgtggaatataggccttactctgcaccacaaaatatgagagcaactgcatgtcttacacatggttcctgacaaaaaataaaatgtaattctcccaataaggggggatytgatagcaggtacttgcttaaacagaattatatttcaagagccaatgaagacattttttgaaacttcaaactacgagaaagagagtttctctattcatgttaaagtcctaaataaagcaagagcctcttaagcggtgtaggtagtggtaatcaagaaataacagaaaatgcatttcatgtattgacctgagatcagatcatatccttcaagcaaaaaatcctatgaataaaaactaatttttgtggaggatagttttatttgtacgttcaaaaaatgatttccttaa

SEQ ID NO: 771471 - DNA, 613 bp, Homo sapiens
tttgtacctgttggattcactggcatgcatgcaatccctctccatgtagaacataatattctttgttttcagctgagatggtgaaatccacatcctatcagaggtggatgaccagacatactgtattttgactataactatattcatctttgcaatgggatactaccaacatcagcatgatttagcagacaattatgcagaatattgcacatgtcaattgtggaatataggccttactctgcaccacaaaatatgagagcaactgcatgtcttacacatggttcctgacaaaaaataaaatgtaattctcccaataaggggggatctgatagcaggtacttgcttaaacagaattatatttcaagagccaatgaagacattttttgaaacttcaaactacgagaaagagagtttctctattcatgttaaagtcctaaataaagcaagagcctyttaagcggtgtaggtagtggtaatcaagaaataacagaaaatgcatttcatgtattgacctgagatcagatcatatccttcaagcaaaaaatcctatgaataaaaactaatttttgtggaggatagttttatttgtacgttcaaaaaatgatttccttaa

SEQ ID NO: 771472 - DNA, 550 bp, Homo sapiens
tttatgatcatttatgtgcacgtgaaaattactgacatagagctatgaaaagatacaaaaatgttgaaagaaactatgatgatcctgaatatagaagacagagcttaaaagtttattattaatgtagtaaaaataattaaatttaggtttaatattaatttaaatagcagccataccactgaaacagggtcttgggaggattatactragtcacattttacctttcaaccaggatctgaattcctaggggatggtttatgtgggcaatagagtgggatcacatgggaagctcagggaaaggagctacatagcaactagtgtagaattattttaatattttaccaatcagtactattgtactagtgtatacttacagaatatccagagttatactatcacattttagcactgctatgacatttataacacatatttttttcttccacatattaccaataggatgtgtctgataccaatgttacttaaagctgtatttaggcaatgaccctcattaattagttatctttgtgcacatgcaagcttaggcagc

SEQ ID NO: 771473 - DNA, 557 bp, Homo sapiens
aacactatatgtttattaattaacttgtctgtgtagaaaattaggcatatattccgggtgcggtggctcacacttgtaatcccagcattttgggtgactgaggtgggtagatcacttgaggtcaggaattcaagaccagcctggccaacgtggcgaaatctcatctctactaaaaatacaaaaaaattaggtgggcatggtggtgcatgcctgtagacccagcttctcgggagacagaggcaggagaatcgcttgaagccaggaggcagaggttgcagtgagctgagattgcaccactgcacgccagcctgggcatcaaagggtagagtccgtctcaaaaaacaaaacaaaacamaacaaaacaaagagacaaaaccaaactagtgttctaaatttatcatttgccatggttgttttagattacataaaattcaattgggagattttttttattagactgtggagtttgaatttgattttggaagcaaccagtgactattgctaatctaagcaagcaggtgatcttgtctcagttgagtttatagtaaaatacatag

SEQ ID NO: 771474 - DNA, 703 bp, Homo sapiens
ttggaccccaaataaccagcaacaatacccagtaaagttgtcatggcccctgggatctgagacgtgccggttgtgggacctagcatattcccatctgtggtggctatcatgaaagactccttctgtttgagaaaagcagaggaaaaataaagggaattctgtcctgcacattaggtaccagctcagccatagcaggctagagcaccaaccagactcttggagtccccaaatctagcctaggctcttagcatgtctggacctgctgtgctccagaggagagcccactgccctgaaggatgagtttcaggcctggcaacattcaccacaaactgactaaagaacccttgggctttaagggaacattgatggtctcctggcagaacccctcaagggtcaatagtgttggtggtcccaaggcraggctcctctgcctatggaaaggaaaggggaagcatgagaaagcctttgtcttgtagtttgaatgcctgcttagacacagtagaatagaacttcagataaatttctaaggcttttgactccaagccctggctcccagacagtattgctggacccatctggggatgggggaactgacccccatgaagggaaggaaataaacctggcttggttactacctgctgatcaaagagtcctagtgttataagtacacattagtggtagccaggtagtggttatagtgggc

SEQ ID NO: 771475 - DNA, 575 bp, Homo sapiens
atgagtttatcaaagtttcaggatacaaaattaatgtacacaaatcagtacttctgctgtatacaaacaatgacccagctgagaatcaaatcaagaactaaacccctttgccaaagctgtgaaagaaataaaatactgggaatacacctaaccaaggaggggaaagacctctaccaggaaaactacaaaacactgctaaaagaaatcataggtgacacatggaaacacatcccatgctcatggatgggtagaatcaatattgtgaaaataaaatgaccatactgccaaaagcaatctataaattcagtgcaacacccatcaaaatatcatcatcattcttgacagagctagaaaaaacaatcataaaattcatatggaaccaacaaagagcccacagagccaaagcaagactaagcaaaaagaacaaatctasaggcatcacattactcaacttcaaaccttactacaaggccatagttaccaaaacagcattctactggtataaaaacacacatgtagaccaatggaacagaatagagaacccagaaataaagccaaatatagccaacctataa

SEQ ID NO: 771476 - DNA, 521 bp, Homo sapiens
gcaaaaatatgggtccaggctaaattcccatcgaccaatgagtgaatacataaatatacaacagaatactacctgccttaaaagggaatgaaataattgcattcagagcaacctggatgtagttggagatgattattctaagtgaagtaattcaggattggaaaaccaaacatcgkatgttctcacttataagtgggagctaagctatgaagacacgaaggtataagaatgatataatggactctggggattctgggagaaggatgggaggggagtgaaggataaaagacaacacattgggtacagagtatgctgcttgggtgatgggcgcactaaaatctcagaaatcaccactaaaccaccactaaggcaatctgcagattcaacgcaatccttatcaaaataccaatgacgttcttcacagaaatagaaaaaaactattctaaaatgtatatggaatcaccaaaaacccagaaaaaccaaagctatcctgagcaaaagaatgaaaatggaggaattgc

SEQ ID NO: 771477 - DNA, 521 bp, Homo sapiens
gcaaaaatatgggtccaggctaaattcccatcgaccaatgagtgaatacataaatatacaacagaatactacctgccttaaaagggaatgaaataattgcattcagagcaacctggatgtagttggagatgattattctaagtgaagtaattcaggattggaaaaccaaacatcgtatgttctcacttataagtgggagctaagctatgaagacacgaaggtataagaatgatataatggactctggggattctgggagaagratgggaggggagtgaaggataaaagacaacacattgggtacagagtatgctgcttgggtgatgggcgcactaaaatctcagaaatcaccactaaaccaccactaaggcaatctgcagattcaacgcaatccttatcaaaataccaatgacgttcttcacagaaatagaaaaaaactattctaaaatgtatatggaatcaccaaaaacccagaaaaaccaaagctatcctgagcaaaagaatgaaaatggaggaattgc

SEQ ID NO: 771478 - DNA, 539 bp, Homo sapiens
aaatagaaaaaaactattctaaaatgtatatggaatcaccaaaaacccagaaaaaccaaagctatcctgagcaaaagaatgaaaatggaggaattgctttacctgactaaattatactacaaagctattggatactawtcagcaataattaagaatgagatcctgtcatttgcaaaaacatggatggacctggaggttattatgttaagcgaaataaatcagacacacaaagacaaactttgcatgttctcacttacttgtgggatgtaaaaaatcaaaacaattaaacccattttgatcaagagtaggttggttaccagagagactgcaaagggtagtggagggtgggaggaaagtggtgatagttaatgggtgcaaaattaaaatagttagaattaatgaataagacctaatatttgatggcacgatggggtgattatagtcaataataatttaattgtacatttaaaaattactaaaataatataattgtattgtttgtaacacaaagtataaatgcttgaggggctgaatacccc

SEQ ID NO: 771479 - DNA, 619 bp, Homo sapiens
taaaccaggaaaatatagaaactctgaacagatgaataacaagcagcaagattgaaatggtaatttaaaagttgccacccaaaaaaaagtccaggaccagatgaattcacagctgaagtctatcagacattcaaaaaagaattggtatcaatcctattgaaactattccaacagatatagaaaaatcctccctaagtcattctatgaagccagtatcaccctaatacccaagccagaaaaggacacaacaaaaaaagaaacctatagaccaatgaacacagatgcaaaaaccctcaacaaaatactagctaactgaatccaacagcatatcaaaaaaaaaatccaccataatcaagtaggttttatatcagggatgtagggatgatttaacatgtggcaagtcaataaatgtgatacagcacataaacagaatcaaaaacaaaaatcacatgatcatctgaatagaagyagttaacaaaatccagcacctctttatgattaaaaccctcagcaaaatcagcatagaagggacatatcttaaggcagtaaaagccatctatgacaaacccacaaccaacattacactgaataaggaaaagttgaaagcattccccctgag

SEQ ID NO: 771480 - DNA, 655 bp, Homo sapiens
taggaccctagacgaagctttcacatctcctctcttcctctgtttacccttcccccacccctaattgaatcctctgaattgtcatttttttaaggcagttttcccaaatttctggaggtttttattgttgttgttggttttactaccaacttattttggtggtgtattttgttgtttttgctgctgctgttactatttttgaggatgaaagagattttagtatgttgccagccaagctgaaggaacaaatggagagaaacaaatgggccagaagagatgtaggtagggctatcatggacacaggtagggggctaaaattggaaaggtagaaagacaatcataccacaagtcatcccacagtgatggtaactggtaaacaaaagcacagagacattctgaggtagaggaatgcatttgtaagcgtacaactgtttgctcttttcaggaacgtggaagtatgctcggtcatacaaygagaggaagtgaatttaaacaggggacttgagtccatttcctgaggaaggcaataagatgtccactaccaataaggaacagtcctggccagcagtctagtggacccagctgcatttaaaaactataaattttgctgggaaactcatgagcacagttacaagatttatctagcaattccagt

SEQ ID NO: 771481 - DNA, 640 bp, Homo sapiens
aattttaaagctaaagagaaagaagggaaagtatgctggagcagacaaagatgcagaagaaaagacgagatagatggttgactctggttcactataagtcagggaagttgctgttaagaggttgctattaggagggtaatgaagaggtttatggaagtgactttacaggttaatgcccttgatgtacttgctttattattttgtttactctcatttcttcaaggtaaaattatgaggattaaaatacatctcaggaagatctataatacctatatcgaaaactgagggaggaatattaagtgaaaaagcttaagacttggagcttaggacatcagggctgtttactctcctgacactgaatgtgatcttaattatgttatttaacccttctagactagatattcctcttctgaaaggaatgtgacaatagttctcttacactgatgttgaagcactaatacaatgatgtattttagtaccaaycgcagaacctgacacattacaagtgatgaataaatacctgctttttcttttgttctatccttcctgttagatcacttcccattagttctgcctgccgttggtttcatttttcaaatatatgttttatgcagggtggtttgttttgttttgcttccag

SEQ ID NO: 771482 - DNA, 624 bp, Homo sapiens
tatgaaattgctatgaataatatattcaggaaataaaagaacataagaaaaaataagcgaaaatatgtttattttcaccagaaatatggaggttttattttatcacagtcaataggaaatctagaactgaaatataaaagctgaaagtaagaattcaatagatgaatttaacagcagattagacaaagtagaagatgggattagtgaactagaagaaaggttaatagataatattcaggctgaagcaaagagaaaaaaagtgtgaaaaaaagagcacaatagaaacattacactgtaaaaatataacagttttatgaagaaagaggagagaagagaaaaggagcagaaatastaaagatatgctgagaaatgtcaaagactaataaagacatcgagttagaattttgaaagttctgtggacaccaaacaaggtgactaactgaaacggatgcttcatcaatgaacataatcataaaactgaccaccaaaattacacgtgtgtgtgtgtgacagtgtgtgggtgtctgtatgagaaaaagacgtatcacatcaaagaacctaatttgagactgaggatttaccttgcaatagaagatttgaaagccaggaaacaaacaagtgcac

SEQ ID NO: 771483 - DNA, 545 bp, Homo sapiens
cagtctatcaatcttttttatcatttcaaaaaactaacttttggttttattgatcttttgtatggatttgaggatctcaattttcttcagttccactctcattttagttatttattttctgctagcttttgggtggtgttcttgttttactagtttctctaggcatgaagttagataattaagttgcgatatttttgtcttcttaacataggcatttagcgctataaaatttccttttgacactgcttttggtgcatcccaaagattttggtaagttgtgtctctgttttcacttatttcaaagaactttttttwaatttctgtcttaattttgttgtttacccaaaagtcattcaggagcaagttatgtgatttccaatgtaattgtgtgaattgagagatatttttggtaatgatttctatttttattctactgtcgttcaaaaatatggttggtataattttgctttttaatttatttagacttgctttatggctgaacatgtgattgatcttgcagtatgttccatgagcagatgacaaga

SEQ ID NO: 771484 - DNA, 655 bp, Homo sapiens
tccaaatacatcttttttactttctagtcctggatctaatcctggatctcccattgcattagtagtcatgtctctttagtttccttcaatctgaaacagttcctctattttttcctgtttttcatgacattgagagttttaaacagtataatctgtttctgatgaatgggcttcacctatttctatctgatatttcctcacatgcagagttaggtcatacatacatcacagaaacaatgctgtgctcttctgatgacttcacagcaggagccacacaatcaagtttgtgctagatttctccaccagaaagtcaacattttttatttgtaatcaataaatattttatatgaagataaattatktctatatttaaatatatttatatgtaaaatatgtgcaaaatattatttcaatgtgtaaccaatttaaaagttattaatgagctattttgaattttatttcatactaagtcttcaaaatctggtgtggattttacgctgacagcacatctccgttgggtctagccccatttcaaatgctcaggagtcacttgttgctagtggctaccatatttgacagggcagctctaaagcataaacaacgcttccttggaaaaattagctttcagagtgttttcaaatgaattttagaaaac

SEQ ID NO: 771485 - DNA, 655 bp, Homo sapiens
tccaaatacatcttttttactttctagtcctggatctaatcctggatctcccattgcattagtagtcatgtctctttagtttccttcaatctgaaacagttcctctattttttcctgtttttcatgacattgagagttttaaacagtataatctgtttctgatgaatgggcttcacctatttctatctgatatttcctcacatgcagagttaggtcatacatacatcacagaaacaatgctgtgctcttctgatgacttcacagcaggagccacacaatcaagtttgtgctagatttctccaccagaaagtcaacattttttatttgtaatcaataaatattttatatgaagataaattatttctatatttaaatatatttatatgtaaaatatgtgcaaaatattatttcaatgtgtaaccaatttaaaagttaytaatgagctattttgaattttatttcatactaagtcttcaaaatctggtgtggattttacgctgacagcacatctccgttgggtctagccccatttcaaatgctcaggagtcacttgttgctagtggctaccatatttgacagggcagctctaaagcataaacaacgcttccttggaaaaattagctttcagagtgttttcaaatgaattttagaaaac

SEQ ID NO: 771486 - DNA, 530 bp, Homo sapiens
attgtccttttatatttatcttgatggttgtttcccacttggaattattgtgaactgaatctctctctttcactttctctccctctttgctccctttctctgcctgtctcttgtggcagcttgaatccttttgaaaataattgatgaagaaatcaactgctcaatactcttaggcttgtagagtccccagtttcmcctcatacacaccaatgaagcccaggtttggtggagggtagggctcccaggggtgagtgggaggctcctaactgaaacaatggaaaatgtcaaaccaaggaagagatcggagccccaactcctagcttacatatggagctagtgacctgaaacctgggaggtgagaaccaaggggcgacatctagagcaggactgtttaatagaaatacagtgtgggccacacatgtactttaaaattttatggtaaccatattaaaaaggttaaaataaacagatacaatgaattttaattatatattttaaatttacccatatctaaaataatatttccacat

SEQ ID NO: 771487 - DNA, 599 bp, Homo sapiens
caaatgccgtaagagagaaaatgatacattcaattacttaaaaaaatttaaaagcagcaaaagtacataaactaaaagtggcagacagcaatctgggtgaaaaattgcaactcatgtcacagacgatggactaatttccctaayacatgagaaagtacctataattcaacagtattagcagctcattagaaaaatcaacacaatatcaacagttcacagaaaacaccaatacagaataaaagggctcaattttattcaaaataaaaaaatatatttcattttagaaaatataagttttaaaatatactgtaattgaggaagtagcaggaaaacaggcattattatactttgctgatggaagcagaaattggcaataatgctatgaagaacagtttaacaataagtacccaaattgcaaatttacaaacctttgacctagcaattctatttctaggaatttatcttacaggtgtactcctacatgctgaaatgacgggtgactaaggaaattcatttctaaattcatatagcaaagataagagagtttaaatgcccatcagtgcaaaactgatgaattataggatagccatacatacaat

SEQ ID NO: 771488 - DNA, 590 bp, Homo sapiens
cccaatgctctgcatgggaccaagacctacaagtaatactcactgtggttttccacttattctcttctccatgatgtaaagatatttttcaaaatgtccagaaaaaaaaaaaaaggccggcagacacccctatgagtaacagtgataagaaaaagaggaagcttatgtttatctatagcacagcaaattcaagctgttggagaaactggacagcagcataagtgagaaacatcttacagaagagtatggtattagtggccgggtgccgtggcttacacctgtaatcccagmactttgggaggccgagaagggcagatgacctgaggtcaggagttcaagatcagcctggccaagatggtgaaaccccttctctactaaaaaaatacaaaaaattatctgggcatgatggcgggcacctgtaatcccagctacttgggaggctgaggcaggagaatcacttgaacctgggaggggcagaggttgcagtgaaccaagatcccaccattgcacgccagcctgggcaatgagagcgaaactctgtcacaagaaaaataaataaataagaaaaaaaagaaaagaaaaagaagagt

SEQ ID NO: 771489 - DNA, 590 bp, Homo sapiens
cccaatgctctgcatgggaccaagacctacaagtaatactcactgtggttttccacttattctcttctccatgatgtaaagatatttttcaaaatgtccagaaaaaaaaaaaaaggccggcagacacccctatgagtaacagtgataagaaaaagaggaagcttatgtttatctatagcacagcaaattcaagctgttggagaaactggacagcagcataagtgagaaacatcttacagaagagtatggtattagtggccgggtgccgtggcttacacctgtaatcccagcactttgggaggccgagaagggcagatgacctgaggtcaggagttcaagatcagcctggccaagatggtgaaaccccttctctactaaaaaaatacaaaaaattakctgggcatgatggcgggcacctgtaatcccagctacttgggaggctgaggcaggagaatcacttgaacctgggaggggcagaggttgcagtgaaccaagatcccaccattgcacgccagcctgggcaatgagagcgaaactctgtcacaagaaaaataaataaataagaaaaaaaagaaaagaaaaagaagagt

SEQ ID NO: 771490 - DNA, 481 bp, Homo sapiens
ttaaaactcaacaataagaaaatgaacaacccaatttaaaaatgggcaaaagacctaaacagcaccttactaaagaagatttacagatgacaaataaacatatgaaaagatgttcaacatcatatgtcattggggaattgcaaattaaaacaacaatgagatactaccatatatatattagaaaaatcaaaatcctaaatattgacaacaccaaattctggcaaagagcaacaggaactctcrttcactgctggtgggaatgcaacacggcacagccactttagaagacagttgggcagtttctcacaaaactacacatgctcttaccataacaaaactacacatactcttaccataagatccattaattttgctctttagtatttacccaaatgagccagagatgtatataaacacaaaaacctgcacacagatgtttatagaagctttattcataattgccaaaactgaaaatactcat

SEQ ID NO: 771491 - DNA, 481 bp, Homo sapiens
ttaaaactcaacaataagaaaatgaacaacccaatttaaaaatgggcaaaagacctaaacagcaccttactaaagaagatttacagatgacaaataaacatatgaaaagatgttcaacatcatatgtcattggggaattgcaaattaaaacaacaatgagatactaccatatatatattagaaaaatcaaaatcctaaatattgacaacaccaaattctggcaaagagcaacaggaactctcgttcactgctggtgggaatgcaacacggcacagccrctttagaagacagttgggcagtttctcacaaaactacacatgctcttaccataacaaaactacacatactcttaccataagatccattaattttgctctttagtatttacccaaatgagccagagatgtatataaacacaaaaacctgcacacagatgtttatagaagctttattcataattgccaaaactgaaaatactcat

SEQ ID NO: 771492 - DNA, 633 bp, Homo sapiens
gcctaattcaaatattgctgtgtctcaggaaatagggaggcccaaggagagggagagagatgggaaaatggctggtcaatgaagcagttagaacacactcaatatttacttattaagtttgttctcttatatgggtggttcttggtgccccaaaacaattataatagtaacatcaaagattacygattgcagatcaccataatagatatataattaaaaagtttaaaatattgagagaattaccaaaatgtgacaaagacacaaattgagcacatgccactgttaacaatggcactgacagacttgctcaatgtggggttgccacatacctttaatttgtcaaaaatgcagtatctgcaaatcataatgaagtgaagtgcaataaaacaagatatgtgaagtgcaataaaacaagatatgcttatatataattgatatggtttggctttgtgtctccactcaaatctcatcttgaactgtaatccccgggtgttgagggagggacctggtgggaggtggctggatcacgggggtggtttcctccatgctgttctcatgatagtgagtgagttctcatgagatctgatggttttataaggggctcttcccccttggcttccttcacttgctctc

SEQ ID NO: 771493 - DNA, 635 bp, Homo sapiens
agagaaactacttcatgcagttgttgtgataattaaatgaggtaatacatggagaacacctggcatctggtacatcttctgcaaatatgcactatcattattataaaatattgtataaaggtgtataaatggaaattatcttaatggattgtcctargaacaatattcaggtaataattttgaatatatatggtcaaactgtgtttaccaggttgaatttgcttaataaagagtaaagaaaaactggcagctgatttttccaaagactaaagatgaaatgagataatattacttggtacttatatagaaatgcatagacttagacccctttttgagaaaacaggatttgaaaaagatatagagaacttagaagtgattttctcctaagggtccatattagaaaatgtactctagacaatataaatcactatcataaagaattcatgagaatgataacatggcaccagaactgtgacaaaacaccaacaaaacaaaacaacaacaacaacaacaaaaaaaacctacttatccccaaatttttctgatttatgatagttattatgagtttcattttttaaaaattccccttctgctatggcatgaatatttgtgtctccccaaaattcatattttga

SEQ ID NO: 771494 - DNA, 601 bp, Homo sapiens
atgtgcttgaaacacacctttaagaccactctggtcactttctattaaagagaggaatttaggttgggaagaggaatgaagaaagggtaaagtttgtgagaaatcactgaaagttacaggacagggaaattactgatgataaattaaaggattgtcaggaatcagggaaagagctgaagatggagactgacaatctgtcatatatcactttgtgtcattttctccagtgtttccagctaagaatttatagacaagatgcacggataagattttgacaggcacctgggtcagaggcatcagacacaggaagtttggatgctgataaaccatgcagtctaggctgtgaagggaggtattagcaggagggctgtcagggaaaatgaaatagtagggcaaatgtagcacatgtgagggtayaaaattatgatgctacaatcagaaagaatactaaagttttctgcaatagtctgtgtttttatgggtgataacaaaactcttagactaatgtctaggttgagaattctgatgttccaccttctaccttacactgaccagtatcaggcaactaaaagttttaaaaagtcagatttaaccttctaat

SEQ ID NO: 771495 - DNA, 540 bp, Homo sapiens
tctattttctgtgtatagtccaatctctctctactttcctcttataaagacacttgtgattgcatttagggcccacctagatattctagaataattttctcatttcaagatcttcaattatacttataaagccactttgcaaataagataacatgcacaaattccaaggagtaggacctgaacatctttgggtgctattattcagcccaccacatggtctacccttgtaaaagttccatgagygctgttgttgatgagtggagtgttttaaacatgttaattggatccagttggttaatagcgtcgttcaagcctactgggtccttacagacttttttcctggttgttctttgaactgttgatagagagatgttaaaatcttcagctatgattgtgagtttgtctgttttgtctgttcttttaatttttgttttatgtaccttgaagctctagttttagaagtgtacacatttagaattgctatatcctcttgatgacatagtctttgttctgaaatatacttgattttatattaacata

SEQ ID NO: 771496 - DNA, 540 bp, Homo sapiens
tctattttctgtgtatagtccaatctctctctactttcctcttataaagacacttgtgattgcatttagggcccacctagatattctagaataattttctcatttcaagatcttcaattatacttataaagccactttgcaaataagataacatgcacaaattccaaggagtaggacctgaacatctttgggtgctattattcagcccaccacatggtctacccttgtaaaagttccatgagtgctgttgttgatgagtggagtgttttaaacatgttaattggatccagttggttaatagcgtygttcaagcctactgggtccttacagacttttttcctggttgttctttgaactgttgatagagagatgttaaaatcttcagctatgattgtgagtttgtctgttttgtctgttcttttaatttttgttttatgtaccttgaagctctagttttagaagtgtacacatttagaattgctatatcctcttgatgacatagtctttgttctgaaatatacttgattttatattaacata

SEQ ID NO: 771497 - DNA, 481 bp, Homo sapiens
gtcttatgaaacacatattaagtacataattatagtgttgcatgtacaaaaattgtactatttaaagaagaaatgtagagaaaatgggagcaggattttcagggatcagtacaaatttagcaggcagaccggagtgggataatgatattctaggaggaccctactggtcaaagaaagatcacttatacttgtctaaacataagatcagaatyaccagattgtagggtgcagtagggaactggtgggagatgagactagacaggaagagagttaagagccatgtaatgaaaggctttgaatgtcctgctaaggagcttgatctttggcctatagacaaatgtgagcaattaagtaggtaagtgatgtgttcagaatttaattttaccctcattacagagaacatggacctaatttctttgttctttcccattactagaatggtaaatcaccaagtttattatatctaatatataaaaatgtt

SEQ ID NO: 771498 - DNA, 575 bp, Homo sapiens
tcactagaaaaaccaaactatgatgagaagcttggagctttcaacaaagcttcctctggggagagaagaggggctgaagcttgagttaataatcaaatatactaagtaatgaagcccccataaaaatctctaaaatgcagggttcagagagcttctgggttggtgaacaaaaatgcatcaaggggctaggagggtggtgtgccygaagaagtcacagaggctctgtgccccttcccatataccttgctctatgtacttcctcatttggttgttcaactgtatcctttgcaactgtatcttttgcaatagcctttacgataaatcagtaaaagtaaaaatgttttcccgtgtcttatgagacattatataaattattgaagctaaagaagggattacaggaaaccccaatttatagctgaacttacaactggcatctgaagtggggggcagtcttgtggggctgagcccttaacctatgggatatgacgttaactccaagtagatagtgtcagagttgaattgaattgtagaacacacccttggtgcctacaaaatgttggagaatttcttggtgg

SEQ ID NO: 771499 - DNA, 588 bp, Homo sapiens
agtaataaaaaaaaaaaggagctttagtaacacatgattggttcagtgatgagatctgcggccaaaagcaatgtctagtacatgaatcagaaattcttgatactactcatcactgaagtacaacggaatttcaaaggaaagaaaagaagtaaattaatatttattgaccaccttcattgtaacactacttaatatccattatctcatttaaacttcaccacagcagccttattagtaaccatattttatagaagaataaactgagacttaaagatgtttagaaaccttatccagaaaataatgagcagtaactggcagaaatgagatagaaacttacatctgtatcagcctgctaggayagcagttgttcttaactccatgaacaatctgcatcctaatcacttgcagaactactttaaagtgtgagtttaaagttcctaaacccagagatcctgattcagttggtctgtgggtggggtccaaaaatttgagtttcaaacaagttcagtatcacatttaatttttacacaagtcagcagtgtgctacatttaaaaaagttattctttgaaaatgattctcaagtgaat

SEQ ID NO: 771500 - DNA, 604 bp, Homo sapiens
gctttctttgtattctttttcctcattcttttagaaacctgttgtgatcctatggttagtagtttgttatttactctccattccatgtaagctgcatttcttataaaagtctcatactccagaacttagttttcactttccttctcagactggtgtaaatggttgagggaaagcattgtcaaagcaagatctgggtagctgaaacaaaattactgtgggcaaggaaaatggatccttgtcagatagcaaaggagtcttgaagccacatatgcaagggacatggagagttctgcctgtagggaccaagaggtttcaaagtttagcccacacaatacagacacaatctcaggcaaagacaaatttattcatgtcccctttttcccaatctcagtccagactgactcaagaatcagtaaaaacaaagaacttaaacaatgataaatcagagggcacatttgcaytgggggaagaagtgagtaggatctctaacaatttactgtcatctattcattcaggagaaaaatgacaagtgcctttttttgtttttgtatttggtccaggggatagagataaacctggcaccagttttgccttgatatttgta

SEQ ID NO: 771501 - DNA, 484 bp, Homo sapiens
tttgtcacttaaaacacaaacacattgcacagctgtatcaaaacatttttatagcactagtttataagctttttttttctattttttccctttttgttaaaattaagacacaaatatattctttagcctaaacctacacaggatgagaatcaacagtatctctattttccacctctgcatcttctcccattggaaggtcctcaggagccaataacacacatagagctgttatctcctgtgataacaatgcctaacaaygccttcttctggatacctcctggaggaccagcctgaggctgttttacagttaaatgtacatatatggagtatactgtaagtataacaataaaaagttagaacagtaggatgtttacagtagtttcaccacaaacaccttattaatgtattgcactgtggccttgcaatggctacaatctcactaggagatagaacatttttcagcccattataatcttaggggacc

SEQ ID NO: 771502 - DNA, 484 bp, Homo sapiens
tttgtcacttaaaacacaaacacattgcacagctgtatcaaaacatttttatagcactagtttataagctttttttttctattttttccctttttgttaaaattaagacacaaatatattctttagcctaaacctacacaggatgagaatcaacagtatctctattttccacctctgcatcttctcccattggaaggtcctcaggagccaataacacacatagagctgttatctcctgtgataacaatgcctaacaacgccttcttctggatacctcctggaggaccagcctgaggctgttttacagttaaatrtacatatatggagtatactgtaagtataacaataaaaagttagaacagtaggatgtttacagtagtttcaccacaaacaccttattaatgtattgcactgtggccttgcaatggctacaatctcactaggagatagaacatttttcagcccattataatcttaggggacc

SEQ ID NO: 771503 - DNA, 620 bp, Homo sapiens
atatcttttcctttgggtggacgcccagtactgggattacaggatcaaatggtagttttatttttagttcttcaaaaaatctccacactgttttctatagtagttgtactaatttacattcccaccagcagtgtatgagcattcccttttctctgtatccttgtcaacatcagctattttttatcttttaatagtagttattctgactggtgtaagatgatacctcattgtggttttaatttcattttttggatggttagtgagaccctggccagggcttggggatccagaattttgtttttgtgtttttcgtttaagtgtatccatcagtctgtgatggtrttgctgaaagcatattgggatgctgctctgggctgggcacagctggtgtgatcaagaagcagcatggacataagtgcacttaaaaacctccaaaagttcctcagaaacaatgaggggcaagcactgagcacagcagaagcaacacatgcacacacacacataaacatacataaacatgcagacagagacatgcaaacttcaacatacatgaacatgcagacacagacatgcaaacttcaacatgcatgcacatgcagacacagacatgcaaacttcaa

SEQ ID NO: 771504 - DNA, 577 bp, Homo sapiens
tcatcccccatccccccatgcacactcaagggtgtggcagcagccagggggcccctcctagagagaacatgaggcagtgccatcccattacactcagagtaaagctcagtgtcattttacagtgagccctccgtacccacaggttttgcatctcaaattcaaaaacggtatttgctggatgcaaagattgtaaatttggagagtggatgtgagcatccccagatgtcagtatctgctggagttcctggaagcaagctctggtagatcccaagagactgtacctctctctctctctctcttttttttttttttttgagacggagtctygctctgtcgccaaggctggagtgcagtggcgggatctcggctccgtatctcttttaatatatttcaaagctacacatgatctcctcccaggcctttttgagcatctctcctcctactctcttcctgactgtgttctgcccacactgacttcccggcctggcctttctgggaacacactgggcctgctccccactcagggcctgggcagtgtccattccctctgccaggcacatggtctagctcaacaagt

SEQ ID NO: 771505 - DNA, 356 bp, Homo sapiens
gacatcttcatggtctggctttgagcctgaggagcactaagaagtcactctaaggaaggtgctgttctggaagggaagcaggaccttaaaacacttcagtgcactccataaaatggttggggcaagtcagacatgcggagttgacttggaggccctctctggaggacaataaatgtgtttcctactttattatgcccctmaaagaaagacacgtagtggcgatgtcagtcagtgtgctttttgtggtttccagtaaacagctggaataattggtgaaatcttaaggctagtactaataaagaacattattgccacccacaggcctgaaagataagacaaagaggttcctacaacct

SEQ ID NO: 771506 - DNA, 581 bp, Homo sapiens
tccaccgttaacctgaacatgatgtcatagctgtgtggggaaggcggaaggtctgacagctcgtctttctatgatggatttttaaaagattcccactaccagagtactgctttggctgcacttgtgatatcagtcattttgatgttgataaaaacacaggtgcctcgtccaagaggctggagatgcacggtgtatgggacctgggagggtagggaagggtgaggctagggtgatacagtggatcgggtcggcatccatcgtcctctgtttctcacaggtggctsctatgcagtgatttgggctcctgcaaggggggcttgtggctgagatctcttttttttttttttttttttttttgagatgaggtctcactatgtcgaccaggctggtcctgaactcctgggctcacatgaactcctaccttggtctcccacagtgttgggactgcaagcatgagccaccgtgcccggcctacatctcttaaggctacttgaggcagtacttgccaggcaagcattgctgtctctcaaacttcctgggaaacagttttttcctcctagaatttcctcctggaatataac

SEQ ID NO: 771507 - DNA, 581 bp, Homo sapiens
tccaccgttaacctgaacatgatgtcatagctgtgtggggaaggcggaaggtctgacagctcgtctttctatgatggatttttaaaagattcccactaccagagtactgctttggctgcacttgtgatatcagtcattttgatgttgataaaaacacaggtgcctcgtccaagaggctggagatgcacggtgtatgggacctgggagggtagggaagggtgaggctagggtgatacagtggatcgggtcggcatccatcgtcctctgtttctcacaggtggctgctatgcagtgatttgggctcctgcaaggggggcttgtggctgagatctcttttttttttttttttttttttttgagatgaggtctcactatgtcgaccaggctggtcctgaactcctgggctcamatgaactcctaccttggtctcccacagtgttgggactgcaagcatgagccaccgtgcccggcctacatctcttaaggctacttgaggcagtacttgccaggcaagcattgctgtctctcaaacttcctgggaaacagttttttcctcctagaatttcctcctggaatataac

SEQ ID NO: 771508 - DNA, 653 bp, Homo sapiens
ttttaaaatgctactttggcatgcagctatttctcccagaacattatgagctacagattataggaagcttgctttattttttttaacctccatctatctctgactgcatagtagctgcttttccatcactgaacgatgcatctgacaaaggtctaatattcgcatctataagaaacttaaamaaatttacaagaaaaaaacaaccccaataaaaagtgggcaaagaacctgaacagatacttttaaagaagacatacatgtggccaataatcatgtgaaaaaaaactcaatatcactgatcattggagaaatgcaaatcaaaaccacagtcagaatgactattattaaaaagtcaaaaaataatagatgttagcgaggttgcagagaaaagggaacccttacatgctgttggcgggagtgcaaataagtgcaaccaaagcagtgtagcaatttcttaaagagttaaaaggagaactagcattcaacccagcaatgccattactaggtgtatatccagaggaaaatttttctaccataaaggcacatgcatgctaatgttcattacagcactattcacaacagcaaagacatggtctcaacgtaaatgcccgtcgatgacagattgaatgaagaaaatgtggtacatatacacc

SEQ ID NO: 771509 - DNA, 613 bp, Homo sapiens
tctgtcctaggaatagaaatgtacattaaattttaattatcagctagtttatttacataaaactgaacaaatcttgcatagtgagtacacgtgagattgtattatctaatgcaattcaatttcatatccatgacgatttacaaatatgcatattcaacatatgtctgagaaaaaagtggattttyaatgtatttatgtgatttgtgttaatagaaatgtttagggtcgtcttaaacttcacattgtacattgaattatgagagttactgtgtagtaagtatgctacacttgtaaaaatatttccctttaaaggagcttaaacatactgggagattcccagagagacaaaaacacctataaaatttagagagtgatatgatgaagcactcattttttaaaaactgaattcactatatttcagatttttttaattcaaaatggaatcattcatcattgaatatcttttttctctacactacctttaaaacaaactaaatatttcatttgtttctgtagttagggataggttagaataaatatgacaatagcgccaatgattgaataagtactatgaattagtactatgttattattttactgttataaatgtgcc

SEQ ID NO: 771510 - DNA, 613 bp, Homo sapiens
tctgtcctaggaatagaaatgtacattaaattttaattatcagctagtttatttacataaaactgaacaaatcttgcatagtgagtacacgtgagattgtattatctaatgcaattcaatttcatatccatgacgatttacaaatatgcatattcaacatatgtctgagaaaaaagtggatttttaatgtatttatgtgatttgtgttwatagaaatgtttagggtcgtcttaaacttcacattgtacattgaattatgagagttactgtgtagtaagtatgctacacttgtaaaaatatttccctttaaaggagcttaaacatactgggagattcccagagagacaaaaacacctataaaatttagagagtgatatgatgaagcactcattttttaaaaactgaattcactatatttcagatttttttaattcaaaatggaatcattcatcattgaatatcttttttctctacactacctttaaaacaaactaaatatttcatttgtttctgtagttagggataggttagaataaatatgacaatagcgccaatgattgaataagtactatgaattagtactatgttattattttactgttataaatgtgcc

SEQ ID NO: 771511 - DNA, 613 bp, Homo sapiens
tctgtcctaggaatagaaatgtacattaaattttaattatcagctagtttatttacataaaactgaacaaatcttgcatagtgagtacacgtgagattgtattatctaatgcaattcaatttcatatccatgacgatttacaaatatgcatattcaacatatgtctgagaaaaaagtggatttttaatgtatttatgtgatttgtgttaatagaaatgtttagggtcgtcttaaacttcacattgtacattgaattatgagagttactgtgtagtaagtatgctacacttgtaaaaatatttccctttaaaggagcttaaacatactgggagattcccagagagacaaaaacacctataaaatttagagagtgatatgatgaagcactcattttttaaaaactgaattcactatatttcagatttttttaattcaaaatggaatcrttcatcattgaatatcttttttctctacactacctttaaaacaaactaaatatttcatttgtttctgtagttagggataggttagaataaatatgacaatagcgccaatgattgaataagtactatgaattagtactatgttattattttactgttataaatgtgcc

SEQ ID NO: 771512 - DNA, 624 bp, Homo sapiens
tttcacagtttcaacattttcttacctctgattccctttaaaaccacactcataaattcctgacacagtcttaaatactttcttttccacatcctcacaccctctttaattcctggtaccatatgatgctttagacaaatcttcatgaatctttactcatcacatctgagaggcttagattgtttaaagtcattgagattcccaaagttcttttcctagcctccatgttttcttttcagggattctcttccttgttaaactgtaaaatcagtgcaattacgtgtaactcaaaaaagttatgctcartaaataacattctctaggtaatgttaattgcacagtttctggtatacatagtgcatttgtagaggatattaactgtcattattgttgcagatattattaatagtaataattcttggaattatttctgaagctccactgtctttctaaagttccaaatatgcatttctggtttttgcttaccgcacctgaagatgtatttgtgagtcaaacttactaaaaacagctatatataaattgtcaacagttatgtgctcaccaattttgagacttctttccattccttatatggtcttgtacctttctctttgtttccttttg

SEQ ID NO: 771513 - DNA, 657 bp, Homo sapiens
agatgagtgaaaatgaaaatacaacataccaaaacatatgaagtagtgcttagataaaaatttatagctatagatgcctatattaaaaaaagaaaaaagatctcaaatcagtaacataatcttccactttaaaagattggaaaaaggctggatgtggtggctcatgcctgtaatcccagctacttgggaggctgaggcaggagaatcacttgaacctgggaggcagaggttgcagtgaaccgagatcacgccattgcactccagcctgggcaacaagagcaaaactccatctcaaaaaaaaaawaaataaataaataaaataaaaaattggaaaaaagagtaaactgaacccaacataagcagataaaaggaaataataaagaatagagcagtaagaaatgaaatagagaatggaaagataataaagaaaaatcaacaaaactaaaaattggttctttgaaactaaattgtcaaacttttagaatgtccaagaaaaaaaagaaaaaagactcaaatttctaaaatcaagagtgagaggggacatcactactgaccttacaaaagtaagaaagattataaagaaatactaagaacaactgtagaccaacaaattagataacatagatgaaaaggacaaattgctagaatgacacaaac

SEQ ID NO: 771514 - DNA, 612 bp, Homo sapiens
cctgtcaataattttgatttgatctttgagtatctgtggattttcctctactttactagaggtgttaatctggaagcagcatgtttcatttaaaagtgcataggtacctcctacttcaaatttaaggacatctaaggcctgtctattttatkctactactgaggctaaagagtctatagattgctattgtggctctatggcatctagaattgctttccatcttcagtgcatcctaatagagatataaagtacagatctttcaaggagagggacacccataaataagaatagacctctggctgtaggatttcccatccatgttttttctaagatgggattgtcatgtgcatgccctccccagtctgccctttcagttaaatctccatatgagggcacagaaatgatagatctctttgtccggcatattctacatagtgcagttttctagaaaagagcctaagttagggatgtccccagatgatgctgtcatctgagtagaatttaaaaataataagtcggtaactacagatactaaagtacaagttcccttccaatgccttaggaggattaagtgtatccaggagccacaaagaaaagatagccccgttcctt

SEQ ID NO: 771515 - DNA, 557 bp, Homo sapiens
tatttctcaccctcctttatatgttgctttatcatttaaactataaacggtgtaagagtttatgaacacatggggataaaacagattattttatgcaactataaaatttgtaaagaaaaattactcacaaatgtcagcatgtgtgtcatactttattcattygtaaaattagtatatagaacaataaaacctaaaattttattaaatataaaaatgtatactatgcacattaaattttatattttcaattttgttctttttgcaagaaaattttgctacttaataaaagattatctgatatgatgtatatatttgaaggctgactgagtgagtgatatgttggaaatattttcttgctaaatatgttttcagttacttaaaagatgcaataagttgtaaggccttaatatagttgcagtactaatgtaatctatttggtcctttctgcaatagatggaaataagtgactaagaaattaacaaagtataagtccttctggaaattcaagataataaagagcaactttatttaatattccacaaatgttctatttacat

SEQ ID NO: 771516 - DNA, 618 bp, Homo sapiens
gccatgctgtttatttccctggacagataaaatggctggaaatcaaaagataactcataacgtgaggataaatgaattggaaatgtgtcagaaatgatttatttgaaagaatatttgactaggcctctaattccagtgatactgagctggtcatttaatctccataagtttgcataatgagaaagttgtaagaggttttcactgagctagccacagttcaaaaagtttattaaaatgtttgatcaacttgaaaaataagaaagctattattttccaaatatatttttgtgtggccaaatacttgaggacaatttaatgatcattttaattttattatgatgcaccttattaaaaattatgctcggccgggcgtagtggctcactcctgtwatcccagcgctttgggaggctgaggcgggcagatcacctgaggtcaggagaccagcctcatcaaaatggtaaaaccccgtccctactaaaaatacaaaaattagccggtcatggtggcgggtgcctgtaatcccaactactcaggaggctgaggcaggagaatcgcttgaacccgggaggcggaagttgcagtgagccgagatcacgccactgcactcgagcctgggc

SEQ ID NO: 771517 - DNA, 612 bp, Homo sapiens
gtttaattggtgcatatttgtacattttctagtttttttctgctatagatttctagttttattccattgtggtaggacaaagatacatgctatgatttcaatctttttacatttttaagacttgctttgtatgctaacatatgatctatcctagagaatgtttcatgcacacatgaaaagaacatgtattctgatattcctgggtagaatgtcttacataygtctattaggttcattgtttataattttgttcaagttctctgtttccttattgtacttttgttgtatttgtacttgtatttacgaagtaactagtttgctattgattttacaagctcataagcggaaggtatttgccttgtctcagagactttgtactgtagacttttgaattaatgctgaaatgagttaaaatttttaggggactgttgggaaggcttgattggttttgaaatgtgaggacatgtgatttgggaggtccaggggtgaaattatatggtttggctgtgtccccacccaaacctcatcttgaattgtactcccatcattcttatgtgttgtgggaggaatctggtgggagataattgaatcatgggggcaatgtccccatac

SEQ ID NO: 771518 - DNA, 521 bp, Homo sapiens
tcatgcttctttcctcccctgaaaagaggatgcctaggatgaacattaactcgacccaagtgtacaacttaggttcccaaaattgataaactggatctgccaccccataagggtcatccaaaaatggcttaagttccttttttaaactttggaattcttgacytggttaagggaggattcacaaagccaatagctcctcctccttgtggcacctctttttaggggaagagagttgaggctgactccttaggtgtggagggaagtgggacattttgaatatcgtttttacattgttctatcccatgatggagtcttttggggaagggtactttggctgagaagaaataggttcatggtataagattcccaacaatctggattgtaaggaggaggaataatgtgagcaggggagggatctggagtttgaactgggacagcagtggctgcctgaggggaagggttaggagaactgagcgagggaagatggtctagaggatcccatatgctggattctttaggcc

SEQ ID NO: 771519 - DNA, 638 bp, Homo sapiens
atatgcaccagtataaaaacacctgaaagcataaggctcacgggaattataaaatagtaacacattgaagaaaataaagcaactaaataacaatcaacaggatgattgtaactgtacctcacatatcaatattaatgttgactctaaatggtctaaattatccacttaaaagacatggattggcagaatgaattaagaaaccaaaaccaagtatctgctgtcttcaagatacccatctaagttgtaaatatttttataaactctaggtaaaagggtgaaaaaaatgcttaatacaaatagaaaccaaagatgaataggagtagctattcttatattggataaagatgactataaagaaacaatagtaaaagaaaagacaaagataattattattctataataatttaaaaatcaatttaactagaagatataacaatagtamatatgtattctctaactccagagctcccaggttcataaaacaattagtactagatataagaaaagagatagacatcaaagcaataatagtgggggacttcaacactatactgacagtaataaacagatcactaaggacaaaggtcaacaaaaaacactagactctagaacaaatggatccaacagacatttacaga

SEQ ID NO: 771520 - DNA, 623 bp, Homo sapiens
tcaatagatgcagaaaaacatttgataaaatctaccatctctttgtaataaaaaccctaaacaaactaggcataaaggaacatatcccaaaataataaaagccatatcaacccacagccaatatcgtgctgaatgaggaaaggtagaaaacattccgctctcagaactggaacaagacaaagatgtccaytttcaacccttccattcaaggtagtaaaagacttctagatttgataaacgaattcagtaaagtctcagattacaaaattaatgtacacaaatcagtagtactgctacacaccaatgaccaagctgagaatcaaatcaagaactcaatcccatttacggttcaacagttacaaaatcaataaaatacctaggaatatacttaaacaaggaagtgaaagatctcaacaaaaagaactataaaacactaataaaacaaatcatagaaagaggtgaggggtcaagatggcagacttaaagcagattacctgtgctgctgtcacggagagaaatcaaaagggctattgaacactgactcacagcagcgagtgaacacagagagcaaagaggagcaaagctgggcagcagccaatctggaatcaatgtggatccaggag

SEQ ID NO: 771521 - DNA, 554 bp, Homo sapiens
gttactttgtatttcattgcttttaatttattacattaaccccatttctatgtgcatctttaaatatacagttttgttttctaagaggcctttatgttgttaaataagtcctttagagaacatataaattatccaccaaaacaattcgtcataaatttttgttattgttgtcttagcacgggactatggtacatttgcccctgtatccatgggggatttgtttcagraccctcctcctccccgtccagataccaaaatccacagatactcaagtccctgatattaaatgatgtcgtatttgcaaataacttgcacacattctcctgtacactctaaatcatctctagattacttataacacctaatacaatggtaatgctttgtaaatagtggtttgctgtattgtttaggaaataatgacaagataaattctgtacattttcagaatggatgcaactatttattgttactttttaaatatttgacctgctgttggttaaatccacagatgcagaagctacagatacaaagagtcaaccatattttacttatta

SEQ ID NO: 771522 - DNA, 595 bp, Homo sapiens
ccctgaaaaccttccagtgggacagttatgtggaggtggaagacagtgatatagatgattctgaccctgtgtaggcctaggctaatgtgtgtgtttatgtcttagtttttaataaaaaagtttaaaaagttaaaaaaattgaaaattttaaaatagaaaaaagcatatagaatgagaatataaagacaaaaatatttggtacagctgtacaatgtgtttgtgttctaagttaagtattattacaagagtcaactttttaaaaattaaaatgtttataaagtaaaaaagttaaagtaagataaatttattattgaaaaaaggagtttttgtttgtttgtttttgttttttygagacagagtctcattctgttgcccaggctggagtgcagtggtgcaatctctgctcactacaacctctgcctctcgggttcaagcaattctcatgcctcagccacccgagtagctgggattacaggcatgcgccaccacactcagctaatttttttttttaattttttctatttttagtagagatggggattcaccatgttggctaggctggtctcgaactcctggcctcaagtgatctgcccgc

SEQ ID NO: 771523 - DNA, 620 bp, Homo sapiens
gttaagaggcacgtgagcacgagggcagatgggtgcagcggggttaggatctgccccagatgcagactccaaacctgctgtgctcacaagcttgggccttctcatctcacccagggtgggaatgattggaacagcgcccatcgggggtatatcataggggttgaataagacagtgcgtagaaaaccctgcttaaggcagagctggcaccaggaaccactcaggaatgcaaccctctgtgagtcctaatttctgtttacatctggcctggccaagggtgcccctgaggtttcagttcttgaggcccaagttttcaggggatctcagaatgactgatgtgcttggttaaatgcagattctggggtctaaccactaccctyggccagctaaattggaatctctgtggtaagacaggaatctgcatccccaaataacctcctaagagaatctgatgaatattaacatgtgagaacctctggaagaatgcagcattcctctctctattcaaagcaaagatggaaaaatgaataaggttttttacatttccctgacacaaaaatggtgcaggcatgatagtcccagtgtccccagataatgttggggcagcagagaggcaccggtc

SEQ ID NO: 771524 - DNA, 571 bp, Homo sapiens
agtacccacattttcattaggagctggtcatacaggtaccttctgcctaggatgtaccgaaattccaaactcccaggaaaaaattacgtgttcaggataagccatattattttcacaaacagtctatgcacaatgagccactcttatcattcaaagaaagttttatatcagtcaagggaaatgtttaccratcaagttcccagatgccagtcaagggtaaacctttcaagaataagtttctaaggataggcagtctcagctctgctacattaaccatttttgcacaatatggaatactcaagcaacaccattaaccaatgtgcactaactgacatttatggattactccactccatccaataagggcagaaaatttattatttttaaaagtacatggaacatttagcaagagagacctaatatggaccatcaacaagtctcaatatgtttaaaagaattcaggaccataaataagtctcactaccgtttaaaggattcaaaccaccagaagtaagttctctgactgccacagaattaaattagaaattatcaacaaaaaatatttttgaat

SEQ ID NO: 771525 - DNA, 571 bp, Homo sapiens
agtacccacattttcattaggagctggtcatacaggtaccttctgcctaggatgtaccgaaattccaaactcccaggaaaaaattacgtgttcaggataagccatattattttcacaaacagtctatgcacaatgagccactcttatcattcaaagaaagttttatatcagtcaagggaaatgtttaccgatcaagttcccagatgccagtcaagggtaaacctttcaagaataagtttctaaggataggcagtctcagctctgctacattaaccatttttgcacaatatggaatactcaagcaacaccattaaccaatgtrcactaactgacatttatggattactccactccatccaataagggcagaaaatttattatttttaaaagtacatggaacatttagcaagagagacctaatatggaccatcaacaagtctcaatatgtttaaaagaattcaggaccataaataagtctcactaccgtttaaaggattcaaaccaccagaagtaagttctctgactgccacagaattaaattagaaattatcaacaaaaaatatttttgaat

SEQ ID NO: 771526 - DNA, 617 bp, Homo sapiens
ttgcaccattgcactccagcctgggtggcagagtaagaccctgcctctgtatatataggaagcaggacagtgctacttgtcattcagagaagaatacatatgcattaaaatgcctataaagacatgcacgagagtcacagccagttcgggacagaggctgcctctggggaggggaggagagggagggcgcagggtggggcagggcactcatcctgtgcaaccgccctgggcctcatgctctggagggcactgcctctggggttcaatgctctgctgttgctgtcttgagattcttaataattttataatggatttcaattttgtaagtgaaatctgatgggacagtgggttgtgagccaccaagagcrtccagtctctgctcacatgaggctctgccccctgggcatgggttctcagcctcctgctccccactccttgatactttcccttccccaacccttgtgtcacatcaaggaccacacatgtccccagctcagggccccaagtgacctagcctccaccaccccaggccccctcaccaggacagctagcaccaggtcctggacgtggtcgtgtagctgggaggcatgtgtacagaacagggccaggtagctctg

SEQ ID NO: 771527 - DNA, 555 bp, Homo sapiens
gatcctcttctttcactggaattacttgatcaactgttttttaataagtgttggtcatcggcatggaatgagagagcactgatcatttcacagagcatatctattgggaggctcctttctgtgaggctcttgtactcctacacaccttgctaagtatgccaagaatgcaaggctctcaccactctttatccaagacatttctcagggttaggttgcagcaagcaaccttgaaaaatgaagggatgtctcccatcaggacagagagcaagcttgcttactgtttgctataaaagcagtggagtccctgagctcagtgttacccctcctgtaatacaactccctgcatgtgtgacatctgtctggctcacatcacccckgtgagacttgggagaagggattgcaaaggccattcaacaatggaccactagtcaaggtattcaatggacatttcacactcccatttgcaggtatctggtatcattttgaacattggaaaggccttctcaaaaatcaactcaaaaagatttctgactctaaccctaactctcactgcac

SEQ ID NO: 771528 - DNA, 625 bp, Homo sapiens
cttagctcataatatatctttgccataaatacttaatgctcattcttattatcatgagttcccatgacatggaaacagtatggttattaccccattcatcatcatggcagcttgggagaatatagccgtaatttgctttttattgcttaggcatggaccaaatggaaaaacatggactaattgttttgtgtgtgattggaacctaaaatcaatttgaaggtacatacactgaatcacttcaatgtacaaagagcatcaattctgcttttaattatatctgagtgttttttgaaagcagtgtaagagagtagagtcatttctaagggtgggaagataagaaaggagcwacagctgtaattttcttttgaatgcttttatgaatgcattattagtttttgtaatgcacggtgtgcctttaggtaatgtaaaaagaattttctaaaagactttcttgtaagagaaaaactgaaattagactttaaaacttagagtgtgatttgtctaagtggcaggctagcttgcctctggtgtagttgttttaataacaaggagaaattccttctattagcagtcatgaccagtccatcatttggattgatatatctgttagctgaatttcatgacc

SEQ ID NO: 771529 - DNA, 625 bp, Homo sapiens
cttagctcataatatatctttgccataaatacttaatgctcattcttattatcatgagttcccatgacatggaaacagtatggttattaccccattcatcatcatggcagcttgggagaatatagccgtaatttgctttttattgcttaggcatggaccaaatggaaaaacatggactaattgttttgtgtgtgattggaacctaaaatcaatttgaaggtacatacactgaatcacttcaatgtacaaagagcatcaattctgcttttaattatatctgagtgttttttgaaagcagtgtaagagagtagagtcatttctaagggtgggaagataagaaaggagctacagctgtaattttcttttgaatgcttttatgaatgcattattagtttttgtaatgcayggtgtgcctttaggtaatgtaaaaagaattttctaaaagactttcttgtaagagaaaaactgaaattagactttaaaacttagagtgtgatttgtctaagtggcaggctagcttgcctctggtgtagttgttttaataacaaggagaaattccttctattagcagtcatgaccagtccatcatttggattgatatatctgttagctgaatttcatgacc

SEQ ID NO: 771530 - DNA, 640 bp, Homo sapiens
aaccccataagtaagttcaattattatcctaagggaggaaaccacccctcatattgtcttatgcccaatttctgcctccaaagaaagaaaaagttaaaactaacaggcacaaatgaaatccacaagcagacagcccggcgccacaccctggtcctggtagttaaagatggacccctgacctaatcggttatgttatctatagattacagacattgtagagaaaagcactgtgaaaatccctatcctgttttgttccgatctaattaccagagcatgcagcccccagtcacgtaccccctgcttgctcaatcgatcacgaccctctcacacgcacccccttagagctgtgagcccttaaaaggaacaggaattactcactcgtggagctcggctcttaagacaggagtcttgccaatgcacccagccgagtaaaccccttccttctttaactcggtgtctgaggagttwtgtctgcggctcgtcctgctacaatcccattttgcaggtaagaaaacaatctcagaaaggttgtatgacttgctcaggtatacaaagattaagaacaagaatgctggctgcagagtctgtgaccttcactcttcttattgcccttactcttgcctaattttgtagtcccttg

SEQ ID NO: 771531 - DNA, 626 bp, Homo sapiens
cacaaattaaaatttaaactaataaatttaattctaaatgtacaattaaggatttaagacataaatatcaatagactttcctaatgttccacagattctgcagttatttagaaatgagaaatgtatttaccaaagactaaataaaacacacaaaaatagattgggtactcttttaaaaaagactttaaaactttaaaaagtttgattttttcaaaaaacagctcctttgactcactgcaggtgaaatagcatagaaatagttggactgtttcacccactaagttgtaaggacaacaaaatactaaaaaatacttaaagattggatcaactattttaatcatcttaaagagctaattcatttaatggagaaatccaatttagttgacagcaaatactycattttcttgtcaatgaagcaaaactatgcagataggattttattcactcagagctgaattctctcctctttactagaatttgcaggcacactgaataaaaacgaacattcggtgtaaaaaaagccaaagctgaaatgatataaaaggattcatcttttcataagtgacttttaatattcaatatatatatttagaaactttccgggacccatagaatatatctgaaac

SEQ ID NO: 771532 - DNA, 651 bp, Homo sapiens
gttcaataattgaatcatctttctagagaagcacaataaatgtaggtgcaataaatcagaggattttaccatacaatatgcaaagtctgtttataaaagtcttgtaaatcagtcttctatacagaaaatttatatgagatctcaagtgaggactatattaattttattgatgtttcccgtgggttttaatgaattgctcccatttactgggcatcatcaagccctaggcaaggtcttttcatataccagactaaaagactctgccatattgaaattatgaattcatagaaattatcgccaatctccaaagtttatttccatcccaccaaaaccatacacacatcctttctctactcagctctaaacgtgaaatcagaaacctwcgtgttcttctgatcttcacattattcattcatattcaggttacctaagcctttgacatgataaacctggccatccatcctagttgcccaggactctcacatttctgtcttctttgcttgctatatcatcgaaaaatgttttcaatgataaattaaaactaaatagaagtagtaaatatggcaaaattcgtaataattgtaaaatgtataagacagttacatgtgggtttattataataatgtcttaattctttgggatgtttgtaaa

SEQ ID NO: 771533 - DNA, 644 bp, Homo sapiens
agcagcctaagccacagtgattggttcaagagtaagcacttggcttaagccttccaaccacagtgaaactcgggacttttgtgggagctcctggaagagaatctgtcatttctaatggtcttaaattttgaagcatgtgggatggtggcggctgacacaaccctgccatgtgaatgaagcacccacatgtaagcagagccaacacatcaggagacagaacagagagttggaaaataacactggcaaaaaaaaaaaaaaaaagacattgtttaatcctgcatatccagctatgtctgaaagaaagcttaccatgggactcttcagttacatgagtcaatacattgatctttacttaagtctatttaggactttttttctattgctttcaacagaagaatcctaactgatgctctacgtggttagttgttcctagrggagattgaattatgtaggcataagcaactttcatgcagcaggttttagaataaaagccatgtgagatcctattgaattctgtctttacacatatccactttcattcaataaatattgatatgtgctgtcactctgttagccactgtaaatacaaaaaggcccactgcccaagaggagcctacaagaagataaaaaagaacaaaaaggga

SEQ ID NO: 771534 - DNA, 658 bp, Homo sapiens
tttctcgatgatcgatgaagaggggagttacgttggttaatacttgcatgctctctttttcagtacctattttttaatcttatgacaatagtaataagatacctacatgccattcattcagtgcgttacacactcaaacatttgaggtagaagatgatcctatctcaagtggcaaagcagcactagataaaaccctccagacacagagaaatcatttgggaacattccataacactgtgccatccaactggaggtttaagagaatgtggtcagaaatcccagccatgggcaaactctaggcttacttttggtaaagtaagatttttatttccatagataatcaataaataattacaatgggagagttaaaggaaacttttgaagaaggggaagataacattagctcttaaataaatagttcaaaatttgttttttagggattgtaaatgaggtgtaaatataaaatgtaattaagagtgagaatgggaactgatcgaagaastcctaggaactgaggtaaaactctcaggtgactcaaaaaatgttgagtttggctcaaagtttggttcagtggatgttgcatttgttgtgaaactgtcccccccccaagtagatttgcatgttttgttcagaagcccagcaataaggtcagtacagt

SEQ ID NO: 771535 - DNA, 640 bp, Homo sapiens
taatatatagtgacctaattcatctcttatggttttttgtcttgaaatctactctgtctgctatatgtatacccactcctggcctgtttggtttcactggaatagaatatcttttttcatccctttgttttcaacctgtttgtctttataggtgaagtgtatttcttataggcaatagattaytggatcttgctctttatcattcagctactctgcatcttttgattgaggaatttagctcatttactttcaaagttatttttaagtaaggacttacttctgtcattttgttatttgttttctggttgttttgtggtcttctcttacatttttcttccttcctgtcttccttccggtaagcgaagctgctgttctctggtggtatgatttaatttctaactgtattttttgtgtgtaagtgtttctgggtttgaccttaccatgaaacttgcaaatactgtctcataacccattatcttaagctgataacaacactgtttgtataaagatacaaacaagcaaaaagaaaagaaataaaaaactatgcaccttgacttcttctccttcttgttaaccttttgttgtttctatttataccttactgtatatgtcttgaacagttgttgtagttgttattttt

SEQ ID NO: 771536 - DNA, 640 bp, Homo sapiens
taatatatagtgacctaattcatctcttatggttttttgtcttgaaatctactctgtctgctatatgtatacccactcctggcctgtttggtttcactggaatagaatatcttttttcatccctttgttttcaacctgtttgtctttataggtgaagtgtatttcttataggcaatagattactggatcttgctctttatcattcagctactctgcatcttttgattgaggaatttagctcatttactttcaaagttatttttaagtaaggacttacttctgtcattttkttatttgttttctggttgttttgtggtcttctcttacatttttcttccttcctgtcttccttccggtaagcgaagctgctgttctctggtggtatgatttaatttctaactgtattttttgtgtgtaagtgtttctgggtttgaccttaccatgaaacttgcaaatactgtctcataacccattatcttaagctgataacaacactgtttgtataaagatacaaacaagcaaaaagaaaagaaataaaaaactatgcaccttgacttcttctccttcttgttaaccttttgttgtttctatttataccttactgtatatgtcttgaacagttgttgtagttgttattttt

SEQ ID NO: 771537 - DNA, 621 bp, Homo sapiens
atgtaaggaaggactgggtatatatgaggatgtgagaatggacataactaagatgaaaatgaattaacatgaaaaagtgaagagcattagcagagaaaaatcagttcacaaatgaggataaccaaaacagcatttcatcttggtataaacaaatgcatacagaaataaacaatctagaattctatacattgaagaaaataggaataaactctgcagaagtttgctttattttacttatacctattaatatcttcgaactttctmcaatgaatattgtttataataaagtattttaatataaatttactataattaataaaaactttaaaaatctgttcaggcaaccaagctcctataaaatttaatggtgggtgatgacagatgaagtagctggccttccaaaaaaaaaaaaaaaaaaaaacaggagagggaaggtcaagggggaaggattgctgaggccaggagtttgagatcagcctgggcaacatattaagactctcatctctacaaaatatttaaaaatcagcaaggtatggtggagcacacctgtagtcctagctactagggaggctgaggcaggaggattgcctgagcccaggagttcaaggttactgtgagcta

SEQ ID NO: 771538 - DNA, 617 bp, Homo sapiens
ggggcatttgagtcaatgtaaggaaggactgggtatatatgaggatgtgagaatggacataactaagatgaaaatgaattaacatgaaaaagtgaagagcattagcagagaaaaatcagttcacaaatgaggataaccaaaacagcatttcatcttggtataaacaaatgcatacagaaataaacaatctagaattctatacattgaagaaaataggaataaactctgcagaagtttgctttattttacttatacctattaatatcttcgaactttctacaatgaatattgtttataataaagtattttaatataaatttactataattaataaaaactttaaaaatctgttcaggcaaccaagctcctataaaatttaatggtgggtgatgacagatgaagtagctggccttccaaaaaaaaaaaaaaaaaaaaamaggagagggaaggtcaagggggaaggattgctgaggccaggagtttgagatcagcctgggcaacatattaagactctcatctctacaaaatatttaaaaatcagcaaggtatggtggagcacacctgtagtcctagctactagggaggctgaggcaggaggattgcctgagcccaggagt

SEQ ID NO: 771539 - DNA, 504 bp, Homo sapiens
aaaaaaaaacccttagggttattaaacaatatatccaccattttaatgaaagagcttagattcaaactcctatctctctgaccttaaagtctaggctttttcaattccttatgaccatgtacccggtcctgcttccagatacccatccttcatcaaaatgaggtataactgaaataccatcttgttttttcaagaagttctaattatggtgttttttctttctacagtacatatttcttccaagaaaagcaaaagggaatatagagcacttttctcccacttttgaaaaagcaagtgaacaccttcttcctccttgcaaacagaaagttaaccatttctttactttctttttcttatacaagaacragtaatagcagatacaaatgttactaaatatcttccgttttagggaaaaccagattggaactgaaactatgtaacactatctctacatcattacactaagccagaacataattaaaacttacattgaaaagatcaatt

SEQ ID NO: 771540 - DNA, 620 bp, Homo sapiens
acagagtatcaactactaacttactgaatagaaactgagagtggtgagcttaaaccaatcttgttaacttttcctatggctgatgtccaaaaacattaataacttagctacagacatttaatcactaaatgaaaatcatggtccataaggtttattactttgtcaatatttcatggctttacatataaatgcttccaattaatacccacgagcctaggtaatagataagtaatcctcaatttcagatggaaaacaaaaacacagagtcaaagacatttatttgtccaaaatctcataactgttcaatgtctgagccaagattcaaccacaggtcyccctaaaatgacacaccagtgacccttggactatttccagtgtctcctaattgtcactgttcataataagtcacacgtttaaggcaacaaaggtaactgctagagtctggtcagatgaagaataacctccactgctgtctgatgtcaaactggcagctctgcctctgtgtctgctgagctgggggccctgggagccccaggcagggaagggattgaccaaagccaaccacctcttgctgcctcagaaatgttccccatatgccttctgggttgttggctattccc

SEQ ID NO: 771541 - DNA, 393 bp, Homo sapiens
gccattcttttctgcttttctatcatttttcaatttctgctgcagttaccaaggaaaaatagttaaagtagccaataatgaatgtttaaaacattaaaaaatcataccttatacatgctagaaacagtaatttcaacatactaggtggacttttggcagtgtgttcttcccatcacactatttgtaatccraatattcattttgtgtttttttccatgtcgggctgcctttgattttcctagattgttgttgttgttgttcttgttgttgttagtagaggaaaatatacagtgtcattaattctgctgcaagtctctcatggggtggaccttgttaggagtacagaatgatctgattcaatttcaccctgttctgtacagttttcaatgtctt

SEQ ID NO: 771542 - DNA, 536 bp, Homo sapiens
caatttgtttggcattgttcttaatatattaatcagaaataaacttagaaaatgttttgtttcaaaacattctgatacagaagcttattgactatcggtgaactcaaaaattacatttggttgtcaaaagctgaatgttttactttttcacatctttgctgtaattgtcatagctaccctaragacatatggatgcctctgaaactgtttgtttattttttcactcagcaaaatcttactgagcagattttatgtgcttggcacagtttcaggtgtttgcatgctagtggcagaggcaagcaataagcaatagagttaaggaaagtattagaaagtgataaatgccaagttgaagaatataggagggaagggcaattggaagtgttggggggagttgtgctattctcgatggggtaaagacctcactgagaacatgacttttgagaaaaatcttaagaaatgaaaggagttaatcatcctgtatctggagggagaccattttaggcagagaaaaatcacaagttcaaaggcttaaa

SEQ ID NO: 771543 - DNA, 474 bp, Homo sapiens
gagcaagtctctaacaaggcactgaacacactgagtctgaggtcagagcctgagtccaccagtggtgggagggtttgccatgttctatggccccggctctttgacccttcccttaagttgacttggtctgccataaatcaagttgctaatccttcatacctgaaccactgctaaagtagytactcttaatcctttgacttcagcttttcttccaacctactcctttcccattagtcaaacttactaaaataccactatttattaaatctattgctttttcaaaaaagtttggggccccacatgcctgtataatatagccatgcttttgctgtgcagcctaatgtttaacactggtttcttggagtcttattctgccctccaaacctgaaagaacagtgtgtgattccagcaagccctcaatctcactgtccctcagacacatggaagtccctctttccttgctcacaagcttcc

SEQ ID NO: 771544 - DNA, 594 bp, Homo sapiens; identical to SEQ ID NO: 752085

SEQ ID NO: 771545 - DNA, 503 bp, Homo sapiens
gacagatgaagggtgctgtgcattacagaggctagagactctactgcatgtagttttccccacaaagacaaaggagctactctcaaacagcgggaagaccttcacttttacaaacactcctcaaaatgttgaaacttgtgttaccttcattgcgggacaaaactgacagtgtccagatattttacaaaaataaattgyatacagagacacagtacactaatagttaaatcccgtgactattttaagctttaaggtgcacacattttttcaaaactaaattcttcaaagtaaatttagcatttttgcttccattcttttgggtggtaagggatgaagggagtggtggtgccagttgtttaaaaaaaaaggtagcctcataaagagtgctctttatctttgtcttcatttattcaatatgatgtttatttaataaacatgtagatttacacgtctgacaaatcataaatgagagaggaatcaaagcctgtgtttcttattgaagg

SEQ ID NO: 771546 - DNA, 503 bp, Homo sapiens
gacagatgaagggtgctgtgcattacagaggctagagactctactgcatgtagttttccccacaaagacaaaggagctactctcaaacagcgggaagaccttcacttttacaaacactcctcaaaatgttgaaacttgtgttaccttcattgcgggacaaaactgacagtgtccagatattttacaaaaataaattgtatacagagacacagtacactaatagttaaatcccgtgactattttaagctttaaggtgcacacattttttcaaaactaaattcttcaaagtaaatttagcatttttgcttccattcttttgggtggtaagggatgaagggagtggtggtgccagttgttwaaaaaaaaaggtagcctcataaagagtgctctttatctttgtcttcatttattcaatatgatgtttatttaataaacatgtagatttacacgtctgacaaatcataaatgagagaggaatcaaagcctgtgtttcttattgaagg

SEQ ID NO: 771547 - DNA, 528 bp, Homo sapiens
ctgatatgcaaaatgttggcccagtggaagcctctggactcattttcattagtgatttaaacacatttggagaattggatggggtgggcaacagattatttgcctctcagcatggcaaaaccacctttattgtcactgctcaccrgttcagaagaaattagcctcctaagtgtgtagcctcttctgcatttcagtgggctgatttgtgctcatattgggttcctgggatcaccagtgagggccaactctccactgattaatcaggtaagacagagcccctaaaaacagggctggtccttcccctaagcaccttgctccaggactttgttcattttgagtatttatttacacctatctggggtggtgtgcagataagggtgtcagttagtttttaaaaatattaaataaagcttgtttgaataagttatcagatcctttgctacttaatttttcagtatctatgaaccagctactaacatattagaaatgggaaacctgttactcccctaattggtgttaatgaatcat

SEQ ID NO: 771548 - DNA, 629 bp, Homo sapiens
ttttctttctatactttaatatatgtgttgccaaaagatccgcttcctccacactttttggtccttctgccctgactctataaaaagtataatccagtcatataaatttaaaaattacctctatgagaaatattgcaatgctaagctctctctgaaactatatttctacatttctaatattctgcaagaactcttatctggggtgatctacagacttttccaattcattacatttaaaagtgaatatataattttacctgaaaactctttcttccttggtcattctatttccaagtaatgatgccacgctcttcccaggatctcagatttaaactctcttctttgaatattttttaaaatatttttttcccttttcttgtccacaacattgactttgtttccaattcaatagtttcagccttcataaaatacctcccatccaatgtctgcttttcattttaactgcctragtaggattcattacttcttttttacctgtatcctttcagtggtttcctgactggtgtctctacttccagtcactgctcagttatatgtatctaatgctttgctcccatattaatcttcctgatggggaactttaatagtgttgttccttctgcctcaaa

SEQ ID NO: 771549 - DNA, 625 bp, Homo sapiens
tcccttttatgttatttgcttgttgccagttagcagttagactgtatttcccagtctcctgatacctagcccctgcatctgggagaggttgagtaatttccaccaacagactgtgagtgtaagtggtataacttctgaggccagtcaagwaagaaaccaacatgccttctctgccttaatgcattggcagaaaacccaggcccattggataagggagtcacattggattgtcactgtgtcacatgtcacattatttctttatgtaaagaaataaaagttggttgtgttcagccactgaaattctagggtttgtttgatacagtattttgcattacccatctaatacatagggtcctcagattcttgatttatagcaaaccgaattaactatgtaccctactgaagggataattacatttaaaggtttaatttaatttatttttgttttctcttcttgagtgaaaaaggtggcagaaaatctgcacatagctcaaggttttcctcctgaaagataggtatggagttcatgggaatcattttggaacgtattcttagaaaactaaatcatcccaaattcactgaagttagcgtcccactgaaggacaatagagcacatgcatagtac

SEQ ID NO: 771550 - DNA, 494 bp, Homo sapiens
accctggggtcgccactatgtattaaatataggatctgctgtcagagtagttgatctcaatagagaaatcctacagggttttgaggatacatgttatacaaaaattctatcccctgtacagtccatgttcacatatgaaggcaatgggaaaaataatttcaaatacatcaaaatttagcaagcctaacaagaaacaaataaataatgactaagagggatagggcattaaaagttccataygattctgaaagaacatgttgcccaactttctgtgtcatttcatattgtccttaaaagtattttaacaaaatataattttatatagacattagtttcttttgcagtcaccctaagaacacactaatattttaaataatattactattaagaaagagaccctataaaaatattggtaggaaaggtgattaggtagctcaccaatattggtagatactagattaccatccagaaatcaacaacattgttatatgtta

SEQ ID NO: 771551 - DNA, 600 bp, Homo sapiens
ataccagctaatgttttgtatttcttgtaaagatggggtcttgccatgttgtccagcctggtctgaaattctggagctcaagcaatcatcccaccttggcctcccaaagtgctgggattactggcatgagccaccacacctggtccatatatgattttccagtaggtttatagttacaggtattacacttaaacatttaatccactttcagttgatatttgcacatgatgggggattaagattctaatttccttcttctacatgtgggtattcagtttttccaacaacatttataaaaataactttcctttccctatcgtgtgttcttagcacttgtatcaaagatcacttgaccatgagtgtgtagatttacttctgggttctttgttgtcttctattggtcaatatgtcttttattcctgtatcatgctgttttgmttaataaatatttgtagtatattttgaaatcaggtagtgtgacacctctagctttgttatttttactcagtattgctttggctattcaattctttttccagtccatatgaattttaggattgctttttattttagtgaaaaaaatgtcattaaaattttgat

SEQ ID NO: 771552 - DNA, 665 bp, Homo sapiens
tgtggacacatgctttcatttcttttgagtaaataggataggaatggttagatcatatagtaggtgtattttaactttctaagacactgagaacctgttttccaaaatggtatatttctgcattcctgccagcagtatatgagagtcccagctcctccacagcatcaccactcttggtgtggccagtctttttaaytttagccactctagtaggtgcttagtgatatctcattgtggttttggcatacattttcttaatgactgttaatgttaagcttctttttatgctcttatttgccatctgtattacctttagtgaagtgtctgttcatatcttttgaccgctttttatggagttctttgttttcacattatgtgtatatgtattatttatattctggatacaagttaggtatgtgatttgcaaatattttctgccagtctgtggctcgtcatttcagtctcttaacagtgcctttcaaacagcagttttcagttttaatgaagtccaaatttatcagtttgtccttttaatatggtgcttttggtttggtatataagaaatctttgcctaacctaaggttacgaaggtttatgttttcttcttgaagtttagagtttttactacgtatacttaagcataatttatatctacagtttatagg

SEQ ID NO: 771553 - DNA, 616 bp, Homo sapiens
tccttaggcatctcctggccttggcagtttcttagactttccttgcttttgacaaccttgacagttttgaggagtactgcgatggtatttgacaggatgcttctctattctctgatgtttttctcaggtcccatgttttggggyttggggacaaagatcacagaggtaaagtgccattttcatccacatgatttgtgactgttaatgttacctttgatcacctggctgaggtaggtgccaagttttccactctaaagttgcttcttttccaccttttccatactgtactcttcagaaggaagtcactatgggcagcccacactctttgtcaggagttatgctccccctccttgagggcagaatacctacataaattctttgcaattctcctgcatagggaattgcctcttctccgccatttattaatttattcagtcatgtatttatatcagtatagattcatgagtatttattttatacttttggttataatccaatgctttttttttttttttttttgctcatattgttgcatatttagccactggaggctcttttttttcttattttttttgagatggaatctggctctgtcgcccaggctggagtgcagtgg

SEQ ID NO: 771554 - DNA, 616 bp, Homo sapiens
tccttaggcatctcctggccttggcagtttcttagactttccttgcttttgacaaccttgacagttttgaggagtactgcgatggtatttgacaggatgcttctctattctctgatgtttttctcaggtcccatgttttggggcttggggacaaagatcacagaggtaaagtgccattttcatccacatgatttgtgactgttaatgttacctttgatcacctggctgaggtaggtgccaagttttccactctaaagttgcttcttttccaccttttccatactgtactcttcagaaggaagtcactatgggcagcccacactctttgtcaggagttatgctccccctccttgagggcagaatacctacataaattctttgcaattctcctgcatagggaattgcctcttctccrccatttattaatttattcagtcatgtatttatatcagtatagattcatgagtatttattttatacttttggttataatccaatgctttttttttttttttttttgctcatattgttgcatatttagccactggaggctcttttttttcttattttttttgagatggaatctggctctgtcgcccaggctggagtgcagtgg

SEQ ID NO: 771555 - DNA, 616 bp, Homo sapiens
ttaggcatccaggaaatacactgttctggttcttctccctcctcactggttgctccttctcagtttcttcttttttttttttttttttttaaaaaaagtggtaaaacatacataatatataatttaccatttttaagtgtacagttcagtggcattaagtagattcacactgttgtgcaaccatcaccaccatccatctctagaactttctcatcttctcaaactaaaactctgtacccactaaacaataactccccattttctcctcccccaggcccagcaaccaccaygcaactttctatctctaaggatttgactacaatagctacaagcacacctcattttattgcactttgcttcattgtgctttgcagatattgtgggggttttttgttgtttgtttttacaaattgaaggtttgtggcattcctgagtccagcaagtctgttggtgccatttttacaaagcatgtgtatgcttcatgtatctgtgtcacattttggtaattttcacaacatttgaataattaatatatctgttatggtgatctgtgatcagtgatctttgatattaccattgtaattgttttggagcatcaggaactgcacctatataa

SEQ ID NO: 771556 - DNA, 556 bp, Homo sapiens
caaccatgctttgttcccagttttcctgaaacatttcagccttaaaactgacccgggaagagcatctgttctcctgacctcaatcattatgtacagattttgcattacctgaggcctctccctgtcccctaggtcttcgtgatcacttctgtcctctctaattatgtagatgttcttccatcttggactcagctttgattttttttgctaatgtaactcaaaatcagggcacattttcccatttccttcatgggcttatcttctagtttcagatctatctgtagattcacacccagtcacagtgtaaataacccctggctttactccagcattcagaccctyaggcttcatcaggcaccattgtctctacctggaatatgtttccagctctctccaatctggcctgcccttctgttacccaccctgaattctgactaacacaggtgcttactgcggctaaaatgaatccatgttcgaattctggctctgaaacagacaactaggcaggttcaagttaatttatctgttaaagcccctgagagttaattcacctttt

SEQ ID NO: 771557 - DNA, 616 bp, Homo sapiens
ttaggcatccaggaaatacactgttctggttcttctccctcctcactggttgctccttctcagtttcttcttttttttttttttttttttaaaaaaagtggtaaaacatacataatatataatttaccatttttaagtgtacagttcagtggcattaagtagattcacactgttgtgcaaccatcaccaccatccatctctagaactttctcatcttctcaaactaaaactctgtacccactaaacaataactccccattttctcctcccccaggcccagcaaccaccatgcaactttctatctctaaggatttgactacaatagctacaagcacacctcatyttattgcactttgcttcattgtgctttgcagatattgtgggggttttttgttgtttgtttttacaaattgaaggtttgtggcattcctgagtccagcaagtctgttggtgccatttttacaaagcatgtgtatgcttcatgtatctgtgtcacattttggtaattttcacaacatttgaataattaatatatctgttatggtgatctgtgatcagtgatctttgatattaccattgtaattgttttggagcatcaggaactgcacctatataa

SEQ ID NO: 771558 - DNA, 641 bp, Homo sapiens
caaggtggtagctatgaaaacaaagtaaacattaatgtttgcataattatctacacaatttggtcaaagtctttagcaaataaaacaaattttggagctagaattccccagttaaaccaattcgctgggtaaattatcttttaaaatgtatattggtttttttttttttttggtcacagatgatcatgaaagaaattttaggaaatactgaaacatataaaaagaaaaacaaattcttcattatgccaaaacccaaatataggcatcgttaacatgctgtgtttcctccatgttgttttatttccaaagcacatatcaatatagctgcagctagtttttaaaaatcaaggccaaaycaaataactagatggacaactagatagacagatacagacaacagctatatctttataatcttataatcttgatgagttgcccttcatatgaatcttcaggataaccatgtaaagcaagcagtagtgctatctgctttatggatgaggaagcacaaggaggtcaaataatggacctgtgtcctctattagaccataaaatcctctaagacagggcctagctagttactcatctctgacttcctgcttctcttactgcataatttgatcacatcttagataatcaat

SEQ ID NO: 771559 - DNA, 587 bp, Homo sapiens
tatagtgtcatgttcagatgtggcaacatattatttttgaatattagagaaaatcatgtgtattctccaggttctatgtttaagttcactgccctaagatagacacaaggtaacccagcctgattttcagccacccatcattcatttatttgttgatttgatgcacagttattgagcatctatgggcatctatgtactacacactaggcatatcacagggaatgatcagaatctctgctttttaggggcttctaacttgaagaggataaagatacaaaaattaatcatcagaatacagtcagccctttgtatccatgggttcagccagttgtaggtccaaaatacttaggaaaaaaaaacaataaaagattwcaacaattaaagaatacaaataaaaacaatacagttcaacagctatttacatagtatttgcattgtattaggtattataagtaatctgaagatgatttaaagtatactggctgggtgtggtagcatgtgctgttagtcccagctacttggagggctgaggcagtaggatcctgtaagcccaggagttagagaccaccctgggtgatataccaaga

SEQ ID NO: 771560 - DNA, 606 bp, Homo sapiens
gcagaaaaaaaaagatgcttatctttggctggactttgaaaagaaattgactaacctctgctgtcttctggtacatacattgcctcaagggctgagaaaagctgataggacagagaagaaatagtgaaacatctccctgtttactacatgcaaacctacagtcaccattataagatgccaggttggcttctttcaatttggcctacagccctaaaaaataagtgtgtcttgaagrcacaaaccttaaagctgtgaatggagactttgaaaagtatctagttgagcccagaaatggaagtagcagaatgctattgacctagttgtaccccaaacactgaagtctcattaatacctaaaaagcctgagccagctttttctttctgtgtttaccttcataccaattacataataaagtcattatggagcacagcgtagcttggtttgaggcttgtgtgagctgtggctgtcagccccggcatatattccttaaaatccttaaagaagacaagtgatttataaaatacttcccattgcctgccatatatcataaatggcatttaaaaggacaatttcagttaggttcacaaactctttattggagggagt

SEQ ID NO: 771561 - DNA, 606 bp, Homo sapiens
gcagaaaaaaaaagatgcttatctttggctggactttgaaaagaaattgactaacctctgctgtcttctggtacatacattgcctcaagggctgagaaaagctgataggacagagaagaaatagtgaaacatctccctgtttactacatgcaaacctacagtcaccattataagatgccaggttggcttctttcaatttggcctacagccctaaaaaataagtgtgtcttgaagacacaaaccttaaagctgtgaatggagactttgaaaagtatctagttgagcccagaaatggaagtagcagaatgctattgacctagttgtaccccaaacactgaagtctcattaatacctaaaaagcctgagccagctttttctttcygtgtttaccttcataccaattacataataaagtcattatggagcacagcgtagcttggtttgaggcttgtgtgagctgtggctgtcagccccggcatatattccttaaaatccttaaagaagacaagtgatttataaaatacttcccattgcctgccatatatcataaatggcatttaaaaggacaatttcagttaggttcacaaactctttattggagggagt

SEQ ID NO: 771562 - DNA, 639 bp, Homo sapiens
tctgtaataaataaacaaatggaaaatctcagcagataaataaaaactatacaaataaaccatgcggaagttctaaaattgattaaaatatctaaaattaaaaattaacagcagttagaagatgacagaggagtcagtgaatttgaaactagatcaacagaaattatctaatctgaagaaaaaaaataaaatagaagagatcctcaacatcaaaatgtctaagacacttttaatgagtcccagagaaagagacaaagaatggggcagaaaaaaawcttgcagaacaatggctgaaattttccccaatttggtgaaagacattaatttacaggcacaagaaattcagcaaaccccagtcaggataaagatgaagaaatctatgtgtagacaaatcattatgaaactgctgaaaaccaaagataaaaagaaaacctgatgcctgtcagagaaaaatgacagattacatacaggggaatgacaactcaaatgaccatgtacttctcaccagatactatggaggccaaataacatttgtaatgtactgaaagaaaaaataaactgtcaacccagaattctacttccaatgaaaatagccttcaagaattggggcaaaataaaggaattttcagataaaagaaa

SEQ ID NO: 771563 - DNA, 633 bp, Homo sapiens
tctttagaatcactcaatattgggatccattttctccaaggcaacaattttggcgggaggtggtggagacttccctctagggggcattcctcaagcattccagagcaggctggcttcattcacgctgctggtcactatctagcctctgcttgatatccaggttgggattgagacccgaaggccctctgcccactggctgctagcctaccttgcgacattgtgggtgatctcttgaacctccttcattagcctatattgtgcgacatcacgacacagctccacgttcggccggtgtgtcctggtctccaagcgcgtatgagccaccttggctggcccttcttggtcaaggatggccttttcaagagctgtaatatttttctcctgggaagcaatctcttccatgaccttacaaaaargattagagtaggtgaggccaagctgtgctcctcaaaactcaacagctgacagcagatgggttgtgatcatgtaagttaggaagagggaacctcagatttcttcttaagcagcatgccagagtctgatctctcttccctaaagcagtgattgctggtgggcaaggtcacataagacttaaaaccttatggactcaagggacaggacgggccattgtca

SEQ ID NO: 771564 - DNA, 535 bp, Homo sapiens
tacagcatccatgtggtcactccgtgaatgattctttgttgtttcctcctgtctctcccgtgagattgaaagcacatcaagggcaggcctgtcacaaagcctctttgtgttctgtagctatgcgtggagcgaatgaacaaggttgggcttgtctggacctgggcacggtcactgaatgttcttggcctctgtaaggaagggcatccccttggcagttagcagggcaggcacaaggggcatagcatccccagaacatgatgaagggcacctttgaaaagctagagaggctttggatagagctggaattgtctggtgacaygtgctcattcatactacatggtcattatactacgtggtcttagaatatgtcaaattctcaccttttcatccacccacaattcactgagttcccgttcagtgccagcttctgtgatgggtaatagcagtgggaaacatgcagaactggatgatcaagtttagaatgagatcgtgcctactgtcggagcagtccaggaggggtgaccccaggatccct

SEQ ID NO: 771565 - DNA, 642 bp, Homo sapiens
aactaaatattcccaaatagttttatgtagatcagtaacatactgtaagttagggaataatttatttttgtgttcgagaagtatattctaatgtttggatttatatttttagaaatactgttgtaagacctgagaaattcagaagacaatctgacratagtgtagccggacaagccacagacaaaacacctcagacaccgagttaaagaaggaaggggtttattcggccaggagcattggcaagactcctgtctcaagagccgagctccccgagtgagcaattcctgtccctcttaagggctcacagctctaagggggtgcgcgtgagagggtcgtgatcgattgagcaagcagggggtatgtgactgggggctgcatgcaccggtaatcagaacaaaacagaacaggacagggatttttacaatccctggaatctatagacaacataaccggttaggtcaggggtggatctttaactaccaggcccagggcatggcgctggtatgtctgcctgtggatttcatttctgccttttagtttttacttctttctttggaggcagaaattgggcataagacaatatgaggggtggtctcctcccttaataggttactaaaagtagccacatcaagacaaaattat

SEQ ID NO: 771566 - DNA, 472 bp, Homo sapiens
gaccttcctagatcatacacattcttatttttggagatcctgatccatatcatatgatacatactaaaatttatgcacattgggacttactgttttagtccattttgcattgctataaaggaacatacaaggctgggttatttgtaaagaaaacagatttatctggttcacaattctacaggctgtacaagaagcatggtaccagcctctgcttctggcgagggcttcaggggacttctactcatgatggaaggtgaaggagagcaggcatcacagggagagagcaaargagcaagagagaggggagctgccagactgtttttagcagcgatatcccccgctggaaccaggagtgagaactcaattctgcaggaatggcactaagccattcatgagggatccgcccccatggtccaaatacctcccactaggtcccatctcgaacaccagggatcaaatttcaacaggagat

SEQ ID NO: 771567 - DNA, 453 bp, Homo sapiens
ccttgggcaccttccttaaacttgataaaggctgagactgtaaagatttttagacatttcaaggaacaaaatagcaacagatctctgatatagcaatagatctctgatacagccaaggaatgcctgagagaaacaacactgcaaaacacagatgattccaggatcaaaatgcaaacaaatatggttgacagarctgctacatctttagtctccaggtgctaaccagttggctttaacccccaagtgacgagcctatagttctgcaggatttttacttttttagtcctttctttttattggttattttcatttcaaaactggaatttgaaatctgaaataaatgattcagggaattcctctgatgaggccagaatttcagtttttttcatgaaccaggtaccacctgaagaggcttgcttacccagtgagactccagaagggccgttctgttgg

SEQ ID NO: 771568 - DNA, 558 bp, Homo sapiens
tctgtacaccaataatgtccaagctgagagccaaatcaggaatgcaatcctattcacaatagcccccccaaaataataaaatacctacaactatagctaaccagtatgatgaaagagctctaccagaagaattacaaaacattgctgaaataaatcagagatgacacaaataaatggaaaaacattccatgctcatggataggaaaaatgaatattgttagaatagccatactgcccaaagcaattcaccaatttggtgctattcctatcaaactaccagcgtaattttgtcatagaatttatacaaaattwttctaaaattcatatggaactaaaaagagcccaaatagccaaagcaatcctatgcaaaaggaacaaagctgaagccatcacattacctgacttcaaagtatactacaaggctgcagtaaccaaaaaaatatgatattggtacaaaaacagacacatagaccaatgtaataggtcagataacccagaagtaaagccacacacctacaaccatcggatgtttgataatgttgacaaaaaacaagcaat

SEQ ID NO: 771569 - DNA, 376 bp, Homo sapiens
catgagatgcggtcacatggcacccaggcaaacactgatatcatgagaatggcagaggaggaggaacatgaccaggggcaggacaaatcatgcggcatgatttcagaatggtggtttcaccctaaatggacattagatatgctaatcacaaacccacttccagttactctctgcccttgaaagcaaaaaaacatcatttactaacacttattctaaaaaccaaagttgcctgggccatgtgaactrtcattcattcaaactaactttgcctccaattagtttagatgtacctctctaataaagatgacgcactacttactaaatactctgttgtgcctgtcctttgcattttatgaatttactctctttatagaga

SEQ ID NO: 771570 - DNA, 637 bp, Homo sapiens
tcccaaatgcaggagaaagccaggctgtggggcgggtggctcagtccgtggtgtgcactgctggtggggtgggcagtgggcacgtggccacattttccccacttgatatgccatgttggctgaaaagcaggagagacaattgtgtctttagaaaacttgaaggctggctgaacacggtggctcacgcctgtaatcccagcactttgggaggctgaggcaggcatatgacctgaggtcaggagttcaagaccagcctggccaacatggtgaaaccccatctctaccaaaaatacaaaaattagtcaggcatggtggcatgcacctgtaatcccagctacttgggaggctgagacacagaattgcttgaacctgggaggcggaggttgcagtgagccgagattgtgccagtgcactccagcctgggcgacacagcaagactccatctcaaaaaaaargaaaaaaaaagaaagaaaaagaaaagaaaagaaaaaagaaaacttgaaggctgaagggtattttgctttccttttagaataaggggcctttccatttggtatcaatgcctgcccttgtcttgagtgggtcatatcccggtcatgggcatactggctgctgccttacctcatgggagagcccc

SEQ ID NO: 771571 - DNA, 637 bp, Homo sapiens
tcccaaatgcaggagaaagccaggctgtggggcgggtggctcagtccgtggtgtgcactgctggtggggtgggcagtgggcacgtggccacattttccccacttgatatgccatgttggctgaaaagcaggagagacaattgtgtctttagaaaacttgaaggctggctgaacacggtggctcacgcctgtaatcccagcactttgggaggctgaggcaggcatatgacctgaggtcaggagttcaagaccagcctggccaacatggtgaaaccccatctctaccaaaaatacaaaaattagtcaggcatggtggcatgcacctgtaatcccagctacttgggaggctgagacacagaattgcttgaacctgggaggcggaggttgcagtgagccgagattgtgccagtgcactccagcctgggcgacacagcaagactccatctcaaaaaaaaaraaaaaaaaagaaagaaaaagaaaagaaaagaaaaaagaaaacttgaaggctgaagggtattttgctttccttttagaataaggggcctttccatttggtatcaatgcctgcccttgtcttgagtgggtcatatcccggtcatgggcatactggctgctgccttacctcatgggagagcccc

SEQ ID NO: 771572 - DNA, 631 bp, Homo sapiens
gctgccctgcctggctcacctaatgccggatgcactgcctatgaatgtcttccccataaatcatggactcgctaggctctctgtgtctttcttaatttgtagttcttggtatcacaaacacccaaaactcctaggaatttttatttccaatttctagacttttcatgaaatatgggaagggtgtaaccagaaggactactacatggtacctttaggycttgactgtcagtacccctccatcagcgtgagtcttgggcagagctgggcatcagtgaacagacacagtgaccaggtacctggccttcctcaccccttgctgccctctggccctcaaagccttgagcccctcaaaagccagtttgcagcagctctgggcccaggtctgggtggggactctggaatggggtacccagggtggaggcagctcaggaaccggctgcaggagggctgcgtgtcatccccatctccagtcatttagcacctcctgggcatgtctgggaacagggaagagtcagctcagacatgcctcctggtccacaccaaggctactcaccgggcattcggggaaggcctttcagctcactgagaggcacttgcttgccaaagggttttgaacagagcatacatttat

SEQ ID NO: 771573 - DNA, 589 bp, Homo sapiens
gaaaacatggtgtgtggcacgggtatgcattatattttattttcctagtgtattctgtttcaaatcattcaaataacacagtaagctaaataagtaatggccttcagcatgtatttttcagaggaaaacacaacatttatgtttgttaatgttctacaaggccaaatagaagcttctgggggtcgggatgaagttgttttcttcccaagcagtgacgtggaatgaatttctaatgattattccaagcttcctgggggcgagctgtgctgtatttatcgaggctcatcttcaggacgctgcgtggaaaataagcccgagctgctccccagcraccctccctgcgtcgctgtgagcacagccctcgcccggccctgcactggtcaggcagctatgcggagaggaggctgcaggacttggccaggtcaaagccaaaggccctcgtggtgtaagacctagaattaagacttcataggacaggctgccttgacctctggtgatgccagaagggccttatctggcctaaccttgagtcccctctcagctctgctctcacagtaaaggccccttagcaaatccactctcctgcagc

SEQ ID NO: 771574 - DNA, 606 bp, Homo sapiens
aaaagacaatctcaaatattagtgaggatgtagagaagttgagaaaatcaaaatgcccttttgtatattgctggtggaaatgtacaatgatgcaatcactttagaagtttgaattctttaaaatgttaaacttagaattaccataccacccaacaattccaatcttaaatatctactcaagaggaatgaaaatatacacctcacaaacttgtacataaatgttcataacagygttatttataatagcctagaacgtggaaacaacctaaatggtcatcagatgatgaacagataaataaaaggtgacgtatctaaataatggaatattattatgcaattaaaaagaagaaagtactgatacatgcagcagcctggatgaacctgaagacatgatgctgagtgaaaggaatcagtcacggctgggcgtggtggctcacgcctgtaatcccagcactttgggaggccgaggcgggcagatcacctgaggttgggagttcgagaccagcctgaccaacatggagaaatcccgcctctactaaaagtacaaagtgagccgggtgtggtggcgggtgcctgtaatcccagctactcgggaggctgaggcaa

SEQ ID NO: 771575 - DNA, 592 bp, Homo sapiens
cagggtttgagttgtaggttgattccacataatccaatcattttttttctagcaaattggttcttgaagttaagctgctggaaacacattatcaatcaacttccctcaygctgtttctctactgcctggtcctttgctcctctgaaagtcctccattaattacacacagtttgctccttgccaccaaagaccctgcgttttccacacaatgggtgaggtatgcaaatggtggaaacccatgaggccaatcagaggtttacagtgggttgcaaaatccatccacgaacccttcaatcttgcaaagatctttttttttccctctaaaacgcagtcatatttttggtcctgaaatactgtaccctgtgcagccttcatcttgggttaactttgaaaaaatatcctcttactagaaaatatgaggcaactttctgcactgcatgtgcacagcttacataagaaagattaaccatccgccaggcctccgtggaggttttgccttgcaggaggtgaatgtctcagagtgcccagcccaggtggggaagagcgcaaagctgcggggtctgtaaattacactacacctccaatagaatcc

SEQ ID NO: 771576 - DNA, 592 bp, Homo sapiens
cagggtttgagttgtaggttgattccacataatccaatcattttttttctagcaaattggttcttgaagttaagctgctggaaacacattatcaatcaacttccctcacgctgtttctctactgcctggtcctttgctcctctgaaagtcctccattaattacacacagtttgctccttgccaccaaagaccctgcgttttccacacaatgggtgaggtatgcaaatggtggaaacccatgaggccaatcagaggtttacagtgggttgcaaaatccatccacgaacccttcaatcttgcaaagatctttttttttccctctaaaacgcagtcatatttttggtcctgaaatactgtacmctgtgcagccttcatcttgggttaactttgaaaaaatatcctcttactagaaaatatgaggcaactttctgcactgcatgtgcacagcttacataagaaagattaaccatccgccaggcctccgtggaggttttgccttgcaggaggtgaatgtctcagagtgcccagcccaggtggggaagagcgcaaagctgcggggtctgtaaattacactacacctccaatagaatcc

SEQ ID NO: 771577 - DNA, 640 bp, Homo sapiens
aggatccctgggcaggacgtgagggttctcactgtggaaccagggcaacatgactatgcacacagccaggacactgtacgtccagtagctgtggatattgcagagcagtttatcatgcgtgacattctgatggcttttgggatgttctagggatacaggactagcacggtagccaagagcaagtgcactgctcagtggttatggttgggattgtttatgagagagcatggtcacaggaggcgtagggatgcccatttcagaattcctcatgccactgatcgtcaaaagcaggttctttatggaattttgatgtrggtagaattgtttgactgaaagttcaggccaaaagcaaaggtagacgttggtgcaatgcagagccaggagacttctgtgctgtgacagtgtctgcataactttactcaatctgagagctgaggttctgtgtcacactggagagtctgctcacccgtaccccaagaagacagaacaaagggtgaagacaagcaggaaggcactaagtctactggagcaacgtgacactaagttgtcttgaaaaattgtgaaactaaacatttttgttgaggataaattgagatgtaccaagattttcattttttaatggggataaaaaagagttttc

SEQ ID NO: 771578 - DNA, 495 bp, Homo sapiens
tggaggtcaaacatctaaaatcaaggtgcagaatccctgggacctgaggatccttaagggactttgcagatatgattcataaagggttttgagatgcggagattatcccagatcatccaggcaggcccagtgtcatgacagagatccttaaaaaagaaggcaaggggagatttgtctgtagaagaaacagaaggccatgggatgcatggctgccccgcagttttgtggctttttctgtgatggaggccgcaggtaatcatcgcgtcctccttccactcccttctgctccatgacttcctccactgctcagacctgctttcctaatkaggtgatataaaccttcattcctggagtgtgagcctgcaatggctccgctcatttcttctttatccgcttttgggttgttgtagtttttcactaacttttactattggatgcggaagaactaagagctgtcccagaaaattctctcagttccaagcatactgttccctg

SEQ ID NO: 771579 - DNA, 608 bp, Homo sapiens
tgctcatactggactagtgtgggctgggcccctcgttcaatatgcctggtgtcctcataagaagagacagccaggtgctgatagggacacacacagggagaacgacataggatgacaaaggcagagattggcttcatgaagcttcaagacaaggaacacaaaactttgccagcaaccaccagagcacaactgccaacaacttgattcagacctctagcctcaagaactatgagatgataaatatctgtggttctaaaccacccagtttgtggtaccttgctaaggaagccctagaagattaagagcatttatgcaaaggaaatagttatcttcaaaagagagaacatatttactctaaaacactaaagcagtsgtgcccagcatgtgggctctgaaccggaagcaacaggctcacctaagaacttttagaaatgcaaatacttgaaccccactccagacccattgagtcagaaactctggggatggggcctggcaatctgttctaatagcccacaggtattgtcgatgcatgccaagagaaccacttcctgggaggtgcagggcctctacatggcacccctgttcagtccagaccctctgcgcattgc

SEQ ID NO: 771580 - DNA, 628 bp, Homo sapiens
tggagaccgagctgtagaaatacgatgtgctgcctgcaggaatgcagctgccgctccatcgtcagcagagccaggctgctgagaaagactgtaagcttcacctgcagcagctctcatctgtagggactggcccaggcaagggactcaggagggaggaagtagccttcatctggctcatactcagcaggaatctggagacaaaggtgctgtctccaaagggccctgcctacgggcattgtgcatccctacctggccaagccagcaaacaacttggatgctgggcacccaaggaggtggcccrcacatccacttctacctgctgagtcctctgcttttatgatgatgtgcattccccacatcccacttagtgtgtgtcctccctctgccatgtgccggttccacctgctccctcctctgcagtggcctgctctctacccccacagaagcgggtggaagctaccaggtgaaacaaggctgtggcaccatcctgagcaatgtggccaacatcccagagtcactcgccagcagcactgtccttcttgagcagcaacgttcccagggaacaacctgtgctttctcgcgtcgtgcccctcaccaggcaccatccaggaagaaatgcacagagcag

SEQ ID NO: 771581 - DNA, 494 bp, Homo sapiens
tccccttaggcagagcagatggccatcttccatcaaacgaagtaaaattctatttgtgtttcttcaaacgatgttcaatgcctgaaaagaaatagactccaatatgtgtttgtggccaaccctctgggctattgaaaacctctggatattgaaactgaaacagggctgactgtgcattgtgtgggcctgggctcacatctgtggcaggggctgctgtgcaggctgarttggtgtccgcaagtaggaggcctatggaagctggcactcctgggtcacttaggggaatcacagtcccctgccctgtggcataagaaaaatggcacatccaaaaactcttcctaaatgcttttgatggcagtgtagacattgctacaaaatgggcaaagactctggaaataaccagacgatgctgcacctttgtccctgctatgggtgtgggtgtatgcttatcatggcagctcacactagcaaaatacagcacactggaatgacgt

SEQ ID NO: 771582 - DNA, 494 bp, Homo sapiens
tccccttaggcagagcagatggccatcttccatcaaacgaagtaaaattctatttgtgtttcttcaaacgatgttcaatgcctgaaaagaaatagactccaatatgtgtttgtggccaaccctctgggctattgaaaacctctggatattgaaactgaaacagggctgactgtgcattgtgtgggcctgggctcacatctgtggcaggggctgctgtgcaggctgaattggtgtccgcragtaggaggcctatggaagctggcactcctgggtcacttaggggaatcacagtcccctgccctgtggcataagaaaaatggcacatccaaaaactcttcctaaatgcttttgatggcagtgtagacattgctacaaaatgggcaaagactctggaaataaccagacgatgctgcacctttgtccctgctatgggtgtgggtgtatgcttatcatggcagctcacactagcaaaatacagcacactggaatgacgt

SEQ ID NO: 771583 - DNA, 622 bp, Homo sapiens
aagacaaggggtctgtggactccccaagcccactagactggctgcctctgcagggaagcagcgggccctgctggggctcctgccttgcgcaggtatgctaggtgcccccacgcctccctcccttaattctcaccatcaccccagaggcagctttagcgggggctcgcccagtgtgctgaagatggtccctgggggagtggaacctcacagtcctttcctctgacccgggccttgtgaacccttccccattcaattccgagaatcaggacgcactgcgctcctttgacaaccctgggggaatctgtaccaagtgacacaactagctcaggaatcccaggctggagaaggagttttgatcccagtgctggctccaagaccagggacayctgccaccagggcctcgcggggctgtagagaggctgctcagcaggatgcctgctcactctgttcttctgattattgtaaaaccacctttaaaaccatgattcccaatgggttggacgcattagcaagtctggattcatttttggacaaggaaacaattccactatttcctgtaacacaaactaacgtattctatgacattccttagatcggacgtctaaattggaaaatacacttt

SEQ ID NO: 771584 - DNA, 637 bp, Homo sapiens
aacataatgatgcccataaatatggtaaagttggcataaaacagtgtgcagttgtcgtcgaagtgtagtggtcaaagccagttacctgtaaaccttctggggcttgtttgcatccatcacccatgtgctgggaggaagagtgtcccccaaaatccatgtacatctagcgcctcagaatgtgaactttaactgagaagaagctcttttccgaagctattagttaagatgaagtcacaccgaactaggagaggctgtaagtccaataacgtgtgtctttataagaagacgagaagaacacacagggaaaaagccatgtgacaacaaaggcagaaagtgaagggacacgcctgtaagccaaggaccccagcaacaatgaggggctagaagaggcgaggagtcatcctcccctagagccttygggggaagcgcagccctgtagacatcttaactttggacttctggactctgaaagagtgatagagaaactttcattgttctaagccacccggtgcttggtcattggtcctggcagcccaggaagctgacacacccagccagagaggtttgtcctactctgagggctggtggacgaggtcctcctccaaggatcagtgtggtcattggcctgcatagagca

SEQ ID NO: 771585 - DNA, 570 bp, Homo sapiens
aaagggagcagcatgtcctccaggagcctgttcatcttttcagcctaggccatcctctgagaacccataaaagtatcttaaccaggcccctgtggccctgcaggttcttggagcatcctgggcttcaccgtcagcacctgctgtgtgggctgagcacaggggctggtgctgcattctctaccaaggccctgratggtcctgcagggcttctctgaactttcctttctatccagagatcccaggaagaatcccagcctcacagctcactagagattgctgatgcctttgaaagaatgaagggtcccctatacccccgagaaaccagggagcctttggtgccagcactttgctaaaactgctttgctgtggccctccaaggaaggctgaattgcagtggaaccccgccagcatctggccacatctggaaatgaagtgagtatggaggagatgaagccagagagatgacaatgtgtgtttggaaagtacatgttatccgagtatctgtgacaccaccctacctgccttgatcctgtcttcccaactccacgggtgtttaggataaactcagag

SEQ ID NO: 771586 - DNA, 570 bp, Homo sapiens
aaagggagcagcatgtcctccaggagcctgttcatcttttcagcctaggccatcctctgagaacccataaaagtatcttaaccaggcccctgtggccctgcaggttcttggagcatcctgggcttcaccgtcagcacctgctgtgtgggctgagcacaggggctggtgctgcattctctaccaaggccctgaatggtcctgcagggcttctctgaactttcctttctatccagagatcccaggaagaatcccagcctcacagctcactagagattgctgatgcctttgaaagaatgaagggtcccctatacccccgagaaaccagggagcctttggtgccagcactttgctaaaactgctttgctgtggccctccaaggaaggctgaatkgcagtggaaccccgccagcatctggccacatctggaaatgaagtgagtatggaggagatgaagccagagagatgacaatgtgtgtttggaaagtacatgttatccgagtatctgtgacaccaccctacctgccttgatcctgtcttcccaactccacgggtgtttaggataaactcagag

SEQ ID NO: 771587 - DNA, 570 bp, Homo sapiens
aaagggagcagcatgtcctccaggagcctgttcatcttttcagcctaggccatcctctgagaacccataaaagtatcttaaccaggcccctgtggccctgcaggttcttggagcatcctgggcttcaccgtcagcacctgctgtgtgggctgagcacaggggctggtgctgcattctctaccaaggccctgaatggtcctgcagggcttctctgaactttcctttctatccagagatcccaggaagaatcccagcctcacagctcactagagattgctgatgcctttgaaagaatgaagggtcccctatacccccgagaaaccagggagcctttggtgccagcactttgctaaaactgctttgctgtggccctccaaggaaggctgaattgcagtggraccccgccagcatctggccacatctggaaatgaagtgagtatggaggagatgaagccagagagatgacaatgtgtgtttggaaagtacatgttatccgagtatctgtgacaccaccctacctgccttgatcctgtcttcccaactccacgggtgtttaggataaactcagag

SEQ ID NO: 771588 - DNA, 424 bp, Homo sapiens
aacaggttttcagctatagacaggggagttcaaattgatatgtggatttgaaaatgattcgaaaactgtacaaagaatcttaaaatatttataacactttgccaattgattgtactattggaaatgtaggttaagaaaataattctaaatgaagaaaaataatagttctatcggtgttcagtagtagagaaacagttaaataaataagtgaataaataaatccacctaaggaaatattaaaaagtcattgaagacatttttacacagtgtagcattttttwaagtctgttacagtgtaaagtaacacacacaagttcctaggcagcatgaacaaaattctgtagaaaagaaactttaaataaaaagaggaagcggtattctgtttccaaaatcacaatagcacatgcttacacctcgcctctcc

SEQ ID NO: 771589 - DNA, 489 bp, Homo sapiens
cctctcaaagtgctgggattacaggcgtgagccaccttgcctggcctgaggtatccttatatcccaagaaagagccaccttgcctggcctgaaggaagtatccttatatcccaagaaagctgtactcaagagtataatattgtaacaatcctaatatttggaatgtaggataagaacatgagagtggacagcttagtgaaaataaatttaaaaatttcaaataaaacaattagatttaaaaaatccatttataaatatcttagwataagaaacaaacaggttgatcacaaactgtcagaaaaatttctatattaagaagcaatgtatcgcaaatatcaaactaggaatattaattgttgaaataattcttagtttcttaaaacctagacttaagagttctaaattttctattgtgtccttcattcacaaattaaaatcccccaaattaactacaaaatcaactgaaaataattcaaaagaaatcaccgt

SEQ ID NO: 771590 - DNA, 565 bp, Homo sapiens
ttgttaggcaatttccttgttgttgtaacatcatagagtgtgcttacatgaacttagatggtatagcctactacacacctaggctatatggtatagcttgtggctcctaggccacaaacctgtatagcatgttgctgtactgaatactgcaggcaatggtaacacaatggtaagtacttgtgtatctacacatatgtaaacatacaaaaggtayggtaaaaaagcataaaaagataaaaggcataaaaataaaaaataaagtataaaaagcatgaaaaataaaaaaatggtttatcaatataagggacttaacatgaatggagcttataggactagaagttgccctgggtgagtcagagagtaagcggtgagtgaatgcaaaggcctaggacaatactgtacactactgtacttaaacaacaatttctttcttcaataataaattaacctcagctgttactgtaactttttattttatgaactttagattttaaaagttttgactcttttaatacttagcttataacacaaacacactgtacagctatacaaaaatattttctcc

SEQ ID NO: 771591 - DNA, 627 bp, Homo sapiens
aagagttaataactactttttgtcaatacaataatcactaataatattcttagaacttgaaaaatgcattcatgattcatcagttaaaattcttaactagaatttatgtatttaaacatttttctaatttttaaagttgcaacccatagtttctcttttctaaacagcaattttaatgaatatcatagtttaattgacttaagtcatttcttactaaagatattagaaggaaccagggtttwgtaatttcagttattttaatgtacacaatagaaaacttgttaaaatattgtttgtatttacattatcaattccaaaatttttaattgttatagtgttgagatatgtgtatagagtttctgtttttcattaaaatattttatttctcagattatgaagttttcatattttaattttttaattagatgaggagttaacaaaatcaaagccatctgctccacccaatgagtaagtttccatgtttaattttgttaaaaaatagactttattttttagagcagtgtttgatttatggcaaaattgaatggaaagcacagagatttccctttatgctccctgccccttcatatgcccagtctctctcacagtcaaattctctcaccagag

SEQ ID NO: 771592 - DNA, 658 bp, Homo sapiens
gcctcccatgtagctggaattacaggcacgcgccaccacgcccagctaatttcatatttttagtagagacagggtttcaccatgtcggccaggctgggcgaactcctgacttcagatgatgtgcccgcctcggcctcctaaagtactgggattaaaggcgtgagcaaaatgcagtacttttgaaaactctgatggctcataattttgttggagagtacagtgtccattgctccataattgtaaaatatttttgtttagattttaaaacaccagttaacattgatgtttataagagtgatcaatccagtgaattttacaatttctatatgtttactttcagtaattttttatacaaaggccctttaatatttgcccattcacaaatcatattaagtaaattttgatgtacatacaaaaatttagtctcatttctttttagcaaaacaggataakagaagtaatatggttcactcagtgattgagtttgagaaaattcaagtatatcatcatctgaaaaatcacagtctgaggtttatcaaaatcaattctgccatcatgataagagtctagagtgctgctgtttctttgcattcgttttctgatttttctaattgtcaaacatcttcctggatcagtttttttctctttatcatttatg

SEQ ID NO: 771593 - DNA, 625 bp, Homo sapiens
ggtaattcactagaatgactcacagcactcaggaaagagctttacttactattagcagtctattctaaaggatacaactgaggagcagccaactggaagagaaacatagggcaaggtatgggaaaaggacatggaacttccatgctctttcctggtgtaccacccttccagcacctagatgtcttccacaacccagaagctccccacactctattgttgtttaggagttttacagaggtttctttatgtaggcatgattgattaaataattggccattggtgaggaacgcagtcactagctcctctcctatcccctgagattgggggatgaggctgaaagttgcaagcaactaatcaaggcttggtctttctggtgacaagatggcttatcataataactcaggcaatttytaagggttttaggagttctgccctagggactggggacaaagaccaaataactctcttattatagtaccccattatatttacttgtcttgtagaaaaggttgtaaagccaccctccttaggatattaaccttcctggctatttcaggctttctctttctatgtactctccatatccctttaacagactgaccaggaacctctaatctgttcttat

SEQ ID NO: 771594 - DNA, 449 bp, Homo sapiens
aagagaatcaatgcagaaaacttcactgttgtcttattttaagaaactgtcagccgggcgcagtggctcaagcctgtaatcccagcactttgggaggcagaggtgggtggatcacctgaggtcaggagttcaagaccagcctggccaacttggcaaaaccccatctctactaaaaaatasaaacaattagccaggcgtggtggtgggcacctgtaatcccagcaactcgggaggctgaagcacgagaattgcttgaacccaggcagcggaggttgcagtgagccgagatgacaccacttcactccagcctgggcaacagagagagactccatctcaaaaaaaaaaaaaaaaaagaaaaaagaaagaaaaagaaaactgttggcctggcgcagtggctcactcctgtaatcccagcacattaggaggctgaggcgggcagatcacctgag

SEQ ID NO: 771595 - DNA, 621 bp, Homo sapiens
tcaatgtgccagaaaataaaccactatcaacatacaattctatacccaggtgaaaatacctttccacaataacagcaagataagatattttcagataaaaacactgaaacagtttgccagcatcagatgcttgctaaagtaaatgcttatgaatacggtttgacacactgagaaattattccacagacttcttgcttccactgttgaattaggaaacatagctcttaatatgttgytcctatcaaagtaagctaccttttatccatggctgcttttaagatttttgtttgtttctttgtatttgatcttctgggtttctgtattcacacagtgtttgacctggatattctttacttccttgccagctctttgatgcttttgaatatgtcatcagcaggttaatttgtttcagtgtgagtatccatatgggaacttatcctgccatgataccagaaacaaaacattacaattaaaaactgtcttactacctaacaatgctactggttaaattaaatgataactactttcaatggaattatatacagccatttaacttatttttttaagagatgttatatttttagagcagttgtagattcacagaaaaattgagaggaaggt

SEQ ID NO: 771596 - DNA, 626 bp, Homo sapiens
ctgtgggcaatagcagcttgaatggcagttggctctaaacatggcatcagtgcatccagtcagactgtttgaggagttatgctgccaactgcacctctatcccagaaacactcttcaatagcatcctaaaaatggcaataaagtgagaaccccaygttctgtatttgcttctccaagaacccaaatctcaagccagaatatttggctcagtggtttgcatcaagttcctgactttgctgggtcttgaatgacctatgaacaaaatagtgcttttatttacaaggaccatgagaatcttgattaagcagtttaagaattgaaagaattgtaagatattaatatagcaatatattctagaggaatattggaagacttaggaacagagagcccctaccgaaaacaggaaacaactatctggctgaggcaaaacaactgacaaaggaaagaagaaaatcaggatggcatcgccaacaatgaacatatttttctcataaatctatttttcttataatgtgtttttctgagaaatacatttatgaaaaatatgtttttgaatatattctgagtttgaaattttcttatgaatagattaataataaatgaataatatattcataagaatcttt

SEQ ID NO: 771597 - DNA, 422 bp, Homo sapiens
tatttattgaaaaaactcttcttctaagtgggcctgttgccagaaagcagtccccatccagaccccaggagcaagttcttgtatctcgtgcaagaaagaatttggggcaagtctataaagtgaaatgaagtttattaagaaagtaaaraaatgaaagaacggctactgaatacagcagtggcatgggctgcttgactgagtatacttatggttgtttcttgattatatgctaaacaaggggtggattattcatgagctttccaggaaagggtggggagttcctgggactgagggttcctttcctttttagaccatatagggtaacttccaggtattgccatggtatttgtaaatagtcagggtgctggtgggagtttattttattatgctaatacattataattagcatataatgaacattg

SEQ ID NO: 771598 - DNA, 630 bp, Homo sapiens
tttttttttttaatctttgtagctatcttattcaggaataaaatgagaggcaggtttgctcgatgcaattcccagcttgacttttctttttggcttagtgattttggggtcctgagatttatttttcctttcacaaactcatgggtagtgcagtcctgtaatttgcttaaattcctgtaaaccaagaaagtacctgagacaggtctcaatcagtttagaagtttattttgccaaggttaaggatatgcctgtgacagcctcaggaagtcctgatgacatgtgcccgaggtggtcaggctacagcttggttttatacattttagggagacagargacatcaatcaatacatgtacgatgtacattggtttgatctggaaaggcaggacaacccaaagcgggctggggacagttccaagttataggaggttttccaattggcagttcgttgaaagagtttatcttaagacctggaatcaatacaagggagtgtgtctgggttaaaataaaggggttgtggagatcaaggttcttattaggcagatgaagcctccaggtagcaggcttcagagagaatagattgtaaatgtttcttatcagacttaaaaaggtcccagactcctagttaattt

SEQ ID NO: 771599 - DNA, 630 bp, Homo sapiens
tttttttttttaatctttgtagctatcttattcaggaataaaatgagaggcaggtttgctcgatgcaattcccagcttgacttttctttttggcttagtgattttggggtcctgagatttatttttcctttcacaaactcatgggtagtgcagtcctgtaatttgcttaaattcctgtaaaccaagaaagtacctgagacaggtctcaatcagtttagaagtttattttgccaaggttaaggatatgcctgtgacagcctcaggaagtcctgatgacatgtgcccgaggtggtcaggctacagcttggttttatacattttagggagacagaagayatcaatcaatacatgtacgatgtacattggtttgatctggaaaggcaggacaacccaaagcgggctggggacagttccaagttataggaggttttccaattggcagttcgttgaaagagtttatcttaagacctggaatcaatacaagggagtgtgtctgggttaaaataaaggggttgtggagatcaaggttcttattaggcagatgaagcctccaggtagcaggcttcagagagaatagattgtaaatgtttcttatcagacttaaaaaggtcccagactcctagttaattt

SEQ ID NO: 771600 - DNA, 609 bp, Homo sapiens
ttagtccttgaaactaggttcagtgaacttcaaccatttttttcagttttatcatttgaatttcagtttttaaataattttgtgatagctgaagaataaccattgcttatgctagaaactaagttagcttggtaaacagttctgtattagtgatctcaagaggctttgcatatgaattgctttagtttctgagaagatcatcttgatttctcccctttggagaaattttggagactatgttgaatatttttgaaaattataagataaaaacaaattaaccatacagatatgctgaacaagtttccttctgaatgtagtcttaaaaggagaaaacatttttcaatacaaatctaaaattcaaaaatctraaatctaaacaaaaacacgaatctgtacttcatgtttcaaacactattgccaaagtatctatctagccaaatagaataagaagaagcagaaaaaactttaaaagaccaatagcaccttgctagctcattgctaataagaactaataggtacttaaactgatgaaagtgattcggacaacaacatattaaccccctactgtgccctgttttaagctgttaatagacattagtcttttaaaga

SEQ ID NO: 771601 - DNA, 585 bp, Homo sapiens
tcaaaatctggataagtactctctctactttagtaagaggaagagagaaatgtaatcacccaatggactcatcttgcccactgcccagagagagccaatttatcaagacaggaattgcaatagagaaagagtttaatacacgtagagctggctaaatgggagaccagggtgaagactgaactctgccgttttttcttttcttactcaaattcctatctaagggtctggggagtcaagccctccaaaccataaagtctcatgagaggggttttaatttaaccctatataatgtgacttactttccaacctgtcataacacctcatgacggataagaaaggaaatcaaaatacttcaaccccaaatatgtttcattgccctatcatgaaatagccctgcaaagttgtcctttgtgragaaaaatctacattctgtagagaatctcctttcctttttccaggccattttttctgatccaggagagaatcaactaagagtctgacacttttttttttttttaagagttttgctcttgtcatccaggctggagtgcaattgtgcaatctcagctcaccacaacccccgcg

SEQ ID NO: 771602 - DNA, 585 bp, Homo sapiens
tgatgattatttgtatttctgtgaggtcagtggtaatattctccttgtcatttctgattctgtttatttgaatcttctcccttttcttctttatgagcccagctaacaatccttttttttttttttttttttttttttttttttttcaaaaaaccacctcctggatttgttgatattttgaatgatttcttgtgtctcagtctccttcagtcatctctgattctggttatttttgtcttctgctagctttgggtttggtttgkgtttggttctttagttcttttagttgtgaccttaggctgtcaaattgagatctttgtaacatcttgatgtgggtgtttagtgctataaatttccctcttaacactgccttagctgtgtcccagggattctggtatgttgtgtgtttgttctcattagtttcaaagaacttctttatttttgctttaactttattatttacccaaaagtcattcaggagcaggttaattttcatgtaattgcatggttttcagcaattttttaaagtcttgatgtctatttttactgtgtgatggtccaagagtgtgtttggtatgagttcca

SEQ ID NO: 771603 - DNA, 585 bp, Homo sapiens
tgatgattatttgtatttctgtgaggtcagtggtaatattctccttgtcatttctgattctgtttatttgaatcttctcccttttcttctttatgagcccagctaacaatccttttttttttttttttttttttttttttttttttcaaaaaaccacctcctggatttgttgatattttgaatgatttcttgtgtctcagtctccttcagtcatctctgattctggttatttttgtcttctgctagctttgggtttggtttgtgtttggttctttagttcttttagttgtgaccttaggctgtcaaattgagatctttgtaacatcttgatgtgggtgtttagtgctataaatttccctyttaacactgccttagctgtgtcccagggattctggtatgttgtgtgtttgttctcattagtttcaaagaacttctttatttttgctttaactttattatttacccaaaagtcattcaggagcaggttaattttcatgtaattgcatggttttcagcaattttttaaagtcttgatgtctatttttactgtgtgatggtccaagagtgtgtttggtatgagttcca

SEQ ID NO: 771604 - DNA, 588 bp, Homo sapiens
gctataaatttccctcttaacactgccttagctgtgtcccagggattctggtatgttgtgtgtttgttctcattagtttcaaagaacttctttatttttgctttaactttattatttacccaaaagtcattcaggagcaggttaattttcatgtaattgcatggttttcagcaattttttaaagtcttgatgtctatttttactgtgtgatggtccaagagtgtgtttggtatgagttccattaatttgcatttrctaaggattgtcgtatgtctgattgtgtggttaattttagagtatgtgccacgtggctatgagaagaatgtatattctcttgttttggggtggagagttctgtacaggtctattatatccatttggtccaattttgagtttaggtcctgaacatatctgttaattttctacctcaataaagtttgtaatactgtcagtagggggttgtagtctcccactattattgtgtgggagcctaagtctctttgaaggtctctaagaacttgctttatgaatctgggtactcctgtgttgggtgcatatatgtttagcatagttaggtcttcttgttga

SEQ ID NO: 771605 - DNA, 588 bp, Homo sapiens
gctataaatttccctcttaacactgccttagctgtgtcccagggattctggtatgttgtgtgtttgttctcattagtttcaaagaacttctttatttttgctttaactttattatttacccaaaagtcattcaggagcaggttaattttcatgtaattgcatggttttcagcaattttttaaagtcttgatgtctatttttactgtgtgatggtccaagagtgtgtttggtatgagttccattaatttgcatttactaaggattgtcgtatgtctgattgtgtggttaattttagagtatgtgccacgtggctatgagaagaatgtatattctcttgttttggggtggagagttctgtacaggtctattatatccatttggtccaattttgagtttaggtcctgaacatatctgttaattttctacctcaataaagtttgtaatactgtcagtagggkgttgtagtctcccactattattgtgtgggagcctaagtctctttgaaggtctctaagaacttgctttatgaatctgggtactcctgtgttgggtgcatatatgtttagcatagttaggtcttcttgttga

SEQ ID NO: 771606 - DNA, 473 bp, Homo sapiens
gggatggaaggaggacaaagaaaactgagtcctcttgtctccattcttggtccactccattccatcctcaacactatcctcatagtgatttaaaaaaaaattccaaaggacaactctagacccgttgtgccctgcttattagcattccctccaagctcccagctgcttagagcaaggctcaaaaaattttctgcaaagggccatatggtaaatattgtagacgtaatagtccaagagacaaagttgaggctactaggtaggtgcagcacttatataacaagagagaagacaaatttccacaaatttcttytgatgaaattcaagatacaataataagcacattttttggggcaatatagttctatatagttctactaacaagaaaaatagattcattttggggggaggataacctttcacttacttgaagttcaaagttagtgttccctatcatcaaatgggttgcaaatgat

SEQ ID NO: 771607 - DNA, 646 bp, Homo sapiens
agcgcccttctgcacaaccgcgggatcccgttaggcacactcttgtataaccagctgttttcactcaacaatatgtcatggacatttttccatgccaattattcccaatctacatcaccatttaagcggccggcaaatactccattatacggatgtattctaaattaatcaaatccccattgataaacatttagtgttgcggtcaagggcacagactctggagcctcagagcgtggcatcattcctggctgtgcaactccccagctgggtgatggtcagcagaaacctagcatctctgagaagtttcctcatgtattaaatggaggtgcggttgtccctcggtatgcgtggggaattggttccaggagccccatacyaaaatccacagatgctcaagttccttatataaaatggtgtgatatttgtatataacctgcacacatcctcctgtacactttaaatctctctggattacttataataccccatacaatgccaacacttcatttcattcttgtggattcaatgtagtagtaattggcgcatggcaaattcgggttttgctttttggaacttggcggaatttttttttctggaatattttccatgcatggttggttgaatccacagatatggagggttggct

SEQ ID NO: 771608 - DNA, 576 bp, Homo sapiens
gaaacccaacgctactcagccttccttcaggattttctccccaacttttttccagctagaagtcttccccgagttcctaaaatcttggattttggagaccagtcaggccttttcttttcgtctagggcataggcttcccttcaggcagtgagcagaaggaatgagctggggtagggggagagggaagagcagatctattaatcgccccaccccacaataactgcacatgcctgggagcccctggagcgcaggccacaccrtgccaggtcctccgagtcgggaaagactcgctattcccgcttccccagcccggagcaggggctaatggaaaaggctgcagcccccggcgcgcgcagcctcctgcttcttggactttggtgaaattgtggctgcgggcccgcgctgcttccgatccacggcgccgctcaagcgaaggctcagggggtcccccgcccgaggcggccccagagccgcccctctggtctccatcccggagcagcgcccttccaccctccttgggcggcgctgccccagcggccgggtgttttcaccgccgaccgcgagcttcctaccgtt

SEQ ID NO: 771609 - DNA, 626 bp, Homo sapiens
gctggagcccgggggtccctaacgcctgccttggctcttcacttcttcctgaggttctcctcaccatgaaactactcccaaatggagatatggttccattccattgcctggattctgctctccatttatgccttgaggcagatggagccaaaggaatgtcacactgtcccaccatcatctcagggactgccctgtttggaggggcagtggtgcccagcaatggagcaaagtcatagggaacagagctgcacagccttggtcacactccttaaamtctttgtgctcccactgttgtgagaatttaatgatatcttcatatgcgaaggacttaacacagtacctgccccctgaggagcacaggagggcatacctcccagggcagttcagagggttacatgaaataatgcctgtaaagcccttagcacagggcctagcacttaagagagggctcagtcatgtggccagtagtataatcagccacttcttttgatgggtcagctatatgctacaaactaaggctctttacatatacatttgaatctttatggaaacctagaatgtagacaaaattattgcatatacaaggaactcagaatcaggctaagtaaattatccaatgtcacacc

SEQ ID NO: 771610 - DNA, 573 bp, Homo sapiens
gcgccaatgacatggcatctaacttctcccaaagtgagggatccaaagcagagagagaatgcccaagaaggaagccatagtacctttttttttttgagagggaatctcactctgtcacccaggctggagtacagtgccacaatctcggctcactgcaaccttcgcctcctgggttcaagygattctcctgcctcagcctcctgagtagctgtgattacaggcatgcaccaccacgcccagctgatttttgtatttttagcagagacgggatttcaccatgttggtcaggctggtctcaaactcttgatctgcccacctcggcccccaaaagtgctgagattacaggcataagccactgcgcctggcccatagtaccttttataatccactatcagaagtgacataccaaccaccctaggtacaatgatgaagtaacggcaggagatggggatcactgggcaccgtcttggaggctggctaccccagaatcttagaaatagtggcatcttgttcccttaatgacagctaaggaagctaaggtccgagagttataacctctgagtgagttggcca

SEQ ID NO: 771611 - DNA, 617 bp, Homo sapiens
ccgctaaacctttatcaggttctgctacaagggaacctgaccaggaggaaacagaggcaaggagggctaagaaactttcccaggagcctccccagaccacacagtagtagatttgaacccaggtagtctgagctcatggtctttaccactgctcttcatacgtaaagaacttgttatgtgccaatgaaagttatgtctcaataaacctcagctctagcctccttgctcagttgctgagcattgaaagtcaatcagacatgattcttgtgcttctcatagcctgcaaactcatggacgagacaaacatagtcaccagtggcagccagtggttacaggcataaacacacrcacacacacacacacacacacacacacaaacccacatacatacacatatataagcctacacacacatacatatacaaacctatacaaacacattaacacacacggaaacctatacacatatgcacattcacacatgcatatgcacccaagccatacccttacagtggaatcccctacagctgctaaaaaagaaagtcataggctgcatgttctaggaatgtatttgttaatggaataaaaaaaataaacaatattttggaaatttcaat

SEQ ID NO: 771612 - DNA, 409 bp, Homo sapiens
gcaaaggagaattaaggtagcagttagaatttaagtttctaggcagggcatggtggttcacgcctgtaatcccagcactttgggaggctgatacaggcggatcacttgaggttaggggttcgacaccagcctggccaacatggtgaaaccctatctctattaaaaaatacaaaaattagccaggcatggtcgcgcacacctgtaatcccagctactygggaggctgaggcaggagaatcccttgaaccagggaggcggaggttgcagtgcgccgagataggcatcactgcactccagcctaggagacagagagaggctccgtctgaaaaaaaaaaaaaaattcagtttctaatcagctgactttaaaacatagtatcctggattattcagtgtgcccaacgtaatcaca

SEQ ID NO: 771613 - DNA, 651 bp, Homo sapiens
acatttctttcattcttttagattattttaattgaaatataacttaaatgcaacgaagtgcacaattaagagttcaactcaataaagtgaacaaacttgtacataaaccaacaagtttaacatattagttattatcaaatattacccagcagcacatactatgcctcctcccagtcagtaaacttcaagggtgactactattctgacatattgatatagattaattttgtgtgtttatgaatttatattaataaaataatattatttatacacatcaatatttgctttttcttttttaacagtatgacaataaaattccatgatattattcagagtatgggttattacatcaccatccactaaaaaacaagcataacaaaaacaaatgaaaataaacaaagtgaagcaaaccatgttggtaacctagaaaataaaaaggaatctacaaaaagaaaaccyacagaaaacattctaaatatgaaataaaaattatttccttgtgaagttaagacctcaaggattcccaattttactctttagtcaacataatacagagatgcctagcaagttaaccaagacaagacaaaccagtaaaaggtatatcatttagaacaacacaaaaagtttacatttaatcgaagagaatatgat

SEQ ID NO: 771614 - DNA, 547 bp, Homo sapiens
agagttaatttcccaaacttcaaactggttggcttaggactgggctcaggggaagggaacccagaagcccaacatgtcagcaaaagggtaaagttttattttttattcattattattattttttaaccagctgggcttttggcctccctctacttgtccaagctgataaaacacctcgggatttttgaactgtccttatctcacccttgttttattttgatacatgttttctaataacctggtttgtctcttcctgccttcggrtcatcaaactccaaatggtcatgtaattggagcctttgacaaaggccccttctgctgggaaccctcaaataggcctctgagggagttctgactgctggttccacagaacaccgccccctgtcagcaggaagcagtaaagatcagtcttcatccttatccttatcctcattgcaagggcagttagacgtacttccttagagggcagaatgagacaacgaggtgggagggggtccgtggcaaaattccaaccggcctatgtactgcgtgcacagtgaggtgcaac

SEQ ID NO: 771615 - DNA, 546 bp, Homo sapiens
aacaatgatcctatttccaaaaaagattacttctgaggttctgggtgaacttaaatagcttgggagacaacattcaactcacagcacttgttatagcccatatggttcacaactatttagctaaaaacagaagtgaataaaaatcaaatgatcacgtaactggcttcttaaaatagatttaaaaatctgactggcgaattgactaaataatgcaaattattctttactaaaagcatcgagcaaacctcaatataatacattgaattcgttttgggaacataagtctttaacaaaattgtattgagtgattcattaactttcgaacactctctttcacgtctttgttcctgaggctgtaggttaaagggttcaaygtggggatgatgactgtataaaacacagaacctactttgactatgagccatgagtttttggagttgggtacacaataaaggaacaggacagtcccgtggaaaatagtgatggcagtcaggtgggaagcacaggtagagaaagctttttggtgcccaacagcagaaggcattt

SEQ ID NO: 771616 - DNA, 591 bp, Homo sapiens
atttgtatgaatcttaattttaaattgtatatctttatctatatttatatatacatatataattgtgctttaatatttcatattacacacaactgtctccctaatagctatttcaaacattcaatattctaaggcctcattctaccactttcttctcattgctagaaaatagtttatattttacagagaaaaataaagaataggaaataarcacacactcaacttacttacaaagttatggtataaacatgtgaattcatcagttactccctttcttcttctcatctgtagggagagtgtgcccctcctctctgaggttaatctcttcaactgtgttttgtcgattaaagtacctatactattactaaaagtcataaacgtttagcatatcatgatatttatgtcaaatgtatctgtaaaaatattacctcaaatctactcccttttagtttcccttattcattgcaatgtttctctataggcatctacactggtttacacattctcacttcagcctacaaaaataggacttttgtctcaaaaaacttaaacccctttttatcataatcagaaagaacattaattatactg

SEQ ID NO: 771617 - DNA, 619 bp, Homo sapiens
ttgtcactgaaagtaatggtgataaataactatatgatggctatataattgagggaacatattattagtggaatttttaatcagaccacttaaagattctcttaagtagatgttctatatatccatcataatgagataaacttggaacaggtaaaaatgtaatgtatcaatacagaactgtgaccatctgacaagacacaatacgccccccagccaaattttactattatgtttttatgtatgtttatyctttcaaaggactcttttgccacgatcatatgactactataatctgctcaatgcttttttgattttgctgatatgtttcctttgttgtcatataattatgttttaccatgagaattcattgctgtatcatataaatttacatacagcttgtgtacaataatattgataattactattttttcttgttttccagatgagggaacaaaagtgctgaaagacaaaactatttttccctaatcaaaaagactataaattatcaagtaagactcttagtgaagtcgaagaccttgaaaacacactaaccacatttgtcttcactcctttacatcaagcctcttctgggttcctcctaccctaccttctcaacttc

SEQ ID NO: 771618 - DNA, 619 bp, Homo sapiens
ttgtcactgaaagtaatggtgataaataactatatgatggctatataattgagggaacatattattagtggaatttttaatcagaccacttaaagattctcttaagtagatgttctatatatccatcataatgagataaacttggaacaggtaaaaatgtaatgtatcaatacagaactgtgaccatctgacaagacacaatacgccccccagccaaattttactattatgtttttatgtatgtttatcctttcaaaggactcttttgccacratcatatgactactataatctgctcaatgcttttttgattttgctgatatgtttcctttgttgtcatataattatgttttaccatgagaattcattgctgtatcatataaatttacatacagcttgtgtacaataatattgataattactattttttcttgttttccagatgagggaacaaaagtgctgaaagacaaaactatttttccctaatcaaaaagactataaattatcaagtaagactcttagtgaagtcgaagaccttgaaaacacactaaccacatttgtcttcactcctttacatcaagcctcttctgggttcctcctaccctaccttctcaacttc

SEQ ID NO: 771619 - DNA, 625 bp, Homo sapiens
atatattgtcacatatgtcctgagttgtctcatacaacctcattatatgatgtagaacctgaagcccagagttattaagtaaacttagtcttatagacattgtttgattgtatccatagaaattgctcataatatatcttttaataaaatacaataaaacagatctgtcttaaaakatagtgttcttaaatactcttacagaatattgtaatgtgtttatgttaaagtgatgttagaaatttcacaaaattaacggcccataaactctcaaagatcactcatgtcacttctcaagcagggcaggaggatcccagaagtgactgaagatagaaggaagaaataacgtttgctatacggagagtaatttatcttgtttatatcaactaggcacttggtcattaatattggtgccaatagaaagtgatgtggcaggtcattgcattgaaaaattgcaggaaacaagtagaaaataaagaaatcagtgccccctaaagtcgtgcagcctgacagcctttagcatatatcctttgtattggccatcttctgagtggtattttataatgcattaatcactacagtgtgcttataagcttaggttactatgtgatctttaaatgtctaatgt

SEQ ID NO: 771620 - DNA, 359 bp, Homo sapiens
gagctgtatcactcactgcaaaggtctgcggcttcactcctgaagtcagcaagaccaagaacccaccagaaggaagaaagtccggaggcatctgaacatctgaaggaacaaactccagacacaccatttttaagagctgtaacactcaccacaagggtccccggcttcattcttgaagtcagcgagaccaagaacccaccrgaaggaataaattctggacacaatgggaggggctgccatgaaggtctctgacatggcctgcagacatttccccatggtcttgggattaacattaggctccttgctacttatgcaatttctgcagccagcttaaatttctcctcaaaaaatggggtttt

SEQ ID NO: 771621 - DNA, 656 bp, Homo sapiens
tcgggttgtttctttacccaaaacctttatgcaagcaaaacaaaacttaacttggaggcagttttgtctgtcttgaaaaaaaatctagcctcaatcacaaccaggcaactagctgattggttatataactaggggtctcttctcagaccacacataaatgaggcaaatgactacgtgtagtcatcaggtaattactttgcttctgtcwtcaggctataaaagctcactgcttgtgccgctggagcagagctctctgaatttcttccagttttatgtgttgcccaattcatgaactgtcctttgcttaaataaagtctgtcaagttcattttgtctaaaagtttttcaagagtaagaaagaatgagacagagaaaaaagcaaaaacaagcatcagaattaagagatggagatagagaagaaatataatagtagagtaagaatcctgacagctccatttggattttcagaaccagctgttattaaagctaactagctctggacttttcagaggtagagagctgaataattttggatacatggacttaaaatttttttgttaggagaggctatgattggttcaaattagatttctgtcatttagaactgaaagagtcctgattaatataactacagtatactgttgaataagaatagat

SEQ ID NO: 771622 - DNA, 656 bp, Homo sapiens
tcgggttgtttctttacccaaaacctttatgcaagcaaaacaaaacttaacttggaggcagttttgtctgtcttgaaaaaaaatctagcctcaatcacaaccaggcaactagctgattggttatataactaggggtctcttctcagaccacacataaatgaggcaaatgactacgtgtagtcatcaggtaattactttgcttctgtcttcaggctataaaagctcactgcttgtgccgctggagcagagctctctgaatttcttccagttttatgtgttgcccaattcatgaactgtcctttgcttaaataaagtctgtcaagttcattttgtctaaaagtttttcaagagtaagaaagaatgagacagagaaaaawgcaaaaacaagcatcagaattaagagatggagatagagaagaaatataatagtagagtaagaatcctgacagctccatttggattttcagaaccagctgttattaaagctaactagctctggacttttcagaggtagagagctgaataattttggatacatggacttaaaatttttttgttaggagaggctatgattggttcaaattagatttctgtcatttagaactgaaagagtcctgattaatataactacagtatactgttgaataagaatagat

SEQ ID NO: 771623 - DNA, 563 bp, Homo sapiens
ttttactttgtttttggagactatgtctcactcttcacctatactggagtgccgtggtgaaatcatggctcactgcagcctcgaagtcctgggctcaagcattccactcacctcagcttcccaagtagctgggagcacaggcacatgctaccatgccttgctcattttttttttaatcttctcttagagacagagtctcactatgttgcccagtctggtcccaacctcctgggctcaagtgatcctcccactgcagccatccaaagttctggggtcacaggtgtgagccactcctcccagattttagtgtttctttttttttaattttattattattatactttaagtttgagggtacatgtgcacaatgtgcaggtttgttacatatgtatacaygtgccatgttggtgtttcttgaatcatgtggaatatgatggagattagttttgtgatttgggactgattttgttgaatacttacaaatctaacattttaatttttccattttgcagtaatttgaacacagatatatgtgtgtgtgtgtgtgtgtgtgtgtgtgtgtg

SEQ ID NO: 771624 - DNA, 427 bp, Homo sapiens
tgagtccagcagccacgctaatcgtttttaactggctgatgggtgcccggttattttcctccaattctaaggaaggataggacagaatagcaagtgaaagtggttcagtattactcaccgctttggagaagcgccgtacgggccaccaaatgttaccggygggtctttgttcttagagttcccaagatggtggcaggccactcccaagatggggcgggctgctcccaagatggcagcaagccttttgttctctgacctggggttcttggcctcacggattccaaggaatggaaccttgggccatgcgatgagtgatatagctctattagaagccatgggtcacagaaggaaccatggaacccagtgactagtgttcagctggattaggacgaacctgggcacttagccgtgcaggaacaacggcaag

SEQ ID NO: 771625 - DNA, 607 bp, Homo sapiens
aatttgcattgatcagattcactgatagcatatttagtctgatacaggctacaagtggaattcatgtttgtttccccatagggacataggtactttaagcaaataagaaatatttgaataatagtaaaataaattacattatgaatctattatttgagagtattttaatgatattctttataaataaaatagaatttaacggctgggaaatgtatttggggataacatttaatttatttcaatattctattaggatagaaatagagggattattctcataaatgctaatggttgtttattattcaagtttatctttctctggtaagtaatatggtgctataataagatcttcttcacttaactataactttttggaaaggtcaaatattccattttggggttaaggaaattctaggacaatgcccytggttaagcagaggttatgatattgcatatacatatatgcaagtatacatacttgcatgcatacatacataaatggtgagctaaagaaagttgtaaacctggtcaatcaactaaaaataactttaaaggatagatctttatgtgatttggggcatttaattcgaccatagttaaaagaatt

SEQ ID NO: 771626 - DNA, 616 bp, Homo sapiens
tgttttgacttccaattatttataaagtattttaataatcactttagataaattacttctaacatctataacacccattctcttaacagtcaataaaaatctgaacgggaactacatgtacgaggtgtacatgaaatgtttcataaaatggctattgttattaaccttcagtttaacatatgagaaatttggagtactgagaggttaagtgacttgctgaagtcacatggatgataggaaccaaagtcatcctaactctaatactcatactctgtctaccatacaatgcttccctggatagacatgaaataggttctgataggtgggaatgaaaatctgagaacacgctttgagtgtcatcaataaagaagtatcctggagataggtagatagggatgtagaaaaaacagcagaaatgaaatagcatggggttcaaagcacagaaatctgatatataagagcaaaggaayaatggctcaaaataaagatggcaacagagggatggtgaggaggggagggagtgtattaaacttgttaaatattaaaataaagatacttaaaaatgaaagtgtataaaatgaaagtcattaaatttataaagaatgaaataccaaat

SEQ ID NO: 771627 - DNA, 555 bp, Homo sapiens
ttttcttccccctctgaacaggaatggggtcatgataaaaagcccatcaaaaataacttcagatttttaattggctcatgattgattgttctgattggggattctgcaggttgaaaatcatcaatgtaagaaaatgcactaatgcacataggtggttatttcttctacacgatgtcattattacatttttatcaaggtctttcttcattaarattttttttatccatataaatttcttttaaatcagtgtcagtgatcatgcatagtcaaggggacaatgttctttattcccaaatcaaactgtggcatgatatcatcagctctgattctaaataatgttgcctatcttactatcatttgcagccagctattgcaagccccgatatcatgtttattaaaattcacattccatgggacacgctgtgcaagtatgcagagaggctgaatatcaggatgcccttcaggtactttcaaattttactttattttatctcaatatatattaaaatgagtctatctttgcatcaccttagagcaacaaatgcaaccccttct

SEQ ID NO: 771628 - DNA, 610 bp, Homo sapiens
gaaattgctccattagatagcaatatgtgctaaggaaaacaagcaaagcaaggcagggggactgaacttttaaatgtgaccagagagggcttaattgagaaagtgacttgaagtaaaggcttgaaggaaaaagattccaagctggggaaagggtgcttgaggctaaggaaaaaatgaatgtgggaatcctgggtaagaacacatttggcttgtgaaggaactgaaggaggctgctgtgactggagtggagtgaccaaatcgatgagggttttcgtcaatctctgctcaagctgctataacaaaatacctaagactgagtgatttataagtaatagaaatttatttctcacaagtttagagactgggaagtcagagwtcaaggtgccagtagacagattcagtgtccagtaagggctcactctttactacacaggatggtgccttgttgctacatcgtctcatggcagaagggcagagaagacaaactttagaactaaaagggctttatagatcatccagttcaactcctacattacatttatgagattcattttttcatgcatatatttctatattcattcactcaaccaatatttactgaagatctatt

SEQ ID NO: 771629 - DNA, 640 bp, Homo sapiens
gcttcacctccctgacaatggtttctaggcacacacctccattctgttcttgcttctattggtttctccttcatcactcgtcaataagaaacaacaacaaaacccaggcatttggccaaatgacctttccacctgtcttatctttctgtctgatttcattctgtgatgacagaatggaaaatccttgaaggcaggtgctatacttattcataatttatattcaagaccaggcatcttttagatgtttattaaattttatataaaagcattaaaaaactttgatggaatgaccctggaaatactttatcttctctttttattttcttcttctcttttagtggctggtagaaaaaggaaaaggttggggggtaagtcatttagatggggaaagacatttctctaaatgtcaatacttatgaaacaccattttamacctttataaatgattatcttcctcagtactgatgaggcagtttcacattgctgctcaatttatttactcaggagaccaatttatttcactacctctgtactaactgtttgcattgacatctaggtctgctttgagcaagcaactgtgacaagttgtttattgaactgtaaacaggtattgtctgaagctaaacaatggctttatcta

SEQ ID NO: 771630 - DNA, 582 bp, Homo sapiens
tagttatatcactaaggcaaaatatatgctttgaaatttcaaaggtcaggaagtcacatttcatgatcatgtgaattctggcttgattgtgtgtatatcccctgagcacaatctcttttggacatctgggattttggttttgttgaattaaaattgccccatgattctaatgtgtttttagacagtggttgcttcttaattattttgaacttaaaatggtgaacttatgaagtgcttagatatggtttaaaaacctgaacaaaaatatactgagaaaaatttcatatttgtacacttctcattcaatattgtttcttgcctccaaatcgcttccataaaatattgcagatttcaatttctgtttgagttgttcatcattccttcmaactatagctgacctttccataaatttgtttttggataaaaatgatgacctagaagatattttaccaagtgaacccttgccaaaacctgataagtggggtccaaaatacccaatcctataaaatgcaagctcacaattttacgaggttaatggaatgaggtgggggtgagcctgttcagctagctgccacagttctg

SEQ ID NO: 771631 - DNA, 549 bp, Homo sapiens
gacaatgcacaggagtattcattataccatgcaaacactaaccaaagaaagctgacatcgtgggactaatatcagacaaagcagatcttaaagaagcattattaaaaataaagagggatactttgtcatgttcaaaagttcaatacccaagaaaaataaaataattgcataactgtatatacttaataaaatattctcaaaatctaaacaaaaatctacaggaaagaactagataaatccatgatcatagtaggagattttgacatatctcttttaatatcsgaatgaacaagtagatactaaaatatcatagagacatagaagatttgaacattattaataaactatacctatgtgacatatgtagaatgctgcttataataactatagaatgcacatcattttaaggcaaaatgaacacttaccaaaattgacaatacacttggctataaaacatatataaacacacttataaagatagagataaagggacaatatactctgactgcagtggaattaatattgaaatcaatgacaaaaaataactag

SEQ ID NO: 771632 - DNA, 585 bp, Homo sapiens
ggtggctcatgttgtaatcccggcactttgggaggctgaggtaggaggattgcttgagcttaggagtttgaaaccagcctgggcaacatagtgagaaccccccacctctatggaaaaaaaatcgaattagctgggcatggtggaatgcacctgtagtcccagctacttgggaggctgaggtgggaagatcagttgagcctggaaggttgaggctgtagtgagccatgttcatgccactgcaytccagtctgggtgacagagaaagaccctgtctcaaagagagagacagagagagagatagagagagggaaaggagaggagaggagaggagataaactttactatgggtaaatggttgagatacagagccaactgtttctgtgccaactacttctgtgagtagttttgggagaggggagacactaatgcctgaaagatgagggacatggaggtggcggttagagtcagggcccaggtgacacattttgatgacctcatggttttgcctatatgaggtctgtataccctagtctttcccagacacaaactgcttatacctacctcctcttcttcaaaatcagaaat

SEQ ID NO: 771633 - DNA, 631 bp, Homo sapiens
gaggcctttgaagagacccctaagaacacagagagtgtttagttaaggacaaccagaagtacacatttacaatagatagatgtgcaaaagacctttttgtagccaaacaagttggaacaaaactctcggtgaatgaaccactgtcattttctgttgagtctattcttaagaggccttcatctgccatcactcgtgtctctcagtgaaaggctgcttaaacagaaagctggattttctgcagtcttagagcrttatagccatttgctactttttttaaaagttaagatgtttgtgtaaagaaatttctaatgtaaagatgatgattttgaaaaattttatatattcctaatatgcatgtactttttcttatcacatatatttaaacttacagatggaaattgcccaatgtgcaaattgttaagtaccacactttacacagcatttcaaaaagcaataaaattgacactgtcttctcaaagacccaatatttgccgaagcaaatagctgtctctgtctagatgaagaagctatttttctatgattctgtatatttgtatattttgaagtactcttaatggtcactgggggccacaggaaaacctttataatactttagttttgcattgtggag

SEQ ID NO: 771634 - DNA, 552 bp, Homo sapiens
tggatatcaagttttcccagaacaatttattggggagacagctttttctccagtagatattcttggtgcttttgttgacaattagttcatggtaaatatctggatttatttctgggttctttattttgctccactggtctatgtattcgtttttatgccagtattatgctgtgttagttactatagctttgtactatgtttttaagtcagatagtgtgattcctttagctttgttctttttgctcaaggctgttgtggctatgtgggtttttttcaaactaaaagcttctgtaaagcaaataaaacaatcaagagtgaagagacaacatatagaatgagagaaaatataarcaaataatatgttttataagagatctatatccaaaatatataaggaacttctataatgcaacaataaaaaacaagcaacccagttcaaaaaataaaaataaaataaagaacttgaatagacatctattaagagatacaaaagatatacaaatagacaataagcccatgaaaagatgctcaacatcattaatcattaggaaa

SEQ ID NO: 771635 - DNA, 619 bp, Homo sapiens
gttttccattataattcattgttttttcatgatgctttgaatttataagttatttatgaaagtttaagccttcattcatatgatgaccctgataatatagagaaatagaagagttctctaattcattgatgtggaaaatacaagaaaaagcaataaggagttttaccaaagtcacagtgggcctcctataaagttggaataaaaattcatatttcaagaaattcccatatgggagcttatttttacagtagaccagagtggtaccttagaattaagagcacccgttgctcacctgtgtgcattgcacaactcttagcatcattgtgccttgacttggccacttgyagaggctcagtttgaaagaatacatgaatggaccagtcatcccgtcaccaacgtttctttctttttctttttttttttctgtactcgagttgcttaaattttcttttatatatatatatatattttttttttattatactttaagttctaaggtacatgtgcacaatgtgcaggtttgttacctatgtatacatgtgccatgttggtgtgctgcacccattaactcatcatttacattaggcatatctcctaatgctatccctccctcaaccct

SEQ ID NO: 771636 - DNA, 598 bp, Homo sapiens
gtctaaggtgtctgttgtccttaggattatttctttgagcaaaaatgccaggagtggaattcctggatgaaaagataaggttgttgaataattattgcaaattctttgcaaaggttatgtaataatttatatgtcaacatcactgattagatttccttcttcatactacgtggagttcatttaaaaacaaaaataaacattatacaccatattctgctataacacaaatcaactatgctccctaaaccaaaggaaactgyagcgtgaagtcctttgacacaggggctgtctctttttttccatcatttcttgacagtagattaccaattgtaagtaataaaaccacctagaggggctgcatttcagagtagagctcaaagctagacagctcctagtgtgatgccctttttggctggctttctgtccaagtaattccatctcattcatgttcaatcaactaggaacttctactagaattttgaaaatgatttgtcattagtggtaaatagtttaaaatgtttaaaggcaaagtggcactattaaattttaactttttcattcatttatttcttactacacatattaatagcagaaacat

SEQ ID NO: 771637 - DNA, 598 bp, Homo sapiens
gtctaaggtgtctgttgtccttaggattatttctttgagcaaaaatgccaggagtggaattcctggatgaaaagataaggttgttgaataattattgcaaattctttgcaaaggttatgtaataatttatatgtcaacatcactgattagatttccttcttcatactacgtggagttcatttaaaaacaaaaataaacattatacaccatattctgctataacacaaatcaactatgctccctaaaccaaaggaaactgcagygtgaagtcctttgacacaggggctgtctctttttttccatcatttcttgacagtagattaccaattgtaagtaataaaaccacctagaggggctgcatttcagagtagagctcaaagctagacagctcctagtgtgatgccctttttggctggctttctgtccaagtaattccatctcattcatgttcaatcaactaggaacttctactagaattttgaaaatgatttgtcattagtggtaaatagtttaaaatgtttaaaggcaaagtggcactattaaattttaactttttcattcatttatttcttactacacatattaatagcagaaacat

SEQ ID NO: 771638 - DNA, 627 bp, Homo sapiens
cttttctgagagtgaagattgctgcttgatgcctagaatatcaaccagagaagagttcaatggaaactgcttggaaataacttatagcacttaaatattgctatatttttacaaagtttattcataattttaaaaattgtataaagattttaattcctacagaggctttttaaatagataatttaaaatatctaacaatggattttgattgagtagcaagcaataatcttcatgaaactcatgcgattgatcacattgagacttggtggagaaagtatctaatagtaatacctaagttcactgcagtctttgtgagtggraaggaatatctttcagctggacagaaataagacaacatgaagcaatcacacagtgctaccttacagccagtggctacgtgtcttcaataaagagcaagtacctcagaagaatcaaaccacagcctgaaatctggccttcacaataacgaaagtgtaaatgacaaatgcaatatttgatttatatagtttttctttttttttttttttttgccattctcaaatatctgacaattttaaaggaatggattgatttaggtacagaagctatctttggcaaactattccaatagtctttaaaatactcatt

SEQ ID NO: 771639 - DNA, 650 bp, Homo sapiens
agttccagattgtgtgaaatgcaccaaaaaaaaaaaaaacaaaaacaaagaggttttgacatagtaagtctactaatcactttttgtgactggaattagccaacagttagctttgagtagaaaagattaagaatgtcacatatttaatctgaggaaagagaaattaataatcccgcttctattcctgccccttactatcaaacaccatattagctaaagccagaaccccagagtaataatccagaactctgacatagcctagaggatggccattctatggaaacatatatggtgcaactgtgagatgycaaccagacatacagaagttgagactgagttgggagccagaaaggtggagcagcagtgagaaagagtaaagtttgagtccaaaaccatagcaaaaatggatttgaggaatgttccaaatctcccacactctgctgccagagcccagcgttgcatgagaactgaatgctaattttccttttaaggataatagctatatttccttactcaagtactttataaatgtcataaggtgaagaaaattttattatttaagcagttgtctcctaaattcctcttagaagaatcatcttcctttggagaaatatcttgataattgattaggaaaaaaagctctactaggg

SEQ ID NO: 771640 - DNA, 650 bp, Homo sapiens
agttccagattgtgtgaaatgcaccaaaaaaaaaaaaaacaaaaacaaagaggttttgacatagtaagtctactaatcactttttgtgactggaattagccaacagttagctttgagtagaaaagattaagaatgtcacatatttaatctgaggaaagagaaattaataatcccgcttctattcctgccccttactatcaaacaccatattagctaaagccagaaccccagagtaataatccagaactctgacatagcctagaggatggccattctatggaaacatatatggtgcaactgtgagatgtcaaccagacatacagaagttgagactgagttgggagccagaaaggtggagcagcagtgagaaagagtaaagtttgagtccaaaaccatagcaaaaatggatttgaggaatgttccaaatctcccacactctgctgccagagcccagcrttgcatgagaactgaatgctaattttccttttaaggataatagctatatttccttactcaagtactttataaatgtcataaggtgaagaaaattttattatttaagcagttgtctcctaaattcctcttagaagaatcatcttcctttggagaaatatcttgataattgattaggaaaaaaagctctactaggg

SEQ ID NO: 771641 - DNA, 579 bp, Homo sapiens
gagaatacatttgttaaagaaaacaacaccatgaaataactttaaaatacttttaagttaagagaacacaatactccctcaaagcaataattctcagagctttttataggaaaagagcataagcaacagtgacacatgagrgtgaacttggtttatcagtattttaatctgggtctttaggtaataattatgaagccatatgctaataaaaagcactcatgaattaagtactttttggtctgctatcctgaagttgccagactctgaaatgaggaggcagacacagtgagggaattaaaaaggaaatagtttcctcaggaaattctactctccttaatctaatctttgcacagctgcaatacaattaaggaacaccagggtcaagttacagcaagagggttttatttgttatctttttgtttgtttggtttttttttcttttggtttaaaaaaacccacatgacagtgtatctattagaaaaaaacacaacaacaacagacactggctctctcaaaaacctctgagaattttttaaaaatttaatttcaaaacaacagggaatggggaatcatctgagt

SEQ ID NO: 771642 - DNA, 579 bp, Homo sapiens
gagaatacatttgttaaagaaaacaacaccatgaaataactttaaaatacttttaagttaagagaacacaatactccctcaaagcaataattctcagagctttttataggaaaagagcataagcaacagtgacacatgagggtgaacttggtttatcagtattttaatctgggtctttaggtaataattatgaagccatatgctaataaaaagcactcatgaattaagtactttttggtctgctatcctgaagttgccagactctgaaatgaggaggcagacacagtgagggaattaaaaaggaaatagtttcctcaggaaattctactctccttaatctaatctttgcacagctgcaatacaattaaggaacaccagggkcaagttacagcaagagggttttatttgttatctttttgtttgtttggtttttttttcttttggtttaaaaaaacccacatgacagtgtatctattagaaaaaaacacaacaacaacagacactggctctctcaaaaacctctgagaattttttaaaaatttaatttcaaaacaacagggaatggggaatcatctgagt

SEQ ID NO: 771643 - DNA, 530 bp, Homo sapiens
agtgagatactaaattttgcacattatctcaaatgcaagtgtgaattactgccgtgagtcctcaggcttcactacataggattggtaatctgttgaaagattccacagaaatgtatttttacaaaagaatgaaaatatcaacctgattgaaattaatctgacggggagaagtccagtttgatgagytcacccatagcaaagctttggcttcaaataaacagatggcccagaactcactggcttaatgcctgaggcttcaagagccttagtgtgggaggcataagaaatatagaagagtatcttcaccaaaagcttttgaggtctttggaatataaatgatatattcttgagattcttctaagtgactgtaatgcaaagtggagagaagtagaccccactttaccttggaaaaagatgaagtttagacaccataggcttctttgcatgtggcttcttaccagtagtgtgcaacaaaacatcccaagagataatgatgcctagcagagtgttggctgaaatcactgtgccca

SEQ ID NO: 771644 - DNA, 472 bp, Homo sapiens
agaatctgcgagtggatatttggacctctctgaggatttcgttggaaacgggataactgcacctaactaaacggaagcattctcagaaacttcttggtgatgtttgcattcaaatcccagagttgaaccttcctttgatagttcagctttgaaacactctttttgtaggatctgcaagtggmtatttggaccactctttggccttcgttcgaaacgggtacatattcaaataaaatctagacagaagccttctcagaaacttctctgtgacgattgcattcaacgcaaagcgttgaaccctcctatggatagagcagttttgaatctctctttttgtggaatctgcaagtggatatgtggtcctctttgaagatgtctttggaaacgggaatatcttcacattaaaactaaacagaagcattctcagaaacttctctgtgatgtttgtgttcaactcacagagtttcacgtt

SEQ ID NO: 771645 - DNA, 472 bp, Homo sapiens
agaatctgcgagtggatatttggacctctctgaggatttcgttggaaacgggataactgcacctaactaaacggaagcattctcagaaacttcttggtgatgtttgcattcaaatcccagagttgaaccttcctttgatagttcagctttgaaacactctttttgtaggatctgcaagtggatatttggaccactctktggccttcgttcgaaacgggtacatattcaaataaaatctagacagaagccttctcagaaacttctctgtgacgattgcattcaacgcaaagcgttgaaccctcctatggatagagcagttttgaatctctctttttgtggaatctgcaagtggatatgtggtcctctttgaagatgtctttggaaacgggaatatcttcacattaaaactaaacagaagcattctcagaaacttctctgtgatgtttgtgttcaactcacagagtttcacgtt

SEQ ID NO: 771646 - DNA, 472 bp, Homo sapiens
agaatctgcgagtggatatttggacctctctgaggatttcgttggaaacgggataactgcacctaactaaacggaagcattctcagaaacttcttggtgatgtttgcattcaaatcccagagttgaaccttcctttgatagttcagctttgaaacactctttttgtaggatctgcaagtggatatttggaccactctttggccttcgttcgaaacgggtayatattcaaataaaatctagacagaagccttctcagaaacttctctgtgacgattgcattcaacgcaaagcgttgaaccctcctatggatagagcagttttgaatctctctttttgtggaatctgcaagtggatatgtggtcctctttgaagatgtctttggaaacgggaatatcttcacattaaaactaaacagaagcattctcagaaacttctctgtgatgtttgtgttcaactcacagagtttcacgtt

SEQ ID NO: 771647 - DNA, 611 bp, Homo sapiens
atttcgttggaaacgggataaaccgcacagaactaaaacagaagcattctcagaaccctcttcgtgatgtttgcattcaactcacagtgctgaacctttctttgatagttcagctttgaaacactcttcttgtagaaactgcaagtggatatttggtcctctctgaggatttcgttggaaacgggataaaccgcacagaactaaacagaagcattctcagaaccttcttcgtgatgtctgcattcaactcacagtgtggaacctttctttgatagttcaggtttgaaacactctttttgtaraaactgcaaggggataatggcacttctttgaggcataccgtagtaaaggaaataacttcctatagaaagaagacagaagctttctcagaaaattctttgggatgattgagtggaactcacagagctgaacattccttgcgatgtagcagtttagaaacacactttatgcagaatctgcaagtgcatatttggacctctctgaggaattcgttggaaacgggataatttcagctgactaaacagaagcagtctcagaatcttctttgtgatgtttgcattcaaatcccagagttgaactttcctttcaaa

SEQ ID NO: 771648 - DNA, 621 bp, Homo sapiens
ttgcattcaactcacagtgctgaacctttctttgatagttcagctttgaaacactcttcttgtagaaactgcaagtggatatttggtcctctctgaggatttcgttggaaacgggataaaccgcacagaactaaacagaagcattctcagaaccttcttcgtgatgtctgcattcaactcacagtgtggaacctttctttgatagttcaggtttgaaacactctttttgtagaaactgcaaggggataatggcacttctttgaggcataccgtagtaaaggaaataacttcctatagaaagaagacagaagctttctcagaaaattctttgggatgattgagtggaacwcacagagctgaacattccttgcgatgtagcagtttagaaacacactttatgcagaatctgcaagtgcatatttggacctctctgaggaattcgttggaaacgggataatttcagctgactaaacagaagcagtctcagaatcttctttgtgatgtttgcattcaaatcccagagttgaactttcctttcaaagttcacgtttgaaacactctttttgcaggatctacaagtggatatttggaccactctgtgtccttcgttcgaaacgggta

SEQ ID NO: 771649 - DNA, 588 bp, Homo sapiens
gttcaggtttgaaacactctttttgtagaaactgcaaggggataatggcacttctttgaggcataccgtagtaaaggaaataacttcctatagaaagaagacagaagctttctcagaaaattctttgggatgattgagtggaactcacagagctgaacattccttgcgatgtagcagtttagaaacacactttatgcagaatctgcaagtgcatatttggaccwctctgaggaattcgttggaaacgggataatttcagctgactaaacagaagcagtctcagaatcttctttgtgatgtttgcattcaaatcccagagttgaactttcctttcaaagttcacgtttgaaacactctttttgcaggatctacaagtggatatttggaccactctgtgtccttcgttcgaaacgggtatatcttcacatgacatctagacagaagcattctcagaagcttctctgtgatgactgcattcaactcacggagttgaacactccttttgagagcgcagttttgaaactctctttctgtggcatctgcaaggggacatgtagacctctttgaagatttcgttggaaacggaat

SEQ ID NO: 771650 - DNA, 503 bp, Homo sapiens
attgcacttctttgaggcctaccgtagtaaaggaaataacttcctataaaaagaagtcataagctttctcagaaaattcttttggatgattgagtggaactcacagagctgaacattccttgygatgtagcagtttagaaacacactttctgcagaatctgcaagtgcatatttggtcctctctgaggaattcgttggaaaccggataatttcagctgactaatcagaagcagtctcagaatcttctttgtgatgtttgcattcaaatcccagagttgaactttcctttcaaagttcacgtttgaaacactctttttgcaggatctacaagtggatatttggaccactctgtgtccttcgttcgaaacgggtatatcttcacatgacatctagacagaagcattctcagaagcttctctgtgatgactgcattcaactcacggagttgaacactccttttgagagcgcagttttgaaactctctttctgtggcatctgcaagg

SEQ ID NO: 771651 - DNA, 529 bp, Homo sapiens
aactagacagaagcattctcagaaaatactttgtgatgattgagtttaactcacagagctgaacattcctttggatggagcaggtttgagacacactttttgtagaatctacaagtggatatttggacctctctgaggatttcgttggaaacgcgataactgcacctaactaaacggaagcattctcagaaacttcttggtgatgtttgcattccaatcccagagttgaaccttcctgtgatagttcaggtttgaaacactctttttgtaggatctgcaagtggatatttggaccactctgtggccttcgttcgaaacgggtacatcttcacataaaatctagacagaagccttctcagaaacttctctgkgatgattgcattcaactcacagatttgaaccctcctatggatagagcattgttgaaactctctttttgtggaatctgcaagtggatatgtggacctctccgaagatgtctttggaaacgggaatatcttcgcataaaaactaaacagaagcatcctca

SEQ ID NO: 771652 - DNA, 596 bp, Homo sapiens
agagcagtttggaaactctctttgtgtagaatctgcaagtggagatatggaccgctttgaggcctatggtagtaaaggaaatagcttcatataaaagctagacagtagcattcacagaaaactcttggtgacgactgagtttaactcacagagctgaacattcctttggatggagcagtttcgaaacacactatttgtagaatgtgcaagtggatatttgggcctctctgaggatttcgttggaaacgggataaaccgcacagaactaaacagaagcattctcagaaccttcttcgtgatgtttgcattcaactcacagtgttgaacctttctttgatagttcaggtttgaaacggtctttctgtagaaactgcaagtagatatttggacctctctgaggatttcgttggaaacgggataaaccgcacagaactraaacagaagcattctcagaaccctcttcgtgatgtttgcattcaactcacagtgctgaacctttctttgatagttcagctttgaaacactcttcttgtagaaactgcaagtggatatttggtcctctctgaagatttcgttggaaacgggataaaccgcac

SEQ ID NO: 771653 - DNA, 537 bp, Homo sapiens
aaactgcaagtggatatttggtcctctctgaagatttcgttggaaacgggataaaccgcacagaactaaacagaagcattctcagaaccttcttcgtgatgtctgcattcaactcacagtgtggaacctttctttgatagttcaggtttgaaacactcttttygtagaaactgcaaggggataattgcacttctttgaggcctaccgtagtaaaggaaataacttcctatagaaagaagacagaagctttctcagaaaattctttgggatgattgagtggaactcacagagctgaacattccttgcgatgtagcagtttagaaacacactttctgcagaatctgcaagtgcatatttggacctctctgaggaattcgttggaaacgggataatttcagctgactaaacagaagcagtctcagaatcttctttgtgatgtttgcattcaaatcccagagttgaactttcctttcaaagttcacgtttgaaacactctttttgcaggatctacaagtggatatttggaccactctgtgt

SEQ ID NO: 771654 - DNA, 407 bp, Homo sapiens
gttcaagaccagcctgaccaacatgaaaaaaacccatttctactaaaagtacaaaaactagctgggtgtggtggtgggtatctgtagtcccagctactcaggaggctgaggtgggagaatcacttgaacccaggaagcagaggttgcagtgagccaagatcacgctattgtactccagcctgggtgacagagtaagactctgtctcaaaaaaatatagtaataataataatcaaatgcaagtatcaaggacctaaartgatcaaaaatttcataaaatcacaaagttggagaactgaaagcactgatgtgaaaacagaaagctctggcagccaaggcagtgtgccataggtttaagatttgacctcgaaatccatggaaaagaagggagcccagaaataaacccaca

SEQ ID NO: 771655 - DNA, 611 bp, Homo sapiens
aactcctgggctcaagtgatcctgctgcctcagcctcctgagtagctaggtctacagacatgtgccaccacgcttggctatgttttatttttttgtagagatggggtcttgctacattgcccaggctggtctcaaactcctggccacaagtgatactgcctcagcatcccaaagtgctgggattacaggcatgagccactgtgctgagccccataataaatatcctaataacaacttggaaagcgtagacttaaaaatactatataacattatttagcagatttctttttttttttttttytcaaacggaaacttgctctgttgcccaggctggagtgcagtggtgcgatcttggctcactgcaagctccgcctcctatgttcaagtgattctcctgcctcagcctcccgagtagctgggactactgggggggtttcatcctgttagccaggatggtctcaatctcctgacctcgtgatctgctagcctcggcctcccaaagtgctgggattacaggcgtgagccaccgcgcccagccctatttagcagatttctaaatattgccattccctgacttataaatgacccatacctataaatgtgcttctttt

SEQ ID NO: 771656 - DNA, 611 bp, Homo sapiens
aactcctgggctcaagtgatcctgctgcctcagcctcctgagtagctaggtctacagacatgtgccaccacgcttggctatgttttatttttttgtagagatggggtcttgctacattgcccaggctggtctcaaactcctggccacaagtgatactgcctcagcatcccaaagtgctgggattacaggcatgagccactgtgctgagccccataataaatatcctaataacaacttggaaagcgtagacttaaaaatactatataacattatttagcagatttctttttttttttttttctcaracggaaacttgctctgttgcccaggctggagtgcagtggtgcgatcttggctcactgcaagctccgcctcctatgttcaagtgattctcctgcctcagcctcccgagtagctgggactactgggggggtttcatcctgttagccaggatggtctcaatctcctgacctcgtgatctgctagcctcggcctcccaaagtgctgggattacaggcgtgagccaccgcgcccagccctatttagcagatttctaaatattgccattccctgacttataaatgacccatacctataaatgtgcttctttt

SEQ ID NO: 771657 - DNA, 611 bp, Homo sapiens
aactcctgggctcaagtgatcctgctgcctcagcctcctgagtagctaggtctacagacatgtgccaccacgcttggctatgttttatttttttgtagagatggggtcttgctacattgcccaggctggtctcaaactcctggccacaagtgatactgcctcagcatcccaaagtgctgggattacaggcatgagccactgtgctgagccccataataaatatcctaataacaacttggaaagcgtagacttaaaaatactatataacattatttagcagatttctttttttttttttttctcaaacggaracttgctctgttgcccaggctggagtgcagtggtgcgatcttggctcactgcaagctccgcctcctatgttcaagtgattctcctgcctcagcctcccgagtagctgggactactgggggggtttcatcctgttagccaggatggtctcaatctcctgacctcgtgatctgctagcctcggcctcccaaagtgctgggattacaggcgtgagccaccgcgcccagccctatttagcagatttctaaatattgccattccctgacttataaatgacccatacctataaatgtgcttctttt

SEQ ID NO: 771658 - DNA, 618 bp, Homo sapiens
taaattttagaaaaatgtctcacatttctaacattttttagtcacacctatgacattctatcaaatcaaataaaggtttttgttttttaaagtttagataataactgtcaaacaattaaccatgctaggtcttttgcccttaaaggtgttctatatactggataatcaaagtgagcaccttgcatggccttcaaggagttatttggaaagaaggcttaaactctaattttaaaaacaaaaatgaaaaaagaagaggtttgtgtttaaggaaatgtttttctttttaatgtaaaatcaagtcatcaaatgttactgattttcaaatctgattaagaatcataaaatctctaaaacaagtaatgagcttcatctcataattcagaactgcaatggagatagccaggtagtgatgaaatctgggtaactggtatatcttactcaaggcctgtttctccaaaacattcttcaagctcatattcactyttttaaactccctttcctctctccttccctttaagtaaaataaacaacttagaaagattgttataaaatacttccatactgtcttttagggatttcttaagagaaggagatttctgtatgtattacatacctaag

SEQ ID NO: 771659 - DNA, 644 bp, Homo sapiens
actagtacgtgagctagaaatctctcagtttgtccttttaactctatcgtattggataaatactctaaaaaatatattctagtcaactcttatgccctgagcttattaatcatttagttcttcccaggttgagattttttaaacatgcttgtaacatgccaaatgaattttggaaatttagttgtatattcatcctacaaatagaaaaactacttcctaaacatttggtgatgtaagttaggcttcctgaccagtgcattagttttaatttcagtagttcrtgtccacaacatttctttagtattcatttgctttgataaccgaatcctagccaatatacacattcacaccattgagacagcataggcctgtgaagcctgacaaacttgaattcagatattgtttcaacagttcatatctgtgtccttgatcacttcataagcctcagtttcctcctctataaaatcagaaaaataattgctactttacatggttgttagagataacgagtatgaagtacctcacactgagcctgtatatagttgatcctcagtaaaacagttatcattataagtaaaatgaggttgagaatgttgctctgttatactgatctccaaatggggctaaaacaatttgcataatct

SEQ ID NO: 771660 - DNA, 592 bp, Homo sapiens
ttgaaagttcattgagaaaaaggtgtaagagatagatggagagggtgggcatggctaagattaggaaaaccagttagtaggataagataggaagataatggtactctcaactagatagtcataacacagagataatactgattaagttgaaaatacrtaaaaagaggcaggtgtttttgaacttgctgaaggagctggaaactttttttaaaaatcaaagacgaggtcctgtttctggcttagacattaataggatggagaataataaatattgaatacttaatattcacaaaatactagaatgagcgttttgcatttatcattttgcttagtcttctagaggagccttaacattcttttaaggttgatggttctccctttttattaagtggaagatccagatgactcagtgattttacaacttgccaattttgaatctcgctcactgagctaggaaacacaagaggagagcaatggtcattttgggaatggaagatgagtctaattttggacaagttgactttgagtcatatataaggaaacgcagagagctgcacagctccagggaggatcattcacatagaccatgact

SEQ ID NO: 771661 - DNA, 592 bp, Homo sapiens
ttgaaagttcattgagaaaaaggtgtaagagatagatggagagggtgggcatggctaagattaggaaaaccagttagtaggataagataggaagataatggtactctcaactagatagtcataacacagagataatactgattaagttgaaaatacgtaaaaagaggcaggtgtttttgaacttgctgaaggagctggaaactttttttaaaaatcaaagacgaggtcctgtttctggcttagacattaataggatggagaataataaatattgaatacttaatattcacaaaatactagaatgagcrttttgcatttatcattttgcttagtcttctagaggagccttaacattcttttaaggttgatggttctccctttttattaagtggaagatccagatgactcagtgattttacaacttgccaattttgaatctcgctcactgagctaggaaacacaagaggagagcaatggtcattttgggaatggaagatgagtctaattttggacaagttgactttgagtcatatataaggaaacgcagagagctgcacagctccagggaggatcattcacatagaccatgact

SEQ ID NO: 771662 - DNA, 610 bp, Homo sapiens
tctattgacacttggtcattagctttccaaaaaaaaaaaagttgttcaagggaaactatcacgtgaaaagtgcagatttatgaaccatgccaaggccttgggtgtcaaggtagtccatgaagccaaactgaaagtaacaatcaagcctttattcacttactgtagtaagagtgaggcaccagcccaccagggttccttttttttttttttcatatgcaggtgaaggtctaatgacatgcagggcaggcaaagggaactgtctaactgcccaggagccacaaacaaaaggctcctgcctttttataaaccccaggggtctccagagcaagaaacagagagaactaagtgtaaaaagtactgagtcaaagtggaaaaaagtggcttagttggaatcctccactaaaaaggtcttggcaragtctcctgaagagtacctcagctgagtccctctaataaagaggcctccaaatggcggcgcctgggctagggatactcgtgggaatgctcagcctgaggtaccctgaattgttgactgcgactctctacaaaaaacagtaatgactggccgtgcaccaagtctggtgtggacaaaggcagttttcccccgagg

SEQ ID NO: 771663 - DNA, 613 bp, Homo sapiens
caatcagaaatgacaaagcggacatcaccaccaaccccacagaattacaacaaaacaaaacaaaaaacctgagactattatgaacacttctatgaacacaaactagaaaacctagaagaaatggatacattcctagaagtacacagcctcccaagattgaaacaggaagaaactgaaaccctgaaccaactaataacaagttctgaaattgaatcattaatgaaaagcctactgactagaaaagccctggaagagacggatgtacagctaaattctaccagacatataaagaagagctttgtcgcaatatggatgaagctggaagtcattatcctaaatcaattaacagaataccaaatactgcatgcttcacttaaaagtgggaggwaaacattgagtacacttaggcataaagaagaaaacaatagacagtggggcctacttaagggtggagggtggcaggagggtgaggattaaaaaatgacctattgggtaccatgcttattacccgaataacaaaattatctgtacacccatcccccacaacatgcaatttacccatataacaaacctgcacgtataccctgaacctaaaataaaatctggtaagaaa

SEQ ID NO: 771664 - DNA, 606 bp, Homo sapiens
aagagagattgctgaataaaatggtagttctgtttagctccttgagaagtcttcatacttttaggttgtactaatttatgttcccatcaacagtatgtaagtgttctatttttctctatatccttgccgatatctggttttttttttttgtctttttaataatggccatttggactgatgtaagataatatctcattgkggttttcatttgtatttctctgattattagtgattttgagcattttttcacatgcttattggccatttgtatgtcatctttgaaatatgtctattcatgtcctttgcccagtttgtaatggggttatttgggttttatttgttgaattgtttgagttccttataaattctggatattatttccttgttggaggcatagttgcaaatattttctcccattatacaggatgtctattccctttgttaattatttcttttattgcgcagaagcttttcagtttaattaagttccatttgtctatttttgttttcatttgcccttgcttttgatgtcttaggcatgaattctttgcctagaccactgtccagaagagttttccttaggttttcttctagtattttcagagt

SEQ ID NO: 771665 - DNA, 558 bp, Homo sapiens
ataatatgtgagatgttaaatttggcccaatatgacacatattcctcaacataaccccattcaccttcctctctttggtaataattacgtagagcagctggtgagaaaatgaagaccagctttgctgtgtccacctccttatagtcacttctttcctatctgctctccaccagcatgggaaaaactggggaccaggtgatcttgaactgatgagaatacactttgaggatacacttcaaccattatcatcttgactcttttccttcctgcctttctgtattataagtaggtgggggaggatgtctttggggttttatcttctatgattgggtttcaaaaatattattttgataccatrctagagtttcagaatattactagaccttaagaaaaagaaaacattttcataatacctgaggttatagatttatcaagcaattgattgttggttcaactatatgacaagattgctgctttttaggtgattttttatactctgatatctccccctaaaattacatataatttaaaccttgtcttgaaaaagtgtgtgtaatt

SEQ ID NO: 771666 - DNA, 600 bp, Homo sapiens
attaataaccagaatatatgagaaacacaactcaatggcaaaaaaaatgtaattagattcaaaaatgagcaaaatatctgaatacagcttgcttttccaagatggcagaagttttttagcgtctctcagacacttggaaatggcaagatagtacataaagatcaactctctgatctttaattcaatagggaaaacaggaactcactaaaattgtgaaggaaacctcagatycctgggaagagaatgcaggcaaaccgtccccgtgacagcatcgaactggtgtgagtgaaggccccatatgtgagagaggcagagagcctccctctgtgaccgactcacctttccactggggatctgagcaacccaggctgaggaagagcactttgtctcttaaactctggagctaacttagggagaggcttggagagactatgagagaaagaccccgggaaaagctgcagaattttcccaaacccaagaataagtgcaggatgccattttgattgcaggcacatacaaagtcagccattctttggtcacccagcagtgtgatcatacaggcattttagtcttggggcagagtttagagggcctaatctg

SEQ ID NO: 771667 - DNA, 627 bp, Homo sapiens
aaaggcctggatgtccaggcagaggtctgctacaggggcaaagccctcatggagaacctctgctagggcagtgtgaaagggaaatgtggggttggaacttccacacagagtgcttactggggcactgcatagtggagctatgagaatagggccactgtcctccagccccccagataggtatatccaccaacagcctgcactgatgcacctggaaaaaccacagacactcaatgccagttgtgaaagcagctggcrgggtggggggcagcgctgaaccttgcaaagccatggagctggagctgccgaaggccatgagagtttacctcttgcatcagcatgacctggatgtgagacatgatgtcaaaggagatcattttggaacttaaaggtttaatgactgccccatattatttcagacttgcacagggcctatggcccctttgttttgtccaatttctcccatttggaatgggtgtatttgcccaatgcctgcacctgcattgtatctaggaagtaactaacttgcttttgatttcacaggctcataggcaaaagggacttgctttgtctcagataagacattgggcttggacttttcagttaatgctgaaaggagttaagactttg

SEQ ID NO: 771668 - DNA, 627 bp, Homo sapiens
aaaggcctggatgtccaggcagaggtctgctacaggggcaaagccctcatggagaacctctgctagggcagtgtgaaagggaaatgtggggttggaacttccacacagagtgcttactggggcactgcatagtggagctatgagaatagggccactgtcctccagccccccagataggtatatccaccaacagcctgcactgatgcacctggaaaaaccacagacactcaatgccagttgtgaaagcagctggcggggtggggggcagcgctgaaccttgcaaagccatggagctggagcygccgaaggccatgagagtttacctcttgcatcagcatgacctggatgtgagacatgatgtcaaaggagatcattttggaacttaaaggtttaatgactgccccatattatttcagacttgcacagggcctatggcccctttgttttgtccaatttctcccatttggaatgggtgtatttgcccaatgcctgcacctgcattgtatctaggaagtaactaacttgcttttgatttcacaggctcataggcaaaagggacttgctttgtctcagataagacattgggcttggacttttcagttaatgctgaaaggagttaagactttg

SEQ ID NO: 771669 - DNA, 627 bp, Homo sapiens
aaaggcctggatgtccaggcagaggtctgctacaggggcaaagccctcatggagaacctctgctagggcagtgtgaaagggaaatgtggggttggaacttccacacagagtgcttactggggcactgcatagtggagctatgagaatagggccactgtcctccagccccccagataggtatatccaccaacagcctgcactgatgcacctggaaaaaccacagacactcaatgccagttgtgaaagcagctggcggggtggggggcagcgctgaaccttgcaaagccatggagctggagctgccgaaggccatgagagtttacctcttgcatcagcatgacctggatgtgagacatgatgtcaaaggagatcattttggaacttaaaggtttaatgactgcccyatattatttcagacttgcacagggcctatggcccctttgttttgtccaatttctcccatttggaatgggtgtatttgcccaatgcctgcacctgcattgtatctaggaagtaactaacttgcttttgatttcacaggctcataggcaaaagggacttgctttgtctcagataagacattgggcttggacttttcagttaatgctgaaaggagttaagactttg

SEQ ID NO: 771670 - DNA, 620 bp, Homo sapiens
gtcaactcaaatgatgctttctagatgattgtaactgcaatctagttaattagttcttatgacaaccaaggaactttttattatgcttaacccctcactagtgtgtgccacctgattggcggaaagtttgagggtaagttgcccagttggcagctgttkgtggatgatgctgacatgatcaggctgaagagctaaacactgaagacctgctagtgtaaaggtcggtgattcccaatgctggctgcaagtgagtacttttaactcatactgatgttcaggttggaaactcaaattaattcaaacagaatgtggggcagagggagccaggacacaggtgtttctaaaacttctcaggggggttcctcatgtgtagacagtgttgagaagctagagagagactctcttttaggctgaaagagaattgtgtcaccgatttcacttgcgctgtgggcagattttagttacaggggctttaacttgaagtgctttctttcattatgtcctcagttcttaaagtgattgggaaacaagcagcatcagcatctgggaactagatagaaatgcaagttttccagcctgacactgaacctattaaaacagaaactctggggttggatccc

SEQ ID NO: 771671 - DNA, 620 bp, Homo sapiens
gtcaactcaaatgatgctttctagatgattgtaactgcaatctagttaattagttcttatgacaaccaaggaactttttattatgcttaacccctcactagtgtgtgccacctgattggcggaaagtttgagggtaagttgcccagttggcagctgttggtggatgatgctgacatgatcaggctgaagagctaaacactgaagacctgctagtgtaaaggtcggtgattcccaatgctsgctgcaagtgagtacttttaactcatactgatgttcaggttggaaactcaaattaattcaaacagaatgtggggcagagggagccaggacacaggtgtttctaaaacttctcaggggggttcctcatgtgtagacagtgttgagaagctagagagagactctcttttaggctgaaagagaattgtgtcaccgatttcacttgcgctgtgggcagattttagttacaggggctttaacttgaagtgctttctttcattatgtcctcagttcttaaagtgattgggaaacaagcagcatcagcatctgggaactagatagaaatgcaagttttccagcctgacactgaacctattaaaacagaaactctggggttggatccc

SEQ ID NO: 771672 - DNA, 620 bp, Homo sapiens
gtcaactcaaatgatgctttctagatgattgtaactgcaatctagttaattagttcttatgacaaccaaggaactttttattatgcttaacccctcactagtgtgtgccacctgattggcggaaagtttgagggtaagttgcccagttggcagctgttggtggatgatgctgacatgatcaggctgaagagctaaacactgaagacctgctagtgtaaaggtcggtgattcccaatgctggctgcaagtgagtacttttaactcatactgatgttcaggttggaaactcaaattaattcaaacagaatgtggggcagagggagccaggacacaggtgtttctaaaacttctcaggggggttcctcatgtgtagacagtgttgagaagctagagagagactctcttttaggctgaaagagaattgtgtcacygatttcacttgcgctgtgggcagattttagttacaggggctttaacttgaagtgctttctttcattatgtcctcagttcttaaagtgattgggaaacaagcagcatcagcatctgggaactagatagaaatgcaagttttccagcctgacactgaacctattaaaacagaaactctggggttggatccc

SEQ ID NO: 771673 - DNA, 529 bp, Homo sapiens
aactttgtttatccaaaggcacagaagtcataataaatgaatggatgcgtaaatacgcccatttttatgaagcattaaaaaaaaacaaacaaaaccttttctttcttagtagggtgctataagaacacggtttcctgtttcctacatgtagtgtagggacaagccaacatttacttctctccaaactggtgagctaattaacctcaaacctgagttgtgtagcactcaaggatacgggtctacatatggkgagcaaattatttaatgaaacttacttgtctgcaatttctctacactttaggaggtattttatgtcacttgcctggccagacacagcatgaaatgagtgacatagtaaaataaaaaaaaaaaattgttagacatagttcaacaactaaagaaaaaaaataagagaacttaaactaaaatataaaattgaacttataaacttaatttttatgaaacaggatacaaattaaagtcagaattcagtaagaagattataaaatgcccatatcaggttttgaag

SEQ ID NO: 771674 - DNA, 593 bp, Homo sapiens
aaatcctttgtcatttagaaatttcctctgccagataccttaaatcatctctctccagttcaaagttccacagatctctagggcaggggcaaaatgttgccagtctctttgcatagcaagagtgacctttgctccagtttccaagaagttcctcatctccatctgtgaccacctcagcctggacttcattttccataacacctcagcattttggtcaaagccattcaaaaagtctgtaggaagttccaaactttcsaacatttttctctcttattctgaaccctccaaactgttccagtctctgccagttacccagttccaaagtcactttggtatttttacagcagtgccctactctctctgatatcagtaacctgtattagtctgctgtcatgcagctaataaagacatacccaagactgggtaatttataaaggaaagaggtttaattgacccacagtttggcatggctgggaaggcctcaagaaacttacaatcacagcggagggggaagcaatcacgtctttcttcacatggtggcaggagagagaagtgctgagcaaagggggaaaatccccttataaaaccattag

SEQ ID NO: 771675 - DNA, 639 bp, Homo sapiens
gaggttttccatttttacttctaatattttatcctttgtttgctgtaggtcagcttgatttctaggcagttgctctgattttctggtatttaacagatataaaatgtcttgttatctcttcaaattcatgaattccaayatttgtctacataattgtttgagcatctttattacgtaaaatacatttcacttggcatagtagtcagataacagaagtttgggagatataaacactatccctaaggaacatactcatctggaggaaaaagaaacatacataaataaatttagttctgtaaaaagcagaaattagtaaatgccaaaatggaggtattgataaaatgtgtgagagtctggagaaaggacagatagatcccagctgaaagaaaaaagaacagatatatgagagccatggtatttcagcctagccccaaagaatggtgatatttgcacaaatgtaattgcagagaagggaaccaaggtggaggtaacaatgtcaccaacagcaaagacaaagctaatcatggaaaagagaagagaactacatccttagagtacattgtggcaaatgtttcacattcaccgttagcttgaaataatagcttcaattctagttccctcagcaacataaagaggaat

SEQ ID NO: 771676 - DNA, 571 bp, Homo sapiens
tgcatgttgctgcaaatgacaagatttcctttttttaaaatgactgaattatctttgaacttcctgtatctacaggtaactatatttcttgcaagacttggaaatttttcaactattgttttgttaaataggttttctatgtctttgcccatctctcctccttctggaccatacaaaatataacgatttaatccttttgttttgagacagagtctcactctgtcacccaggctggagtgcaggggtgtgatcttggtccactgtgacctctgcctcccaggttcccaagtatctgagattttcgtctttttttttttktttttctgtctggtgggttattacaaaagacctgtcttcgagttcagaaaagttttcttctgcttgatctggtctattattgaaactcttggttgtatttttaattttatttattcattttttttcagtctaggatttctgtttggttccttttaatactatctacttcttggttaagtttctcactcagatcatgaattgcttttctgatatttttgtattgtttatctgtgttctcttctatctcactgag

SEQ ID NO: 771677 - DNA, 525 bp, Homo sapiens
aaacatcttcaaacgcaaacgctgttttccaaccattaaaaagtttatgcgctgcttggtttccatggatacctgaggtaatagcctccttcctctcattgaagagtgaatgttgctcagttacttttttcctgttttttttcacttttgtcttcctgacttttttcttccatccctatttatgaaaacaaaaagataactaaattgaaacctgacaatgtaatttgtcagaggaaggcagcctgttttataagctcaggtgatttcatttttgttcacctgtttatttcatgacacttgcaggaaaaagargaattttcatttgatcaaatcatttccatgatccatcaaacacacaagttaaaaagggaaatgctctcagtctttaataacagtcttaatcgtgtgtagagcagagattgacaaactatggcctgccggctaaatctggcccagtgcctttttttttataaataaagttttattggaatacagacacgttcatttgggtagacgttgtcgatg

SEQ ID NO: 771678 - DNA, 521 bp, Homo sapiens
cctttgcagaagtagtttactgacctattatatacaggaaagaatgagggcttgggtggcacttagtagtgttgtcacttttgtcattggccttgacctgactcagtctccgtattgttgagatgggaatgacgggaccctcagtagtgttttgggatataaggcacacggtaaaggaacaacaaataggaattacattccgtcgagattcttttgctagaaagatccaaagaaacctaccttgtgattctagatgttttttaggaaacccaaagaaagtatgaaaaagcccaagccaagtccttccactgttgttcccgggcctgtgtgtgctgtgtgtctttsctgggagaaggtcagagctggagtggggcactcgattccggcaagagaaggcaaacaaaagaagccacaacagtctaggaagaaatctttaatttctattcagctttaaagagtttgagagagttttttcccctctgttaacaaacgagttcaagtacatgccttcatattataaa

SEQ ID NO: 771679 - DNA, 530 bp, Homo sapiens
cgttctcaggtgcctgggggtgtgggcgggggcacgcctttcccctggttctccggcttgtgggacttaatcacacctcagttactggcagagctgtccgggtggcactgagtcacatcctcccctctaggggagctgggtctctgaactctcactgaacatctttactgttttgacccacacaataaatcccaagaaaaacaacatggcccccagagtggcctcgttgcttctgttatgccctccatgaccatggggtgtggacatgagcttcccagccctggggttggaatcagctaccccctctcccccacaaacaccggaattgtgcgtaactgtacccataccatgcaagaaaaatgtagtcgtctcagcytgagggttatgatcatgggcttgtaggaaacctctgttcatatcctgagtcttttgctcctggctgcaggattttgagcaagtcacttcacctctctaagcctccatttcctcatctgtcaaatggtcatagtaatgatggcactagcctgtta

SEQ ID NO: 771680 - DNA, 612 bp, Homo sapiens
ctgaaaacccaaaaaaattagtcacggtggtgcgcacttgtagtccaagctacttgggaggctgaactggggggttacttgagccccagaagttgaggctgcagtgagccgtgatggcaccactgcactccagcctgggtgatgggagtgagattctgtctcaaaaatttaaaaagaaaaagaaatgatctgcttatgtgtctctaccccacttatctctggtctccatgaagaccatggcatgctggtaagtgtgcagtgatccccagaaaggtttgtgggtctagaaaacactgaaggagggctttaggtgttaacgatgatcattcccatccacaagacactaaataagactttgagatctgcttttcttttttccttcagggagtgaggaccatcgtctaaaagattttgatttaaatcctgtctgggctgcagactgtatactmttagccaagtcccttaccctctcaggacctcagttgcctcctctccaaaggcagaaaaatagcagcccaccttacagggctcttaggggaattaaacagtccaggaacaccaggatcctagcaggacatgatatacaacaggtgctatgcagatgacgctcct

SEQ ID NO: 771681 - DNA, 642 bp, Homo sapiens
gtctctcttggaggcagatgggtctggggatggcagtgtccatgcacggacaaagccatgagttattataagacaagagataaagctgcaaggtattgatttgacaaggtcacatagctagcttttggaaaaacttgctataggtgagtcagctccacccagggtggccsaaaagtaactaaggtggaaatagtgtttttctggctatcattaagcgttctctctctctatccaaatgatacacatttttgttcatcgtcataatgttgcttgacaagcctcgtactgtcgcagggactgtgccacaagtgctgaccgctttatctcttttaatcttcacaagtccctgaggaagatactcttagaagctgatcttataaaggaggaaactgaagccctgtcattgacaaacaggcatttgcaataacattcattcctatgtaaatatcctttacagagtgttctttccatcaccatttgatcgccagaaaatcctgctaggtgccaaccagacttacgtgcaaaccttagctttgctgtttccttaatgcatgataacctgaacaaactcctgaaattcccttgagcctcaatttccttctctgtgcaatgggcataagaattcccaaccctgtgagttgt

SEQ ID NO: 771682 - DNA, 642 bp, Homo sapiens
gtctctcttggaggcagatgggtctggggatggcagtgtccatgcacggacaaagccatgagttattataagacaagagataaagctgcaaggtattgatttgacaaggtcacatagctagcttttggaaaaacttgctataggtgagtcagctccacccagggtggcccaaaagtaactaaggtggaaatagtgtttttctggctatcattaagcgttctctctctctatccaaatgatacacatttttgttcatcgtcataatgttgcttgacaagcctcgtactgtcgcagggactgtgccacaagtgctgaccgctttatctcttttaatcttcacaagtccctgaggaagatactcttagaagctgatcttataaaggaggaaactgaagccctgtcattgacaaacaggcatttgcaataacattcattcctatgtaamtatcctttacagagtgttctttccatcaccatttgatcgccagaaaatcctgctaggtgccaaccagacttacgtgcaaaccttagctttgctgtttccttaatgcatgataacctgaacaaactcctgaaattcccttgagcctcaatttccttctctgtgcaatgggcataagaattcccaaccctgtgagttgt

SEQ ID NO: 771683 - DNA, 642 bp, Homo sapiens
gtctctcttggaggcagatgggtctggggatggcagtgtccatgcacggacaaagccatgagttattataagacaagagataaagctgcaaggtattgatttgacaaggtcacatagctagcttttggaaaaacttgctataggtgagtcagctccacccagggtggcccaaaagtaactaaggtggaaatagtgtttttctggctatcattaagcgttctctctctctatccaaatgatacacatttttgttcatcgtcataatgttgcttgacaagcctcgtactgtcgcagggactgtgccacaagtgctgaccgctttatctcttttaatcttcacaagtccctgaggaagatactcttagaagctgatcttataaaggaggaaactgaagccctgtcattgacaaacaggcatttgcaataacattcattcctatgtaaatatcctttacrgagtgttctttccatcaccatttgatcgccagaaaatcctgctaggtgccaaccagacttacgtgcaaaccttagctttgctgtttccttaatgcatgataacctgaacaaactcctgaaattcccttgagcctcaatttccttctctgtgcaatgggcataagaattcccaaccctgtgagttgt

SEQ ID NO: 771684 - DNA, 595 bp, Homo sapiens
tagtatgtggcatgataatacattggcatattagaattatattttaatcttagtttctatttatggcaagtagataatggttttccatttatagccacaatataaagatcccttttaaaatgctttattggctgggcacggtggcttacacctgtaatcccarcactttgggaggctgacgcgggtagatcacctgagttcaggagttcgagaccagcctggctaacatggtgaaaccctgtctctactaaaaataaaaaaattagccaggtgtggtggcgggcacctgtaatcccacctacctgggaggctgaggcagaagaatcacctgaacccgggaggcagaggttgcagtgagctgagatcgcgccattgcactccagcctgggcaacagagggagactgcatctcaaaaaaaagagaaaagcttcatttattataagaagtgagttaacttaagtgaaagtgtgatttaaatagcggtaatttttgtgagtgtgacaaaaatcacgaagattgcacctgaaagactgaaaacattaaaaactcttaaactgtttgtttctttaattaataatgcttataatattttaaa

SEQ ID NO: 771685 - DNA, 580 bp, Homo sapiens
cctagctacaaacttacttctcctctcttccctttcttgcctaaatcctccaccttttaagtcctggccctttcccatcaaaattcagagacaaggcatctccttaacctgccctactcttgctccacttactccttcttgggtgggagtttaccagcatggtaggagccagcttttttgtccgccaraatgctcaacagcaaggtgtgttcccccatttcagtggacacagtttggcctttatttataaaatagtaccaaaaaaaaagctgtgtgtgtattgtgtgtgtaatgacagatgcacttaattatctattttttgagtaacagcagtttttaactaaaatcttgattttatcaaattaatacatgtacacagtctaatgaataaaatggtactgttaggctcatgaaaaacagcagtttcatgccccattgctctctactatcagtttctactcctttgatgcatctactttcaaatcttattgctggttcttctgatatttgatttcatatttctaaataacaggcatagtatgccatttttttcagtttctacctttaaatatctattggc

SEQ ID NO: 771686 - DNA, 546 bp, Homo sapiens
gaaggccaataactcttagatttccccttttgagactattttctaaatcctgtaggagtgcttcattcttttttattctgttttcttttgtctcctctgactgtgtattttcgaatacctgtcttcaagctcactaattctttcttttgcttaatcaattctactgttaagagactttgacacattcttcattgtcaactgcatttttcaactacagaatttctgcttgattctttttatttcagtctctttgttaaatttatctgataggattttgaattacttctctgtgttatattaaatttctttaaatttcctcaaaacagttsttttgaattctctatctgaaaggtcatatatctctgtatctccagggttggtttctggtcccttatttagtttgtttgctgaagtcatgttttctgggatggttttgatgcttgcggatgttcttcagtgtctgggcattgacgagttagttatttattttagtctatgcagtctggacttattagtacctgtccttcccgagaaggctttcccagt

SEQ ID NO: 771687 - DNA, 546 bp, Homo sapiens
gaaggccaataactcttagatttccccttttgagactattttctaaatcctgtaggagtgcttcattcttttttattctgttttcttttgtctcctctgactgtgtattttcgaatacctgtcttcaagctcactaattctttcttttgcttaatcaattctactgttaagagactttgacacattcttcattgtcaactgcatttttcaactacagaatttctgcttgattctttttatttcagtctctttgttaaatttatctgataggattttgaattacttctctgtgttatattaaatttctttaaatttcctcaaaacagttcttttgaattctctatctgaaaggtcatatatctctgtatctccagggttggtttctggtcycttatttagtttgtttgctgaagtcatgttttctgggatggttttgatgcttgcggatgttcttcagtgtctgggcattgacgagttagttatttattttagtctatgcagtctggacttattagtacctgtccttcccgagaaggctttcccagt

SEQ ID NO: 771688 - DNA, 618 bp, Homo sapiens
cagagcggtgtaggtggctcttgcaaatcctcctgcaaggcagctgcttcaggtgtggtcattactaattctttcagcaaggaaaggctggttacctcagtcagaaaggagaggctgcttttttttggtaaggaatgttcagkggggatttgagagttcatagtttttaggtttgtttaattctgaaagtcctcatcctatgttcttcctacttaatatccagctgatagcatcttaacagaagaaacctggtgaaactcttcattgaacttgtaattttgcatttcccataattagatttccaggtttgttcataaccttatctgccctggggctgtactaaataagcagttattttaaagtcaccataaaaactcgtttttctgactgtcttgaactgagattctaaagctctgagattatcattttgtgtttgtaaattctctagtatagtgagatttaccctttctatccctcaggccttgtagtaaatcaatactggcatcatagttaagtgcgttcattacttcattttccgaaggcttattttcaactggcacttcatcctaaacaactgcacaccataatttaaagaactgtgatcccactgtatgctgt

SEQ ID NO: 771689 - DNA, 481 bp, Homo sapiens
atgatggcacaggcctgtaatcccagctacttgggaagctgacgtaggagaactgcatgaacctgaaaagcagaggttgcagcaacccaagatcacaccactgcactctagcttgggtgacagagcaagactctgtctcacacacacacacacacaaacaaaaacctctatttaaaaaatcaygttatttgtacataaaaaaaaaaaagaccaatggaacagaacagctagaaacagatctaagcacaaaaaaacttcaatgataaaggtagcaattcaaagcagtagcaaaaagacagactaaatggtggtgaaataactggatggccttctggaaaaaaatataaaagttgatctatacctgacattttatacataagtaaattccaaatagaccataaatctatatgtaaaaaaaatgaaaccacagaaatattagaagaaaatacaggcaaattacttaatcttgttataaagatag

SEQ ID NO: 771690 - DNA, 597 bp, Homo sapiens
cttaaaaagtgggtatacaagaaacatgccccaacataataaaggccaaatatgacagacccacagctagcatcctactgaatggggaaaacctgaaagcttttcctctaagatatggaagacaacaaggatgcccactttcaccactgttattcgacataatactggaagtcctagctagagcaatcagaaaaaaaatgaagaaataaagggcatctaaattggaaaagaagaagtcaaaaatcaaattatccctatttgtagatgatatgatcttatatttggaaaaaaaatctaaagactccatcaaaaaacagtactataatggataaattctgtaaagttgcagaatgtaaaatcaacgtacaaaaattcatagaatttttatgtgctgacaataaacartctgaaagaaatcaagaacataatcccatttacaatagctccaaataaattaaatacctgggaattaaccaaataagtaaaagatctttaaaataaaaactactgaacatttatggaagagattgaagaggagacaagaaatggaaacttgttatatgtgcatggattggaagaatcaatattgttaaaata

SEQ ID NO: 771691 - DNA, 494 bp, Homo sapiens
agctggctttcaacactgggggatgtgattgtttttaacctggattggggcaagtttgtgagagactttaaaacaactatagcaattggtagttatcctggggctcttagcattctagttgctttttcacttctctatatcaccctccccaatttcccttagcaaaaacaaggactcttttgtattttccttaccaccattatgtctatcatatagcaaacattaagaaataaggtgaacagactattttggtatcaattactcattttattccctaatcatagttcatgattccatctcttccaacaaaagatcaaggcctctcatttcttctatcagccacagaraacgagttggacccaggcactggtggacacataatgagtctctgagtggaagaattctgtcctctctttgttatcctgtctactatatgtgttgtttatccttctgaatgaaaagagaattgaactccaattattctggaattcaat

SEQ ID NO: 771692 - DNA, 543 bp, Homo sapiens
catatttcatttcagaaaataatgaaatagtaatttaagtccaaggataattacacatatgcttttctacaggggacagaaaaattatccctatctaaacaaatatatatcagagaagaagaccaaggtgaaaacttacttccagttccaatattagaacaatagtatatcttgcttaagcattttaagggcagaatgacaaataagtactttccaagaaaagattgaatatactgcaaatcagattttaatgtgtaaaattttacacaaaaaccacatttatgaacactgaaacattttatctatcattaatcttttaaaatgctgttagagctgttttcaaaagtcgatgctmcaatacaaagaaaaaattaccatttcactgcctgtcaagctttctttattaataagatagatgcctcatctcacagaagcatattactaagtactaccaactatgttaacttcagttatgtaatttattgttttagcaatgcctttaaaatatctttggatactacaggatgccaaaatagaatatgc

SEQ ID NO: 771693 - DNA, 603 bp, Homo sapiens
atcatttttcagatgagggctacatggcccaaaaagaaacgaagtacaggtagtggcagaactaaaactagaagcacaggtagtggcagaactaaaacaggtagtacaggtagtggcagaactaaaactagaagcaagatctcttgaatcacawtaaagtgccattgccatttaatcattaaaaacctatatttccaacagtggaaatgggttgttcatcacagcctagataatacatcccttaaatcctggtccaacaaacagttttctgattgatttgcatctccaagatacctcaatattaggaaagcactatcttgcgtacaacatacaacacttcagactctaaatatcaacatggggtgcggtggctcatgcctgtaatcccagcactttgagaggctgaggtgagcggactgcttgaggtcaggagtctgagaccagcctgaccaacatggtgaaaccctatctctactaaaaatacagaaaattagctggctatggtggtaggcgcctgtaatcccagctacttgggaggctgaggcaggagaattgcttgaacctgggaggtagaggttgcagtgagccaagattgtgccactg

SEQ ID NO: 771694 - DNA, 558 bp, Homo sapiens
tagggaacactgaagaatattaagcagcaccaaggatatgttctcctggaaagatttgcctgagggtactttaatggttggttatttaaactaaatgtcctttcgaaaatattggggccctttgaataacagagtgctgcatcatgttagattctataaagtgtttcatgtttcttggttgagtagatttataccttggaagctctggttaagatagaataaattatgatataacattccttctccattcggtggtggtggtggtagaggtagctactccatgtacatacatttctacagtgggtttcargctgagctctgggaaaggatgtcatattttaccaccttatatatttgatctgtgtatctcatacatagattttggctcttaaagagaatctgaattagaggcacttcaggaagcattcacatatctagaatagatgacttggctatcaaccccttgccggctgtagctccccatttgttgtagtctgtatgtgctatacccaacctagagcagggcgccatgcctggctaattttttttttttacttt

SEQ ID NO: 771695 - DNA, 572 bp, Homo sapiens
aaaacataaacaacgattagcatgtcaccagtattgtgtggcggctttatgtttcttctagaggaaatgttcaaatgaagggggataccattaaattccaaattcccttagcaattatatatgattatatcctattctaaaaacagccattctgggagaatttcatgttttctttaatttaaaggcaaagaattttaaagtacagtgtggatatgtaaatatattttaaaactatacgcgagactattttaaaaggacctaaaagtctattattttttatatacatraaaaggtaagatttactttcctttttcaaagccaactgtaaattaaatagcaaattaacagtaaattaaataattcaaaaatgtagtatataacaaaatttaaatagacaagtttggaataattatgtttgtaattccggtcaatattttaaaaaccatttccattttgatgtgaattttttcagatgttttctaaattattactaagtatacaaacacatttttgaaaatacaaatggggatcatatcatgcatattattcacttcaggctgtattcttcttct

SEQ ID NO: 771696 - DNA, 573 bp, Homo sapiens
ggttcacatcactggaaattccatgatatatccagcttcagaaatggctggatgccgataatcaaagatcatcatggactttatgtctcatactatatctctaggcactgcattcctttggaatggcttcattccctagcagctckctctctctctgcatagagaaggatcatggcacctagcagctctaggcttatgttgtcattagaattcttttttttgctgggcgcagtggctcacgcctgtaatcccagcactttgggaggccgaggcgggcggatcacgaggttaggagatcgagaccatcttggctaacaaggtgaaaccccgtctctactaaaaatacgaaaaattagccaggcgtggtggcaggcgcctgtagtcccaggtacttgggaggctgaggcaggagaatggcatgaacctgggaggcagagcttgcagtgagccgagatcacgccactgcactccagcctgggcgacagagcgagactctgtctcaaaaaaaaaaaaaaaaagaattcttggaaccaacccaaatgtccaacaatgatagactggattaagaaaatg

SEQ ID NO: 771697 - DNA, 622 bp, Homo sapiens
gacaatataggtaggcaaaaatagaaattcggcaaaagaaataaaaggtatccaagtcaaaaagaaagaataaaattatctctgttcacagattacatgattgtgtatgtagacaaccctaaagattccacactcaagaaaactgtcacaaataataaattcagcaaagtattrggataaaaaatcaacacataaaaattagttgcatttcaactcactagcagtgaacaatctgatatagaaattaagaaaatttcatttataataacatcaaaaagaatgaaatactcaggaattaaccaaggagatgaaagacatatactgaaaattatgaaacactgctgaaagaaattaaagaagacataaatagaaagatattccatgttcatggattagaagacttaatattatttaaatgacaatattagttagccaaagcaatctacaagtcaatgtaattcccacaaaattccaataacttatttgttttagataggggcttctctgacccccaaactagggtgtagcagaatgatctcagctcactgcggcctccacttcctgaactcaagggatcctgccacctcagcatccccagtagctgggaccacagccatgtggc

SEQ ID NO: 771698 - DNA, 636 bp, Homo sapiens
tccacttcctgaactcaagggatcctgccacctcagcatccccagtagctgggaccacagccatgtggcaccaggcccagctaatttttgtactttttttggtaaaggcagagtcttgctgtgtttcccaggctgatctcaaactcctaggctcaagcaatccacccactttggtctccgaaagtgctgggattacaggcatgagccaccatacctggccccaacaaccttttctgcagaaatagaaaactccatcctaaaatttatagggaacctcataggaccctgaatagccaaaacaatcttgaaaaagaagaacaaaattgaatgactcacttaatgatttcaaattttattacaaagctacaaaaatcaaaacagcatggcactggcataaagagacatatagaccaaaggaattgaatagaggcccagaaataaaccttcatatatatggtcamgtgattttcaataagaaaagtgccaaaaccattcaacgggaacaagacagtctttgcaacaaattatactaagaaaaagaaaaccaggtatcctatacaaaaggataaagttggacccttacttaacaccatatataaaaattaactcaaaatgaaccaaagacctaaaagtaag

SEQ ID NO: 771699 - DNA, 520 bp, Homo sapiens
tgatgacattttatttttatttttttgagatggagtctcactctgttgcccaggctagagtgcagtggcgcaatctcagatcactgcaacctccacatcctaggttcaagagattctcctgcctcagcctcccaagtagctgggattacaggcatgtgccaccacacctggctaattttttgtatttttagtagagatggggtttcaccacgttgaccagcctggtcttgaactsctgacctcaagggatctgcccacctcggcctcccaaagtgttgggattataggcgtgagccaccgcgcacagccagacatggtgactttttaatctcttattcttttttatacttccctgtgttgattgagcattccaaggatgtgctatctttataatccagaagaaattaggaatttagaatttaggaaaaaatatacgtatgtaaaaaactggaagaaaaccctcaaatggccataccttttggttggaattatagatacatttttttctcctttcttctct

SEQ ID NO: 771700 - DNA, 579 bp, Homo sapiens
aataaaaatgaagtgctgctctaggtgaagtagggtcagcgctgtagaggtgagggcctgaagagtggaggaagaaccagggatcattgttgtgaatggggaaggaagtcttaggggctgaatcccggcagcggcctctctcccaggagcagagggcctgcatctgtcctggagcccttcccttgtcaagagcatgaagaaacacagcgtcaatgtctgggggcctactttcaatttccagtgaaattaggacaaagttcctttaggcttgatatcatttcttttaagcctgaggcttgaagttggagcattctaaatgmgtaggaaactgttatgaatagcaacgaaaggcagagtaactaacacctgacatagctattttccttgccattgcctctgcatgatttaatatttaatatgcttgtggtcaaaccaagtctgaacagagcaagcctgaagcacttctagcaacacagccaggtggccaggagcccaaagtgatataactgcggtttactcacaggctttcagagtaacctttagggctggttgaactctcagacaccacttagcatttcc

SEQ ID NO: 771701 - DNA, 647 bp, Homo sapiens
cttcacagtgctacggatctaattagtctgactaagagggacatatagctaaaatcaccaacccttccagacaacaaacggttggctgaccagaaaccagcacccaagaaccaagataactccttgcattgcttcagctcatragctacatgcgtgattagaaaaataagttactcaccacaaaaatcacagagcaagagacaggaaagaagaggaaggttttcttctccctgcaactaaatatgcatagataaaggagaagctagggtcaaaacgttgtcagtgtgacaaaagctgaatttctgcttgggatggaagatcaggaaatgatttttgcagtttattaataatctaatcatagtctttgcagctaccatcatgaatgagtaatatcctttcccacagacacaggtgtcaagtcaaagagaaatggataagcagacaccatgggcgtcacgggcctctgccttagggatctctgcataagacagcaccagcataattttcagcaacaggctggctggacatgtcttcgtgatgctgctgcaggagagtgaatgttcctgaatccaggtgcaatgggaaagcacaaatttccttggcatttcccattttccccacagcggcctcttcctcatttatgtatc

SEQ ID NO: 771702 - DNA, 587 bp, Homo sapiens
aatggaatggaatggaatcaacccgtgtggaatgtaatgcaaaggaatggaatggaatggaatggaatcatcaaaagtggaatggaagggaatggaatagaatggaattgaatggaatggaatggaaagcaatggagtcaacccgaatggaatcgaatgtaatgaaatgcaatggaatggaatggaatgcaatggaatggaatggaawtgaatagaatgggataggatggaatggaatggaatcaaccagagtggaatagaattgaatggaatggaatggaatggaatggaatcaacccgagtggaatggaattgaatcgaatggaatggaatggaatggaatggaatcaaccagagtggaatggaattgaatggaatggaatggaatggaatcaacccgagtggaatggaattaaatggaatggaatggaatggaatcaagccgagtggaatggaatggaatggaatagaatggaatggaatggaagggaatggaatggaattaacccgagtcaaatggaatggaaaggaacggaatggaatttaatggaatggaatggaatggaatcaacctgagtggactggaa

SEQ ID NO: 771703 - DNA, 587 bp, Homo sapiens
aatggaatggaatggaatcaacccgtgtggaatgtaatgcaaaggaatggaatggaatggaatggaatcatcaaaagtggaatggaagggaatggaatagaatggaattgaatggaatggaatggaaagcaatggagtcaacccgaatggaatcgaatgtaatgaaatgcaatggaatggaatggaatgcaatggaatggaatggaattgaatrgaatgggataggatggaatggaatggaatcaaccagagtggaatagaattgaatggaatggaatggaatggaatggaatcaacccgagtggaatggaattgaatcgaatggaatggaatggaatggaatggaatcaaccagagtggaatggaattgaatggaatggaatggaatggaatcaacccgagtggaatggaattaaatggaatggaatggaatggaatcaagccgagtggaatggaatggaatggaatagaatggaatggaatggaagggaatggaatggaattaacccgagtcaaatggaatggaaaggaacggaatggaatttaatggaatggaatggaatggaatcaacctgagtggactggaa

SEQ ID NO: 771704 - DNA, 627 bp, Homo sapiens
  misc_feature 1, 2, 3, 4, 5, 6, 7, 8, 9, 10, 11, 12, 13, 14, 15, 16, 17,18, 19, 20, 21, 22, 23, 24, 25, 26, 27, 28, 29, 30, 31,32, 33, 34, 35, 36, 37, 38, 39, 40, 41, 42, 43, 44, 45,46, 47, 48, 49: n = A,T,C or G
nnnnnnnnnnnnnnnnnnnnnnnnnnnnnnnnnnnnnnnnnnnnnnnnnagcaagttaacacaggaacagaaaaccaaacaccacatgttctcactcacacaagtgggagttgaacactaagaacacaaggacacagaaaggagaacaacacacaccagggcctgttgaaaggtggggattgaggggagggaacttagaggatggatcaataggtgcagcaaaccaccatggcccaggtagatctatgtaacaaacctgtgtgttctacacatgtatcccttttttttttttttaaaagaaaatactttctgaacttgcaacatgttcttttaaatagccccagttgagaggtgggttcggtctttaaaaatagctaaaagaatttggagtcacacttagaaaacccagaaaaaaaaaaaaaaaaaaaaccctaaacatgttcttacraggataggggagtgaatgtcctccaggtttaaaagcactgtttacaagtcagtacctgtcacaattgatcccatgtttgaatttatacacttatttctccaaattgacagtgaaactcttcaagcacaggaaccttattccccagcaactagcaaattttgggacatttgctaggctcc

SEQ ID NO: 771705 - DNA, 643 bp, Homo sapiens
aaacatggtctttgtgttggcaagtaccacagaacaaattcttcttttcatttgttatgattttcatagctgtttcttcttctctacttctacaccaattggtactctcaaatataacttttatagttctttctgacattcttaaagcattgatgggtgaaagcagctttattgtcttgcagggataggtagggttaaatatttctaaataaytatttaaataatgtatttcttgcatatggacaacctgtctgataaaaaaattaaaaaatgaattagtattttttagaagtgggtttgtgataaagctattagtctcattattgctaaattacattgcagtgattttcaaaactgggttaaatgacattatgtatagatgtactttagtgttaggttttataagatctttggcaaagtatgaagctacaagattcagtaaattgttaaataattttttctcaatcaacttacaacccaaaaagaaaatgcagcccctaggtaggttagaagggcttgtaacagggattgtgaattgggaagaagtagttaggtagtgggcaattgatattattagagatagacatttagaagttgtccagtccttaaattaattgtttaagataaaaaaaagataattgac

SEQ ID NO: 771706 - DNA, 552 bp, Homo sapiens
tcaaattctcccttccaaaagtatgatttggattttggaactctacattggtatctttaataatcaaacatatgtcctaattgttttcaataatttatctttggcttcaaaattcctgatcaatttactttatctctttaaactttctctgtaagaagcaaagggatgaatcattgtatttgattgaaattttattttcatactctctcctcatgtgataagtcctgcagagttttagggaaygcttttttaaaatgtccctacattagaataaatggcagaaaggaaagctcaattaacaatactatttggttaatattaaacagcagttaaatgtaataatcagtgctgtacaaaaatagcaaatttttgttttacagtcagaagtttttaataatttgatgaaaatcaagattagccttaaatgtaatagcctggttaagaatacccaattatctttcacatgctaagagtttacattgtattttcaaaagctgtaaaaacataaatatatcagaaaatttccaagaatcttttttcatctaaaactct

SEQ ID NO: 771707 - DNA, 599 bp, Homo sapiens
aaaggcaaatgagctatctcaggttggggaggtgggctgtgatacctggtcatattaaaaaaatcttattagcatctaaaacagttttggaataaataagcaggtttagtcctgcatgactcagaactgacactgatcttattttacattttacaaaggtttgaaaagggagagaacatgctaagacatccagcgcacacctgacatcaggctcctctgcgcaccaacatgctgagccaagtggaagctacaagcagatcttttaaagcagaaatgagccattgaaagarcttcagtgttggtaagcataagcagacaaatgtagggaatcatgaggtaaactgtgcttattggattatggattcacaatagagtatttctagcatcttactttgtgctgggcaccctgttagatgctgtcacacacattttttttaaacataatcctcaaaacaaatgctgcaaagtcatttatactcattttacatataaagaatctgacattggaaagtgtaagttacccaaggccaaagcccgcacaagaggcacagccatcctggagcacagccttcatgggccaccgagttagaatccaagga

SEQ ID NO: 771708 - DNA, 599 bp, Homo sapiens
aaaggcaaatgagctatctcaggttggggaggtgggctgtgatacctggtcatattaaaaaaatcttattagcatctaaaacagttttggaataaataagcaggtttagtcctgcatgactcagaactgacactgatcttattttacattttacaaaggtttgaaaagggagagaacatgctaagacatccagcgcacacctgacatcaggctcctctgcgcaccaacatgctgagccaagtggaagctacaagcagatcttttaaagcagaaatgagccattgaaagagcttcagtgttggtaagcataagcagacaaatgtagggaatmatgaggtaaactgtgcttattggattatggattcacaatagagtatttctagcatcttactttgtgctgggcaccctgttagatgctgtcacacacattttttttaaacataatcctcaaaacaaatgctgcaaagtcatttatactcattttacatataaagaatctgacattggaaagtgtaagttacccaaggccaaagcccgcacaagaggcacagccatcctggagcacagccttcatgggccaccgagttagaatccaagga

SEQ ID NO: 771709 - DNA, 632 bp, Homo sapiens
gatggttggtgtattagtcacggttctttaaagggacagaactaacaggacagatgtatatatgaagggaagtttattaggagaattgactcacatgatcatgagatgaactcccacagtaggccctctgcaagacaaggagccaggaagccagttcaagtcccaaaacctcaaaagtagggaagctcatagtgcagccttcagtctgtggccaaaggcctgagaggccctggtaaatcactggtgtaagtctcagagtccaaaagctgaagaacttggagtcttcagcttttgctcgagggtacaatgttcgarggtatgatgcatccaacacaggagaaagatggaggccagaagacttagctagtctagtccttccacattcctctgcctgcttttatcctagccatgctggcagctgattagatggtgcccgcctagattatgggtggatctgcctttcctagtccactagctcaaatgttaatctcctttggcaacagcctggcagacacacccaggaacaatactttgcattcttcaatccagtcaagttgacacttactattaaccatcacaagtccaacccttgtcaacttgaacccatacatattttctgaaatcatacataa

SEQ ID NO: 771710 - DNA, 632 bp, Homo sapiens
gatggttggtgtattagtcacggttctttaaagggacagaactaacaggacagatgtatatatgaagggaagtttattaggagaattgactcacatgatcatgagatgaactcccacagtaggccctctgcaagacaaggagccaggaagccagttcaagtcccaaaacctcaaaagtagggaagctcatagtgcagccttcagtctgtggccaaaggcctgagaggccctggtaaatcactggtgtaagtctcagagtccaaaagctgaagaacttggagtcttcagcttttgctcgagggtacaatgttcgagggtatgatgcatccaacacaggagaaagatggaggccagaagacttagctartctagtccttccacattcctctgcctgcttttatcctagccatgctggcagctgattagatggtgcccgcctagattatgggtggatctgcctttcctagtccactagctcaaatgttaatctcctttggcaacagcctggcagacacacccaggaacaatactttgcattcttcaatccagtcaagttgacacttactattaaccatcacaagtccaacccttgtcaacttgaacccatacatattttctgaaatcatacataa

SEQ ID NO: 771711 - DNA, 655 bp, Homo sapiens
attaatggcattattaaaaaggatggccagagtgggtttgctctcttgtgctcttgcccttccaaccttccaacagcaaattgccccacacaagatgccagcaccttgatgttgtacttcccagcctccagaactatgagccaataaatgtatgttgaktataaattacccagcctcaggtattggggtatagcagcacaaaatggactacaacaataggtgatagaaaactcaacacacgctggcttaaatattaggaccattagttaactcatataactgacttaaatgttggcttaaactagtaactcaaacgcatcatggagctggcttctttccatttcttctctgcctttcaaaatgtcaacttcatcttagagtggacaccaatcatgttgcaatatagcttccagatgcttgcaggacaatatatatctctgctggagtggggggcctttctattaattatattaatataatatatctccccaaggagtagggggcctttctattagtcacgaaaaaagagacttttcttacttgaaccaaatagtgaagatattctttcagggtttatcccaggaattagaagtagaatcagtaccaccaaaaccacgggggttttggtaaacgctggagaggctgccacaatgtc

SEQ ID NO: 771712 - DNA, 655 bp, Homo sapiens
attaatggcattattaaaaaggatggccagagtgggtttgctctcttgtgctcttgcccttccaaccttccaacagcaaattgccccacacaagatgccagcaccttgatgttgtacttcccagcctccagaactatgagccaataaatgtatgttgagtataaattacccagcctcaggtattgkggtatagcagcacaaaatggactacaacaataggtgatagaaaactcaacacacgctggcttaaatattaggaccattagttaactcatataactgacttaaatgttggcttaaactagtaactcaaacgcatcatggagctggcttctttccatttcttctctgcctttcaaaatgtcaacttcatcttagagtggacaccaatcatgttgcaatatagcttccagatgcttgcaggacaatatatatctctgctggagtggggggcctttctattaattatattaatataatatatctccccaaggagtagggggcctttctattagtcacgaaaaaagagacttttcttacttgaaccaaatagtgaagatattctttcagggtttatcccaggaattagaagtagaatcagtaccaccaaaaccacgggggttttggtaaacgctggagaggctgccacaatgtc

SEQ ID NO: 771713 - DNA, 655 bp, Homo sapiens
attaatggcattattaaaaaggatggccagagtgggtttgctctcttgtgctcttgcccttccaaccttccaacagcaaattgccccacacaagatgccagcaccttgatgttgtacttcccagcctccagaactatgagccaataaatgtatgttgagtataaattacccagcctcaggtattggggtatagcagcacaaaatggactacaacaataggtgatagaaaactcaacacacgctggcttaaatattaggaccattagttaactcatataactgacttaaatgttggcttaaactagtaactcaaackcatcatggagctggcttctttccatttcttctctgcctttcaaaatgtcaacttcatcttagagtggacaccaatcatgttgcaatatagcttccagatgcttgcaggacaatatatatctctgctggagtggggggcctttctattaattatattaatataatatatctccccaaggagtagggggcctttctattagtcacgaaaaaagagacttttcttacttgaaccaaatagtgaagatattctttcagggtttatcccaggaattagaagtagaatcagtaccaccaaaaccacgggggttttggtaaacgctggagaggctgccacaatgtc

SEQ ID NO: 771714 - DNA, 577 bp, Homo sapiens
ggaaaaaaagtaaatcagtttcttttaatgacgtcctataattcatttccagagcatattgaatgtaagtcttttcaatatcatctcagggcagtaaccaaactcctgtgtagtattgaaatgggagagttccctgacctccctcacaggacatgcggtgggtgtggctttgtttggccgctgtgcactcaaccccttatgggagggggagcacgcagacgggcaggtgcaagagccaaggggagcacttttgggctctggccccactgtagcatctaggggtggatgcctgcaactcccaaagccccagtggatgtattacagtrctcttttagctctgccatccacagacggcttaagtattaaccaactcagtgccctcttggtatccaggtccttgtctggcatccaagaagaattgggtcacacagacaaattgaaggagggcaaatgtgggggattttaatgccagatggaggtggctctaagcaggatggatggggagctggaaaggggatggagtgggaagatgatctgcccctggagtttggttgccccatggacaatctcctctcca

SEQ ID NO: 771715 - DNA, 533 bp, Homo sapiens
cgaggtcaggagatagagaccatcctggctaactggtgaaaccctgtctctactaaaaatacaaaaaattagccatgcgtggtggtaccgcacatataatcctagctactcgggaggctgaggcaggagaatctcttgaaactgggaggcagaagttgcagtgagccaagatcacaccactgcactccagcttgggcgacagagcgagactctgtctcaaaaaaaaaaagaaagaaagaaagaaatgacatcatatcctttgcagggacatggatggagctggaagccgttaccctcagcaaactaatgcaggaactgaaaaccaaataccacatggtgtcacttataagtgggagccraatgatgagagcacatggacacatggtagggcacaacacaccctggggcctgtcagggggttgcggggagagagaggatcagaaagaatagctaatggatcctgggcttaatacctaggtgatgggttgatctgtgcagcaagtcaccatggcacatgtttacttatgtaacaa

SEQ ID NO: 771716 - DNA, 646 bp, Homo sapiens
aaatcttatgttaactactacaaatgcaaatattaagtgtatttcatttacccaccaaattgaactgaatttaaaactgaattgcagatgtcccatgaaggggcacaaatatgattatggaaaattattctattgaaaataacagtagtttttatagtgatataaatctgagaaagcgaaataaattgaggttggagaaacagatgtattcaataaaaaactactgtgtgcacgtgatgaactagtctttagcaagatttgaataatgcaatcagtaggaatttggctggcctgtggagttttcaaaggcatggatgttccaataatagctggaaatttgttgtggacacgaggccattaagcctgtctcctgctgcattcaatatagtggtaaaaactattattaaataactgattttatagcaactgttacaattatttgtccaaagtataaattaaagtttatgatggawgcaaatgtacatcttaaaatgtataatgctaatttaggttcctttctcattttaaaataactactcatatgaaagaacagtgactaccaaaataagagcaaattaataaggctgacaggaagacttatcgaaagtgtaaaacattaaatgtgcctttacttttcaaacacaga

SEQ ID NO: 771717 - DNA, 467 bp, Homo sapiens
ttgttttatacaatgtattgtttttttcacaaccttgaaatgctttgattcaacaacttctgacttattaacatttacataagggcatacatacattactaatggaaatcaatggacaatatttttagcctactgttttagcacataatatgttaaaagccatgatgctrctgtttttttttaatcaaacacaaaaatctaaaactggcctcattattacatgataatcttcattctgaatcttctcctcatcttcttcatcctctttggcctctcttacagaagctgtagtaggaccaccttcgagaagcatgtcagagcatgcagacttcttagctcgtgtctccagagcatcatcattttgggggctaagatggttatctggtggtgacaaatctcttgacttctgagttcgagacagctcaatagtaagtctcttttaaaacaagaaaagcacaaatattagc

SEQ ID NO: 771718 - DNA, 467 bp, Homo sapiens
ttgttttatacaatgtattgtttttttcacaaccttgaaatgctttgattcaacaacttctgacttattaacatttacataagggcatacatacattactaatggaaatcaatggacaatatttttagcctactgttttagcacataatatgttaaaagccatgatgctactgtttttttttaatcaaacacaaaaatctaaaactggcctcattattacatgataatcttcattmtgaatcttctcctcatcttcttcatcctctttggcctctcttacagaagctgtagtaggaccaccttcgagaagcatgtcagagcatgcagacttcttagctcgtgtctccagagcatcatcattttgggggctaagatggttatctggtggtgacaaatctcttgacttctgagttcgagacagctcaatagtaagtctcttttaaaacaagaaaagcacaaatattagc

SEQ ID NO: 771719 - DNA, 574 bp, Homo sapiens
cagccgacctaggctatgatgggcgtgtggattcattcactgatagaactagcctgagcccagggtcccaaatcaacgtgctggaagacccaggctacctagatctcacacaaatagaagcaagcaaacctcacagtgcccagtttttgctaccagttgagatgtttggtcctggtgcaccaaagaaagcaaatyttattaatgagttaatgatggagaaaaaatcagttcagtcatcattgcctgaatggagtggtgctggagagtttcccactgctttcaatttgggttcaacaggggagcagatatacagaatgcagagcttgtctcctgtctgttcagggttggaaaatgaacagttcaaatccccgggaaacagagtttctagattgtctcatttacgccaccactactcaaagaagtggcacagattcaggtttaatccaaagttttattcatttctctctgctcaagagccttcccacaaaataggcactagcctgtcctcacttactggaagtgggaagagaaataggataagaagttctctgccatggaggcaaaatagttggaa

SEQ ID NO: 771720 - DNA, 591 bp, Homo sapiens
cacaacagctacctaagatttaatacattgagaaatgaatttaacaagacattatttagaacttatatggaaaaaactgagagttctaaaaaaggatatgaatataacagatgacctgaataaatggagagaagtaccacattcctagacatgaatgtttgatgctgaaaagatctcaattgcccaaattagtctctctttttttaagagagagagagagactgttgcccaattggagtgcagtggcacgatcacggctcactgcacctcaaattcctgacctcaagtaatcctcccacctcagcctcccaagtagctggggttacaggtacataccaccatgactggcttatcaaaaaaatttatttttgtagagattaaggtcttgccatatgatgttgaactcctgggctcaagaagccatcctcccycatcagcatcccaaaatgctgggattaacaggcaggagccatggtgcccagcacccctaaactagtctttaaatgtaaagcaattccagtcaaaatactttggaggaggattaaaagtgcaagaaccaccaataacattttgaaaaccaagaacagaata

SEQ ID NO: 771721 - DNA, 628 bp, Homo sapiens
gaaagaagtataaaggaattaaattatataaatactccacaaaaaaaagacataatgtataaaacatcttcctcttccatttgaatataatgtgatttgccaccatcctaaattctaatttcttcaagtaaagaaaattcaagtgtaggggaaaaaaggaacactaaaaattaaggccaaaataaaccagcagactaggaaggaaagaatcttaccaaaatgtctttaattttttattaaaaaaatacgtattttaaatccagaagacagtaggtcaggtataacagttctcaaaggaaataaaatatctggttgagaggaaatttaaawctaatttatctccactgttgtgtttttgctattatacaatgtaataagttctgcgggctttgtgattaaaggagataaattaaatacttcctaaatagtagccagataatgattgagaaagtgactgtgacacagagacacaattaaatgaatatataaatataggcatctagtacttgtcaagtgttctggagacacagagataagatgacttcttcaagacaagaactattttatttgcaagcaaaacagaaaaaagagtaagaagacaggaaaagtaatcaaattgttccaggag

SEQ ID NO: 771722 - DNA, 495 bp, Homo sapiens
cacacataaaaacagtattaatctcctagtacatctccatcagagctcttgggtaaccaggtgtcttgtcaataagcagtaccatattgaaaggactcttcttctgaccagtaatctcaacagtgggcttaaaatattcaattcagtaagccatactgtgaacacctgttgtcatccaggctctgttgcttcatttacagagaacaggaagaatagatttagcataattgttaagggccataggatttttggaatggtaaatgagcactggctttaacttaaagttcccagctgcattagcccctaataaaagagtcagccygtcctttgaagccaggcactgacttctttttagctgggaaagttccagatagcatcttcttctagtagaaggctgtttcatctacattgaaaatctgttgcttagtgtagcaaccttcatcaaaaaccttagctaaatcttctggataacttgctgcagcttctacatcagca

SEQ ID NO: 771723 - DNA, 541 bp, Homo sapiens
cattttctgagagctaacatttacccttggaaagttataaggtttattatcctgaataatagtaaattagcaagtcaagtaagacaggagaattaagtaatcccttggccaggcttctacacaatgtcttagaggatatggaaaagaatcagtaatccggctgggcacagtggctcacgcctataatgccagcactttgggaggccaaggcgggcagatcacctgaggtcaggagttcgagaccaggctggccaatatggtgaagccctgtctgtactaaaagtacaaaaaattagccggctgtggtggtgcacgcctgtaatcacagttacttgggaggctgaggcaggagaatcacttgaacccaagaagyggaggtcactccactgcattccagtctgggcaacagagtgagactccgcctcaaaaaaaaaaaaaagactcagtaatcctacgttttggaaaatttttcttaatagtgcaaatttctgaataatgatcaattcttcaccaatataataatctacctgtaaacatgccc

SEQ ID NO: 771724 - DNA, 600 bp, Homo sapiens
atttactcaaaatcaccttcagggtgatgtttacagtggtttacgaagctcttcattaccagccctatctatctagtgacatctctcagcacttgttttatagtttaggctccagcaacaacaatattcttgcttgttgctaaatacagagcgtggtttttaggttttgcgtctttgctcctgatcttctctttgtctttgaccttcccctctcccactccatataaacaaactgcacaggacttattcctccttatcatttgaaattaaaatgagcatggttttcccttggtaatgattagaaaattagttctgattgatactgacagccggtttcactkcatttcctttattctctaaacctactgctatttattcatttccacaacatttcaaaaatatttgtgtttatcccccgacaacgaaaaccttgagaggagagaatacattgtatccacttctctctcatcagtttctagtatctgatttgggcactcaataccagtttgcagaatgagctagcaaagaaggccagcctggctcattgcacataatagggttataatgacacgagtgcaagagaggttttatttgtatgtt

SEQ ID NO: 771725 - DNA, 492 bp, Homo sapiens
gagggggtgcgggggggacagggtctcactctgttgcccagaatggagtgcagtggcatgacctcagctcaccgcaacctcgcctcctgggttcaagtgattctcttgcctcagcctcctgggattacaggctcgcaccattatcacccggctaatttttgtatttttagtagagatggggtttcaccatgttagctaggctggtcttgaactcctgacctcaaatgatccacccgcctaggcctcccaaagtgctgggattacaggtgtgagccaccacgcctggcctgaactgggttttatatgatattaagaaattgttgtaccatggaataytatgcagccataaaaagaatgaaatcatgtcctttgcaacaatatagatagagctagaggccataatcccaagcaacctaatgcaagaacagaaaaccaaataccacgttctcacttataagtgggagctaaatgttaaatacacatgatcataaa

SEQ ID NO: 771726 - DNA, 503 bp, Homo sapiens
tgctgctggaaatgcccctccactgccccttccctgctgcatggactgtggcccgcgggactgccattggtgccctgatgtggggttacccatgtgtccgtctcctccacactgcattctcccacacggcgtgatcccatggctgggtcaccccgccacccctgatgccttgtacagtgcctgacacagtgtgggctcggcgggtgcacatctgaggtagaacgtggccctgcttccacagattagaaacctggatgccggaaaggccaaaygggctgcccccggtcctgccacccctcttccactgactgggaaatgttctcttaacacccagcctagctttctttccagtagaccagactgcatgtgcgtttggaaataaatggagcccatgaatcatttagaaattattagggctgggtgtggtggctcaggcctataatcccagcactttgggaggccgaggcaggaggatcccttgaggccaggagtttgagaccagt

SEQ ID NO: 771727 - DNA, 513 bp, Homo sapiens
ttaaactgaagttacgtcctgtgtatagaatagtgattttatttccattcttcaatgccaaaaatttactaagacaagtagatttcagccccccaacacatttttgtgattcacagttccaagtcagttttccctacgctagcccccagatgggtctttcaaggtcaaagctaaaagacacctaaagatgatcacctgcttctcaaacatctctccacacattaacactaaggtacctacctaatatctatttgccacacggcctaacaaaagaaaggtgtcttagtaaaargacctgtgattgccaggggttagggggatagggagggatgaacaggcataacacagaagatttcttagggcagtgaaactattctctataatacgaaattggttgatacctgtcattatacatctatgaaaaaaaccattgaatatacaaccccaagagtgaaccataatgtaaaactatagactttggatgataatgatgtgttagtgaaggttcattga

SEQ ID NO: 771728 - DNA, 589 bp, Homo sapiens
gcaggactggcaggcagccccacctgcaaccctggtgtgggatccacttggtgaagccagctggactccagagtctagtggggacttagagaacctttatgtctagctaagggattgtaaatacaccaatcagcaatctgtatctagctcaaggtttgtaaatgcaccaatcagtgctctgtatctagctaatctagtggggacttggagaacttttgtgtctagctcagggattgtaaatgcaccaaaacggaccaatcagctctctgtaaaatggaccaatcagcaggatgtgggtggggccagataagggaataaaagcaggctgccccaaccagcagtggcaccctgctggaatacctttccgcgttgtggaaactttgttcttttgctttttgcratagatcttactgctgctcattctgggtcagccctgcctttatgagctgtaacactcaccgtgaaagtctgcggcttcactcctgaagctagcaagaccatgaatccacggggaggaacgaacaactccagacgcgccacgttaatatctgtaacaccccgtgcgaaggtctgcagctgcactcttgaa

SEQ ID NO: 771729 - DNA, 645 bp, Homo sapiens
gttttaaggatgcatatattaaacattgctaagcttcatcctgtctataattattaacacgttgctgagggactcatggtaattatcatctgggaatcccactcagatactgcacaactctaaaaaggtggactaattcctaaggtaaggcaatgttgagcaggaatgtcaaagtgagcagcatataaaataataaggtgkctgggcgcggtggctcatgcctgtaatcccagcactttgggaggccgaggcgggtggatcacaaggtcaggagattgagaccatcctggctaatacggtgaaaccccgtctctactaaaaatacaaaaattagccgggcatggtggcgggtgcctatagtcccagctgctggggaggctgaggcaggagaatggcgtgaacccgggaggcagagctgacagtgagccgagattgcaccactgcactccagcctgggcgacagagcaagactccgtctcaaaaaaaataaaataaaataataaggtaaccatgagcaataaagccataaatacatctaagaggcttgaatgacccagcccaggaaggaggaacgatggccttgttaagattcacacatttcttaactttatactgttactaatggagcaatctgtggttagcgtc

SEQ ID NO: 771730 - DNA, 524 bp, Homo sapiens
aataaagctgcccagccaaaaaaaaaaaaaaaaaaaaaaaaaaaggcttgacaatattttgtagtgttggctacttaaatgtgaaaaatcaagtctgtaataaaaatatgtgtgaaacattctataaaccatacagtaaaataaaaatatagggtggtattgaggtcaracaaaaccattttggtgtcttttcctccaatctttcatatccagtaagtcatcccactaccacagcaaaccaactaggattggccgaaatcgtgcctgcttgcgccttctttctaaaaatttccatgtccccagcgtgcatgttctgtcgccttctgcccctttctgtcttgctgccgtactctccattggtcttgcctctgctgccttgtttcctttctgtacaagtgcaaggcaaagctctttcctttcccctgagcatctgtccctgtgcaaatttatcaggtttctctcgtctagcagagaaagaaaaatgaagtatcagcattatggcctatctgtgcactttttaaaat

SEQ ID NO: 771731 - DNA, 524 bp, Homo sapiens
aataaagctgcccagccaaaaaaaaaaaaaaaaaaaaaaaaaaaggcttgacaatattttgtagtgttggctacttaaatgtgaaaaatcaagtctgtaataaaaatatgtgtgaaacattctataaaccatacagtaaaataaaaatatagggtggtattgaggtcaaacaaraccattttggtgtcttttcctccaatctttcatatccagtaagtcatcccactaccacagcaaaccaactaggattggccgaaatcgtgcctgcttgcgccttctttctaaaaatttccatgtccccagcgtgcatgttctgtcgccttctgcccctttctgtcttgctgccgtactctccattggtcttgcctctgctgccttgtttcctttctgtacaagtgcaaggcaaagctctttcctttcccctgagcatctgtccctgtgcaaatttatcaggtttctctcgtctagcagagaaagaaaaatgaagtatcagcattatggcctatctgtgcactttttaaaat

SEQ ID NO: 771732 - DNA, 524 bp, Homo sapiens
aataaagctgcccagccaaaaaaaaaaaaaaaaaaaaaaaaaaaggcttgacaatattttgtagtgttggctacttaaatgtgaaaaatcaagtctgtaataaaaatatgtgtgaaacattctataaaccatacagtaaaataaaaatatagggtggtattgaggtcaaacaaaaccattttggtgtcttttcctccaatctttcatatccagtaagtcatcccactaccacagcaraccaactaggattggccgaaatcgtgcctgcttgcgccttctttctaaaaatttccatgtccccagcgtgcatgttctgtcgccttctgcccctttctgtcttgctgccgtactctccattggtcttgcctctgctgccttgtttcctttctgtacaagtgcaaggcaaagctctttcctttcccctgagcatctgtccctgtgcaaatttatcaggtttctctcgtctagcagagaaagaaaaatgaagtatcagcattatggcctatctgtgcactttttaaaat

SEQ ID NO: 771733 - DNA, 523 bp, Homo sapiens
tcaggcttcagtggctcatgatacctaaactttgacttgcctacctagactcatcctctacaatacacttaagaaacagaatgagcaggatgaggctagactcatcctctataacacacttaagaaacggagcgagcaggctgggtgcgrtggctcatactgtaatctcaacactttgggaggccgaggtgggcagatcttttgagcccaggaattgaagaccagcccgggcaatatagtaagaccccatctctacaaaaaaaaagaaaagaaagaaaaaattagccaggcatagtggtgcacaactctagtcccagctactcaggaggctgaggtgacaggattgcttgagcccaggagttcaacgctacggtaagctgtgattgcaccactgcactcaagcctgggcaacagagcaagaccctgtctcaaaaagaaaatggagagagcaaaatggatagaacagtatgtgcacatgtgcacttaaccaaaggtaaagcatgggaatcatttatgcatgtga

SEQ ID NO: 771734 - DNA, 523 bp, Homo sapiens
tcaggcttcagtggctcatgatacctaaactttgacttgcctacctagactcatcctctacaatacacttaagaaacagaatgagcaggatgaggctagactcatcctctataacacacttaagaaacggagcgagcaggctgggtgcggtggctcatactgtaatctcaacactttgggaggccgaggtgggcagatcktttgagcccaggaattgaagaccagcccgggcaatatagtaagaccccatctctacaaaaaaaaagaaaagaaagaaaaaattagccaggcatagtggtgcacaactctagtcccagctactcaggaggctgaggtgacaggattgcttgagcccaggagttcaacgctacggtaagctgtgattgcaccactgcactcaagcctgggcaacagagcaagaccctgtctcaaaaagaaaatggagagagcaaaatggatagaacagtatgtgcacatgtgcacttaaccaaaggtaaagcatgggaatcatttatgcatgtga

SEQ ID NO: 771735 - DNA, 572 bp, Homo sapiens
gcagctggcttgaattcctccccacaaaatggggctttcttttctaccacatgatcaggctgcacatattcccaacttttatgctctgctttccttttaaatataagttccagtttcagatcatttctgtgaatgcatataagcatatggttagaagcagccaggccacttcttgaacactttgctgcttagaaatttcttctgccagataccgtaaatcatctctttcaakttcaaagttccacagatttctagagcaggggcacaatgctgccagtctctttgtagaagcatagcaagagggacctttatttcagttcccaaaagattccttgtcttcgagaccacctcagcctggactttcctgttcatatcactatcagcattttggtcacaaccattcaacaagtctctaggaaattctatctttccatcatcctcctttcttcttctgatctctccaaactgtttcaacctctgtccattacccacttctaaacttgcttccacattttcaggtatctgtatagcaatgcctgacttcccattaccaattttctgtattagtttgt

SEQ ID NO: 771736 - DNA, 553 bp, Homo sapiens
cctgtaatcccaactactcaagagggtgaggcaggagaatcacttgaacctgggaggcagaggttgcagtgagccgagttcacaccattgtgctccagcctgggtgacaagagtgaaactctgtctcaaaaaaaaaaaaaagaaaasaaatagcaaattataattaaaatctacactttacatgcttagagggaaaaaagtgcaacacattaggtgcaatgcacatgttatttactctgtgcataagaattgtgcttgggcatctgaaaaagcctcaccccatttcctacattctgcaggtgctctgtgtatatttttagcattcatactcaatatattagatttatgtaatgtatatatatgcaagtgtatgtttatattatgttatagaagtaatataacttatgcaagatagtttttttaataaagagaaatgaaaatcagccataatttcatctcgataaaccaccactgataatatgcttttctgggatttcctatgtgtttttttttcttttgtatttttatggatagggggaaaaaacttacctac

SEQ ID NO: 771737 - DNA, 619 bp, Homo sapiens
ttggatgtggaatgtaacaatatgaaaggtaatgatacgaaatgcactttaatgttggtaattaattccctaagggatataaaaaagtcttgttcagaagttctcctttaattctctcttactcttaatatcccctggctgcttcctttctaatagttaatgtttgagatttttaaggttcattttttcttccactggaaactccctggacctcatccattgccattgccattaccatagtttcagctactttcttcatagagcccatctcagatccagagctcagtagtgcaagaaatgtttatttgattttctgaaatgaactaagtttctgcctccagtagtagaatacatagtcccaatcaattcattggtcttgcctgaccctctttttgctaarctggattctgacttctaacaggctgttgtgctccctcatcttggtgataaaggttctcatcactccctcctggaattagtagatgtatctgtgttcccgctggcctctagctgtggacatctttatcaagtagaattacatttggctgttacctaaactaataagatttaaagattcatgttatatggctgtcatgtaaaagtctagacagtgggcagg

SEQ ID NO: 771738 - DNA, 619 bp, Homo sapiens
  misc_feature 73: n = A,T,C or G
acacatcaacagtcccctagtacagttaccatgtcagaagctgtaaacccactttacaagaaaaatctcagcncaatttcccaagtaatctttttttgggggggcgggggagggttatctccaagagaattaattagactcgtaaacaaagatggagaaaaacatccctccttgcccgacccaacctatcttgttccctttcctgcagcctctggctcttcagaagggttagcgaattacctgtgaatttaggtgattgcttcttgcaatattttaggattgtgargagaagtgatgtctcaatacctatttttttttttttttaaacagagtctcactcggtcactcaagctggagtgcactggagtgatctcagctcactgcaagctccgcctcccgagttcaagtgattctcctgcctcagcctccctagtagctgggattacaggtgcccgccaccacgccaggctaatttttgtatttttagtagagatggggtttcaccatgttggccaggctggtcttgaactcctgacctcaggtgatcctcccgccttggcctcccaaagtcctgacattataggcgtgaaaacactgtgcctggtctgaaatacagtaa

SEQ ID NO: 771739 - DNA, 619 bp, Homo sapiens
  misc_feature 73: n = A,T,C or G
acacatcaacagtcccctagtacagttaccatgtcagaagctgtaaacccactttacaagaaaaatctcagcncaatttcccaagtaatctttttttgggggggcgggggagggttatctccaagagaattaattagactcgtaaacaaagatggagaaaaacatccctccttgcccgacccaacctatcttgttccctttcctgcagcctctggctcttcagaagggttagcgaattacctgtgaatttaggtgattgcttcttgcaatattttaggattgtgaggagaagtgatgtctcaatacctatttttttttttttttaaacagagtctcactcggtcactcaagctggagtgcactggagtgatctcmgctcactgcaagctccgcctcccgagttcaagtgattctcctgcctcagcctccctagtagctgggattacaggtgcccgccaccacgccaggctaatttttgtatttttagtagagatggggtttcaccatgttggccaggctggtcttgaactcctgacctcaggtgatcctcccgccttggcctcccaaagtcctgacattataggcgtgaaaacactgtgcctggtctgaaatacagtaa

SEQ ID NO: 771740 - DNA, 620 bp, Homo sapiens
caaaccatggcatcaggatcctcccagggtgggaagggagggtggtgagtttatttacaagcaaaatgaatctgcccgttcaaggagaagaaacatgaatgatactagtttttcaaattcttaccactgggactggccctaaactttagcactttattagaaagccaaaaaccactcaaaagctaacgtctacagagaagacggccaaaaaaaaagtacctttttttctcttcatgggaagttttctaatatttaaaagctcaggattattctgcagagacgttaaaaatgacccaatctgcagggctggaagcatcttctgggaggcaggggagttttgagagaaaagtgtggactttatgaaaagatagatctgcattctttttttttttttttttttttttggatggagtttaagctctttttgcccagcctaragtgcaatggcacgatcttggttcattgcaacctccacctcccgggttcaagtgattctcgtgcctcagcctcccgagtagctgggattgcaggcatccaccaccacgcctggctaatttttgtatttttagtagagatggggtttcaccatgttggccaggatggtctcgatctcctgacct

SEQ ID NO: 771741 - DNA, 581 bp, Homo sapiens
tgcacaggctggtctcaaactcctgggctcaagtgatcctcctgcctcagcctcccaaagtgctgggattccaggcgtgagccaggacacccagcctctgctacaagttctatacatatgggctcacttagtacccacgacaaccctttgaggtattattatccccattttccagatagaacactgaggttcagagaggctaaggagctgccggaagtcatacaacgtattatgaccgcagccaaagggcctgacgcctgccttcattcagggtagaccaaatccccactggggcggccccctccgaagccaacctcaccccccacgggcagattcctaacaaaattcacgctcccytgtttgtggtaaaagtcactagtctgtggacaaggaggagttaaggctgcatttgtagacgcagaacctagttttctgagttttgtgggctgaagtcagacttgtagcattaactttaacgtaaatttttttggaggtgattcatgtagaattcctgccaagaattttcataattagactgaataaggccaaactctgtccgtacatgcctcaccgcgtcgact

SEQ ID NO: 771742 - DNA, 617 bp, Homo sapiens
aacactgaaaagttggtcctgatggaattctattttatcaattctaaaaggcgggtttttccacatactacatttctgaaactggaatacatcttttataatggaggtatcttaccataggtctagactagaggagaattttcccagagaagrtgtgcatctgcttctgctgtcatctgggaacactatcagcccaacaccatctgaattaatcctttgtggcaggcctttttggaccacactggtggtaaggctgcacacccaaagcttagggcttgtggttcaaattctcagagaaatgtttttttctttctctatttagtgtcaaggttgagacttgcatgcttctttatggtcccttttctggatggtcaagttaatttctcatttatccctaggtgtaccagccttgtgggttaggtctcctactaaactccctgtcctgagtgtttttcccttcttagaggtatataatgtaatagcactttttaaaaataatctatgacatcttagattcgatgaaatatggtaccttaaataagcttctccagtctattgagtaggctccagaacttctacacaacgactcattatactgcaacctcttttattctctt

SEQ ID NO: 771743 - DNA, 618 bp, Homo sapiens
attactgtttcaatgtagttgggacaggaaggtttacgttaaacacaaaatgttcctcacatgtcacttgacttgaactgttcccatcagcaagaaaaattactgcaagaatgaaaggagttcacttttctctgtgactgttccaaagaagcggaagagcattttaagtttctccggtttccttgatgaatgtccctcaaacaacctaaaggacttaaaaaataagagaatggaagatgagttaaaatgccttaatgattcagaaaactacatccatattgctaccaagtmacaaaaagaaataattgttccagaagacaattctgtaatgataagaactagaaaattggtttagattcaaatggcatctggagagaactgaaatcaactagaaccagccttcttcaaagctgttcaaatcagacagcatttgctaccaaccacatttctccaacctatcttccaccacagagaaggcaccatctagccctcccagtcaattggggtcagtcagtgcacagctactttctcaatggctaataacatttataattcataatgttactacgtagtttgataagtaacaataacagtatctgaaaaaaatccttatctgag

SEQ ID NO: 771744 - DNA, 654 bp, Homo sapiens
taaaaactgaattcatatcaagtatcttttctgaccacagtcgaatagtattagaaatcagtaacagatagaactttaaaaactgtacaaatacatggaaattaaaatacacactcatgaacaaccaataaaagaaatgaaaaaaatacaagggaaattaaatatttattgaaacaagtaagaatagaaacacaacataaatcctgtgggatgcaccaaaggcaattctaagaggaaaagtgtatagctataaatgcctgcatcagaaaagtaggaagatctcaaatagcctgacagtacacctccagtaatgagaaaaacaagaacaatcaaatgctagaattcgcagaaaaaataccataaagattagagaagaaattttaaaaatagaaacaaaaaatacaaaaagtcaatgaaacaaaagctggggtgttttaaaaaaaatcaaaattgacgagttttaaccagatgaasttagataaaaagaaaacaaagtcataaagaaggcattagaactggtaacccagaaatacgaagcattaaaagattactaaaaacatcacaaacaaattgaaaaatctggaagtgaatacatttctagacacataacgaattcccaagatagaatgataaaaaataaaaataaaaaacctg

SEQ ID NO: 771745 - DNA, 603 bp, Homo sapiens
agaatagaaacacaacataaatcctgtgggatgcaccaaaggcaattctaagaggaaaagtgtatagctataaatgcctgcatcagaaaagtaggaagatctcaaatagcctgacagtacacctccagtaatgagaaaaacaagaacaatcaaatgctagaattcgcagaaaaaataccataaagattagagaagaaattttaaaaatagaaacaaaaaatacaaaaagtcaatgaaacaaaagctggggtgttttaaaaaaaatcaaaattgacgagttttaaccagatgaagttagataaaaagaaaacaaagtcataaagaaggcattasaactggtaacccagaaatacgaagcattaaaagattactaaaaacatcacaaacaaattgaaaaatctggaagtgaatacatttctagacacataacgaattcccaagatagaatgataaaaaataaaaataaaaaacctgaacagaccaataatgagtaatgcaattaaagcagtcataaaaagtctcctggcaaagaaaaacacaagaatcatggttttcctgctgaattaccaaacattttaaaaatagctaatatctattttactc

SEQ ID NO: 771746 - DNA, 551 bp, Homo sapiens
aaaaggcatccaaattggaaaaaaggagtcaaattgtctgtttccaggtgacatgaacatatatagagagaaccctaaagattccacaaaaaacctactagaaataataaattagtcaagttccaagatacagtatcaaaatataaaaatgaatactacayccatgcaccaatagtgaaatatctaagaaagaaatcgagaaagctatttcattaccaaaaaaatgatatctaggaataaacttaaccaaaaaggcaagagatcccaaaatgaaaacttcataaaacatagatgaaagatactaaagcagacacaagtaaatggaaagatatcccatctctatgcactagaagaatgttaaaatatgtgtatcacccaatgtgatctacagaatcaatgcaatccatgttcaattacaagacattcttcattgaaatagaaaaagaatctcaaaattcacatggaagttcaaaatacctcagatagacaaaagaatctggaataaaaagaaaagctggaggcatcacactacctgatttcaaaatatacta

SEQ ID NO: 771747 - DNA, 551 bp, Homo sapiens
aaaaggcatccaaattggaaaaaaggagtcaaattgtctgtttccaggtgacatgaacatatatagagagaaccctaaagattccacaaaaaacctactagaaataataaattagtcaagttccaagatacagtatcaaaatataaaaatgaatactacacccatgcaccaatagtgaaatatctaagaaagaaatcgagaaagctatttcattaccaaaaaaatgatatctaggaataaacttaaccaaaaaggcaagagatcccaaaatgaaaacttcataaaacatagatgaaagatactaaagcagacacaagtaaatggaaagatatcccatctctatgcactagaagaatgttaaaatatgtgtatcacccaatgtgatctacagaatcaatgcaatccrtgttcaattacaagacattcttcattgaaatagaaaaagaatctcaaaattcacatggaagttcaaaatacctcagatagacaaaagaatctggaataaaaagaaaagctggaggcatcacactacctgatttcaaaatatacta

SEQ ID NO: 771748 - DNA, 612 bp, Homo sapiens
gagatggctgcacaactcagtaaatgtactaaaaatcttttaactttaagttaaaacagatacattctatagtatgtaaattatatttcaacaaagctgttttaataaaaaaaggaaaaatgtgtttactatatcggcttagaaacatgcctcatttctaggaaataaaagatagaggtgagagatgatttactttgagaaaagacattgtgtcacctatgaaattttattaggcacagagtcatattttaaggtagatagttctgtactgctgaaatagtaattttaatgtctttaygttgccacatgttaagaccataatgtagttataaatggaaatgtttacacctgaagtgagtattttcaaattaaaatttaattaagtgattttcttcgacacttaattctagattccccagatgaattgaagtgtattgctgtgtcttgtaataccttgctttaactagctttttatgtattttagttggtatagctttgttattattcatattaacaaatctgaaaatatgtcaaattacgtatttttatgaccacgtaatgttttaaaggcacctactggttataaaatcataatttaggataaatgtggta

SEQ ID NO: 771749 - DNA, 507 bp, Homo sapiens
tggtccacctgctcctggcacacccttgcagaggtggctggttgctctttgagccagcttggacttacttggcatgcacaggccccgggtactgacaagctgctccgagtgagcttgtcttgtcttgggccaaattctaastctggccagggccacagaaggctgagtcccctgggtggtaatcctggctgctgcagggaggcccatggtgctcctcccctcccagggctcaggatgaggttcaactgggacaggaccctttaggtatgggacttgtgccccaggagggggcctctgtcacacaggttgggtaagatgtatggcatgctgctggcttccagggctgttgggatgacacattcacccttccctccagggacctcaaaatgaccagcttcccctttgagaatgacttcccaaggcctaggagccatctggggctgcagggcagctgcctgcatgctgccctggcttcttccatgttgtgctggtcactacccaccaagg

SEQ ID NO: 771750 - DNA, 601 bp, Homo sapiens
cctctttcctctctctgtcttcctcctacacctgccatatggaacatctcattgtcgcttggccttctggtatggtaggagacttcctgagtcctcccagaagcagaagccactatgttccctttacagcctgcagaaccgtgagccaattaaacctctttttaaaataatactacagaaaatttgtactgtagagtggagctatgaaatgccctcaaggtttttttcctgattttttactattaacatttggcttcttttatatgcaaatatctgaagccttcttgaattttccccctgaaaatggactttttttcttttaccacactgccaggctgtcacaacgatagctgaaaktgtagaagcaagttcagaagcaggttcagaagctgggtaacgaccacaggctgcacagtttggagggcttggaagaagacagaaagatgaatgaaagttttgactattgtagagacgtgttaaatagttataattaaaagggtgactgaaggatggatagtgaaggccaggcttagaaggtctcagatgaaaatgaacaacttactgagagcagaagccaaggtaacttttcttttgccttagc

SEQ ID NO: 771751 - DNA, 601 bp, Homo sapiens
cctctttcctctctctgtcttcctcctacacctgccatatggaacatctcattgtcgcttggccttctggtatggtaggagacttcctgagtcctcccagaagcagaagccactatgttccctttacagcctgcagaaccgtgagccaattaaacctctttttaaaataatactacagaaaatttgtactgtagagtggagctatgaaatgccctcaaggtttttttcctgattttttactattaacatttggcttcttttatatgcaaatatctgaagccttcttgaattttccccctgaaaatggactttttttcttttaccacactgccaggctgtcacaacgatagctgaaagtgtagaagcaagttcagaagcaggttcagaagctgggtaacgaccrcaggctgcacagtttggagggcttggaagaagacagaaagatgaatgaaagttttgactattgtagagacgtgttaaatagttataattaaaagggtgactgaaggatggatagtgaaggccaggcttagaaggtctcagatgaaaatgaacaacttactgagagcagaagccaaggtaacttttcttttgccttagc

SEQ ID NO: 771752 - DNA, 646 bp, Homo sapiens
gttacatgtgtatacacgtgccatgttggtgtgctgcacccattaactcatcatttacattaggtatatctcctaatgctatccctccccccttgtccgccccacgacaggccccagtgtgtgatgttccccatcctgtgtccargtgttctcattgttcaatttccacctatgagtgagaacatgcagtgtttggttttttgtccttgcgatagtttgctcagaatgatggtttccagcttcatccatgtccctacaaaggacatgaactcatccttttttatggctgcatagtattccatggtgtatatgtgccacattgtcttaatccagtctatcattgatggacatttgggttggttccaagtctttgctattgtaaatagtgccgcaataaacatacgtgtgcatgtgtctttatagcagcatgacttataatcctttgggtatatacccagtaatgggatggctgggtcaaatggtatttctagttctagatccttgaggaatcaccatactgtcttcctcaaaggatgaactagtttacagtcccaccaacagtgtaaaagtactcctatttctccacatcctctccagcacctgtgggttcctgactttttaatgatcgtcattgtaactggtgtga

SEQ ID NO: 771753 - DNA, 646 bp, Homo sapiens
gttacatgtgtatacacgtgccatgttggtgtgctgcacccattaactcatcatttacattaggtatatctcctaatgctatccctccccccttgtccgccccacgacaggccccagtgtgtgatgttccccatcctgtgtccaagtgttctcattgttcaatttccacctatgagtgagaacatgcagtgtttggttttttgtccttgcgatagtttgctcagaaygatggtttccagcttcatccatgtccctacaaaggacatgaactcatccttttttatggctgcatagtattccatggtgtatatgtgccacattgtcttaatccagtctatcattgatggacatttgggttggttccaagtctttgctattgtaaatagtgccgcaataaacatacgtgtgcatgtgtctttatagcagcatgacttataatcctttgggtatatacccagtaatgggatggctgggtcaaatggtatttctagttctagatccttgaggaatcaccatactgtcttcctcaaaggatgaactagtttacagtcccaccaacagtgtaaaagtactcctatttctccacatcctctccagcacctgtgggttcctgactttttaatgatcgtcattgtaactggtgtga

SEQ ID NO: 771754 - DNA, 479 bp, Homo sapiens
cggaacattgaattatttggctttacttactaaaaatgtacatgagtagatgggcttctgtctcagtgggatcaggggtcaactaatatcaaccaaggctcattctgtcccttcatttcctatgtcagctctgcttttcaggcaagctgttttgagagagcagcaaaaatggctccataaagttcacatcacttacttccttacaaatagatatgccaataaaaagaaagcacctcattcccagcagtttcatcaraagttcagggatgacttccatgagcccagcttggatcacatgaccactcctgaatcaattaccctgctgatctgattgcccagggtgggtcagccttcccaaatcacatggactagtattgaaagacaggtcctcccatgaaaaaaaaaaaaaaaaaaaaaaaggaagggtagtggcagaggaatatgagtggggggggcctcatctctatataaaaagtatg

SEQ ID NO: 771755 - DNA, 599 bp, Homo sapiens
aactggatccagcggaacattgaattatttggctttacttactaaaaatgtacatgagtagatgggcttctgtctcagtgggatcaggggtcaactaatatcaaccaaggctcattctgtcccttcatttcctatgtcagctctgcttttcaggcaagctgttttgagagagcagcaaaaatggctccataaagttcacatcacttacttccttacaaatagatatgccaataaaaagaaagcacctcattcccagcagtttcatcaaaagttcagrgatgacttccatgagcccagcttggatcacatgaccactcctgaatcaattaccctgctgatctgattgcccagggtgggtcagccttcccaaatcacatggactagtattgaaagacaggtcctcccatgaaaaaaaaaaaaaaaaaaaaaaaggaagggtagtggcagaggaatatgagtggggggggcctcatctctatataaaaagtatgagcgtatttgtgctcttttgtacattcatttgtatagtcactgggaaaaaaatgagaaaaacccaaacacggctttctatatgcctctgtgctttgttttcaacactg

SEQ ID NO: 771756 - DNA, 501 bp, Homo sapiens
tcaaagttgaactctaccactgttcagctgggtgactttgggcaagtgactttccctctctgatcctcatgttcctttttgataaaaacagcaaaatgtcaggcctatggggattcaaggagccaaaagaaaaatgtgtgtcttagtctgaatttcctggaagtagatccygaggcaaagattcaaatacaaaaattttgtttggagataacgctaggatattaattcgactgccagttcttccttagggtgttaatcccaggaaacatcagtggaggagtggggaactgagacaggaaaggaatgcagcagttaaagggaccttcatcaagaaagtttccactgtggcagccaggactcagccctgccaggtacctctgagagacagcacagaacatgtgcttcagagtcatcatacccagagcaagggaccaggggtatttatccaccaatacccaccagtcactcctcagggatcctcccaagggcatgattcctcca

SEQ ID NO: 771757 - DNA, 515 bp, Homo sapiens
tccaagcaggatccctcccttgccatctccagacctgccccacaaactccctccctggtctcctggctcttgttcactccttccaggcagccttccacagtcatctctaaaacatatatgactgtccctcctttatccagcaccttccatggctccccagagccctccaggtcaagtttaagttctttgaycagacactagatctcaagctgcattctacctcctgaattaagatcccggagaagcccaccttgctcagcacaaacgcatcactgaagtcgaaaatcttgaacgtggccttggcattgaggaagtcatcaacaccctggctagtgagggtgcagtgccgctccaggatgatggtgtctaaagttgtgcaccaggtcgcaggccctgcagaagcatctcccctcaggagtgaggtagtacaggaagtctgtgcacaggcagatctgctggtgctgttacactatgagggcactgagctccaagatggtggcaatatattcactggg

SEQ ID NO: 771758 - DNA, 637 bp, Homo sapiens
gacagaagagtgctctggtgagacaggccacagaggtccccgggggggggtgggatcaggggctggaggattctggaggtttccagccttgggctctgtggttcctcaaagagtttaggtttacctaggactaggcctcccctcccatgmttcaaagagtgggtgagtgctatgcatcacgaactctgatctggacctattttttcatttaggtcaccaagagacaacccctaacccccaagctagggatggtccaagctctggcatgagattctcttccagcaatgtgatgcttgcagggacagggagaaaagccggtgaccaggcctgctgtcccccaggtaaggacagtgtgctacccaccctctgagaggcaggtggtgccagctcactgcactgggtgcctgtacccctggctctgcagacaccggtcatggaggtcctcccctctccacattaccttcttgctgctcccagatttcttctggtcattaagcactttgagccatttttctgtgcagccgatctgatatttttgctatcagatgaaacatgacaaagtaagccgagccaccaggattcctggagggaaccttggatgctgcgtcttgggatccagagccctgatgggactgaa

SEQ ID NO: 771759 - DNA, 488 bp, Homo sapiens
agaactataaatcataaaattataaattctacaaaaacaaatcaaccttatctaccacccagtactacccaattacagaatgttagaacggaaggtctcaccatggactcaagagctgatatgagcaatgtcaccaccatcctgttctctgcggactcatcttcaacagactcatcttcaacggactcctcatctgccatggactcctcatcttcaatgggcagggtggaaactgcagcttgtgccatgatccctgtgcaagaaaagtagtaagaaattgaatggtagaaatccagtatcctaaactcacatccagagctgtgagagtttttcactggctggcaaattgtttytttgcatcagagaaaaaaacaaaacttggtaacttggtattcgatttgcccaaaactctcatcagatagaaagttaggggatgaattctctatctagtattatttccatgaagttagatgaatatcactcccaaa

SEQ ID NO: 771760 - DNA, 497 bp, Homo sapiens
cactcccaggttggctcttgttccccttgttccctggcttttctacattctcatgggtcaaggtgtttgccttgtcagtctcaatgtgagaacctggatatttcagtttaaagtgctgaattcacttgcccttcttcattcctctcagtgagtgccatagaccacagctgcttytaattggccatcttggatcaacgttgttattccctttttcactgcttatttcatttcactcacatctataagcaaaaaaaaaaaaaaaaaaaaaaagactcaaacggcataaaaaagtgacttttgtaggttattgtttagtaaagcatttgaattaaaaaaatctcatcatgagctatagctcatatttggtcattttttgtacttctcatttgggtatctaagacttaatgctgaattgaggcatctgtggaataaataaaactctggacctgtctggacaagcaagctcaaagcaggagtgtgctgtggtgggaataggc

SEQ ID NO: 771761 - DNA, 561 bp, Homo sapiens
ttacaaacaattcaccagggtttttggggggcttacagtggctgtagtcttcaaacctggtattttcaaaatccattacctcagcatgggaaaaaagactagaaaaataaagccctggtgagcagggaattagatttttagaagtgtaytgaaactcaaaagttgaagtacatttgattctcattattctggttataaagtgaccacaaacagtgaattagcaaatactgaaccattgctcctagaggacatacaggtttgggttcctgcaagtctctggtcacagtattttcatcaatcagtcaatatacaacgttgttttatgtgccaaattaaccgacgcagagctctaaattatgcagctcaacttcatatgaaatgcaggacaacaatcaggtctttgggggtggaggtgggaggatgtattgctctgcattcaagcagtaaaaacatgtgacactcaaattaggaggatatgaggagagtttaatcaaaggactacttacaaaggtgggggtggggggtgaaatgtagcaggtccagaacaatctctagggctgg

SEQ ID NO: 771762 - DNA, 454 bp, Homo sapiens
ttaaaaccctcacacatgatgtatagtaaatactgggaatgtatcatgcacaagatttaacctttgaaagtactcaagaaaatatcttagatcattctaatatatatttctaatactatttttaaaaatatataaactctgtcattaagcatgaggaaggaccatataraaaatctcaaaaaccttacaaatgatatgttgtcttctatcaaaaggaagatgtctttgggctgagaaaaatcaccaaagatttaaaaagagatcttactttttgtaaattaatcctttatcttaattcctaagattagatttttagaagggaaaattatcacagaggtaatattcaggcttccagcctgttggaagagaacaggatgaatgtgaccactgtgatgaggtgacagcaatggattccacgagtaattaagcttcatggaatgcatcaaaaagctta

SEQ ID NO: 771763 - DNA, 593 bp, Homo sapiens
atatgtaatttttattgcaatagtagcttacttctgccatgtacaagaattatttccttgactgttcaaaacaaggaagaacagaggtttccaagagcctttgaagattacagaataaaacaccaaaagagataaacaccttactcctacgccagtctgtactttcttctgaagccttgctttgactacctgctcaactttcatattaatttgtcttaacatgtttttcaaaatattacatctgccaggtgtggaggctcttgcctgtaatcccagcactttgggaggctgaggcaggaggacggtttgcacccaggagttagagactaggttgggcaacaaagcaagacccawctctacaaaaaaattttttttaatagccaggcatggtggtgagtgcctgtagtcccagctagctacttgggaggttgaggtgggaagatttcttgagcctgggaggtcgaggctgcagtaagctatgatcatgccactgcactcctcgcaacagagcgagaccctatttcaaaaaaaacaaaaacaaaaacaaaattacatctgaccactctaaggcctctgaaaatgctgactgcttc

SEQ ID NO: 771764 - DNA, 558 bp, Homo sapiens
gtatgacagggaatctgaaagctcccagcactttgggaggctgaggtgggtggatcacctgaggttgggagtttgagaccagcctgaccaacgtggagaaaccccatctctactaaaagtgcaaaattagctgggcatggtggtacatgcctgtaatcccagctacttgggagactgagrcaggagaattgcttgaacctgggaggcagaggttgcagtgagctgagattgcaccattgcactccagcctgggcaacaagaatgaaactctgtctcaaaaaaaaaaaaaagattcaatctaaaaagatcttcaccaaagcacattatagtcagactgacaaaagtcaaattacaaagagagaattctaaaaacagcaagagaaaagtatcaagtcacacatataagagtattcctatcagacaaatagtggatttcttagcagaaaccttattttataggcaaggagaaaatgggaagatatactcaaagtgctggaaaaaaaacccccaaaactgccagacgagtaagtatactatacacagcataaaggagaaata

SEQ ID NO: 771765 - DNA, 558 bp, Homo sapiens
gtatgacagggaatctgaaagctcccagcactttgggaggctgaggtgggtggatcacctgaggttgggagtttgagaccagcctgaccaacgtggagaaaccccatctctactaaaagtgcaaaattagctgggcatggtggtacatgcctgtaatcccagctacttgggagactgagacaggagaattgcttgaacctgggaggcagaggttgcrgtgagctgagattgcaccattgcactccagcctgggcaacaagaatgaaactctgtctcaaaaaaaaaaaaaagattcaatctaaaaagatcttcaccaaagcacattatagtcagactgacaaaagtcaaattacaaagagagaattctaaaaacagcaagagaaaagtatcaagtcacacatataagagtattcctatcagacaaatagtggatttcttagcagaaaccttattttataggcaaggagaaaatgggaagatatactcaaagtgctggaaaaaaaacccccaaaactgccagacgagtaagtatactatacacagcataaaggagaaata

SEQ ID NO: 771766 - DNA, 558 bp, Homo sapiens
gtatgacagggaatctgaaagctcccagcactttgggaggctgaggtgggtggatcacctgaggttgggagtttgagaccagcctgaccaacgtggagaaaccccatctctactaaaagtgcaaaattagctgggcatggtggtacatgcctgtaatcccagctacttgggagactgagacaggagaattgcttgaacctgggaggcagaggttgcagtgagctgagattgcaccattgcactccagcctgggcaacaagaatgaaactctgtctcaaaaaaaaaaaaaagattcaatctaaaaagrtcttcaccaaagcacattatagtcagactgacaaaagtcaaattacaaagagagaattctaaaaacagcaagagaaaagtatcaagtcacacatataagagtattcctatcagacaaatagtggatttcttagcagaaaccttattttataggcaaggagaaaatgggaagatatactcaaagtgctggaaaaaaaacccccaaaactgccagacgagtaagtatactatacacagcataaaggagaaata

SEQ ID NO: 771767 - DNA, 591 bp, Homo sapiens
ggagttacattacgctcaatatcgcagggagtgtacactccccctgtgatattgttccaaattccagggtgaaagaggatgatattactcttaatatcgcaggggttgtacaccccctcgggacattgttcctaatatccagggagggagaggatgatattactcccaacccaatagcraaaaggatgtacaccttcctgcgatattgttcctaatatccgggggggagaagatgatgttactcccaatatcgcaggggggctgtacacccccctgtgatattgtttctaatattgagcagtggagaggatgactcccaatttccaagaagatatacacttcttctgtgatatagcttctaatatttaggaaaggagaggatgacattacttccaatatcacagtgggtgtacaccttttctgcgatattgttcctaatatccacggggggaaaggatgatattacttccaatatcacaggaggtgtacacccaccttgtgatattgttcctaatagccaatgggggaaacgatgatattactgtgaataccacaaagggtgtacaccaccccccatgatattgttcctaa

SEQ ID NO: 771768 - DNA, 591 bp, Homo sapiens
ggagttacattacgctcaatatcgcagggagtgtacactccccctgtgatattgttccaaattccagggtgaaagaggatgatattactcttaatatcgcaggggttgtacaccccctcgggacattgttcctaatatccagggagggagaggatgatattactcccaacccaatagcgaaaaggatgtacaccttcctgcgatattgttcctaatatccgggggggagaagatgatgttactcccaatatcgcaggggggctgtacacccccctgtgatattgtttctaatattgagcagtggagaggatgactcccaatttccragaagatatacacttcttctgtgatatagcttctaatatttaggaaaggagaggatgacattacttccaatatcacagtgggtgtacaccttttctgcgatattgttcctaatatccacggggggaaaggatgatattacttccaatatcacaggaggtgtacacccaccttgtgatattgttcctaatagccaatgggggaaacgatgatattactgtgaataccacaaagggtgtacaccaccccccatgatattgttcctaa

SEQ ID NO: 771769 - DNA, 520 bp, Homo sapiens
ctctagacattttccctatccttaatttatatttttgttgccttaatttacttttttaccttttgtgtgttccttaactttgaattatagatgttgtttttgaccattttggctttttatgtttatactagaagattgaaagatttatatagcaccattacagcactggggtattttgagtttgattttgaagttactkctagtggtgaattatatactttcacatactttcatgatagtaattattgtccctttgctttcagttgtggcactcttaagcatttcttgtaagactggtctagtggtgatgaattccctcagcttttgcttatctgggaaggtctttatgtaaccttaatttctgaagaatagctttgctgggtatagtatttttggctgcagttgttttctttcagctgtctaaatgtatcatcccattttctcttggcctgtaagatttctgttgagaagtcaactaatgatataatggagattcccttgtatgtgacatgtcagtttt

SEQ ID NO: 771770 - DNA, 576 bp, Homo sapiens
cactgcaaaacattaacttaatgggttattaatagatgtaatgcaaaaatgagttttgttaaaacactttaaaaagtgttgaaagtgctgagttacaggattaagaaactcactcaaaactgctcaaatacatggaaactgaacaacctgctcctgaatgactactgggtgcataacaaaatgaaggcagaaataaagatgttctttgaaaccaacgagaacaacgacacaacataccagaatctctgggacacatgtaaggcagtgtgtagagygaaatttatagcactaggtgcccacaagagaaagcaggaaagatctaaaattgacaccctaacatcacaattaaaagaactagagaagcaagagcaaacacattcaaaagctagcagaaggcaagaaataactaagatcaaagcagaactgaaggagatagagacacaaaaaacccttcaaaaaatcaatgaatccaggagctgtttttttgaaaagatcagcaaaattgatagaccgctagcaagactaataaagaagaaaagagagaagactcaaatagacgcaataaaaaatgataaa

SEQ ID NO: 771771 - DNA, 590 bp, Homo sapiens
ataccccgtctgatgttcttcttaatatccatggggggagagaatgatattactttcaatgtcgcaatgggtgtacacatacctgtgatattgtttctaatatccagggggagaggggataatattacacccaatattgaaggggttgtacacccgcactgtgatatttttcctaatatccaaatagggagaggatgatataactcccaatatyacagggagtgtacagcccccctgtgatactgtttttaatatccaggttgggatgctattcctcccaatatcgcagagtttgtacacccctctcgtggtattgttccaaatatccaaggatggagaaatcatataactgtcaatatcacaagagggaatacaccatcccatgatattgtttctaatatccagggtgggaaaaagaatgatatcactcccagtattgcaggatgtgtacacccccatgtgatattgctcttaatatccagaaggtggagtaatatattactcccaattttgaatggagtgtacacacccaccctgcggtattgttcctacagtccggtgcggggagaagatgatattactcccaatat

SEQ ID NO: 771772 - DNA, 574 bp, Homo sapiens
ttgtagcaaaaattctgctaagtcagtttaacaaaaattccccacccttgatatctaatcactctttacatataagcaaattcatcatcacttaactttgatagcttatcccccagcctatcttcagcaagaattctgttaagtattcttagaaataattcccccaccctgatgtttcctctgagtaatttttctcttgatccctttaattctgctggttgactatatatttccactgtccttgctatactcagagttgagggtgatttcactacccarttgcaatagatttgatgcctatcacaatagtgctaaatagtcttcctcctcaacaaactatgccctgaagtaacatacctcaaaataataaaagccatctatgacaaacccacagcaaacatcataccaaagagaaaaaaaagctggaaggatttcccttaagaactggaagaagatgagaatgccaactctcaagactcctattcaacataaaactgcaagtcttagccagagtaatcagaaaagagaaagaaataaaagacattacatgggaaaagaggaagtcagattatct

SEQ ID NO: 771773 - DNA, 571 bp, Homo sapiens
ccaaaaaaagcccaaatagccaaagccgtcttaagcaaaaagaacaagccagaggcatcacattcttctatttcaaactatactataaggctacagtaacaaaaacagcgtggtactagtacaaaaacaggcatgtagaccaatggaaccaaatagaaagcccataaataagactgcacacctataactatctccaaagtcaacacaaataagaaatggggaaatgactccctgttcaataagtggtgctgggacaaatggctagccatatgcagagaatgaaactaggcacctgcctttcaccataaacaaaaagtaactcaagatggattaaatgtytaagtgtaagacttcaaaatataaaaatcctagaagaaaacctaggaaatacccttctcatcatcagccttggaaaggaatttgtggctaagtcttcaaaagcaattgcaacaaaaacaaaaactgacaagtgggacctaattgaactaaaaagcttttgcacagctacaaaaactatcaatggagtatatcaacaacctacagaatgggagaaaatattcataaactatgc

SEQ ID NO: 771774 - DNA, 571 bp, Homo sapiens
ccaaaaaaagcccaaatagccaaagccgtcttaagcaaaaagaacaagccagaggcatcacattcttctatttcaaactatactataaggctacagtaacaaaaacagcgtggtactagtacaaaaacaggcatgtagaccaatggaaccaaatagaaagcccataaataagactgcacacctataactatctccaaagtcaacacaaataagaaatggggaaatgactccctgttcaataagtggtgctgggacaaatggctagccatatgcagagaatgaaactaggcacctgcctttcaccataaacaaaaagtaactcaagatggattaaatgtttaagtgtaagacttcaaaatataaaaatcctrgaagaaaacctaggaaatacccttctcatcatcagccttggaaaggaatttgtggctaagtcttcaaaagcaattgcaacaaaaacaaaaactgacaagtgggacctaattgaactaaaaagcttttgcacagctacaaaaactatcaatggagtatatcaacaacctacagaatgggagaaaatattcataaactatgc

SEQ ID NO: 771775 - DNA, 629 bp, Homo sapiens
gggatatagaaacttatttgcaaagctgtgaacttccaatttttgtgaatgttcagaaagatgttagctgactagctttcaaatatactatttaattgctacattaggtaagagataatcttttaataaccacctatattaaaatttctccaattacgttcttctcatgtgatgaattctggacatttttttaaataagggcttaccacttattttctttgaaaattttaacacaattttttgttaaagagtatttatttttaaaaagtattttttaaacagttgcatatatataattttggggaggatgattctatccagtaaatttctttatttactaccaagtacatttcaaaatgagacacattctcacaactatattcagcctcaggaaataatttatgaatgaatattacttgaggcacacagagagaagkgactctgcaagacatattccataaaatatatgtatatttttcttgttttatgaaagatgacaaattttagagctctataatgttaaaaaatatataaattttttttcttagggaacactgaggaaaaaaattggattaaagcccacactaattctcaattctggaataaatattttctctcctttcaagcta

SEQ ID NO: 771776 - DNA, 537 bp, Homo sapiens
tagaatagttagtaaccccaaagattcagcattttttctggtaaaataaataaaaaaagaaaaagaaaagtgaaaatacataacacacacattttaaaacatattcaggttataataaaagaaaacttttgaaaaaatgtttgttttagtctaaggcaaacattaatcattaatcagctttctctcaattcttgctgctgctttgatagtaatgctcttttttytaataacagaaactgcaccttgtcttttctgatgccccatggtttaactcatataggacagtcatatttcaaacttttggagccacttgattattcagccctgtttgtcatcaaactgtagctgatatcatcacaaataaaattgtacatagtttaaatgatttattttctccagtggcctttgctaaaagtttcttaattttgactaaaatcatctgtacttgccagattttttaaaaaaaatattctgaaaataggcaatgttgaatctgcatagcagtcttttatgtccagcaactattttaaggttctg

SEQ ID NO: 771777 - DNA, 598 bp, Homo sapiens
atgtgttatgctatttattatctttgatttaagatataggagctgggtttcagaaaagctgaataacactcaaagttacatagctattagtttagcagagattttaatgtggactagactgaccccaagtctgtctttacatatagtcggtataactttcccaaatatactatacaacggaagacagagaccatgctatacaataatgtaacactggtgatgacctttaacttccccaagagaatttatttactcataaaacaagtttaatcggcctagagccctgaccctctctaaggttacttcctgccccaacaktcctttgctctatagctaatctggataagctcctaccaaaacataatttgaaaaaatagtaattatatgcaatgtaggatacaagcctccatgtatgcttttgagtgtgccaagtcttccgaaactctaagtttctatttctctctctacattaaaatagagcatatatggcaagaaaagaaaaatgtaagcttcatgaggggatgagtgtcctgggctcctttcgaaagtgtatttaagtttaatgccacgaataaatcttaaaaaagatattatcatc

SEQ ID NO: 771778 - DNA, 600 bp, Homo sapiens
tatcttatgtgatatctgctatcccagagtctttggtcctctgttccttctcaagtcttggctcccgtgtactacttcaaagccctatagatattttattctaaagaaaagaaacttggttcctttaagttgtttaaacatttctttctgggtataaacttgggtttgtgtctgggagctctgttaaaaaaaaaaagtctttagtaagccaaagctgttagaagcttataagtaagtgacattacaattgaccgtcagtaaatagtggaaagattgcatgactagctactccttcagatctgagacaacctggagctagatttttgtactctctactcaraaaagcatatagtgacttggggtttgatgctgtacaaaaatgacatgcttatgcacaactttaactttctgcaacacttttacaacttcttgtgaatgaagtaggcagggctcgcatttgacagatgagctatgtccagcgtgaggcagagttaaaacccttttcctggctcaggaacttcaggctggggcctgtgtctgctctccctgcatccctgtcctctagcagatacctctctgctaacatgctgagtgtccttg

SEQ ID NO: 771779 - DNA, 504 bp, Homo sapiens
aaagtaaataaaagcttcccagaagggctgattcttaattctttcttgtttgctatttatttaaattaggaagtaattccaacataaagtataaaaaaaaatactattcacagtctgtcacccagattaaaactataacaatttagcaatagttgcttcagatgggctacttttttgtgtgtgcagttgacctcccaacctctttcaatcaactttcctcccctcctctctcactgaagataattagtatctttttaaaaaaattattagatagagatgggttctcgctatgttgtccaggctggacttgaactmctggcctcaaccgatccttccacctctgacttcaagtgctgagattataggcatgagccatcacactaggcctttttttttttttccagcatggtttccttgccaaacatattttaagattttttactccaaaggtatatattcatcataaacaatacagtattgttctgcttttcaatttgcatacgt

SEQ ID NO: 771780 - DNA, 599 bp, Homo sapiens
ctgagtgtgggggctgacagagaaggaggaatcaggagtcctgtccaggtttctgaccagcaactggagagatgcttactgagacagtggccatgcgggaaggcgggaggggtgttcagaacgtgctcaagttcacacatgtggggatggagatgctcttaagctgctgggctgtttctcctgagacaagcccacactggagcggccagcagcctacagatggtaattaaagccacagggaggatgagctcacgcagggagaacgcgtggagggaggaggtgaggactgggatccactcgagaagcacccacagcaaagggggcgggcgaccagcgaaggaaagcaagaagccagccaaggccaaagccacaggcaccggcggggttccrcctgggacctgaggctggacttccaagcaggcagcggcccacgtggccaaatgccatgggaggcagaaacgtcctgagaacagcagttggatttagaagtggtaagggggtggattggagaggggacttggtgactttgtagaccactggtgatgccactcagaggaaaaacacctggaagaccacttgcttaaaaaaaaaaaaaaagt

SEQ ID NO: 771781 - DNA, 612 bp, Homo sapiens
ccgtgatgtcagccagaggggaggggttagcgttaaccccctcctggcctcgatgcgcgcccgccggggcccggtcggagcccgagcgcacgcgccttcccgaccgaagcagaggcggatcgcgagcgcgggctgcggggtccggctcaggaccctcgctcgggagctacccctcggccgccttccagctggggagccggctggagcgcgggctgccctcctcctccgctgacaaaggcaggcagtgacccctagcggccggcggcgccgaggcgcggcgggtgggggtggagttaggaccgggccgggggcggcggtggaggagagggcgggatggagaatcccggctagcagcgtgggagctggcarggcttctgcaagccctctgctcccaccctggccccatttcacagacgaggaaacaaaggcccaaagaagagttccgcccgggacggaacgtggtatagctcgcaacagaacccagtctccggagatccctctcctctgcaccacttggacgttccacggagaggcagcggtgcgcggggcgacggggagctgccagagaagtcagtggtgggcatgagtgggtgagacgggcccactgaggtt

SEQ ID NO: 771782 - DNA, 612 bp, Homo sapiens
ccgtgatgtcagccagaggggaggggttagcgttaaccccctcctggcctcgatgcgcgcccgccggggcccggtcggagcccgagcgcacgcgccttcccgaccgaagcagaggcggatcgcgagcgcgggctgcggggtccggctcaggaccctcgctcgggagctacccctcggccgccttccagctggggagccggctggagcgcgggctgccctcctcctccgctgacaaaggcaggcagtgacccctagcggccggcggcgccgaggcgcggcgggtgggggtggagttaggaccgggccgggggcggcggtggaggagagggcgggatggagaatcccggctagcagcgtgggagctggcaaggcttctgcaagccctctgctcccaccctggccccatttcacagacgaggaaacaaaggcccaaagaagagttccgcccgggacggaacgtggyatagctcgcaacagaacccagtctccggagatccctctcctctgcaccacttggacgttccacggagaggcagcggtgcgcggggcgacggggagctgccagagaagtcagtggtgggcatgagtgggtgagacgggcccactgaggtt

SEQ ID NO: 771783 - DNA, 629 bp, Homo sapiens
aatatctacataatatttcccattctaaagaagtttaatttttagctttacatacaattactgattttgagtatttgtcctgaagagctgtggctcacctacaacaggttctagggttgaatttatacatataccatgtgggaagtttggggggatgaaggaggtaggtatacacttaaaaataaatgggaattacagcccagtcttctagaaacttgaatttgcatrttttctggggtgggcagggggggaagatggcttctaccttgcaagattctacagggacatataatctatgcctaccatgcccataatttaataaataaatgttaagcccctgcattaatttagagagagaactttgtataatatgaatctttttggatctcctgaagaaatatgcccagagaaattacagggattttgaaaagttaaaaacaaagccaggaggcaatctatgtcttctcactggttctcaaacttcagcatcagaattacttggaagacttgacaaaacgcaggttaccgagctgcagccacacatttctgattcactaggtctggggtggagcccaaagatttacatttctaacaagtacccatgtgatgctgatggtgctggttcaggg

SEQ ID NO: 771784 - DNA, 625 bp, Homo sapiens
ggatgttttagttgacaaggaaaggactgccaggatatgacaaatatttggaactcctcctaaatagagaaggtctggaagagaggaattctttcaggttcattcagtgacccctgtcagggatcgctgtcagttggaagagggcatggagcagagaggttaggaagtccagctctggagtctgtcttcatgagttcaaatatagccaccaacatgcattagctctgtgaccttgagtaggttgtctatccattctctgtctcagcgtcctcatttataagatgggatcatggtttcctcctgaaaggtctgtggagaggacaaaatgagataatatacctgtgaccagtttgctagtgagctgggctgggcagggtgcttgcagaatgcactgaattcttcctttccaaaccgaccctctttcatcttcctcctcatcctagacaaaaccccccagactatccactagatgacagtaccccagytgtgacaatgaaaatgtcccctagggggcagaatttcccctggttgaaaaatcactgaattaagactgtcccagataagatgaccaaaattttcagtgttttccaaattgcaggagacactttaagctccctgcattctt

SEQ ID NO: 771785 - DNA, 627 bp, Homo sapiens
atgaattttgcaatgctagtttcagaaagggtgtggtacccgcaaactggggaaagttgagaagtattggtgggtctggctggctcttctccctggctgacgttgtaaggctgagatttaggcatatggactgcccttctttttggcatttttaagcatcagatcgctgttcatctacttgcaactgcattcttctaagcggaaattattctcccttcagttttctgggtttcagcataactttaaacaagttacacatttcagatgcatattcttggacttataaattgtaatagctgcttgtagtttcttactcatatgctgtacactttttcttatggcttcatttaagcatatcatactaaaaaccaacatgccaggytattccagagacttgtaaccagatcctcagagctgggggctcttagacatatttcagcccagccccctcattctgtagatgaggagcagaactcacagaggtgatctggtgtccaaaggcacacagcttgtaagtagcaccgctgagatcaaatcaggccttcacacttgcagctcgggatgtttccacaacaccgtgggttctgttaccatctttttcatcccctacatctcccgggaggtttt

SEQ ID NO: 771786 - DNA, 604 bp, Homo sapiens
tttttaatgtattaagtttcctgatccgataagattttattaagtgttttcacaataaacacaagatatggaataaaaatattaatgctaattggatataatctagtgcatattccttatttacaagtagccaaagagatgaagcctcagcttgagctagaaatcagatccaagtccttactgagtgctttttttttgagacggagtctcgctctgttgcccaggctggagtgcagtggcacaagctcagctcactgcaagctctgcctccaggttcacgccattctcctgcctcagcctcccgagtagctgggactacaggcgcctgccaccaggcccggctaatttttgtatatttagtagagacggggtttcaccttgttagccaggatggtctcaatcccctgacctcgtgatccgcctgcttcagcctccaaaagtgctgggattacaggygtgagccaccgcgcccggcactgagtgctctttctaaccacattaaaggtgagagcctttagttaattaaggcaagtattaagtggtccatatgtgccagacactgcaaagtgtttaataaaattacttttaaacttaatggagccaa

SEQ ID NO: 771787 - DNA, 565 bp, Homo sapiens
ccgtttcctaagcccgttggaaaagggcagtgttcaggtgggagtggcccaattttccaggtgccctctgttacccctttccttgaccaggaaagggaactccctgatcccttgcgcttcccgagtgaggaaatgcctcggcctgcttcggccggcacacggtgcactgcacccactgtcctgcgcccactgtctggcactccctagtgagatgaacccggtacctcagatgtaaatgcagaaatccctcatcttctgcgttgctcacgctgggagctgtagaccggagctgttcctattcagccatcttggctcctccccactattttgaatgttttctrtgttatcttttgagataatctagtgtttcttagtctgtcaatatgaattatattaattgattttcaatgtttgaatcagtcttgtagtcctggaatgaactccactggaatgtagtattccttttgcacattgctgaatactgtctactaatattttgttgaggatttttgcatatatgttcatgagaaatattgttctgtagttttcttagaatgtttttgtc

SEQ ID NO: 771788 - DNA, 498 bp, Homo sapiens
ttcttggtgaattgacccttttattaccccgagtgtctggtgatgcctcttacttaatgcctatttgatagtagatataggtgcactgttatccttccatgtatatttcattctgtgtatatttgcatagtattccttttattcttttactttcaacctttgtatattcttatatttcagatacatcacttgtatgcagggtaaattggggttttatttttttaatccatctgctgttgtcattgtttaaattcaagtacttaatacatttatatttagggtaatatcttaaaatacttaggtttaatgtasttccttatttgccccacttgtatgttttttttcctgttttttttttcattcttttggaataggcaagtatttttattatttcatcctcttcccattgtctttttagttaaacattttaacttggcctttagtgaatatcctatgtttgtctccttggcttattaggggctagtatgcattgcaaac

SEQ ID NO: 771789 - DNA, 533 bp, Homo sapiens
aagtatttttattatttcatcctcttcccattgtctttttagttaaacattttaacttggcctttagtgaatatcctatgtttgtctccttggcttattaggggctagtatgcattgcaaacattgcaacagatgtttacttattatttgggtacattaagttgtgctatgtttattacaraatcagtctttgtactttacttttttggagacagggtctcacctgtcacccaagtttagtgactgagtgcagcagcatgatgatggctcactgcggtcttgacttcctgggctcaaacagtcattgcgtgtagctaggactataggcacatgccacgaagcctggctaatttttgaaatttttttagagatgaagacacacagtgttgcccaggctagtctcggactcctggatgcaagctctccgcccgtctcagcctcccaaagtgttgggattacaagtgtgagccaccgtgcccaacttgtactttactattttttaacttttgaaaaattccatgtttctcttgcct

SEQ ID NO: 771790 - DNA, 552 bp, Homo sapiens
catttcctgttacaattctttgaagcagtacgtcaaaatcttgatcccacttgtttacagttttgattgaaagctctgcccttgtatgcagctgatctgggcataaggattttggccctaatcatgtggaaagtttgcacaactttaatttttcagtcagaattgtttaacctgaaccaattgcggtggctctggtggtgggtattgtttgtgctgttaatcatttatcttcttcaattagggaacaaacaagatgagttttttccttgcaaactgatgtggaaggtcagctgctggggtcttcatcttcaacatagtcttgttctttcagttatccatttgtaaactgctatctcattagggcattgtctcatgaacttttcataaagcatcaatagttttaccatttttctatccaagcttcaccataaatttgctkcttcttgcttcaattttaacaaaattcatgtggctctgacaaactgttttcaaactggtatcttacccttagtgcctcaaactggactctgttcagacatgttttaacaagtt

SEQ ID NO: 771791 - DNA, 599 bp, Homo sapiens
ccttgcaaactgatgtggaaggtcagctgctggggtcttcatcttcaacatagtcttgttctttcagttatccatttgtaaactgctatctcattagggcattgtctcatgaacttttcataaagcatcaatagttttaccatttttctatccaagcttcaccataaatttgcttcttcttgcttcaattttaacaaaattcatgtggctctgacaaactgttttcaaactggtatcttacccttagtgcctcaaactggactctgttcagacatgttttaacaagttagtatgaatttattttggtgcaaaaataactgaaatccatgcataatttttaaaataatacatcttttacrtgaactttttgaagacccctcatatattaaacctcttaatattgttgttattaagggacctgtgtctctgaggatgtcattttttttttttgtcaatcttttttgtttctatgcttactttgaatggttgttctgtctccaaatttactgatttttttcttcagcttgtaagcttatttagtgcactttaaaatttccaatattatatcttttagctgtagaagcttcatttggttcttt

SEQ ID NO: 771792 - DNA, 621 bp, Homo sapiens
gaatgtgtgggccttatttggatcctcattcaaacaacaacaaaaaaaactttaaaattttgagacatttgggaatctgatatattttgatatttgataatattttggaattctcacaaatagttgtgattatgctattgtaatgttaaaataattcatatttttagagacacctactgaamtatttatggatggaatgatatgacatctgggatttgcttcagaatgatatgagagagaggaagtggatgagaatcgtgttgaaataagattggccatgagtcagttatagttgaagctgagtgataagtccatgggggttctttatactattctgcctttggtatatgtttgcatttcttcataataaaaaagctttcaaaaagaatgagatatttttattactaaaaattgtgatgaaatcttacccaaagttagtgctttgcattagcttgcactggcttacagatgctgaaagtttgagaaatgctgcctaaatggtatgcggtcttgaatagaggaagtacccaattcctaaaacatctaacaaagaatatagaagagaagaaccatggacaggtaaagttgtcctgttaatgttcttaatagaggtcttcattg

SEQ ID NO: 771793 - DNA, 552 bp, Homo sapiens
ttccttctattctccctcattccgtctggatctctacctattattttaaagtaaatcccaattatcatataacttccatctgtaaatatttccaaatagagataagaactctatttttaaaacagaacaataataacattatcatatctttaaaaattaatagtaattcattaatagtaattcattggctgtcctctaatatccagccagtgttcaaatttccctattgtctataaatagcctttccccccgccccagmtgatatgtttgaatcaagatccaaaccaagtctttgtaccttaatttgttggtaagtcttttaagtctcttttaatttctaaatttctcctccctcctttcttcttgcaacttatttgttgtaaaaaatcaagccatttattttgtagaatttcctagattctgctttggctgattgcattcctgtggcatcatttaatatgttcttcttttctgtacttcttttaaactaatagttgcgtctagatatttgattagattcaggttaattatttgacaagactacttcaaagg

SEQ ID NO: 771794 - DNA, 633 bp, Homo sapiens
ttgcttaagttaatcaaggcacataacttgaatctttgggtttactgaattttacataaacttaaagcctgagaatggtgcagaagggagattttcctgaggaaatgtgagtttcgggcatcaggaaacatgcagaatagatgctggttaggaaaaacaagttttcactataatgtgtttgtctttttcctgttatttttgtcttcgtgatataaaaggcactaatactttgtgtgtggtaaacatttcttctcctatgctctctagattagaaactgtcgtccactttcctgaatgactttatttttaataagatgctgactcgtgtatttcctgttgcacagtgaatgactattgcccaaacctagggcaaaagagacataaactcttcatgatgtcaaggtaaccactagaaaatggggctacatacccacgccagaacatactragaaaggtagaactggacctgccatacgcactacccaccttccttcatagaagccaaagatcgggcactgaggatgcaggaggagatgagacaattcttagaacaatgagtcctcaatagaaattgtccatattaaggaacagaagggagtcctttcatagtggatggacaaaggggtagacaag

SEQ ID NO: 771795 - DNA, 633 bp, Homo sapiens
ttgcttaagttaatcaaggcacataacttgaatctttgggtttactgaattttacataaacttaaagcctgagaatggtgcagaagggagattttcctgaggaaatgtgagtttcgggcatcaggaaacatgcagaatagatgctggttaggaaaaacaagttttcactataatgtgtttgtctttttcctgttatttttgtcttcgtgatataaaaggcactaatactttgtgtgtggtaaacatttcttctcctatgctctctagattagaaactgtcgtccactttcctgaatgactttatttttaataagatgctgactcgtgtatttcctgttgcacagtgaatgactattgcccaaacctagggcaaaagagacataaactcttcatgatgtcaaggtaaccactagaaaatggggctacatacccacgccagaacatactaagaaaggtagaactggacctgccatasgcactacccaccttccttcatagaagccaaagatcgggcactgaggatgcaggaggagatgagacaattcttagaacaatgagtcctcaatagaaattgtccatattaaggaacagaagggagtcctttcatagtggatggacaaaggggtagacaag

SEQ ID NO: 771796 - DNA, 633 bp, Homo sapiens
ttgcttaagttaatcaaggcacataacttgaatctttgggtttactgaattttacataaacttaaagcctgagaatggtgcagaagggagattttcctgaggaaatgtgagtttcgggcatcaggaaacatgcagaatagatgctggttaggaaaaacaagttttcactataatgtgtttgtctttttcctgttatttttgtcttcgtgatataaaaggcactaatactttgtgtgtggtaaacatttcttctcctatgctctctagattagaaactgtcgtccactttcctgaatgactttatttttaataagatgctgactcgtgtatttcctgttgcacagtgaatgactattgcccaaacctagggcaaaagagacataaactcttcatgatgtcaaggtaaccactagaaaatggggctacatacccacgccagaacatactaagaaaggtagaactggacctgccatacgcactrcccaccttccttcatagaagccaaagatcgggcactgaggatgcaggaggagatgagacaattcttagaacaatgagtcctcaatagaaattgtccatattaaggaacagaagggagtcctttcatagtggatggacaaaggggtagacaag

SEQ ID NO: 771797 - DNA, 621 bp, Homo sapiens
caagacaccacggtgcttaaaaaacatcctgtctcatgagccccggtttccatcttcccatgactcagggcttacctctttagagaaggggacacagcttggaccccagaagggggctggtgactgagtgcgcaagccctgtcctcttttgctcactttcttgggcccccacgtcctcctcattcacaatggccccctgttccygggcctcctctcacgagtcagtctttgtcctgccttttgctgttgttcccctcactctctagctggggtcaaaccacatcaccaaagtccaaggacaaaggtacccaagtgaaacagagaacttcctaagggattttcaaaatgccctgggctatctgttcgggaagattttcttccccaaagagttttcagtttttattctataaaccttaaaggcaggatacggtcttgtcctacttagggaaggagaacattgagtaggtttcaacaagcggcagaacccagctacaatcccggtggccagctgagtcataaaattgccacaggtctgcctcacaggtgatttgcagagatggcctcttgctgcaaaaatctcttcttagaccatattatgttccaccagtaaagctggaataa

SEQ ID NO: 771798 - DNA, 620 bp, Homo sapiens
caagacaccacggtgcttaaaaaacatcctgtctcatgagccccggtttccatcttcccatgactcagggcttacctctttagagaaggggacacagcttggaccccagaagggggctggtgactgagtgcgcaagccctgtcctcttttgctcactttcttgggcccccacgtcctcctcattcacaatggccccctgttcccgggcctcctctcacgagtcagtctttgtcctgccttttgctgttgttcccctcactctctagctggggtcaaaccacatcaccaaagtccaaggacaaaggtacccaagtgaaacagagaacttcctaagggattttcaaaatgccctgggctatctgttcrggaagattttcttccccaaagagttttcagtttttattctataaaccttaaaggcaggatacggtcttgtcctacttagggaaggagaacattgagtaggtttcaacaagcggcagaacccagctacaatcccggtggccagctgagtcataaaattgccacaggtctgcctcacaggtgatttgcagagatggcctcttgctgcaaaaatctcttcttagaccatattatgttccaccagtaaagctggaata

SEQ ID NO: 771799 - DNA, 600 bp, Homo sapiens
acttcagtctcctactggtcggtgccggatccttttgtggccaccccaggtgtccagatatacacaggagactgtggctggggacccagatgaaagtcgagagtgtggtgagcacttccctgtccggatcatgtgagggatgggctcrgtgtcacagtgtcctgcccagcccacctggccggacctccctctgggccagaacagcggatcatgaggacagtgtgaggaagctgccctcgggccagtcggggtctgaccccagggctccccaggccccgctgggcacacgtagacttactctgctgaaccttaaaggcgattcttgttatcggcatcaacgcctgttcgccttctaccagatacacgtcccacaggcgcagggtgagcccgagagagatctgtggggacagcaggtgtgaaagaacctggtccttccaggctggggctggtggctcgagctgcgcacactggggcttcagtctccagagtcagtgaccttccccatgagggtcgcctgagccctccaggacgctgggtcagacaaggtcttgaagctcctcatggggggcactcatttgagtggggatgtggctcctggag

SEQ ID NO: 771800 - DNA, 564 bp, Homo sapiens
acttcagtctcctactggtcggtgccggatccttttgtggccaccccaggtgtccagatatacacaggagactgtggctggggacccagatgaaagtcgagagtgtggtgagcacttccctgtccggatcatgtgagggatgggctcggtgtcacagtgtcctgcccagcccacctggccrgacctccctctgggccagaacagcggatcatgaggacagtgtgaggaagctgccctcgggccagtcggggtctgaccccagggctccccaggccccgctgggcacacgtagacttactctgctgaaccttaaaggcgattcttgttatcggcatcaacgcctgttcgccttctaccagatacacgtcccacaggcgcagggtgagcccgagagagatctgtggggacagcaggtgtgaaagaacctggtccttccaggctggggctggtggctcgagctgcgcacactggggcttcagtctccagagtcagtgaccttccccatgagggtcgcctgagccctccaggacgctgggtcagacaaggtcttgaagctcctcatgg

SEQ ID NO: 771801 - DNA, 564 bp, Homo sapiens
acttcagtctcctactggtcggtgccggatccttttgtggccaccccaggtgtccagatatacacaggagactgtggctggggacccagatgaaagtcgagagtgtggtgagcacttccctgtccggatcatgtgagggatgggctcggtgtcacagtgtcctgcccagcccacctggccggacctccctctgggccagaacagmggatcatgaggacagtgtgaggaagctgccctcgggccagtcggggtctgaccccagggctccccaggccccgctgggcacacgtagacttactctgctgaaccttaaaggcgattcttgttatcggcatcaacgcctgttcgccttctaccagatacacgtcccacaggcgcagggtgagcccgagagagatctgtggggacagcaggtgtgaaagaacctggtccttccaggctggggctggtggctcgagctgcgcacactggggcttcagtctccagagtcagtgaccttccccatgagggtcgcctgagccctccaggacgctgggtcagacaaggtcttgaagctcctcatgg

SEQ ID NO: 771802 - DNA, 579 bp, Homo sapiens
agaactttggaaagctgaggtgggaggatcacttgagcccaggagctcaagactaaccggggcaacatagggataccctatctctacaataaataaataaaattacccagatgtggtgacatgtgcctgtggtcccagctacttgggaggttgaggtgggagaatcacgtgagcccaggaggttgaggctgcagtgagccaagataacattaatgtatcccagcctgggcgatagaccgagaccttatctcaaaaaaaaatatatatatatatgtatatatttatttatctayctatatattcatatatagatatagattaatatagatatataaacatatatttatagatatatagatacataaatatatagctatatataaatatatatttataaatatatagatatatatgtaacaaaatatgttccaagacctccagtgtatacctgaaactgcagatagtaccaaactctatatgtactatgtttttttcctatacatacatacatacctatgatgaagtttaatttataaattaggcactgtaatagaataacaacaataactaataataaaa

SEQ ID NO: 771803 - DNA, 579 bp, Homo sapiens
agaactttggaaagctgaggtgggaggatcacttgagcccaggagctcaagactaaccggggcaacatagggataccctatctctacaataaataaataaaattacccagatgtggtgacatgtgcctgtggtcccagctacttgggaggttgaggtgggagaatcacgtgagcccaggaggttgaggctgcagtgagccaagataacattaatgtatcccagcctgggcgatagaccgagaccttatctcaaaaaaaaatatatatatatatgtatatatttatttatctacctatmtattcatatatagatatagattaatatagatatataaacatatatttatagatatatagatacataaatatatagctatatataaatatatatttataaatatatagatatatatgtaacaaaatatgttccaagacctccagtgtatacctgaaactgcagatagtaccaaactctatatgtactatgtttttttcctatacatacatacatacctatgatgaagtttaatttataaattaggcactgtaatagaataacaacaataactaataataaaa

SEQ ID NO: 771804 - DNA, 612 bp, Homo sapiens
gagtgaacctggggtcttcttcccagtgtgggctggggcagttgcctggttgcttaaacacagaggggaaattcaggtgtaacggattctgagagtgacttttaaccaatatacttatttttagtctcactcggacccctacttttaaagtcacctagtacctctagttcttgggtctttctgactttctgctgtacaaaccagcctacttctgaatttcttcctctgccagtttagattttggctttctcaagggtgctaaatccattagcacaaactcatgatttctaggctcccaaatgtcattgctgtcattttcyatcttgctctgtgtcctttttttcattcttttaagtctcatatctgttatttgagtgaaggttttggagggaatggaggtaaacacttaattccatctaccatatttaactatatatgcctctagaggccttcctaagtggatcagaagttctggtaatgagaaaggtcttcaaacatggatgttggatgacaagaaaagtcaccttggatgtgagtgactgaaggatggatggccgccacatcacagaggcggtcaatcttcagcacttacggggcattcgcaatctgtag

SEQ ID NO: 771805 - DNA, 602 bp, Homo sapiens
ttttttttttttcagacagggtctccctctatcacccaggctggagtgcagtagcacaatcatggctcactgcagcttccaccttttgggctcaagccatcctcccacctcagcctccccagtagctgggaccataggtgtgcacctcacgcctggctaattttattgtattttatttttgtagagatggggtctcactctgttactcargctggatattttttaaaggttcctgaaatagagtcagtgacccctaagactcagtattactttataggccttcctcactcatctctttccagcttggcttgcctgccacctctctgagggctccccactcttccctgcttcctggcatttgtgaaggaataatgcatatgccattggaggcagcaagatgtgcaagtagctgccgtcttgaggcctgtacctctggccatccccatagcagcaacatagagactctgttctcattactctgtcttaggccactatgctcgccttcattttgcacaaggcactaattcatgtctccaaatttgtcacttgaattctgttaagtctttacttctagacctttaaataatgttatgaaaataagg

SEQ ID NO: 771806 - DNA, 625 bp, Homo sapiens
tgctgggttgaacaatcagtttatgtttatctttttaagaaacaactaaactgttttccaaagcaatgtgctgttttacactctcagaagcaacgtatgaggcttctggtttctctacatcatcaccaacattcagtagtgatggctttttattatagtcattctagtaagtctaactgcataacaaatgaccccaaaacttagtggcttaaaatcaaacatttattccacaatttctgtgggtccagaatccaagtgtcctaggtcctctggctttcagatttcaaacaaagctacaatcaaggtgttgtctgtggctgtagtcatctcaggttgattaggggtcasggggagaatctgctttcaaactcactcaagcggttgttggtaggattcagttccgtatgggctgttgtactgagggcctcagttcctcactgactgtgggctgaaagcctccctcagttctttgccacgtgggcttcaccatagggtggctcacaacagggcagctggcttccatcagagtgaccaatttgagagggcaagaaagtatgagcaagactgaagccagagtctttttgtaacctaatctagaaatgacagcccattacttagagtctgt

SEQ ID NO: 771807 - DNA, 625 bp, Homo sapiens
tgctgggttgaacaatcagtttatgtttatctttttaagaaacaactaaactgttttccaaagcaatgtgctgttttacactctcagaagcaacgtatgaggcttctggtttctctacatcatcaccaacattcagtagtgatggctttttattatagtcattctagtaagtctaactgcataacaaatgaccccaaaacttagtggcttaaaatcaaacatttattccacaatttctgtgggtccagaatccaagtgtcctaggtcctctggctttcagatttcaaacaaagctacaatcaaggtgttgtctgtggctgtagtcatctcaggttgattaggggtcagggggagaatctgctttcaaactcactcaagcggttgttggtaggattcagttccgtatgggctgttgtactgagggcctcagttcctcactgactgtgggctgaaagcctccctcagttctttgccacgwgggcttcaccatagggtggctcacaacagggcagctggcttccatcagagtgaccaatttgagagggcaagaaagtatgagcaagactgaagccagagtctttttgtaacctaatctagaaatgacagcccattacttagagtctgt

SEQ ID NO: 771808 - DNA, 637 bp, Homo sapiens
ggctctttcttaatatatttataagctgtttgtcctaggttcatgtcatccacatactggataccaacagtagtacagtacatgttcataaaagttactgataaaattgttgaacaagagaaagccacagatagagtcctgaagcttgcgggtagaactgcccttcaggttgatagcaattcattaatgagcacttgttagttatgattgttcaaacaattacctagccacctagttgcactgttatccatcttatatttatcttgtatatgggtgtaatgaaaacctggtcaaataccttattgaaatcctaccaacacactgtttttactgcctctttttgatctgtgacctatctgtacatacactctttttttaaaaaaaaacaagaaattagrttaatctggtaaaactcaggttgattccacaaatggttaccattttcttttctaaatggttagaaactgttttaaaataaataatctgaatttagaaaaggattgacgtcaagtatactggactgtcgttggcagttgtttctgttttttaaaaaatcaggactacagttatttgttcttttccagtctttggcagtcctccggttctccacacttcctccactggcagcagctcagtg

SEQ ID NO: 771809 - DNA, 614 bp, Homo sapiens
ttgcttgggaagctggtatttctgttctattcaggccttcaactgtttggatggggcccacccacattatgaagggcagttggcttactcagacttcactgatttaaatgttaatctcattcaaagcaccctcaaagttgacatataaaattaaccatcacatctaccacacagtaaaatgagtagttttgaaattagttctcagacagtatgatatatgaatacatttttttctctgtggattcataaaaatatcaactgtaaagggagatgctttctgccttcatcacattttgtaatcctttgagattttatgggaaaactrtagattttctgagttattagcattaatcaataggctctaggacctacttgtttgaaatgtgccctgcttgtattccagaccaaagtaatgaaatcctaattaatgtctttgaaaccatccatgagatctcatctggcattttaggctcatagtctgtaaaggattcacagaaattctatttggtttttattagcaacattaaatgtattccccaattggggattagtagcattttaatacatagcatttattatctattagtataggttaagaacagctggggacctct

SEQ ID NO: 771810 - DNA, 654 bp, Homo sapiens
aatcagcaatagagcagggcatggtggctcacgcctgtaatcctagctctttgggaggctgtagcaggaggattgcttgaggccaggagcttgagaccagtctgggcaacatgatgagactttaaatgtagagctttcgtgcttgcaagaaagaaatgtgagtttgcaggtgacagaaaggaagcaggtcttgaaatcagagggaaaagattccagctaccattgcaattgctggtggcagtgggggctggggagaaaatgtcataagtcaagaacttggattttaaggcatacctaggaatgaagcaccttagtcctgggcctggtacagacagataatcctgtgtgaagctggaacyctcaaagagtggcaccctcagtgaaaggacacatagcaaaaaatctactcaccagcccagagaggtgacaagaaaatacatattttcttgtctatctgtgtgtatgcatgtatgcacatatgtatgtatgtatgtatttcttgtctgtctttatatatgcagaagaaagagttagaaaaaagaatttctgcagagtcattaaaaacccagacctgcttttcacattgcttttgactttgcttaatactctctttgtggtcaagaaacacttaaattaagaagttaacataaaaat

SEQ ID NO: 771811 - DNA, 654 bp, Homo sapiens
aatcagcaatagagcagggcatggtggctcacgcctgtaatcctagctctttgggaggctgtagcaggaggattgcttgaggccaggagcttgagaccagtctgggcaacatgatgagactttaaatgtagagctttcgtgcttgcaagaaagaaatgtgagtttgcaggtgacagaaaggaagcaggtcttgaaatcagagggaaaagattccagctaccattgcaattgctggtggcagtgggggctggggagaaaatgtcataagtcaagaacttggattttaaggcatacctaggaatgaagcaccttagtcctgggcctggtacagacagataatcctgtgtgaagctggaactctcaaagagtggcaccctcagtgaaaggacacatagcaaaaaatctactcaccagcccagagaggtgacaagaaaatacatattttcttgtctatctgtgtgtatgcatgtatgcacrtatgtatgtatgtatgtatttcttgtctgtctttatatatgcagaagaaagagttagaaaaaagaatttctgcagagtcattaaaaacccagacctgcttttcacattgcttttgactttgcttaatactctctttgtggtcaagaaacacttaaattaagaagttaacataaaaat

SEQ ID NO: 771812 - DNA, 526 bp, Homo sapiens
attatgctaaatctactctgccagtgctgtataaatggagcaacaaagcctggatgacagcacatctgtttatagcatggtttactgaataatttaagcctgctgttgagacttactactcaaaaaataaaaaagattcctttttaatatattactgcttcttgacaatgcacctagtcacccaagaactctgatggagatgtacaaggagctgaatgttgttttcatgcctgctaacacaacatccattctgtagcccatggatcaaggagtgatttttgactttcaagtcttgttatttaagaaatacatttgtaaggctrtagctgccatagatagtgattcctctgatggatctgggcaaagtaaattgaaaaccttctggaaaggattcaccattttagatgttattataaatactcatgattcatgagagaagggcaaactatcaacatcaacagagtttggaggaagctgattttaactctcgtggatgactgtggggtctgagacttcaatggagcaa

SEQ ID NO: 771813 - DNA, 540 bp, Homo sapiens
aacacaattgctacagcctctcttagcaattgctaaggcctctcttagctgcacagaatgacagctcccaagggctgaaaagcctttcttctggaagttccacctataaccttcccacctcattttccacctgcctcgcagtgccatgctcttagcagagcctctgcccgacwttctttgctatctcaccttccttgattcctttgttctttctctctgaagccctttctacaatccataagctgcacattgtgaccaagtccacaatgactcagactgtgttgggggtttaaaagctcctttgctgctcacagatggggcgaaataattagcaactatgcctcagtttttacatctgtaaaatgcaaacacgctcccattttgggggtgattcaaataactctaaaagcatcaggactgttccagatggaaagatgaaggctgaaggtgatacactttttagtgatgtcttaaaaacctagggttatgaagaacatgggtgggtgactacagcttcttaacagtatctgaactctacga

SEQ ID NO: 771814 - DNA, 558 bp, Homo sapiens
accacctgggcctcccaaagtgttgggattacagtctgagccacctcacctggcctaattgttgcttgtaagggatgcagtgtctctctaatcttgcttaagaaatgaattatctgtatttcattttttttcctactgtttgacctttaattttttgttttgttttgtttttgtttttgtttttgttttgagacaaggtctcaccctgtcgcccaggctggagtgcagtggtgcagtcatagctcacagcaacattgaactcctgggtttagagtgatcctcctgcttcagcctggctagtagctgggactacaggcrtggctatgcacccggctaattatttatttattttttgttttcttttctttttttctttctttttcttttctttcttcctctttttttttttttttttttttagacaatgtctcactctgtcgcccaggctggcgtgcagtggcgcaatctcagcttactgagcctctgcctcccgggcttgggtgtttatcccacctcatccgactgaatagctgggactacaggcgcatgccaccacac

SEQ ID NO: 771815 - DNA, 518 bp, Homo sapiens
tgcctccagcctgggcgacagagtgagactccgtctcaaaacaaacgagagaaggaacatctgctctgctggctcttcacatcttctacagactgtggacacccagtgctacctccagcttctttctcctaaggactgcttgccccttcaggccgcctcatagataagcccttccacgcttgcaccacaggaaacattctttgctccaaaaatctctggaatgggcttcagaaaggagatgaccctgagggaggaaagcatgtgggttggcgtggtaggcagcatagtggccccaaagatgcccatgtcctagtctctggaacctgtgaatatatcagcctgggtgaaagagcgagaytctgtctcaaaaaaaaaaaaaaaaaaaaagagggaggcagaacagtaaagtcagtcaaaggagcatgtgaatatgaaagaaagacacagagatgtgatgctgctgacttcaaagatggagggaagggaccatgagtccaggaagatagaaggtctctgca

SEQ ID NO: 771816 - DNA, 606 bp, Homo sapiens
agagagggatccagtttcattcttctgcatatgaatatctagttttcccagcaccatttactgaggaaactgtcctttccccagtgtatgttcttggttcctttgttgaaaatgagaacactataagtgtattgatttgtttctgacttctgtcttctattggtctatatgtctatgtttttatgccaaaaccatgctgtaccrattactatatctctgtagtgtaatttaaagtcaggtaatgtgattcttccattttgtttttttcgctcaggatggctttggctagtctgagtcttttgtggttccacatacattttagaattgttttttctatttctgtgaagaaatgttgatagagattgcatgggatctacagattgcgttgggtagtatggacattttaacgatattgattcttccaatccataatcatgaaatatctttctaatttttgtgtcctttttaatttctttcaccaacattttatagtcttcatagtagagatctttcacttttttggttaattgctaggtatttaattttatttgtatctattagaaatgtgatttttttcttgatttcttttttggattgttcactctt

SEQ ID NO: 771817 - DNA, 666 bp, Homo sapiens
ctgcatatgaatatctagttttcccagcaccatttactgaggaaactgtcctttccccagtgtatgttcttggttcctttgttgaaaatgagaacactataagtgtattgatttgtttctgacttctgtcttctattggtctatatgtctatgtttttatgccaaaaccatgctgtaccgattactatatctctgtagygtaatttaaagtcaggtaatgtgattcttccattttgtttttttcgctcaggatggctttggctagtctgagtcttttgtggttccacatacattttagaattgttttttctatttctgtgaagaaatgttgatagagattgcatgggatctacagattgcgttgggtagtatggacattttaacgatattgattcttccaatccataatcatgaaatatctttctaatttttgtgtcctttttaatttctttcaccaacattttatagtcttcatagtagagatctttcacttttttggttaattgctaggtatttaattttatttgtatctattagaaatgtgatttttttcttgatttcttttttggattgttcactcttggcatatagaaatgctacaggtttttgtatgttgattttgtatcctgtgactttacttaatttgcttatcagttctaatagttc

SEQ ID NO: 771818 - DNA, 583 bp, Homo sapiens
tcttgatttggcaattttaattttgcaagacactgcttaaaaaaaaaacaacacgcagctgggcacggtggctcacgcctgtaatcccatgtaatcccagcactttgggaggccgaggcaggcggatcatgaggtcaggagatcgagacaatcctggctaacatggtgaaaccctgtctctactaaaaaatacaaaaaagtagccgggcgtagtggtgggcacctgtagtcccagctactcaggaggctgaggcaggagaatggcgtgaacccgggaggcggagcttgcagtgagccgagatcacgccactgcactccagcytgggcgacagagcgagactcggtctcaaaaaaaaaaaaaaaaaaaaaaaaaaccacacacacacgcaccagaaccctgtgataaattgatagtggcttaactttcatcttaactcctttatttctgttccggcttgagtggtatttatcctttccatgtttcttatcccttgtaaaagagcaacggtgacgatttgggagggatcatgccctaagtgctccatggaaccatcagagcctgaacatgaaggcagaagagttt

SEQ ID NO: 771819 - DNA, 484 bp, Homo sapiens
tcatatgttcagggactcttaggaagattccatatcttggctattgggataatgcagcagtggacatggcagtacagatatctctttgacatactgatttcagtacctctggatatgtactgagaagtgggattgttggatcatatggtagttctatttttaatttgtttgtttgttttctgagacagagtctcactctcgcccaggttgcaatgcagtgggacaatctcggctcactgcagcctctgcctcccgggttcagacgattctcctgccacagcctcctragtagctgggattgcagatgcaagccaccacacctggctaacttttgtatttttaggagagacagggtttcatcatgttggccaggctgatcttgaactcctgatctcaagtgatccacctgcctcggcctcccaaagtgcttggattacaggtgcaagccactgtgcccggtctatttttaatttttgttagtgac

SEQ ID NO: 771820 - DNA, 465 bp, Homo sapiens
gaaccttactaataagacaatgactacaggagtagcaatcgatctttgaaattccctacccttatctgcaaacaggatgagataaaaggtgcctggcacagagtggatactcaaatgttaatttccttttcctctcttaccctcaattctgaaatgaacrtgattttcttacctgttctttgtgacctttgaaacagtgatcactagaaatgaaggcactatgttgggagaaggtacaacattcttccattaaagcaaaatgccagagaggacagccttacctgacatagagagagatgggtaccatggtgttgagaacaatgatatagccccagaaaatgaggaatccacggtaggagggtgtatcgtcttctccatcatagaggtaccaagaggaattgcccacctgtgcttcccaataagcatggccgatggcaagaccagcagaaagcagaataagaacaa

SEQ ID NO: 771821 - DNA, 632 bp, Homo sapiens
aacctcttgcatttcctagatgctaattaaccttactcaatacttcatatgattgagaatttagtagtctgaaaaataatatatgtcaaataaaaacagcactatcataacgctttgaaagtctatttgattgctgcrattgactgatgtatcctacatctcccatagaaggtaaggttttgttcccaaaattatctctccaaagagaaggtggtgtcttatattcaaatccttgaagaatcttatattacagggcattctctcaattacgtttactttgaacaataacatactgtttggggaagatatcttacttagcatgaaacaacttccaacaaggctgaactggaaaactggaatgcttatagaagatattcaacagattttttttttttttttttttttttttttagacagcgtctcactgtatcacccaggctggagtgcagtggtgccattgtggctcactacaacctccacctccctggttcaaacaattcttatgcttcagcctcctgagtagctgggattacaggcacgcgccaccaaggccggctaatttttgtctttttagtagagacgagtttcaccatgttggccaggctggtctcgaactcttgtcctcaagtgat

SEQ ID NO: 771822 - DNA, 625 bp, Homo sapiens
actataacttaaatcctaacacagactgttacagttcaatatgggaaacataggtgggtgcagtggctcgcaccagtaattccagtactttgggaggccgagatgggaggatagcttgatgttgatgccaggagtttgagaccagcctgaacaacataaggatacccctgtctctacaaaagaagaaattttaattagccaggcatagtggcacacacctgtagtcctagccactcaggaggctgaggctggaggatggcctgagtccagaagtttaaagctgcagtgagctgtgtatgatcaggccactgcactccaacctgggcaacagagcragaacccatctctaaaaaccagtaataataatatttaaaatacagtaaatgccaggagaagacaatatgctcaggttgcagtgggagcttggcaaaaccatacctaacccagcctgggaagcacatgggaggcctctgccatagggcagaaagctgctgcagtgaaatccatttaattggagaatggagcagaaagggcagaagatgcaaagaagccctgctgtctatagaatttgcgaaaataagatgaagcaatagtttgccagcagcaaataactacacagatatga

SEQ ID NO: 771823 - DNA, 614 bp, Homo sapiens
aatccagggagctacgaacacagtattctatgagatatgctccatcttgtctaaagttgggtggtgagggaaactcgcaaagaaattttaaactcttacgatatactttatgtagtgatactggcaaagcaactctgaaacagttttagatgtattttagcattgagcaaatgagttattgttttggagagccagggttctcactgagaaagaaggaacatatagawaggaaatgggagatgggggaaaagaacattgtgggaatcaattggaatcagaagaataggtatgaactgatttctgaaatacatgcatgtataagtattcccatgtacatgcgtgtgtgcataagtgtatatgtatgtgtgtgtgtgtatacattttttacttagctctatccatcaaaggaccaggaccaagaagcaaagtcaccccgctagtaacaagcacatcaagtgccaagatcttggtctctattatcatttcccattcaaaggaaccaggggtactgggagaaatggctgattacaggctggggcaggagaggtacaacttgagcctggaacatcttgttattgtcacaaggtatggacatgctgaaagaatgatgggag

SEQ ID NO: 771824 - DNA, 621 bp, Homo sapiens
gggatcctgtcttttctattcctctcctgcgctcgctccctagcttcctcggagcttccagttgctcctcccgctctgctggtctcttcagtctccctcttcccgcggcacacccctccccaacataactccactctccagtgctctccagccaccgcctgttcgtccccacagtcccaggtctcctcgcctcctcagttcccaacccctgtgtgggctcccctccaagatccctcctcaatccacacattctgggcccctccactcctcattcagcccccacaactagatctccccaacaggccccactctgctggtccccactctgtctgcccttagcccctgactcctctctccagtcccttcacacaaggacccggagtccccttccagtcarcagacagctgccccgctctcaccttgatctcctccacccgccgggtcaggcggctgatccgggtccccagatcctccttttccagcctcccggagtgtgccaaaacttctgtcacgaacgaggccatggccaagacgggaaccaacgctgactgggtcactctcgtagccagcgccgcagctcccgtcccgccggccgtcttgacgcgaggcctgccgggaaac

SEQ ID NO: 771825 - DNA, 622 bp, Homo sapiens
gatctttgctttctgttttcagaattctggattcatctgcaacatagtttctatggctgtcttaagagtgaagaaatctctttccaagcagaccccaataaatttggccttttgtctcattagaccaaattgggtcataacttttcctgaattagttctgaggccaggactgattcacattggcctggattccaaaagccaagggagtgaggttactcttaggccctttaggcccaaccttggagctgagggtggcagcagcccctcaactacagtggctgtgtgggcaaggcttgggcaaaactgcaataatcaccggrtgaagaggaagtggatgtcagggaagccaccatgacatccactagactaaccaactttaccaacttctggatataagttggcttcctatttggacttgccagaggaaagcacaaaaacactatcaattcaaatcttatggtccagaatctgtttcctaccagtaaggctgttttcatttatgaggggctgctgtatcaggtaaacatagaaatattttgtgatttaatacaatgaagtttttcttactcagataaactctaaacagtggcaaggtgagtgacaatgagcactgtgctccaga

SEQ ID NO: 771826 - DNA, 535 bp, Homo sapiens
ataaaagagaaaaataaacaaagcaaataattacttgaaaagactaattaataaacccctgaaaagactgactgcaaaatactgaaaacaaaaaagatacaaatcacccaatatcagtaacaaaagacagatattactatacagaccttaattagaaataaaaagtcrtccgggcgcggtggctcacgtctgtaatcccagcactttgggaggctgaggcgcgcagatcacgaggtcaagagatcgagaccatcctggctaacgtggtgaaaccccatttctactaaaaatacaaaaattagctgagcgtggtggtgcgcgcctgtagtcccagctactcaggaggctgaggcagaagaatcgctggaacctgggaggcggaggttgcaatgagccgagattgcaccactgcactccagcctgggtgacagagcaagactctgtctctaaataaataaacaaatagtcacaagataaaattatgaacttcctgtaaataaaattttaattttagatataatggatacacttctaa

SEQ ID NO: 771827 - DNA, 535 bp, Homo sapiens
ataaaagagaaaaataaacaaagcaaataattacttgaaaagactaattaataaacccctgaaaagactgactgcaaaatactgaaaacaaaaaagatacaaatcacccaatatcagtaacaaaagacagatattactatacagaccttaattagaaataaaaagtcgtccgggcgcggtggctcacgtctgtaatcccagcactttgggaggctgaggcgcgcagatcacgaggtcaagagatcgagaccatcctggctaacrtggtgaaaccccatttctactaaaaatacaaaaattagctgagcgtggtggtgcgcgcctgtagtcccagctactcaggaggctgaggcagaagaatcgctggaacctgggaggcggaggttgcaatgagccgagattgcaccactgcactccagcctgggtgacagagcaagactctgtctctaaataaataaacaaatagtcacaagataaaattatgaacttcctgtaaataaaattttaattttagatataatggatacacttctaa

SEQ ID NO: 771828 - DNA, 603 bp, Homo sapiens
aacattgcttttctgctgtaagggcaaaattgagtggttgcaacagagatggtgtggccacaaagccaaaaatattaactatctagccctttacaggaaaaagctctcagtgttgcccaacagtgtttagataatctacaatgattatctttggagattgagattagggcagattcttacatttcttttttttttcttttttcccgaaagaatgtattctttttgtcaacaggggagaaaaacaattaaaagaacttgaaaaaatctgccctcatagggtgcacattctaacagatgggtaagtaaataaaaatctaaagagtcaagggaaagtagaaggtcacttaggcrtttgatatgttaagtagataataacggtaatagccagtaattattgaaagcttaactgggtgttggacactgtgcgcaaagtgacattttaaatatttatctttttcttcgagatcaaaatagctttattggcttttatgattttaaatgtaacacatgctcattgcaaaaattcagaaaatattttttaaaatgaattccgtgtataattttaatgagattagtctataaatactgtttgataacttgctg

SEQ ID NO: 771829 - DNA, 602 bp, Homo sapiens
caaagactctttcatttttctgaggaaccagctgtagtttgtcactttttgaaagagactttcatgttaagtgtttaggcaaaattttttggtggggaaggggtggggatggaggcaggtggaacaaaactccagaggagaaggggagagaagcactgcccagaagctgggctttccccgtggcttcctatttgctcggccttygtttttgtgagtccttgcacaaacagactaaatacctggattatgccctcatctggactcaaatacacatacattacatacccttttctccctaatcagcctgacacattcctttgttggtaaatggttccaaaacaaacactgtcagggcacctaattagcaggtttgtgggctgcgcttggcagtcttgttacatcctgttcaacaatagagaacaacagccttggctaggccggtcttcagggagggagtagcttcccccaatgtatatgccattttttaatgatatttcctttctgtggcttttcttgggaagcagccactcagtgagtattgcagtgaggtgtgggatcctagaagcagctaaaggaaacttctgctcctctgtagagtacct

SEQ ID NO: 771830 - DNA, 651 bp, Homo sapiens
ctagccaaaaacagggttaagacttaaaaacaaaaccaccaccaaaacaaacaaataaaccaaaacacatttcctgtccctcaaccagagactccgattaaacagggcccaagcttcagtatttctaaaagctccccggtgattgyaatgcgcagctgagggccactgatcagcgtggcaaagattagcccagtacttccattaccccgaggagaaaaagaaagctgcttttactcttctataatctccaccacattgtaggagaagagaggactgaagattactgttgaattattccacttacaaaagatactctcattatgaacccaggaaaaatggctcattgttttaatcctctggtttgtgtctcgaggtatctgatacgatgggaagagcagtgatcagagatgctgtaggacatgttgggagctagtctggaaatacctgtgaggaacttgggttggctggtggcctctatcctgagccagcaagtgtgcacatacatggttactgataatcaggagtgtgcactttgatcctgggcaagtgacacgatccctgctttggcactaaatttaccaatatctaagtgccagagatagctggtgagagcctgcagtgttctcagaaataaagtacacctggaaaaaa

SEQ ID NO: 771831 - DNA, 586 bp, Homo sapiens
caatacctctacacagttctgttcaactgggctctctggtaccgggagtaaggtggcggggttcaaggtgttgcaaacttcaatagttatgcagggcttttcacagagtaagttttggtacctagttagtctagcattcatgagccaatgatgccctttggtattcattaaagtcaccacagcatgggaggcctttatgttcrggttttgcccaagagttagtttatccacttcttgtgctagcagggcagttgctgccaaggccctcaaacacgggggccaatctttaaaaactccatctagttgtttggagaggtaggctaccagtcttggccagggccccaccgtctgggttaaaattccaactgccattttttctctctctgacacatatagtgtaaatggctttgtcaggtcaggcagccccagggctggggctgaaatgagtttctcttttaactcatgaaaagctcgttgctgttgggactcccattcaaaagactctttgttatccccctttgtgacttcatacagaggcttggccagtactgcaaagtttgggatccataacctgcagaaccccaca

SEQ ID NO: 771832 - DNA, 671 bp, Homo sapiens
agtttgggatccataacctgcagaaccccacagctcctaagaattctctcaactgctttctggtctcaggctccggtaggttgcaaatgacctgctttctttttgatcccaggctgcactctccctgtcggatagtaaatcccaagtaacatacctgctgttggcagatctgagctttcttcttggacaccttatacccacagtcctccaggtgctggagcasggtatccattcccttggtgcgcccgactgctgtggggtgtcccagcaggaggtcatcaatgtactggagcaacacgcaacctaggtctctagcggggaacttttggaagtctcgagccaatgcctccctgaagatggtgggggagttcttgaacccttggggaagctgggttcaagtgtactgagtggtgacacctgaccacagatcctcccactgaaaggcaaacagtttctggcgctcagggtctagtctcatgctaaagaaagtgtccttcaggtccaggcaggtgaaccagctgtcctcagctggcagtaaccccaacaatgtgtatgggttaggtaccattgggtgcaaagtcactgtagcttgactgaccaagcacaagtcctgcactggcctgtagtccttggtccctgacttgggaacaggcaggaggggagtgttccat

SEQ ID NO: 771833 - DNA, 631 bp, Homo sapiens
gttgtcttctgcccacatccttggccaccgcttagccagagctattcctatcccttggcctggctcagttaataataagagtttccatgaggttccaagatggcccaataggaacagctccagtctatagctcccagcatragggacagagaagacaggtgatttctgcatttctaactgaggtaccaggttcatctcactggagtttgtcagacagtgggtgcaggacagtgggcacagcccacggagcgtgagccaaagcagggcgaggcatcgcctcacccaggaagcacaagaggtcagggaattccctttcctagccaagggaagctgtgacagacggcacctggaaaatcggtcactcctaccctaatactgtgcttttccaatggtcttagcaaacggcacaccaggagattatatcctgcacctggctcagagggtcccacgcccatggaccctcactcattgctagcacagcagtctgagatcgaactgcaaggcagcagcgaggctgggagaggggcgcccaccattgctgaggcttgagtaggtaaacaaagcagccaggaagcttgaactgggtggatcccactgcagctcaaggaggcctgtctgcctctgtagaccc

SEQ ID NO: 771834 - DNA, 631 bp, Homo sapiens
gttgtcttctgcccacatccttggccaccgcttagccagagctattcctatcccttggcctggctcagttaataataagagtttccatgaggttccaagatggcccaataggaacagctccagtctatagctcccagcatgagggacagagaagacaggtgatttctgcatttctaactgaggtaccaggttcatctcactggagtttgtcagacagtgggtgcaggacagtgggcacagcccacggagcgtgagccaaagcagggcgaggcatcrcctcacccaggaagcacaagaggtcagggaattccctttcctagccaagggaagctgtgacagacggcacctggaaaatcggtcactcctaccctaatactgtgcttttccaatggtcttagcaaacggcacaccaggagattatatcctgcacctggctcagagggtcccacgcccatggaccctcactcattgctagcacagcagtctgagatcgaactgcaaggcagcagcgaggctgggagaggggcgcccaccattgctgaggcttgagtaggtaaacaaagcagccaggaagcttgaactgggtggatcccactgcagctcaaggaggcctgtctgcctctgtagaccc

SEQ ID NO: 771835 - DNA, 659 bp, Homo sapiens
aagagctgtgctttgtaaaagagatggtggctctcagtttgctaagtaggtcccttcctagcaaaggcaaggggcagtcaggcatgtacaggaaccggtgaatcacttcatgcccccactatggtacaggtccggggctaacagaaagcttgctttgccgaaacccctgtggctccaattatatcaatagtctttttggataagggggtgacggggtggccattactgaatgttaagcaccagtatcgactaggaactcaatgtccttgcccccrgactgtcatcctgaccatgggctctttgggggcacatgaacctggtccccctccatccagtaacccttctgccagattgaacaaggctccttcatccttgccttaggcctcatgctcagagtcaccttgtttccctttcaactgggggcacttgtccttccaatgtcctttacagtaagcacactgattacgctgcaagcgtagatggccagactgggtatttttcttggggcccccttctctcgccctttggagggacccctctaatagctgcagctagcaggtcggtgtttcgccgggcttgctgtttgctctctgcagttctctctgcggcttactgcagctctatttacaaacacctggttggctatctccaataactgt

SEQ ID NO: 771836 - DNA, 658 bp, Homo sapiens
aaacaaagctaatctttcatccttagcatgctttttaaaaattttttatgggtacatagtaggtgtatattttatggagtacatgaaatattttgatacaggcaaacaatacatacttatcacatcagggtaaatagcgtatacctcaaacacttaactttcttttagtttatactaaaagaaacattccaattatactcttagttatttttaaaygtgcagtgaattattgttgactgtaatcaccctgttgtgctatcaaataccagagcttattcattctaactctagttttgtacccattagccatccccacttctgccatccccgactacctttcccagcctctggtaaccatcattctactctctatcttcaggagttcaattgttttaatttttagctcccacaattgagtaagaacatgtgaagtttgtctttctttgtctggtttatttcacttaacatgatgtcttccagccccatccatgttgttgaaaatgacaggatctcattcttttttatggctgaatacttctccattgtgtatatgtaccacattttctttatccattcatctgttaatggacattcactttgcttccaaattttggctattgtgaatagtgctgcaataaacatgggagtgcaaatatct

SEQ ID NO: 771837 - DNA, 681 bp, Homo sapiens
ctgaacatgaagacgtagaagaaatgggaaatattgggcaatgtatagttctttttcctttcagccattccttgctcatcactaagctgaagatagagtgttggtagaatgcttacatatcaaggaataaaagcaattgagctggttgtgcagtgtttccaatattctggtaagaacaaaatgcatatgcatgtacaagctgaaatgtgaactggataatttcagtgattccactataaagtaaatgctcttatatttgcacttaaaactggtagtgcacaatataaaaatgaasaataatagtcaagctaataaattaaattttccatttttaaaacttagaatgacgttaaataaatgaaaaaaacccacaccacaagttcggagacacactacagaagaaagggaacatctttatattctagtactttaacagccctttttatttccaagctccacaaattatgtagctgtcctgcttcaaaatctgtcattcatgttgcattgtaacttatgaaaacccacgcttcttctttaaaactattgtctctgttgtgagttcttaaagttcattttgaaaactacaaatcaagaatcgattcttttctttgtttctaaatctctgctgtgctacctctgtaccccaagaaaatggacaggagtataggaaatgcaggaaag

SEQ ID NO: 771838 - DNA, 543 bp, Homo sapiens
tcccagacagttaaggcattctaagtcacagaatgagataggaggtcaacacaagatacaggtcataaaaaccttgctgatcaactagattgcagtaaagaagctggctaaaacccaccaaaaccaagaaggtgacgagagtgacctctgctcatcctcactgctactatcccaccagcagaatgacagtttacaaatgccatggcaacatcaggaagttatcctgtatggtctaaaagggggagacgtgaataatccaccctttgtttagtatatcatcaataaataattataaaaattggcaaccagcagcccttggctgctctgtctatggaatagacaytctttcattcctttactttcttaataaatttgctttcactttactctatggactactctgaattatttcttgtgcaagatccaataaccctcttttgcagtctgcattgggacccctttcctgtaacatctttttggcaaccatgaagggactatagtgcagaagcccctgacccaaatgctaactttgggtaagtggtg

SEQ ID NO: 771839 - DNA, 510 bp, Homo sapiens
tatgacacacccacagccaatatcatattgaatgggcaaaagctggaagcattccctttgaaaactggtacaagacaagaatgccctctctcaccactctcgttcaacatagtattggaagttctggcaagggcaatcaggcaggagaaaaaaataaagcatattaaaataggaagagaggaagtaaaattgtctctgtttgcagacaacatgattttatatttagaaaaccccatctcctcagcccaaaattccttaaattgataagcaacttcagcaaagtctcagaatacaaaatcaatgtacaaaaatcacaagcattcctttacaccarcaatagacaaacgagagctaaataatgagaatgaactcccattcacggtagatacaaagagaataaaatacctaggaatacagccaacaagggatgtgagggacctcttcaaggagaactacaaaccactgcccaaggaaataagagaggatgtaaacaaatggaaaaatattcca

SEQ ID NO: 771840 - DNA, 654 bp, Homo sapiens
gtctatatatctatccttatgtccataccacactatcttgattacttttacagtaagtttttatatcaagtagatgagccttcaacattttttttcaaagcagttttggttttcctattcattacacttctatgtaaattgtcaaggcactttgttaatatccacacaaaaaaatagcctccttggatcttgattgagatttcactgaatctacagataaactgcggagacttgacttcttaagaatgttgtgtcttctgatccatgaaaacaatatatctctatttctcagcaatgttttatagttttcagtgtatagttcttgaacatattttttaaatttatccttaartatttcaagtttttatctgatgctttttcaaatggtatttttaactttattttccaatttttgttgctattatacagaaatacaatttgtgtatatgtgtatagatatgcagtaatttcttagagattttctgcataagtgattatgtaatctgtgaataaaagcacttgtatgttttcttttccaatctacatgccttttactccttttcatagccttactacattgtctagagccctgagtataacggtgaatatgttttgggaatggatatttttgtcttatttccaaacttaggggga

SEQ ID NO: 771841 - DNA, 654 bp, Homo sapiens
gtctatatatctatccttatgtccataccacactatcttgattacttttacagtaagtttttatatcaagtagatgagccttcaacattttttttcaaagcagttttggttttcctattcattacacttctatgtaaattgtcaaggcactttgttaatatccacacaaaaaaatagcctccttggatcttgattgagatttcactgaatctacagataaactgcggagacttgacttcttaagaatgttgtgtcttctgatccatgaaaacaatatatctctatttctcagcaatgttttatagttttcagtgtatagttcttgaacatattttttaaatttatccttaaatatttcaagtttttatctgatgctttttcaaatggtatttttaactttattttccaatttttgttgctattatacagaaatacaatttgtgtatatgtgtatagatatgcagtaatttcttagagattttctgcrtaagtgattatgtaatctgtgaataaaagcacttgtatgttttcttttccaatctacatgccttttactccttttcatagccttactacattgtctagagccctgagtataacggtgaatatgttttgggaatggatatttttgtcttatttccaaacttaggggga

SEQ ID NO: 771842 - DNA, 516 bp, Homo sapiens
atttctttccagtattttgatagcttttatacctattgcaatggttctgtaataaagtcttccttaccatcttgtcagaactgtcagaacaaggtttttttttttttttttttttgacagttcattagttttaataagtctcagtaattgtacgcttgggaattctcaaataaatcacagatacctactggatgagctaacttgtagcttcatttttctaaggagaatatttcaraatatttactaatctttgaaaataaagtttattgcaaatgttaatctgacttttaatcggctttcatctttttcttatttatctctgcctcacctctattactaacatgatattattcaggaataaatgttctacttctagcctctaaatcaaagcatatagtttcatacaataaaatcaattctgactactcagggaaaaagataagcttgtctgtatcaaaaatctatttaaagttttgatgaaataaactttttccaaaaaatccataagccaccaat

SEQ ID NO: 771843 - DNA, 516 bp, Homo sapiens
atttctttccagtattttgatagcttttatacctattgcaatggttctgtaataaagtcttccttaccatcttgtcagaactgtcagaacaaggtttttttttttttttttttttgacagttcattagttttaataagtctcagtaattgtacgcttgggaattctcaaataaatcacagatacctactggatgagctaacttgtagcttcatttttctaaggagaatatttcaaaatatttactaatctttgaarataaagtttattgcaaatgttaatctgacttttaatcggctttcatctttttcttatttatctctgcctcacctctattactaacatgatattattcaggaataaatgttctacttctagcctctaaatcaaagcatatagtttcatacaataaaatcaattctgactactcagggaaaaagataagcttgtctgtatcaaaaatctatttaaagttttgatgaaataaactttttccaaaaaatccataagccaccaat

SEQ ID NO: 771844 - DNA, 516 bp, Homo sapiens
atttctttccagtattttgatagcttttatacctattgcaatggttctgtaataaagtcttccttaccatcttgtcagaactgtcagaacaaggtttttttttttttttttttttgacagttcattagttttaataagtctcagtaattgtacgcttgggaattctcaaataaatcacagatacctactggatgagctaacttgtagcttcatttttctaaggagaatatttcaaaatatttactaatctttgaaaataaagtttattgcaratgttaatctgacttttaatcggctttcatctttttcttatttatctctgcctcacctctattactaacatgatattattcaggaataaatgttctacttctagcctctaaatcaaagcatatagtttcatacaataaaatcaattctgactactcagggaaaaagataagcttgtctgtatcaaaaatctatttaaagttttgatgaaataaactttttccaaaaaatccataagccaccaat

SEQ ID NO: 771845 - DNA, 516 bp, Homo sapiens
atttctttccagtattttgatagcttttatacctattgcaatggttctgtaataaagtcttccttaccatcttgtcagaactgtcagaacaaggtttttttttttttttttttttgacagttcattagttttaataagtctcagtaattgtacgcttgggaattctcaaataaatcacagatacctactggatgagctaacttgtagcttcatttttctaaggagaatatttcaaaatatttactaatctttgaaaataaagtttattgcaaatgttaatctgacttttaatckgctttcatctttttcttatttatctctgcctcacctctattactaacatgatattattcaggaataaatgttctacttctagcctctaaatcaaagcatatagtttcatacaataaaatcaattctgactactcagggaaaaagataagcttgtctgtatcaaaaatctatttaaagttttgatgaaataaactttttccaaaaaatccataagccaccaat

SEQ ID NO: 771846 - DNA, 612 bp, Homo sapiens
cttgctaatgatctgtcaattttatttatctttttgaagaaccagctttttgtttcatttatcttttgtatttcttttgtttcatttagttctgctctgatctttgttatttcttttcttctactgagtttgggtttggtttgtacttgtttctttagtttctggaggtgtgaccttagatwgtctatttttgatctttcagactttctgatgtaggcatttaaggctatgaacttttagtgctgtctttgctgtatcccaggtgttttgataagttgtgtcactgttattgctcagttcaaagacttttaaaatttccatcttgatttcattattgatccaatgattgttcaggggcaggttatttaatttccaagtatttgcatggttttgaggtttccttttgatttccaattgtattccactgtggtctgtgagagtacttgatataatttcagtttttcaaaatttattgatacttgctttgtggcctatcatatggtctatcttggagaatgttccatgtgctaatgaatagaatgtatattctgaagctgtttgggtagaatgttctgtaaatatctactaagtccattttttctagaataaagt

SEQ ID NO: 771847 - DNA, 568 bp, Homo sapiens
gattggttggttttgctttattttaaaacaagaaattctttttggatccacagatttattttacccttgtattagtcagggatctccagagaaacagaaacaacaggagatctctctctctctctctctctctttctctctctcwcacacacacacacacacacacgcacagaagagttgatgttgttgcatcttgaatccaaaggcagttgggaaacagaattctctcttcctcagaaaccttagtctgtttttctcaaagctttcaattgactggatgaggcccacccacattatagagggtaatgtgctttactcagagtttacttttaatgatttaaaatgttaagctaatccaaaaaatattttcactgtgacatctatactggtgtttgaccaaatatctgggtaccgtggcctagccaagttgacatataaaattaacctcatgattttttatgttaggaaaattttattcagggattaagtataacttctttttcatttattgtatttccagtaattttctgaagtttaaaatttaataggtgcagatttgtaaggttat

SEQ ID NO: 771848 - DNA, 586 bp, Homo sapiens
gctcaagcctccctcaaggcctttgcacttgctgtttcctttgtctagagtacactttcttgatcttcacaggcatggcttgcttaccatgtggcaatgtcatctcatcagagaggcctttcctgttccacctatttaatatggcctatcaccttcacaggtcactttgctatattatcctattttattttctctatatagcatttatctgtaccttaatcttctcgcatttatttacttttatgtacatttattgtctacatcccctcatagaaagattctaagagacttttgttcacaattctattctcaggacacagaatagtamataataggtgcatgaaaattatttattaaatgaatgaacgaggaagtgaatgaaaggatgtcataaccatattgttaatttagaaaagtactcaagttgcagtgagggaagtgtatgctaagaaaatctgaaatagaggaaatttctttaggcaagaaatgctgaggttctgaactaaggtatttttggtagaaaggtaaagggtaggttagataagaaaggagacaagtcgacagacaagagagccatttgctgaga

SEQ ID NO: 771849 - DNA, 600 bp, Homo sapiens
gatagtgttttttgcagcacaaaagttttaaattttgataaagttaaatttatctattttttttagttgcttgtgtttttaatgccatatttaagaaactattacccagtccaaggtcataaagatttacacctatgttttctcctaagagtttcacagttttagctcccacatttaggtgtttttttttgtattttgtttgtttgtttgtttgtttttgagatgggattttgctcttgtccaggctggagtgcaatgacrcgatcttggctcactgcaaactctgcctcccaggttcaagtgattctcctgcctcagcctcccatatagttgggattacaggcatgcaccaccatacccagccaattttgtatttttagtagagacggggtttcaccatgttggccagcctggtctcaaactcctgacctcaggtgatccacctgcctcaacctcccaaagtgctgggattacaggcatgagccactgcgcctggccttacttaggtctttgatccaggttgagttaatttttcagtattgtgtaagatagggatccaacttcattgttttgcatgtagatactcagtggtcccagcag

SEQ ID NO: 771850 - DNA, 552 bp, Homo sapiens
gatttcttgcttcccaggtttttgctaaaaatttaaggttgctaagagttaaacattctaattaatatatatatataactttgtatttaaaatataccaaaatacaaatttttttgatgaaaaaaattataagaaaagtatacaaatatgctctctgttgagaaagaaagagtaattttgtctaattcagaggttatttgaaggttgttttaaaatacagatttaggaaggaaatagaaataaaataaaatggaaccagcaagtagcagatagaaatgtaaagttataaatatgaaaatatgtttttggtaaaraacatgaaaaagaaaagagaataattttgaataagaaagaatcttgcatggtaaattttgtcctaaagtaaaataattggttatttaagatagaggaagtataggaaaatgcagaaagcccaagtatgtcatcagtggtctgagtaggttgcagtaagtttcatcaaaaataatttatagaaggaattgtttgtgtgatcaaattggctataattagaaggaaattatttaaaagttt

SEQ ID NO: 771851 - DNA, 447 bp, Homo sapiens
aacagggataacctttgtaaaagataaaccctcctctcaaagcccttcagagatgactactgagctcatctgaacttttttgatgacctgcaaggtccttctgactggccccagcccatccctcgagcctcccctgagcctgtcctcttcctaactaagcggcacgcgtggctttgtccagctcctcacacaggccgagcatccgccaccatgcggccttcacacatgcagttgcttctacctgaacttctctccctccatccttctccatggccccccgtgccagtcctttcagcctcagcctcactgtmccctcctggacctccctgactgaggcatctcccaccttcacagatggatcacggctcctccctatattgtgagctctgtgcagcagaaactgccctctctgcttccccatctgagcccagtgcctagtacagtgcc

SEQ ID NO: 771852 - DNA, 556 bp, Homo sapiens
ctaccttatggctaaacatgttcctgatcctgtctccacctgtggcaaagctttttgatacttttctttgctagaacttgtcaccttctcaattttccagtaacacaacaaggattgagtattttgtctattaacattatgycaaatactgtcatctctacctttcaaacaaatccagaatcctcagatttcaacaccttccctgctgtcagagccctagcaccatagtttcttgcctacattattgggacggatccatcaggcctctgtgcaatgatctaggcaagaggcgatggtgctaggatgatgtcaccaggtggatggcagtgagagtgttgaaaactgttctgattttcccttactcctgttctcagagcaactggagtaattattttagaatgtcaggtcatgtcattaccctactgaaacccatcaaaggttttctattgcgatctaaataaaagccaagtaaccagatggtcttctttaacattgttcctgtcccccaaatttcctagtcccctttcctgctttattttttttccatagcatccac

SEQ ID NO: 771853 - DNA, 566 bp, Homo sapiens
aaaataaatacagcattccgtttctagccaaatgtttctccataaacctaaagtttaatgtgtggcttttgtaatctcatcagaatttctgagatgaggtataaacatgttaattagaagaagacaacttcaatcattttctgttctagcctgaaatctcacatatctaaggaaagcattttaatycctatcaagagacagaagtactgcagggttgacagcatcgtgagagtacaacagtggtgttctgaggaaagtaagaagtgcccatggttctagatgctacattacagcctgtgatgctctagcaaccaagatataacactaaccagaagaacaagacaggatgtgttcttgattctaagatctacttctagcatttcaattctcctaaaatcacaatgaattttacaaatggcatagatggaatatgatggcatttttttcactaagatactaacttctggtatggcttaaaatcgattgatgtcagtaggtggtagtctactcagatggtgttagctagaggcacattttctagctcaatctctctataatggatttta

SEQ ID NO: 771854 - DNA, 603 bp, Homo sapiens
acatagcaagatcctgtctctaaaaaaatttaaaaaatatatatataaaaatataatgtaaagttgcatttatcaagaacgtctagtgttggcaaatgaacaaataccagtagaccaacggaacagaagacagagcccagaaatagacccacataaatacagtcaactgatctttgacaaaggagcaagagcaatacaatggagcacagataatcttttcaacaaaccgtgctggaacaactagaaatccacatgcaaaaaaatgactctagacacagattttacacatttcacaaaaattaatttgaaatgaatcgcaaacctaaatttaaaacacaaaactataaaacttctagaaaataacgtagtagaaaatctacgtggccttgagtttggcaatgagttttaaaatacaatgtcaaaggtacgatctctgaaagaaawaattgataagctagactttattaaaattaagatttctgctctgcaatagacactgtcaagaaaatggagagacaaaccacagactggcagaaaatatttgccaaagacatatctggtaaaggattattattgaaaacatactaagaactcttaaaactc

SEQ ID NO: 771855 - DNA, 597 bp, Homo sapiens
aagaatattaaagaagaagaaaggtcaaaaattaatgactgaatcttctaatttaagaaatccccaaaagagtagcaggataagcccaagtaatggaaatggccgggcacggtggctcatacctgtcatcccagcactttgggaggccgaggcgagtggatcacttgaggtcaggagttcaacaccagcctggccaacatggtgaaaccccgtatccactgaaaataaaaaaaaattagccaggcatggtggtgggcacctgtaatcccagctactatggaggctgagacatgagaatcacttgaacccaggaagcagaggttgcagtgagccgagattatgccattgcactccagcgtgggcagcagagcaagactccatccccctrcccccccaaaaaaagagaagaaaagaaaaggaaataagatagaatttaaagtaacagtaagtaatatcctacagaactgataaagccataaattgcttcttaggaaaaaaataatcaaattgacaatgctttggcacaactggccaagaagaggaagcattacaaatgaagaaagggatacagttccagatataacagatatttaaaag

SEQ ID NO: 771856 - DNA, 670 bp, Homo sapiens
ccatgagcatgggatgtttttccatttgtttgtgtcaactatgatttcttttagcagtgttttgtagttttccctgtagaggtctttcacctccttggttaggtatatccctaagtgttttatgtttttgcagctattgtaaaagggattgagttattgatttgattctcagctttgatctcagtcattgttggtgtatagcagtgctactgatttgtgtatcctgaaactttactgaattaatttatcagatctaggagctttttggatgagtctttagggttttctaggtatacaatcatatcattggtgaacaacaactgtttaacttcctctttaccaatttggatgccctttatttttttctcatctgattgttstggctaggacttccagtactatgttgaatagaagtggtgaaagtggacatctttgtcttgttccagttagcagggggaatgctttcaacttttccctgttcagtataatgttggctgtggatttgtaatagatggcttttattaccttgagatatgtcccttctatgctggttttgctgagggttttaatcacaaagggatattggactttgtcaaatgctttttctgcatctattgagatgatcatatgattttttgtttttaattctgtttatatgatgcatcatatt

SEQ ID NO: 771857 - DNA, 606 bp, Homo sapiens
attatagttcgttctcaggaactacatttccagtgacattggattgaaaattgagcaagattccaattcagcaccaaatattctctaatttgtttctctcccttccgaggcagataaataaaagctaaaatgaggaaagaatcttaataaggaataatgcaatgcgattgaaaaacatttgtcttttgaagacagggacaatgtatatgtatattacatagcctatgttcttaggaatattatttaaaaatattttcctttatacccttagggtaaatattatcaaaaaatatttgaaactgatacattaaatttgctagggaaatttgaaaattacaaacgttttgatcagattttacctcttcctatcaaccatatacattcgctgagctttactttttgttagtatcaacatttattgattcacaagataaatattgacatgaccttgccttcwcctcagtttatatctacttcttaattcaataaatctagaaactgatctgacagcagccaatattagtttaaaattcttaaaatagcagttttgctgtaaggtaataattcagtattttatagtttctgcctcaaagaaataaaaaggca

SEQ ID NO: 771858 - DNA, 611 bp, Homo sapiens
cttttttattaggaaaattagctctttctggtattaattgaattttttttttttctggtttgctgtcttttgactttgctttggtggcttttgccatatagattttttaaagtatgtgattaaatttgtcaagattttcaatgccgtctggtttttgtgtcactgttagaaaaaacgtaaccactccaaagttataaaattaattcttcygtgatttttgtgctctttatgtttttagcttttacatttcacatgtaaattatttgaaatttgtcttggcataaaattcagatttgactttattttctagatgactgtccacttgttcaaacagtatttattgaatgattctctatggagtgtatttacggtaatagccaaatgtgaagaattgtcgacggggaaaaaagtgaagtttaatcaagattgtcagtgaagatatgcttggctaagccctttctttttgtcctcttctccctcctttcctttcttctcctttcttcccctctcattctcttctcttctttgtttttctctttttgtctttatttatatgtaacttgattcattctctttggggatagaaacatttttaaattttcttacaaatt

SEQ ID NO: 771859 - DNA, 596 bp, Homo sapiens
cttgctttatggatcacaaagatattttgttaaatatgccagatgataaatacttacaaattgtttatcaactcttataccatcaccccaagaagaaaatgagctaagattttctttagcagcaaaggtgattatctcatccagaagtagctgggtgaaaattcacaaagcaaatgttattgactgcctatcagtctctgagtatgaaaactatttccctctgagtaatcaaagaaaatccctgagatttcttgctgctcttttctgtcttycagataggcctagtggtgggggttgggaggaggtgggatttgccctcaatctgtagactccacccaatctgaggcatggattgaggcaaccagccagcagagtccaggaagctggcataaccaggcctaaccaggaaggatgcagtgtctcttctggcttctgcaatctttggatctgacctcttttatgaagtttgccctgggatggcaggactaaccctcgcatcacagcaggagctcccaagagatattttttaccaatccttctcttttcatgctcgtacccagtaccaaagtctctcatgttttctttccttcttttgc

SEQ ID NO: 771860 - DNA, 629 bp, Homo sapiens
atatatccattaccttggttccatatgcaccagtggttaacatttcactgcccttgctctgtcattctctttctacacacacatacacacacatatgcagaattatataaatatgtaaattttttttttgagacaaagtttcactcttgttgcccagcctggagtgcagtggtgcaaactcgactcactgcaacctctgcgtcccagtttcaagcaattctcctgcctcagcctcctgagtagctgggattacaggcatgcaccaccttgcccagctaattttttaatttttttagtagagacaggatttcaccatgttggccaggctggtctcgaactcctgacctcagatgatctgygcgccttggcctcccaaagtgctgggattacaggcgttgagccaccgcgcctggcccaaatatgtcaatattttacataaatagataattttgtctctatatagctacatatgtagtctgttttctgaaccatctgaaaatacattggagacacacctgcgaccacaccaccttatctctaaatcctccttgtgtatttctgaggaacaaggacattctcttgcacaaacagtaagtaaaagacacaagccaaaaagctattatacacac

SEQ ID NO: 771861 - DNA, 512 bp, Homo sapiens
aaaaaaaaaaaaaaaaaaaaaaaaactcttctgagaggtgtagccagggaggcatgttagtgccaaacagagattaaaaccttgaatcttctgacttctgatctagtacatgtgaccctatcgcctgaaggaacaaatgtccttgtagagttaacaagaggcagagaaaaagaagaaagattgtggtatgcaaaaggatacctatattatttccaaaaattaatttaaatagaagaccacgacaagaagcacttggttttcccctgtgggacatcttttgttgattaatttttactttagggcatcaaaatggggtcrattatgttacatcaaccaaaacaaggttgacacccctggagttgtgactctctgaccctgagcccctgactccatgacagcctgcacaagagggctgttagctcagtaattcggaaagaccttgctcacaaggtgggtggcggatggcatcacaaaataagtcacacgaagatgtctgctccagagtatttttt

SEQ ID NO: 771862 - DNA, 580 bp, Homo sapiens
catcattgtccaggtgcccctctgcaagtgaaggggaaaagcctccattacgtttttgttttccaggtgacagttcctgggggcaaaggtcatttgaaagtttggaggaagctcattattttccagactagtttagaaaaaccccaacatgagaggtacccaccacaccaggagtctcctcagccaagcagaagcacatggtcgagggaactgtttgggtaatgcggtttttttaggatctggaggtagatctgatamcgcagagctgattcccggattataaatgcttaccacacctcaaggccaagttgatgcacttggggaatggaaattccatagctgggagccaaggacttgacttttcccacaccctaagtctcaagtcttcaacatatcagcaacacatcccttttcaaaccactgataacattcctgaatgagacttggaatttgaagagcgctgtatcaggacttgtgctataagcactttcttatttgacttttacttgaccttcaagagaatttttctccttttatctaaccctaaaagaaagaaaacaagacttggggttcctccctt

SEQ ID NO: 771863 - DNA, 567 bp, Homo sapiens
gtgctgggattacaggcatgagccaccgtgcttggcctctacctttaaatagatccaggatggaaccacttctcaccagcaccactgcagtagcccctgcctggtgcctctgcttctaccagttccactttctccaggctattagccaagcagcatggtgaaccttttagttcacctaagtccaagacacatctctcctttgttcaaagccttttgataattttgcatytaaaaccaaaattattaccatggccttcaagactctataagatgtgacaccccagcacccctctcctctgccatctcttctctagcattctctccccatcactcagctccagtcccactgacttccttgccaatgtggcccctgcctcctggcctttgtacttgcggttccttctgtctggcacatccttcccccaggaagccttcacccttgagccctccttttcttctacctcattacctggctttatgtttcttcatagaacttgtacacacaggacatatactcacttgcttcctgtccattctttcttttttttttttttcttggaaacagac

SEQ ID NO: 771864 - DNA, 631 bp, Homo sapiens
gcaagtatttgttgaatggataaaggaaaggtgccaagccccttagtgattttaaagtattcttgcctcagagacctcttgcaggtggccaccaaccggtgcataaaaaaataaaaagttgaaaatgtgtgacaggcctaaggcttcctccctagcaaagaaatagggcagaggcccttcccccagtctccagttgtgcctccctgaccagttctaccatgagctattttaatctttggccaatagagtaggagctgattaaatctccctycatgcctctgctgatctaccaaatggaagcccgtaagccaggggcgagactgagggcttcttgctcctggttttctgctctctcccagtgtggtttcctgcttcctctcttcccactgcatccctgcaaagactggagagtatgggaacatgaaggcatttcactcccctctccctcccacatgattccacagtccattttcatttggcggaagcaggcctcttttgggtaggctcaccaggcctgaggtaggttccaccctcatcatcacttgaacccatcccctctaggctgagacaagtctctaaagatcactttatcctcaggcggaacagagggatccacagaacaacctcccca

SEQ ID NO: 771865 - DNA, 644 bp, Homo sapiens
ggattttaaaagaataaacacaatacatggttttcaaaatcaaatattggaagacttgcaatggaaggcagcagcccctgagcctcctcccaatcccatttctgttatctcctcccctaaactacgtctccagctgtgtattcattatttatctccatacttctaaaaagatgctgatactgctgcttattggtttctttttcttttctttctttctttttttttttttttggagacagagtctcactctgtcccccaggctggagtgcagcggcacgatctcagctaactgcaaaccacctcccaggttcaagcaattctcctgcctcagcctcctgagtagctgggattacaggcatgtgccaccacacccggctaatttttatatttttagtagagaaggggtttcaccatgttggccaggctagtcttgaactcctgacctgaagtaattcacccayctctgcctcccaaagtgctgggattacaggcgtgagctaccatgcccggcctctttttcaatattagacattaataattgattccatatcatggaaggtgaggattgaaccttcttgtatggtggtcctctccttagggtgaccatgtagcagcctggtcatatgtcaatgcctgtggggctt

SEQ ID NO: 771866 - DNA, 600 bp, Homo sapiens
tgaaccaagaacaaacatcaaatttatgatgaagcctgagtggaagaatggtgaaatcattgatgctttatggagacaatgcccaaaataaatcagcagttcacaaatggataactcattttaagaagggaagaaacaatgttgaagcccacagtggcagaccattcatatcaattttcaagggagaaaataatcttgtttgtgccctaactggagaggaccagtgattaacagcacaagcaatagccaacaccatagctataaccaatacttcagctaacacaattctgactgaaaaattaaagtttagcaaactttcaactaaaacagtgccaaaatcactgcacccaaattayctgcagacaagtgcagaactttcaattaaaattttaagcaagtggaatcaagatcctgaagcatttctttgatgaattgcaaaagagatgaaacatggctttaccagaatgatcctgaagacaaagcacaatcaaagcaatgactaccaagaggaggatatggtctagtcaaagcaaaagcagacccattaataacaaaggtcatagcatcggttttttgagatgctaaagtcattttccttgt

SEQ ID NO: 771867 - DNA, 584 bp, Homo sapiens
ctggtaagggtgggtaaatctataattattcgggtgatgtggaaactgtacgtttaaaagacaaactgaaaaataaatcattgcaaagtctatttatatgaagaagaattggggtgcaggaagaaagggacaggaggcctctgtagctttgctctcaaagtgtagtttgtgaagcagaggcattggcgtcccagcaccttgttaggagtgcagactctcargctccacccagaatcagaatctgcatttttttttttttttttgagacggagtctcgctctctcgcccaggctggagtgcagtggcgcaatcttggctcactgcaagctccacctcccgggttcacgccattctcctgcctcagcctcctgagtagctgggactacaggcacccaccactatgcccagctaatttttttgttgttgttgttggtatttttagtagagacagggtttcatcatgttagccaggatggtctcaatctcctgacctcgtgatccgcccgccttggcctcccaaagtgctgggattacaggcgtgagccaccatgcccggccagaatctgcattttaaccagagccct

SEQ ID NO: 771868 - DNA, 614 bp, Homo sapiens
tatttatttatttatttatttatttacttatttgaaacaaggttttgctctgtcacccaggctgcagtgcagtggtgtgatcttggctcactgcaacctctggctcccgggttgaagcaattctcctgcctcagcctcccaagaggctgggattacaggcacctgctatcacacccggctaatttttgtatttttagtagagatggggtttcgccacgtgggccaggccggtcttgaactcctgacctcaagcaacctgcccrcctcggcctcccaaagtgctgggattacaggtgtgagccactacgctggtcccttcactaaatctttatgccagcctggcttacttgccccccaattaccttgcaggtgtcaatcagctgggcgggacttcatactgagcatgagtggccaagagggtgtgcaagaacacctgcatggtaaggtaggagactgtttctcccagagaaactccagtgttggggaattcatgaatgagatattttaataaatgcaaaatcatgcagtccccagtccaaatgaatccacggatgagtaaagccagtgaattttggcagaaaatagcatatgacccaaacctgccccttcacctc

SEQ ID NO: 771869 - DNA, 534 bp, Homo sapiens
aattcagggtgtttcacatttccacataaattttggcattgtttctttatacttcctaaaacactatttgtcatatactaaatgtatacaattagaaggtacaaggaaggttttcatacatgtatatgttgaataatgataaaatcaggttatttagcatctcttcatctcatatagttattatttttggtaacaacattcagaatctttccttccagctactttgaaatatatgatacatttgtgttaaggctagtcacgctgctgtggaatagaaggycagaattgatcactatcatctgagagtaactttgtacccatcactgattccttccgagactgcctccacttccccagcagcctctggtaagccctattgaactttctacttctagaagataaagcttttttcagtctacatgtgtgagatcacgtggcatgggactttctctaccaggcttattctttggaccttgttcttcagatttcttcatgtggctgcagatggcaggatttcccaaaggtttatggctg

SEQ ID NO: 771870 - DNA, 461 bp, Homo sapiens
aacattaacgcacattcatcttcctggcattgtacggcctgtcagtattagaccaaaaacaaattacaaatcttaggaattcaaaataacattccacagctttcaccaactagttatatttaaagcagaaaactcatttttatgctatgtattgaaatcaaacccacctcacgctgatagagttggctactgcatacctttgtcagagctgtcctctttttgttgtcaaggacattaagttgacatcgtctgtccagcacgagttttactacttctgaattcccattggcagasgccagatgtagagcagtcctgtgagagtgacaagactttttaggaaattgtagtgcactagctacagccacattaatgattcatgtacttgcaaacactgaatagcctgctattactctgccttcaaaacaaacatttaactttcccatgaaaaaagcacactattt

SEQ ID NO: 771871 - DNA, 640 bp, Homo sapiens
tttgcctatttttaatggcattgattttttaacttttgaggagtctgagttccttctatactctgcacattagttccctgtcaggtgagtaatttgcaaatattttctcccactccaggggctgtctcttcactgtgttgattcttttgctgtgcagaagttatagcccactcaactatttttgcttttggtgcctgtgcttttgagatttcatccataaattatctgcctaagccgatgttctgaagagttttctctatgtttttctagtagttttatagtttcaggtctgacatttaagtctttttttctttttttgagacggagtctggctctgtcaccagattggagtgcagtggcgcaatctcagctcactgcaacctccgccgcccgggttcaagtggttctcctgcctcccgagtagctgggactacaggcacccaccaccatgcacagctaatttttgtatttttagtagagackggccatgttggccaggatggtattgatctcttgacctcgtgatccacccacctcggcctcccaaagtgttgggattacagatatgagccactgcgcccggccctaagtctttaatctaccttgaattggttcctatttccaacctgagacagggaag

SEQ ID NO: 771872 - DNA, 472 bp, Homo sapiens
ttctagaaacatttgtttctaaaacttgttttcatgttagagcactattttgtgttcaaattgaaaatactatatgttcagattttttaaaaaacagtattgcatgaatgttttaataaaaatattcctaaatgagcttgagcaagtacagggaagataagtaaartaaggctttgtggcataggagacatttggtggacatctttcagctcaactaagatttgaaaaaaaaaaaagaatttttataaaaaatgtaaaggcaggatttaccctgatgagcttgtggagaaaatacaaagtctaacataattcaaaagagactaatcagtcaaagtagttttgaaggaaatatcttgaagagagagaacataaaatgaagatcaggtatgtaattattttaataatctatccatgagataaaaagcattgggtttttttttatttgtcaaaaacagacaatagtttcaaaaac

SEQ ID NO: 771873 - DNA, 619 bp, Homo sapiens
actgaggtgggaggagggcaaggtattatttcttcctcaaaaaacaacacagataagagacagtttgactcccactagaataagagtcaggaagtgctaaaaatatcccttctctgagtgtccaatgatgaaactggctcaaaaataacatgaatcatccctctgcccccaacctaaattttctgcctagtcacacacacacacaaaatgatgttctacagttagagaggaamaagaaattggagagagaccctcctatgacatatgtggtaaggactacagaaagataactgtgcaaccggagcactggcatatgccctccagagcctaaggccccacacaaggcacatgatatagcagcctactgctggagaaatcttgagttacatggttcactgaatgtttcagacaccgcagcaaaaaacaacctttgttcctgcccacactaatagcatgacacaaaccaaaatgaaacataaatataaaacaatctcgacataaataattatctcatcatctactgtttttctacatctgatgatgtgcattttttagaaattggaaaacacataaaagcaagttagaaatttgagttgtgagttataatattttcaaaaga

SEQ ID NO: 771874 - DNA, 562 bp, Homo sapiens
caaagaccgtatctcaaaaaaacacaaaataatcctataaataagtattctaatgccacaagccttttcctaggctgtaaatgttttatgctaatttgaattgcattttaaaaagtaatgattcttggggtaaaggacatagaatacagcattgagaaataaatccacttatttaccttaccagaaataaatccacattcttgcgttacaagagctcctgaagtaagcactaaacgtggaaaggaacaaccagtaccagccactacaaaaacataccaaaytgtaaagaccattgacactataaagaaactgcattaactaatgggaaaaattaaaaactagcaacatcatgacaggataaatttcacatgtaacaatactaaacttaaatgtaaatgggctaaatgccccagttaaaagacacagactggcaagttggataaagagtaaagacccaatggtgtcctgtattcaggagacccatctcatgcgcaaagacacacataggtttaaaataaagggatggaggaatatttaccaagcaaatggaaagcaaaaaaaa

SEQ ID NO: 771875 - DNA, 574 bp, Homo sapiens
tctctgatgatcggtgatattgagcaccttttcttatacctgtttgccatttgtaggtctccttttgagaaatatctattcaaatcttttgccccctttttcttaaccaggtcattagattgtttcttaaagagttgtctgagctttttatttattctgattattaatcctttgtcagatgagtagtttgcaaatattttctcccattctgtggattgtctcttaactttgttgattgtatcattttctgtacagaagctttttaacttaatgcgatccatttgtccatttttrctttgattgcctgttcttgtggggtattgctcaagatatttttgcccagaccaatgtcctggagattttccccaaagtttttttgtactagttttatagtttgaggtcttagctttacatctttaaacaactttgattttacttttgtatttggtgatagatactagtctgttttcattcttatgcatatggatatccagttttttcaacaccatttcccaccagtgtatgttcttggcacctttgtcaaaaatgagttcactgtaggtatgtagatttg

SEQ ID NO: 771876 - DNA, 574 bp, Homo sapiens
tctctgatgatcggtgatattgagcaccttttcttatacctgtttgccatttgtaggtctccttttgagaaatatctattcaaatcttttgccccctttttcttaaccaggtcattagattgtttcttaaagagttgtctgagctttttatttattctgattattaatcctttgtcagatgagtagtttgcaaatattttctcccattctgtggattgtctcttaactttgttgattgtatcattttctgtacagaagctttttaacttaatgcgatccatttgtccatttttgctttgattgcctgttcttgtggggtattgctcaagatatttttgcccagaccaatgtcctggagattttccccaaagtttttttgtactagttttatagttygaggtcttagctttacatctttaaacaactttgattttacttttgtatttggtgatagatactagtctgttttcattcttatgcatatggatatccagttttttcaacaccatttcccaccagtgtatgttcttggcacctttgtcaaaaatgagttcactgtaggtatgtagatttg

SEQ ID NO: 771877 - DNA, 637 bp, Homo sapiens
aaatcaattgaccacagacacacggatttatttacgggttctatatccctttgtactgttttacatgtctgtttttatgccattactatgctgttttaattactatagctttgtaatagagtttggagtcgggtagtctgatgcctccagctttgttctttttgttcaagattgctttggttggtccaggtcttttgtggttccatacaaattttagcagtaatttttctatttctgtgaagaatgacattggaatttgatagtggttgcatttactctgtagattgctttgggtagcattgacacttttacaattctratttttgaattcatcaataaaggatgtttctccacttatttatgccattttaatttttttcatcaatgtgctatagttttcagtatgcaaatcttttgcgtttttgattaaatttactgctgtcttttatatatttatatatgttttgattctattataaattgaattgccttattaatttatttttcaggtaatagtttgtcattagtttatagaaacaataatgatatttgtatgttgattttgtaactattaactttattgaatttcttcatcagctttaaccgtttattttggtggaatctttaagattttctc

SEQ ID NO: 771878 - DNA, 637 bp, Homo sapiens
aaatcaattgaccacagacacacggatttatttacgggttctatatccctttgtactgttttacatgtctgtttttatgccattactatgctgttttaattactatagctttgtaatagagtttggagtcgggtagtctgatgcctccagctttgttctttttgttcaagattgctttggttggtccaggtcttttgtggttccatacaaattttagcagtaatttttctatttctgtgaagaatgacattggaatttgatagtggttgcatttactctgtagattgctttgggtagcattgacacttttacaattctaatttttgaattcatcaataaaggatgtttctccacttatttatgccattttaatttttttcatcaatgtgctatagttttcagtatgcaaatcttttgcgtttttgattaaatttactsctgtcttttatatatttatatatgttttgattctattataaattgaattgccttattaatttatttttcaggtaatagtttgtcattagtttatagaaacaataatgatatttgtatgttgattttgtaactattaactttattgaatttcttcatcagctttaaccgtttattttggtggaatctttaagattttctc

SEQ ID NO: 771879 - DNA, 618 bp, Homo sapiens
atgaaaagtattgatcctgggtatgtctgtgagggcgctgccaaaggagattaacattggagtcagtgggctggggaaggcagatccacccttaatctgagtgggcataatctaatcagctctcagggaatataaagcaggcagaaaaacgtgaaaaggagagactggattagcctccagcctacatccttctcctgtgctggatgcttcctgccttcaaacattggactccaagttcttcagttttgagactcaaactggctctccttgctccttaagcttgcagacagcctattgtgggaccttgtgattgtttaagttaatacttaataaactcccatcatatatatatatatatatcctattaattctgtccctctagggaaccctgactaatacatgctgycatccaggctttgttgtttcatttctagaacacgtagaacagctttagcataattcttaagggccccagcattttcagaatgatacaagagcattggcttcaacttaaagtcacccactgcattagcttctgacaagaacagcctgtcctctgaagctgtgaaaccaggaattgacttctcctctctaggctatgaaagtcctagatggcat

SEQ ID NO: 771880 - DNA, 616 bp, Homo sapiens
cttggctaagtgaaagaatccagtctcccagaaacccacacatcgaatgattctatttacatgaaatgttcagaataggcaaatgtattgccagggactgggggaaatgggagagtggggagtaactgctcatggagatggggtttctttttggggaaatgaagacgttctgaaattagtggtgatggccacaaaactttgtgaatatactaaaaaccactgagcactctaaaagggtgaattttattgcctgggaatgatatctcaatttaaaaacttttttgtaattaaaaaaaaagacaagtcttgcctttagaatcccctcycctcattccgggaaagtacgtgtcgtgggcaagtctaagcagaaagtgtattgaatctgccaggttgaccacctgtttcatgcagcttagggtcagaagaatctgtagctctgtcaagaagacgcagggctacagataggaaacaggagggaataatccagccagaaattatcttgcccaaccacagagggcatcatctacattctgctgggatccataccagaggaggacagaaacagaaaataggatcgggactggaaactagagctgtggttgtcttctggatggat

SEQ ID NO: 771881 - DNA, 616 bp, Homo sapiens
cttggctaagtgaaagaatccagtctcccagaaacccacacatcgaatgattctatttacatgaaatgttcagaataggcaaatgtattgccagggactgggggaaatgggagagtggggagtaactgctcatggagatggggtttctttttggggaaatgaagacgttctgaaattagtggtgatggccacaaaactttgtgaatatactaaaaaccactgagcactctaaaagggtgaattttattgcctgggaatgatatctcaatttaaaaacttttttgtaattaaaaaaaaagacaagtcttgcctttagaatcccctctcctcattccgggaaagtacrtgtcgtgggcaagtctaagcagaaagtgtattgaatctgccaggttgaccacctgtttcatgcagcttagggtcagaagaatctgtagctctgtcaagaagacgcagggctacagataggaaacaggagggaataatccagccagaaattatcttgcccaaccacagagggcatcatctacattctgctgggatccataccagaggaggacagaaacagaaaataggatcgggactggaaactagagctgtggttgtcttctggatggat

SEQ ID NO: 771882 - DNA, 616 bp, Homo sapiens
cttggctaagtgaaagaatccagtctcccagaaacccacacatcgaatgattctatttacatgaaatgttcagaataggcaaatgtattgccagggactgggggaaatgggagagtggggagtaactgctcatggagatggggtttctttttggggaaatgaagacgttctgaaattagtggtgatggccacaaaactttgtgaatatactaaaaaccactgagcactctaaaagggtgaattttattgcctgggaatgatatctcaatttaaaaacttttttgtaattaaaaaaaaagacaagtcttgcctttagaatcccctctcctcattccgggaaagtacgtgtcgtgggcaagtctaagcagaaagtgtattgaatctgccaggttgaccacctgtttcatgcagcttagggtcagaagaatctgtagctctgtcaagaagmcgcagggctacagataggaaacaggagggaataatccagccagaaattatcttgcccaaccacagagggcatcatctacattctgctgggatccataccagaggaggacagaaacagaaaataggatcgggactggaaactagagctgtggttgtcttctggatggat

SEQ ID NO: 771883 - DNA, 609 bp, Homo sapiens
aggggcccttcctgctctgtgcctcaacctattctccataatagggagtctaatcctattccttccctgcctgatgaggatggtgtgaggatgaggaggacggcatctcatttggggctttttggcagtgggcctcattttaatcctgcagggctgcctgccagtggatctatccagctgcttccttgtagccaagaatgagttcaatraattgtgattcactgattttattgattttgttttaaaacagggagactggtatttttgaagctgctatcattttctatttctttattaatttctttgtaatcatcttattaaagttttcttatttagtgggagagggagctttgtttaagtttggaatttgcctaaggcagaagttataaggcttcataaccttttgtatgtattgccaatatttgaaacttgggagattacgtataaaaaatacctagttttctgggtggaggatggggcatgctgtcatctcaagtctgctgcggctcacccccaccacctttaccccctcccccgcccttcccatcccccactgcacttcactcatgtaagacgtctgcccggtgctggtccaggcgggcatgtgag

SEQ ID NO: 771884 - DNA, 591 bp, Homo sapiens
ggcctgcacggctgagcttcccaaagtttagctgcacaagtccaagtgcgcaggaggcagagaactggatttgccccagggttgtggttttgccaaatgaatgggatgaagggagatgggcaagggagttggaagtttctttcaccaaattcattgttaatttcatcagaacaaaacgattcttttgcttgttcccacagagaaagcaacatccccaaatacatatgaaacaccgatcactaaaggcacaaaacagrcaccacatgatcctctattccacttctcttaggcagctctgttcagctacggggactcacctagttccctggcagtagcccaagtctctttcagcaacagcagccttgggaatcttctgtacataataccttcctgaggttggtttatcagcacattaaaagcacctcctaccagacacacagaatggagccccattagaaaaaaacaactaaactctaatgtcatcctgcagcagactgcaatccacacaccagtgtccagggtataatcagattctccagaatatggtatacacagtccattcttgactgctggcagtggcaggcaggagaa

SEQ ID NO: 771885 - DNA, 591 bp, Homo sapiens
ggcctgcacggctgagcttcccaaagtttagctgcacaagtccaagtgcgcaggaggcagagaactggatttgccccagggttgtggttttgccaaatgaatgggatgaagggagatgggcaagggagttggaagtttctttcaccaaattcattgttaatttcatcagaacaaaacgattcttttgcttgttcccacagagaaagcaacatccccaaatacatatgaaacaccgatcactaaaggcacaaaacagacaccacatgatcctctattccacttctcttaggcagctctgttcagctacggggactcacctagttcccyggcagtagcccaagtctctttcagcaacagcagccttgggaatcttctgtacataataccttcctgaggttggtttatcagcacattaaaagcacctcctaccagacacacagaatggagccccattagaaaaaaacaactaaactctaatgtcatcctgcagcagactgcaatccacacaccagtgtccagggtataatcagattctccagaatatggtatacacagtccattcttgactgctggcagtggcaggcaggagaa

SEQ ID NO: 771886 - DNA, 591 bp, Homo sapiens
ggcctgcacggctgagcttcccaaagtttagctgcacaagtccaagtgcgcaggaggcagagaactggatttgccccagggttgtggttttgccaaatgaatgggatgaagggagatgggcaagggagttggaagtttctttcaccaaattcattgttaatttcatcagaacaaaacgattcttttgcttgttcccacagagaaagcaacatccccaaatacatatgaaacaccgatcactaaaggcacaaaacagacaccacatgatcctctattccacttctcttaggcagctctgttcagctacggggactcacctagttccctggcagtagcccaagtctctttcagcaacagcagccttgggaatcttctgtacataataccttcctgaggttggtttatcagcayattaaaagcacctcctaccagacacacagaatggagccccattagaaaaaaacaactaaactctaatgtcatcctgcagcagactgcaatccacacaccagtgtccagggtataatcagattctccagaatatggtatacacagtccattcttgactgctggcagtggcaggcaggagaa

SEQ ID NO: 771887 - DNA, 637 bp, Homo sapiens
taatttttttttatttgtatttatttaaagggtacaagtgcagttttgttacatgggtatgttgaccagtggtgaaatctggacttttagtgtaaccatctcattaacattgtacattttacccattaaataatgtctcatccctyacccccatcccacgcttcctggtaaaaggtaacaaggatatctttaggttatgtttaacgttattattatgactaacagagatcaaatgagagactgatttattttgagctgagtaacaagtgtgttcatctcatctccagtacagatcatccatgcttactaggttcatactgagaagcctgtatctgttccaagtcacagaaaataaataaagcaattattctatttgatgttgtgtttttaaaaaatgataacaaaatccagtaccgcctttaattttgtgaactcaagccctttcaccttgcacctgcaaactcaaatgccttgaccaggctcataatgcaaacgagtaaacagaatcagctgcaaaacaaacagctctatggtcagtttattgctcatttacttttttttttttttgaagttataaatccagaaaaaattaactttaaaaaagcagtaatgcaaaacactaggagaacttgaagat

SEQ ID NO: 771888 - DNA, 637 bp, Homo sapiens
taatttttttttatttgtatttatttaaagggtacaagtgcagttttgttacatgggtatgttgaccagtggtgaaatctggacttttagtgtaaccatctcattaacattgtacattttacccattaaataatgtctcatccctcacccccatcccacgcttcctggtaaaaggtaacaaggatatctttaggttatgtttaacgttattattatgactaacagagatcaaatgagagactgatttattttgagctgagtaacaagtktgttcatctcatctccagtacagatcatccatgcttactaggttcatactgagaagcctgtatctgttccaagtcacagaaaataaataaagcaattattctatttgatgttgtgtttttaaaaaatgataacaaaatccagtaccgcctttaattttgtgaactcaagccctttcaccttgcacctgcaaactcaaatgccttgaccaggctcataatgcaaacgagtaaacagaatcagctgcaaaacaaacagctctatggtcagtttattgctcatttacttttttttttttttgaagttataaatccagaaaaaattaactttaaaaaagcagtaatgcaaaacactaggagaacttgaagat

SEQ ID NO: 771889 - DNA, 636 bp, Homo sapiens
aaacataggcaaccacctctctactctagtcaagcacagcaaataaaaaatggtggctccactccaactcatgccaacaaaggcccagtaggcagtctgacctccactctcatgaggcaccctagactggaaatatggtaatataagagaaggctaagtagggagttgggactttcacccctatgggagctgataacctctcctcaaggygttagtgaagaccttctggggagcctggacttacatcatatccagcagtaatgaaacatttttcctattcttggctgtgttgcttccacatgtggcctagtggagattcgggactttcatcactgcccagaggttaaaaggctacattcccccatcccctgagtggtatcagtgtaggccacattgatagtgaaaaccctcacacatgcccagcaataatgaggagttcccttttttccacagggtgtcagtggaggtctgctgggaaactggtacctcttccactatctggcagtagtaataaggcattttctcttaccctgccagagtagtatcagaggaaggcagttaaaacagatggtttaaataagacaagagtttcataacataataccccaaatatccaggatccaggtgttttattta

SEQ ID NO: 771890 - DNA, 522 bp, Homo sapiens
ctagactggaaatatggtaatataagagaaggctaagtagggagttgggactttcacccctatgggagctgataacctctcctcaaggtgttagtgaagaccttctggggagcctggacttacatcatatccagcagtaatgaaacatttttcctattcttggctgtgttgcttccacatgtggcctagtggagattcgggactttcatcactgcccagaggttaaaaggctacattcccccatcccctgagtggtatcagtgtaggccacattgatagtgaaaaccctcacacatgcccagcaataatgaggagttcccttttttccacagggtgtcagtggaggtctgctgggaaactggtayctcttccactatctggcagtagtaataaggcattttctcttaccctgccagagtagtatcagaggaaggcagttaaaacagatggtttaaataagacaagagtttcataacataataccccaaatatccaggatccaggtgttttatttaatttatt

SEQ ID NO: 771891 - DNA, 598 bp, Homo sapiens
taactaatctgatataattaacatttatagactaactcacccaaaattcagtaaacacatttttctaggtgtaaatggaacattaacaacagaaaaaatgtttataatataactctctatgcatttaaaaaaattgcaacttccaaaatagttactctgtgccaagcagaattatattaaaaacttaatgtctaaatttcctgatattttaaataaccaatgaatcaaagaagaaatcataatgaaattggaaaagatttcwgattggatgataatgacaatataataggtaaataacaatgatgcaattagagtgatgattaaaagataaatgcttgtattagaaagaatagatatttaaaaagagttatctaatatttatcataagaacctggaaaacaagagcaaaatggactgaaagtaattgcaggaaaggaaataataagactaagagcaaaaatcaatgacatagaaaatagaatcaaagaaagaaaataaacacagccaaaaatcactctttggaaaatttaataatatcgataaatccatagcaagtttaaggatacaaaatagaaaatacgtaataccaatgtcatga

SEQ ID NO: 771892 - DNA, 626 bp, Homo sapiens
ttttttcacacactggaaaattccccaaattgatttaacattcagtaataactaagttgagtatatgttacataaaaaaataagaatcctgaagacatactttccctttttcttgtgtcttaagggctgatcttgtctaaagcatcaggtgtgggtatgacctcatgacttctgaaatccagcagtgactgtcatacatgttctattctctcatgtacactgggctcctccatgattctgaaatgtaactcagaaactttctcttctaccaaagagaacacgtggtttgtgtatgggggggtgaggatagtaatactgtagttcctttgctgtatctcatctttaattttctctgtcctcactctttcacttattaattttaatttatgttcaggttatctctagcwtcctagcagactctccttccaataagtatcactgttagggaaacattttttggcatggacatctgacttatttatgacactaagttcaataagaattcatctttttggtataccattaattctgtgaaaacataaatccattctgtctcagaaatatgtgattataaataacagaacttcctattatggcaacaaactaacaggtgttttttttttctt

SEQ ID NO: 771893 - DNA, 474 bp, Homo sapiens
tacttaaaatttgctttctttgttcattcattctttctttctgcagggtatgaatgacattttaagataaatatccatctgttactaagtttatctgtttctgttttctaaagcaatcattctgctatgaagtgctccactatctgcagggctccaaagttaataaatcaattagcaccaattaatcatttatataactcatgacactagggggcaaaaaaaaaaaaagctcaagagtgcatattacttctggtrctgacaaagcatatctaactaaaacctaattcattcaaattttattcagttgtgattcattgaccaaatgttatgattttggcacagttaatgattaaagtacaggattaaactttggatttgggatacaattttaatcctactctctactcttttttttttttttataatgcagtgtaatgtggaaaggcaactgagatatcaattataattatcaat

SEQ ID NO: 771894 - DNA, 588 bp, Homo sapiens
gaccatgtatgaaaatggcctgccaggcggcctgtgcccttgcaggttcctgactcaaggagatcttagggaaggcccagagatgatttcactttgggtgagcacatgcaaaaaggggcgtgtgcagattcttcacaagctctgcttggacactggcccaccatcccagcacttaacgcgactggcccaggtggcagaggcactggtgtccatcagggcccacaggtcgggaatgcacactgctaactgcaatttgctttgctctaattcattttagcaggggaactgctgcaaagaacatccctaaaaagaatatcatggtctggacttttttttttttttttttttttgagacagagtctcgctctgtcgcccaggctggagtgcagtggygcgatctcggctcactgcaagctcctcctcctgggttcacgccattctcctgcctcagcctcccagatagctgggactacaggcaccagccaccacgcccggctaattttttgtatttttagtagagacggggtttcactgtgttagccaggatggtctcgatcttctgacctcgtgatctgcccgcctcggcct

SEQ ID NO: 771895 - DNA, 630 bp, Homo sapiens
aaaatgatgtataacataaccacatttatttaagactgtattccaatatcaaatggcaaattccaaccatgccaaaaccacaattacttttgtaccaacctaatagaaattctaaaactgaagaacttactgaatgaaaaaaatakgtattaaatatgtatttgaaagcttccccaatagatcaagcagaagaaaaaaatttcagaacgtgaagacagatcctttgaaataacccagtcagacaaatattaaaacaaaagaataaaaaggaatgaataaagactacatgacaaatggcactccacaaagtgaccaaatattcaaattttcagtgtccatgagggtaaaaagcaaacaaaagggatacaaaacttttaaacaaaataacagctaaaaatttcccaactctaacaagaggtttagatattcagacacaggaagctcagagatccccaaatggatacaattcagaaaggtctccatagcaccttatagtcagactgtcaaaggtcaaaggcaaaaacagaattctaaaaacagaaagagaaaagcatcttgtcacttataagggaaactccatcagactaacagcatatttctcagcagaaaccttacaggtcaggagataat

SEQ ID NO: 771896 - DNA, 623 bp, Homo sapiens
attctgtttttattcttgagcacgtcagtttttttatagctttgggaaacttgttttttacttctattgatacagtaattttcagtcgaataaaatctgttgtggttgggctttgaaaaattccagtattacagttagttcgtcatccatatgatcttaggaaagttggctgatttctctgacgttttcttcatctacacgtatatgaaaaagttaatttctgtcattgggattattgtgagaattaaataacaaagagcagcaaaaaataagcatcagattttgaggctaaatcccagttaggttgtgcctgttgaaatctgagttcctttcacctttgtatttgtaagctttcctttttctctgaactcttccttggcatccttccctacctttcctttcttccccccacatgccccscctttttggataggtctcacagaagataaacagggtgaaaagtttcatgccgtagctcttctctcacagccaaccaaatgctttaaatccctcctctccctccatttgtcagtcaacatgtacttagtaagggctcacaggacatcgaatactagaagagatagctgaatacttaattccactctgcagttatctaggcctgt

SEQ ID NO: 771897 - DNA, 648 bp, Homo sapiens
gacattttagaggcaaaaatatctctgatcctataattaaaaagatgatattgagaattgatattttcattacaattaaaatagtattgcttgatctaatgatcaaatgaaattatgtgagaatgaattctaacccattagtgggccttgtgttttaaacattagaatttgctcactctcatgaaaattatttaacttgtgtatctgtttagaggtaatccttttttttttttttttggtaaagaaraaggttctgtgatttggggatagtgaaattcatttttaattatttgatataaataatgcattttgataagtgttagtgactctgacactttttaaaactcaatgtttgtttgacacctggaaaagtgatctctcaattttaaatattatgatggaaaagcaattacattttaagtaatgttttgattatacctcccctgagctttatggaagtaaatctgagctcttgttgctgtttaacacctatcatgaagcatagatttaatgaagaactgaatatgataatatcatacccaaatattggaggtggaaatagcaactatgattcttgcttcaactatgctaacaacataaacagttttgctttttatgattaaactgaatggtcagtttaatacaaaa

SEQ ID NO: 771898 - DNA, 533 bp, Homo sapiens
gcatttaagaaatatgatctggttaaaaagtattttaaagatctgactcatcctttcagaatgcagtggagcatggatgttttttccttatggatgatgccttcctttaagctgaatattccaatatcccactgtgatatgtggaagactgtttgcctattgcaggctatgaaggaagcagaattctcccttacatgacccctttcctgcaaggtgttggtcagagcctctcttaggactaaaggatgggctttcctcaggttacgagaactacctgtgcctgcttattaatatttagttaatacatttctatatgctaygtttatatgtgcagcaaaatttggtctgagatttgctttcatgagaccctaataatgaggttgtaagaaatagctagcccttatctttttcaaatttctttggaggctaccattacctaccaaaaagaacctaagagtagggcatagccacactggcttaggtcaatgtggtagtagtaagatatgcattgaacactgaagaataattctatt

SEQ ID NO: 771899 - DNA, 637 bp, Homo sapiens
atcctaaccactctgtctcctctccatcccccaactgaattctatgcaaagtcataatctttttttttttttttttttttagacagggtctctgtcacccaggctggagtacagtggcacggtcccggctcactgcaacttctgcctccggggttaaaacaattctcctgcctcatagctgggtttacaggcatctgccactatgcccagctaatttttttttatttttagtagagacggggtttcaccatgttggccaggctggtcttgaactcctgacctcaggtgatccaactgcctcaccctcccaaagtgctgggattacaggcgtgagccaccgtgcctggccttcataatcttctttctgtttgttatttttcaaaaaacrggcaatcacttgaacaataatacgaagattgcaaatattcaccaagcagaatttagcacaaggaatttagcacaatgaatgcctgttgagtgatgaatagatgaataaatgaatgaatgaatgaatgagcagacaaatgaataaaaattcaactcttgtgattgctgctgaaaaaattcagaaccagaatctgatctatttttttttaaacatctggtagttcagaagacttgcctcagtgtaaggtgg

SEQ ID NO: 771900 - DNA, 608 bp, Homo sapiens
agcacacctgtaattggaattcttttttttttaattttttatttttgagatggagtttcgctcttgttgcccacactggagtgcaatggtgcaatctcagctcaccgcaacctctgcctcccgggttcaagtgattctcctacctcagcctcccgagtagccaggattatgggcatgcaccaccatgccctgctaatttttttgtgttttttgtagagacagtgtttctccatgttggtcgggctggtctggaactcccgacctcaagtgatctgcccgccttggcctcccaaagtgctrggattacagacataagccactgcgcctggtctctgtaattggaattcttgaccactgctattggaaatattgtctccatgcactctgagagctaaatgttcttatgactcttttttgcgcatatctctcatagatatttacaatcctactcaaaaacaaactccttgaagggcaatctccttactttcttttttatatgcaccaaagcacctagtagatgtttattaaatatttgctgaatggctgatgaccatggtttccacaagatgttttcagtgtcggactctggcaaaaatgtaatcattgtt

SEQ ID NO: 771901 - DNA, 396 bp, Homo sapiens
tcgtatctcattttaaagactgaaaacaaagacaatcaaacaagaataatacagagtagtaggtaaagtctgaactctggagtccctcaatggtttgaatcccagtccaccattccccagctgtgtgactttaaataaatcatttcacatatctgagcctcagcttcctcatctataaattcctgatgaaataagtattgctagttttaaaaattaagtcacataacaacctaygtagcattccaaccataaagaaggtactctgtaaattacatgtccctttcctgcttccttctcctgatcctatttgacccaagtgcccatatctctgactgagaaaagagatataacctgctctgatgtgtccatccttatcgcctcccatgcatacctcag

SEQ ID NO: 771902 - DNA, 598 bp, Homo sapiens
aacctagaccctcactccaggccctgttctccacgcagggagtcgtggatcttttaaaaaacaagaaccagcacacccactttgtcacaaaacccagacaatcacaagctttgtcgaggatatagggaagttgggaccctcatacactgctggtgggaatggaaaattgtgcagccgctgcaggaaacagcttggtggttcctagataagttaarcagagttatcatatgacccagcacttatactcccagctatatatcccaaagaattgaaatcaggccttcaaacaaaagcgtgtacatgcatgctcatagcaggactattcatgataacttggaataggtggagagaacccatatgtccatccactgatgaatggagaaactgcggtctctccacacaagggaatagcattcagccataagaaggaatgacgttttgatacctgctaccatgtggatggaccttgaaaacattatgctaagccgaaacacattatgctaagtggaaacacattatgctaaatgaagacgccagacacaaaaggacacatattgtacgattaattccacttacgtgaaacagccaaaacaggcag

SEQ ID NO: 771903 - DNA, 598 bp, Homo sapiens
aacctagaccctcactccaggccctgttctccacgcagggagtcgtggatcttttaaaaaacaagaaccagcacacccactttgtcacaaaacccagacaatcacaagctttgtcgaggatatagggaagttgggaccctcatacactgctggtgggaatggaaaattgtgcagccgctgcaggaaacagcttggtggttcctagataagttaagcagagttaycatatgacccagcacttatactcccagctatatatcccaaagaattgaaatcaggccttcaaacaaaagcgtgtacatgcatgctcatagcaggactattcatgataacttggaataggtggagagaacccatatgtccatccactgatgaatggagaaactgcggtctctccacacaagggaatagcattcagccataagaaggaatgacgttttgatacctgctaccatgtggatggaccttgaaaacattatgctaagccgaaacacattatgctaagtggaaacacattatgctaaatgaagacgccagacacaaaaggacacatattgtacgattaattccacttacgtgaaacagccaaaacaggcag

SEQ ID NO: 771904 - DNA, 606 bp, Homo sapiens
ggattgagaacatgaatttcacacctgcacttttagccatgtgcagagaccttgagtagagcatgtctggacctcatctacactatctctcatgccccaagggaaagagtggagacttgactgacagcaaactttggggaattaatgaacgttaatattttcttatagactaataaacatattgggctagaagatctactcartgggaaaagtaaggttttagttatccctgttgaaagttttttttttttttcatttattttgctgcatttgaaaagctggtgatcttaacattgcctatatttttaataatcttaagattttttagtttttatgttttgttagggatcaggcaatggaagatgcatatttatagatgaaacttacaatataaggtaaatattgacttactaatagttatgcgagaatatttatttgatcccaattttatatagttgagtgtgtgaagttgcaggtcaagataacttggagtttcaacaccaagttttattcatgtgttcattcatgaacaggatgcctccaatgtggagaaatttacaatgaataagcatgaataggacctggccagtgagctttcagtctagc

SEQ ID NO: 771905 - DNA, 613 bp, Homo sapiens
catttcccaaatgcatctgtgcatagaagacagcaggggcatccaggcaccaggaaatgagaaagatccctcagcctgccaggtccttaggagccacagccacagcaacacctgagttccaggtaatgcatctgagacctgtggtttagaccacaggaagcacaccctccattttcagaataaaggtgaaaagggaagtgtaagactgaagcctagagaaaaggaaaatggattagcagagaaaggaccaaatggatcagttctgagtcagatgttcagttttaaaggacgatggggttactgtgaaaactgtcaggattctaaggacccaggccctgggcgagcctccctcttggtcccaatctgaatcccaaagcctgttccaatcagagattcccacagagackcctgccctgagtctgactgaaaaacacttcccaggttcccctgggcttcctcaggactctgattctggtgaccagggcagggacacttctgtccccaaagtgacactcaggcttctgtggaggtgagaatgtgtcctcctgtcacaaaaacaaagacacaccagggaaggaaagtgtcacattcagagacattaaatgtaagtaca

SEQ ID NO: 771906 - DNA, 653 bp, Homo sapiens
gactttgaactgaaatgttaaaataaagaaaggtggaagcattttaaaggtaaatcaagcatagtgataccttacctttttatcacagttgccagttttttatcatcctatgaggcaggcagaaaatattgtctcaatttggcaggttaagacaattgagactaggagcagcaggagttgcatctgcaagattagttggtgcatgataacactgagaccagagtggaggagatttaactccaggcaaccacgccacactgccactcaaaagaaagctctcctgaaaccagacagcattgtttctgtgccagatctatttactctacctccacccgaactttccttcccacaagacttaattactcattgctagtaccatgcacattcaacagtcatgtgtatggtattcattaagagagaaaaataacataaaatagckcagctatgtatctgctttcccccaggaagagtgaaatgactcccacagacagtggtggagccttagggtgcagatgatggagaggaatgagaagggaagaggaggcgggaaggctggtctcagtgggtggggcggatatttacatgagctcctcgcctcactccatcaactttatgactcaccagtgcacagcaattactcctccttctctaat

SEQ ID NO: 771907 - DNA, 649 bp, Homo sapiens
acatttgcattttaaggactttttgagggctagagacattaagcctcacaggtatatcaaaatgatagctttatcccaacttaaaccatcttgcccatctgcaataaaatctccatcatcccaggtctagaaaatgtgctgagcttatagactaaacattcaacagttgtatgcactcagcagctttatgacttyttttggtgcctttgtggaatcatcctggaatcaatttatcttcatgcttcaaagaatcctaattcaaaagtgctccaaatgtttgggactattttaagattatttttcttctggaagtttaaacgtaaactcgaacgaatgctttctttataattttatactgttttgcactaacagttaaagttcaccttatgttcaaacgattgctttcatgcctaaatgcatttttacttcttcgattattctattattgaaaaactagtcttttaataacacttactttccagctcttctttcacatcttatgataggaatggccaagccaagtcagttgtagaatgaattacgtttttcctaaaattgagacctgttttttacttgttctaaagagaaaagaaataaaaatgacagtaagtggagaatttaggtgtagcagaaatatgttcaggcatgg

SEQ ID NO: 771908 - DNA, 649 bp, Homo sapiens
acatttgcattttaaggactttttgagggctagagacattaagcctcacaggtatatcaaaatgatagctttatcccaacttaaaccatcttgcccatctgcaataaaatctccatcatcccaggtctagaaaatgtgctgagcttatagactaaacattcaacagttgtatgcactcagcagctttatgacttcttttggtgcctttgtggaatcatcctggaatcaatttatcttcatgcktcaaagaatcctaattcaaaagtgctccaaatgtttgggactattttaagattatttttcttctggaagtttaaacgtaaactcgaacgaatgctttctttataattttatactgttttgcactaacagttaaagttcaccttatgttcaaacgattgctttcatgcctaaatgcatttttacttcttcgattattctattattgaaaaactagtcttttaataacacttactttccagctcttctttcacatcttatgataggaatggccaagccaagtcagttgtagaatgaattacgtttttcctaaaattgagacctgttttttacttgttctaaagagaaaagaaataaaaatgacagtaagtggagaatttaggtgtagcagaaatatgttcaggcatgg

SEQ ID NO: 771909 - DNA, 638 bp, Homo sapiens
ctaaattaaaatatttactctaatatattttcttgatatagtgttaaactgttttgactcagagcagcacaactctgttcaaactattcaatgcccttaggtgttagggataagccatgattctttcaaggaaaacatcttgagtgagtagaatagtatgcctgaatttttgccaagatgtgttagratttctctagaatcatttcctctttttaaaggtcaagaggaagctatttggatgacatggaacatatgccaaatgctgattcttatccaaggttaacgtatcttgagttccattcagcaaattgatttcttcttgagatttcacttaaaaagaaaaattttattgcataatgaggtaaattaatgccctacaaatgtaatatgcctctgtgatatacagagtattttagtttttttagcaaagcatttatcctattatcacataatcactcctaacctaaataaagaatctagagcttaatgcacaatgaatcctatcttttagcagttttattgctatatcggctattaatttaaatttgtgtcatttttagttaacaagaaagatagcttaaagatttgtttgcctagattatattgaaaatcccgtatgttggagtagttaacattgc

SEQ ID NO: 771910 - DNA, 607 bp, Homo sapiens
attccacgtagtcaaaaattgtgaaaagaggatagaaagctgatgagtacctgtttcacttcatccaacaaagcaccttggtcaatccaagctggctgtcaaggtttctgaaatagggtatcccttccagagggcaaaatagatcttagataatggtcctaggctccgcaaacaactagctgggcagcttctattcttaattgtttagggtcatgggttattctgatttgccaggcctgtgtcacttgtctactctctatataaacagaattactatggrgtgaaggagaaatgcaaataaaaattatgctaataaagcatttgaattaggcaatattttctcaaaataaatgatgctgggtaaacgtgtgcatacatgcagtagaataacagagcaaaatatttgtagtggatggctttgacttcagacagaaacacagtatccatttcccaaagatgttttttaaaactagtttaaaaaccaatgtgggtatgattcttttctgagtttttaaataatatgctgaatgacagatttctgcattgtgtaccttctttcaaaaaagggtcttatttctcatgttgtaattcctatctctttggtcaa

SEQ ID NO: 771911 - DNA, 630 bp, Homo sapiens
tatctttggaccactttggctttgatctcccagggagtgatcatgtcatagaaatggaagtaagcatgtattttgtctctccaactgaactgttcagaaacagttaataatttcataataatattactagtaattgtagcagcagtatgtggttaatcgaggttccatgtgcatttctttcacggtgtcttaatttkcacatgaagtccatgtttcaggggttgttatgcctgctttacagatgaacaaattgaaatgttaaataacctaaataaccttgcctaagagcttatgagagtgttggggctgggatgagaacctggtcttacctgaattcagcactcaggtgccaaaacactgtgagaaatagaggtagtttatttcttaaatgataaaatcatttaaatgttcccagtatcatacctagcatttaatagagactcagtacattttagttctctctttctctctttgaaacaactaacaaaacaaacaaaaacttgccacagttccaaattagagggatatgtgaaactcaaaggcatagtaaaataatggactttaggaatttaggagctccagatgacaaccaagaagtctaggggtgagggctcctccagagtagcccag

SEQ ID NO: 771912 - DNA, 639 bp, Homo sapiens
tattttattctctttgtagcaattgtgaataggaattcactcatgatttggctctctgtctattggtgtataggaatgcttgtgatttttgcacattggctttgtatccttagactttgctgaagttgcttatcagcttaaggagattttgggctgagacgatggggttttctaaatatacaatcatgtcatctgcaaacagagaaaatttaacttcctctctttctatttgtatatcctttatttctttctcttgcctgattgccctggccagaacttccaatactatgttgaataggagtggtgagagtgggcattcttgttttgtgctggttttcagagggaatgcttccagcttttgcccattcaatatgatattggctgtgggttttgtcgtaaatagctcttattattgtgagatacgttttatcaatgcctagtttattgagagtttttaayatgaaggggtgttgaattttgtcaaaggccttttctgcatctgttgagatagtcacgtggtttttgtcatcagttctgtttatgtgatggattatgtttattgatttgcatatgttgaaccagccttgcatcccagggatgaagccgacttgatcgtggtggataagctttataatatgc

SEQ ID NO: 771913 - DNA, 633 bp, Homo sapiens
atcctgctacttacagaggtccaggatcctgacacatccactcctcccctttctaccccttgagaggcaagcagttatgaacttgaggcaaggaacaattgccctctgagggaggcttcttcagtttcttctaaaatytccttgttgagttagcaacaataaatgttttccacatgtccagccacgctgggcatggtggctcatgcctgtaatcccagcactttgggaggccaaggtgagaggattgcttgagcccaggagttctagaccagcctgggcaacatagtgagatctcgtttctacaaaataaacaaacaaaacccaaacacttccagccaagaaactcaaaaagtggcacagcgacccccttcacagtcttactcttcctaggtctttgccagtgcaggctttgagcccagccaccttctggccaaactgttcactctccctcagccacaagtctaccctccaatgtaggcatgcactgtggctggtttctctcctgggggaaaagagggctgtgggggcttacagaccagtgtgagatctctacctgcttttgcttgatgacatcctgggtgcttgaacctggagtgaggcagcaactctaaggggtcatggatcaagcagata

SEQ ID NO: 771914 - DNA, 694 bp, Homo sapiens
cacttatttcacttagcataatgtcctcacaaggttcattcatgttgtagcacatgtcaaaatttctttccttttttttttttttttttttttggagaggagtctcatgctctttcccccaggctggagtgcagtggcatgatctgggctcattgcaacctccgcctcctgggttcatgccattctcctgccacaaccccccgaggagctgggactacaggkgggcgccaccacgccccagctaattttttgtatttttagtagagacggcgtttcaccatgttagccaggaagggctcgatctcctgacctcatgatctgcctgcctcggcctcccaaagtgctgggattacaggcgtgagccaccatgcccggccttcaatttctttcctttttaaggctgaataatattccattttatggatatgccacattttgtttatctatttatccactgatggacacttgggttgcttccactttttggccattgtgaataatgctgctatgaacatgggtgtacagatatctttttgagaccctgacttcctcaattcttttggatatatatccagaagtagaactggtgaatcctatggtagttctattatcaagttttggaagaataaccatactgttggcttaaacttattgggcttttattttcctcatctataaagtagacttgaggttg

SEQ ID NO: 771915 - DNA, 694 bp, Homo sapiens
cacttatttcacttagcataatgtcctcacaaggttcattcatgttgtagcacatgtcaaaatttctttccttttttttttttttttttttttggagaggagtctcatgctctttcccccaggctggagtgcagtggcatgatctgggctcattgcaacctccgcctcctgggttcatgccattctcctgccacaaccccccgaggagctgggactacaggggggcgccaccacgccccagctaattttttgtatttttagtagagacggcgtttcaccatgttagccaggaagggctcratctcctgacctcatgatctgcctgcctcggcctcccaaagtgctgggattacaggcgtgagccaccatgcccggccttcaatttctttcctttttaaggctgaataatattccattttatggatatgccacattttgtttatctatttatccactgatggacacttgggttgcttccactttttggccattgtgaataatgctgctatgaacatgggtgtacagatatctttttgagaccctgacttcctcaattcttttggatatatatccagaagtagaactggtgaatcctatggtagttctattatcaagttttggaagaataaccatactgttggcttaaacttattgggcttttattttcctcatctataaagtagacttgaggttg

SEQ ID NO: 771916 - DNA, 476 bp, Homo sapiens
ataatataaacaagtcaagagaaaaatttgtgagtagaaacaaactgaaacacaatctttcctgattttgtgaaatggtttttgattcttttctttttacaagtataacagtctgtaatatgatatgtcccataaagtgtcagttttacaaattactcatctcattcatcaggggtggctttcactgcaattcagatttaaactttacagaatcattattcactgtagtcagcctggttcatggatctcatattctattctttatttatgcatggaaattaccaatactgtcaacaagaaagaacacracccagatccatccataagaactttttcttattgtgtagactatcatattaaaactttagtatatatttctgatggtaaattttggcttatattttctgaagtaaaactagattgaatgcattttaatatatcaatttaacttctgcagaaatctgtagccaaggtag

SEQ ID NO: 771917 - DNA, 615 bp, Homo sapiens
tctgagttttcataattcttgcatctttatgttgatacctacaaatttgagaaaacagacacttattccagtttttctgggtgttccttggtggtgtttatttattgcagacagagtctcactccaacatccaggctggagtgcagtggcactatctcagttcactkcaacctctgcctcccaggttcaagtgattcttatgcctcagcctcccgggtagttgagattataggcttgtgccatgatgcctggctaatttttgtatttttagtagagacagggtttcagcatgttggccaggctggtcttgaacccctgacctcagatgacccacccacatcggcctcccagtgctgagattacaggcataagccactgtgcccggcctgtggtggcatttaacatttaccacttagtatcaacacttaaacactgatttatttatccttcctgtactggggaagtcttatactgaacataaacacttaaatgctactctggaactaaattgctggcctgtaattgtttccaggtctggagaagacttctaatgagcaccagaaactaaacattacctcagaactatattgctaccctcctgttttttcctagtct

SEQ ID NO: 771918 - DNA, 578 bp, Homo sapiens
gatgcaaaaatcctcaacaaaatactagcatactgaatccagcagcacatcgaaaagcttatcaatcatgatcaagtaggtcttatccctgggatgcaagattagtttaacatatacaaatcaataaatgagattcattacgtaaatagaactaaagacaaaaaaaaaacacatgattatctctatggttgcagaaaaggctttagataaaattcaacatacttcatcttggaaactctgaataaactaggtattaaaggatcatacctcaaaataatsagagccatctatgacaaacccacagccaacattgcaccgaatgggcaaaagctggaagcatcccccttgaaaaccagaacgtgacaaggatgtcctctctcaccactcctatttaacatattattgagtcctggccaaaggaatcaggcaagagataaaaataaaaggtatccaaatagagagaaagtcaaattatccttgtttgtaaatgacatgatcctacatctagaaaatcctatagtcttggtccaaaagctccttaaactgataaacaacttcagtgtattcttagcatacaa

SEQ ID NO: 771919 - DNA, 387 bp, Homo sapiens
taccagtgaggccacagtggactagactagtaaatggactcttgcggtccccaattccagcccttggttcttggacagccagaagggagcccactgctctgaagggtgagtcccaggcttggcagcattcatgacaagctgactaaaaagcccttgggcctgaagtaaatatcagtgataggctggcagtactccctatgggyctgtggtggggataaacatggagacagactcctctgcctggggaaaggggagggaagaatgggaaggactttgtcttgtggtttgggtgccagctcagctgcagtagaatagagtaccaggtagatttctaaggtttctgactccagactctggctcccagataatatctgcggatccatctgg

SEQ ID NO: 771920 - DNA, 651 bp, Homo sapiens
tgctaatttgagatctttctaattttttgatatgggcatttagtgctataaatttccctcttaaaactatcttagccgtgccctggagattcttgtatgttgtatctttgttctcattatctatctaatactatcagtgtggtgttgaagtctcctactattattatgtgggaatctatatctcttcatagatcatgaaggactttctttatgaatctgggtgctcctgtgttgggtacatatatatttaggatagttaggtcttcttgtttaattgaactctttaccattatgtaacractttctttgtatttttttatctttgttggtttaaagtctggtttttttttttttgaattttttttcttttaggatgttgaatatagcccccagtgtcttctggcatatagagtttctgctgaaagttctgctgttagcctgatgggtacgccctttgtaggtaacctgccctttctctctagctgcctttaacactttttcttttattttgaccttggagaatatgaagattatgtgtcttgaggatgatcttgcatagtgtcttgcaggggttctctgtattatctgaatttgaatgttagtctttccagtgaactagaaaactcttgagaatgttctcatgaacgatat

SEQ ID NO: 771921 - DNA, 557 bp, Homo sapiens
gagtccaccgttgtgtaaacagattctatcttcccatagttcctggaaaccggatagccttcatctcacatcttcactgtattctagagaaatgagggtaatgtgttgggcagggcagagtagagatgaatagttgggtatggcmcaggcggctacctgttgtatcagtgggtatggtttacctcacatagggcacctacacgtgaagaaatggacaacagaactgctttgtctgttggcatggttgtcttattggaggactgcattattggaggactggtttcctcttccctaccaggacaatcctccgaagttctttgagctttttctactgcctatttttgcagcccaggtcagttgatcaggaggtgtggccttgtatttggtccaccttgagtcagatgccgctctgcttactgagtatttttatattggactcaaatcatgatatggaatcatttgtagacagcagacccaccaaaattctgctgcgcagtgacagcagggcagatcacggtgttaactgtaatcatcctggtagggagagggtatttata

SEQ ID NO: 771922 - DNA, 557 bp, Homo sapiens
gagtccaccgttgtgtaaacagattctatcttcccatagttcctggaaaccggatagccttcatctcacatcttcactgtattctagagaaatgagggtaatgtgttgggcagggcagagtagagatgaatagttgggtatggcacaggcggctacctgttgtatcagtgggtatggtttacctcacatagggcacctacacgtgaagaaatggacaacagaactgctttgtctgttggcatggttgtcttattggaggactgcattattggaggactggtttcctcttccctaccaggacaatcctccsaagttctttgagctttttctactgcctatttttgcagcccaggtcagttgatcaggaggtgtggccttgtatttggtccaccttgagtcagatgccgctctgcttactgagtatttttatattggactcaaatcatgatatggaatcatttgtagacagcagacccaccaaaattctgctgcgcagtgacagcagggcagatcacggtgttaactgtaatcatcctggtagggagagggtatttata

SEQ ID NO: 771923 - DNA, 594 bp, Homo sapiens
ttcaattatccgtgaatttatctaaacattttttattttatattataatttcagactatagaaatgttagggataacaattctcaaaagtttatattttaatgaaaaaatatacttctgttcaaaaactgccttcttcatgtattactgattcctccaatgatctgggagtgtgtggggaaaaaagtattttcttgaaygtattttgcaataatttgtggagaagtttttaaatttatttttcatcttcatgtaatgctagaaatgtctcacattaatggttacctagtgcatggtagagacttcttctggacaatactctagtaaatggatgctaatggatcagcggtccattgaaaaacattaataagcttgatatgcattgtctacaacaggagtccccaatcccccagccagactggtaccagtctatggcccgttaggaacctggccacacagcaggaggtgagcagtgggtaagcattgctgcctgagccccacctcctgtcagatcattggtggcattagattctcataggggtgtgaaccctattgtgaaccatgcatgtgagggatctaggttgcccgtatgaga

SEQ ID NO: 771924 - DNA, 637 bp, Homo sapiens
gtgtatatatatatatatatatttttttttttttttgagacaaagtctcaatctgtttcccaggttggagtacagtgactcaatctcagcacactgcaacctccgcttcctgggttcaagcaattctcctgcctcagcctcctgactagctgggattacaggggtgagccaccacgcccagctaatttttgtatttttagcagagatggggtttcaccatgttgtccagactggtctcgaactcctgacctcaggtgatckgcctgccttggcctcccaaagtgctgggattataggcatgagccactgcgcccggccaccaatgacataatttaagaaaatttcccaaactgaagaatgaaagtttccagattcaaagagcccaacacaatgcatgaaaacagacccaaacctaggcacagtgtcgtgaaattttaggactgtggaggccaagagaaaattctataaacttcagggaggacccagcaaattgtaacctgtacacagattacaagaaaaagctgaggaatcagtagagttctaaatttctcaacagcaataccacaatgtggaagtcaatagaacaatgccttcaaaattgccatcttagaaatctacactcagtcaaactatcaat

SEQ ID NO: 771925 - DNA, 637 bp, Homo sapiens
gtgtatatatatatatatatatttttttttttttttgagacaaagtctcaatctgtttcccaggttggagtacagtgactcaatctcagcacactgcaacctccgcttcctgggttcaagcaattctcctgcctcagcctcctgactagctgggattacaggggtgagccaccacgcccagctaatttttgtatttttagcagagatggggtttcaccatgttgtccagactggtctcgaactcctgacctcaggtgatcggcctgccttggcctcccaaagtgctgggattataggcatgagccactgcgcccggccaccaatgacataatttaagaaaatttcccaaactgaagaatgaaagtttccagattcaaagagcccaacacaatgcatgaaaacagacccaaacctaggcacagtgtcgtgaaattttaggactgtggaggccaagagaaaattctataaacttcagggaggacccagcaaattgtaacctstacacagattacaagaaaaagctgaggaatcagtagagttctaaatttctcaacagcaataccacaatgtggaagtcaatagaacaatgccttcaaaattgccatcttagaaatctacactcagtcaaactatcaat

SEQ ID NO: 771926 - DNA, 618 bp, Homo sapiens
tcaaaaaaaatagatttataaaaaatcaagcttgatgatatattaacaataattacaacatatcatggggaaaaaaacctattcacaagagtagctaaaactataaaataggaatacatttaacaagaaaagtataggacttcaaaaacaacaactgtttaactctattcagggaaataaaattaacagattaaagtagagacacaccactttgtttttcaaaggaagaacttagagaacataaaccaattgtaaacatgcttgtttattagctgttttacagtggaaatgtttgrgagtatttcactgtcagagtttgcagaaattgtcagatattagaacaaatgaaatgttatgtgctctacagaggcagatccatattttgagggacctgaagcttaaacactttggaggagaaatctttgtcaattaaaaattaaaaataaaactaaaatgcaaaatcataaatgcaaaagctctggggcccttccagaggccttaggaagggctatggaattgaaagagcctaaagcttacttttctttaactccatagcagacccacctctgttgtcataaaaatgtaaagttggtcagactcggtagcttatgcctgtaa

SEQ ID NO: 771927 - DNA, 592 bp, Homo sapiens
tgaaaataacggcagaaagcataattttttgtttttttcttttttgagacggcgtctcactctgttgccgaagctggagtgcagtggcgtgatctcggctcactgcaacctcagcctcccaggttcaagtgcttctcctgtctcagcctcccaagtagctgggattacaggtgcctgccaccatgcctggctaaattttgtatttttagtagagagtaggttttgccatgttggccaggctggtcttgaacttctgacctcaagtaatccacccgcctcggcctaccaaagcgccaggattacaggtgtgagccaccgtgcctggctgaaaacactgtagcgagttcatgaatcaggattaaagaatctgtgggatatatagaatgatagaataaattctataaygttcattttcattgtgcaggatggagacattagtgtgcatctcagttaggatttaattgctccttccctgtgttcttgaaagcgcttggaaagcgcctccaatcctccattgtatgattctagttcaggtctggctctttcaccagacaatgagctcctgtggtaagatgccatgtcttaattcatc

SEQ ID NO: 771928 - DNA, 606 bp, Homo sapiens
tttgattatttttcacttacagtaataatgtcaccaattccaggtcattaaaattttttccttataagatatttatttttctgtttcaaaagcatttattatcactcagagtttacaattatattatttgggatataactgtaggaaagtgtcagataggaaaattgtttcttttttctctttttttttttttttttttttgagatagggtctcgctctattgccaaagctgaagtacagtggcatgacccyggctcactgcaacctccacctcccaagctcaagcctcatgcctcagcttcccaagtagctggaactacaggtgcacaccaacatgttggctaatttttgtattttttgtagagatggggtttcaccatgttggccaggctggtctcaaactcctggccataagtgatatggctgcctcagcctcccaaaaaggaacaattaacacttgtgtgatgaggtaggacccacagggagagtacagacgcctaggtgtgccacagcagagacttcactccagagtgtgatggaacagagtgcgggagagactgccaaaattgggaaggagagagtagtggagagtagtcaacttaagag

SEQ ID NO: 771929 - DNA, 618 bp, Homo sapiens
atgccctgtgtcccagctgcttcagctacggctacaaggggccaacatagagctcagaccatggcttcagagggtagaagccccaagccttggcaacttccatatggtgttaagcctgtgagtacatagaagtcaaaattggggtttgggaacctctgcctggattttagaggatgtatggaaatgcctggatacccaggcagaagtttgctgcaggggtgtggacttcatggagaacctctgctagggcagggcagaagggaaatgtggggtcggagctcccacacagagtccctactggggcaccacctagtggagctgtaagargaaggccactgtcctccagaccccagactggtagatccagaaacagcttgcactgtgtgcctggaaaagcctaaacactcaaggccagcccatgaaagcagctgggagggaggctgtatcttgcaaatccataggggcagagctgcccaagaccatgggaacccacctcttgcatcagtgcgacctggatgtgagacatggagtcaaaggagatcattttggagctttaaaatttgactgcttttctggatttcagacttgtatgggggcctgtagctcctttgttttggt

SEQ ID NO: 771930 - DNA, 618 bp, Homo sapiens
atgccctgtgtcccagctgcttcagctacggctacaaggggccaacatagagctcagaccatggcttcagagggtagaagccccaagccttggcaacttccatatggtgttaagcctgtgagtacatagaagtcaaaattggggtttgggaacctctgcctggattttagaggatgtatggaaatgcctggatacccaggcagaagtttgctgcaggggtgtggacttcatggagaacctctgctagggcagggcagaagggaaatgtggggtcggagctcccacacagagtccctactggggcaccacctagtggagctgtaagaggaaggccactgtcctccagaccccagactggtagatccagaaacagcttgcactgtgtgcctggaaaagcctaaacactcaaggccagcccatgaaagcagctgggagggaggctgtatcttgcaaatccataggggcagagctgcccaasaccatgggaacccacctcttgcatcagtgcgacctggatgtgagacatggagtcaaaggagatcattttggagctttaaaatttgactgcttttctggatttcagacttgtatgggggcctgtagctcctttgttttggt

SEQ ID NO: 771931 - DNA, 635 bp, Homo sapiens
tagggacttggtgccttgcaccctagccactctagccatggctaaaaggggccaagatacagctcaggccatggcttcagaagatgcaagccccatgccttgacagcttccatgtggtgttggtcctgcaggtgcacagaagataataattgaggtttgggaacctccacctagatttcagaggatgtgtggaaatgcctgaatgtccaggcagaggtttgctgcagaggcagagccctcatggacaacatctactagggcagtgcagaagggaaatgtggggttggagcccttacagactctgcctagtggagctatgagaagagggccaccattctccagaccccagaatggtagctcctctgacagcttgcactgtgtgcctggaaaagctgcagacactcaacagcagcccatgaaagaagctggctggggagctgtaccctgcaaggccacaggggcagagctacccaaggccmtgtgaatccacctcttgcatcagcaagtcctggatatgagacatggaatcaaaggagatcattttggaactttaaggtttaatgactgccctactggatttgcatgggacctgtagtctgtttgttttggccaatttctcccatttggaatggtgc

SEQ ID NO: 771932 - DNA, 600 bp, Homo sapiens
atttatgtacattaattttttatcttgaaactttgctaaattcatttagcagttctaggagctttttggaaagaacaaatctggaggccttacattaccaaacttcaagctgtactataaggccatagtcatcaaaacatcatggtactggcataaaataggcacatagaccaatggaacacactagagaattcacaaatgaaggcaaatacttaaagtcaattgatctttgacaaagcaaacaaaaacatgaagtgggaaaaggacaacctattcaacaaatcgtgctgggataattggcaagccacatgtagaagaataaaactggatcctcatctcttaccttatatgaaaatcaactcaatatgaatcaaagacttaaatctaagacctgaaacaataacacttctagaaggtaasattggaaaaatctcttctagacattggcttaggcaaagacttcatgaccaagaacccaaaagcaaacacaacaaaaacaaagataatagatgggacttaattaaactaaaacacttctgcgcaggaaaagaaatagtcaggagagaaaacagacaatccgcagaatgggagaaaatcttt

SEQ ID NO: 771933 - DNA, 635 bp, Homo sapiens
catttattcttaatttgagagattttatttgttgccttataaccttcttctttgcctttttcttctcttcctttttattctttaaacatacatcttttgtttttttcttttaatcttctgtcttaagcttagactttctcacctgacacccattttctcagcatatgttagtgaaacgggagagttccctgatccctcacaggacttatgacagaggtgtcgctcatgtgctcagccactacaggctcgaactcctttcgggagggcgagcacacggatgggcgggggcaagagctggggcggggcgagtgcttttgggctccagccccagtagcgtttaggggtgtgttacaattaatgctcttttagyagttgccatttgtggacggctaagtgttaaaccagctcagtagagagtcagggtgacagccttttacaccctgccctcttggtacctggatccttgtccggtgtattagtctgttttcacactgctgataagacataccggagaccaggcaatttacaaaagaaagaggcttattggactcatagttccacgtagctgggcaggcttcacaatcatggcagaaggtgaaaagcgtatctcacatggcagcaggcaagaggagaga

SEQ ID NO: 771934 - DNA, 631 bp, Homo sapiens
tgctgatggattttaaagtccctgaaagcttaagatccaaattctaagttaccctacatattagtctcattgacatacaaagaaatttcaaggggagccctgcctcctgagttcattggcacctggtgtaggtcactggctgkcctgtgacaggtaagcctctccaagtgacatgattgggttttctcacagatttccattattggatttaaatttaaacaaaatattctgggccaggcatgatggtgtgtgtctgtagtcctagctactttgaaggctaaggcaggaggatcactggaacccaggagttcaaggtcacagtgagctatgattgtaccattgcactccaacttgggtgacagagcaagactctgtctataaacaaacaaacaaataaataaataaacaaaaatgttctgacataaggttcaccaagtggggtggacagaaataaatcagaccatttgacttttgttcattcgttcagcacatacttgctgagtatgctggactctgtgctaagtgctccaagtgcagcataagcaaaccagtcaggttcctgccctcatagatctggaagaagttagtaaaataaccttagaagtaagtgaaaaagtagaagtgctacaag

SEQ ID NO: 771935 - DNA, 600 bp, Homo sapiens
aagaaacaaagatcagagtgatagtaacctttttgttagaatctaggcaagtgagaagagaaaatagcatttttaaactctgaaaaacttttgacaacctaaaattctaagcccagcaaaaacatctgtcacatatggagataaagtaaatatatttcagtcaaagcacagctggtaagacttaccaccattacatcttcattataagaattgatatagaagttctttgagaggaagaacactaatacaataaataaatttggatataaattaagaaataaagagaactgaaaatattaaacatgtaaggcaataaaatacttatactctatttttttattttgttaaaaaacagctgtctrtttaatgccaaggtaatatcaatgtgttgtggattttacaacaaacaaaaataaattctatgacaataacaaagaacagtaggaaagaatttgcagattattattgcacattttacattaagcactgaaagtataaataaaagttaaaacaggaataaatagtaagataaaactaaagacaaatttaaataaaaaaattaattaaaagaagataggacatgagaaaaagaaaagagca

SEQ ID NO: 771936 - DNA, 495 bp, Homo sapiens
tgcctcttaacatgagctttaaagataggcagaactgggtttgaattctggctcaattgtttaccaactatatgaccttgggcaagctgtttatattctctaagccttggtctttgcctctgtagactgaatatatgagacctattttacagattgctgtgagaatgaggtatagcatatgcaaaacacctggcacatagtaatgctttatgaatgctagctattattactgctctgttgaacatactggagtgacccactaagaaaagaaggaagaagaaaggtgccagctacctactgagcatctcaaacatttcagttactctccaaaagaaggaaagataaagccytgggggctgggtaaattcaaatcagaaaagactcttcccttcaagtaaaatgtgaagtgtgggtacgagagtgtggtggaaagggcacaggatttagagactcaggatctgcatttgagtcctgcctccactacatattagatct

SEQ ID NO: 771937 - DNA, 644 bp, Homo sapiens
aactctgtgatctccattttccacagtttccacccagctaatttcattcatttatgttgtgttttagtctctttagcatttgcatttgaggtcttggctctaaagattaagcgtgaaaattcttgataaagttagaaaaattaagccatatcacaagaacatcctccctcaaatacctcacaaaataaagaaaaggarttttgaaagaagcataaaaatttatcagttatacaaagaaagagtataatatcatgtcaaaaaattaaaagatagcaacaagaaaagaaagagaaaatcctacgacaactcagcatcatcttccttaatctcaccacttccctgaataatcaatgctggagaaagaatgcgagcaggtatatttctgagaattttcactatgatcctctaatttaaatagaagcaaaatgaggcagcaacaaggcagctcaaggaaagttatgtgaaataccaaggagagaaaagctcctgcctgcccgagaagaatctcaagatgttagcaaaggcaagtaaacacataagaagtcaccgttttaaagatcccacataacactgagagaatgaattctactatccagacctcatataatgataatatatgtatttaaaataaataaaagtcataa

SEQ ID NO: 771938 - DNA, 653 bp, Homo sapiens
tgatttgcctagcaacaacaactatcacaagaaattttttccatactgcagcgactatgtgagttgtgcaaggacagctagcagcacaaggacagctagccacgtacacagaaacacttgcctgacaaattgtttcacaagcccaatccaaaactgccaaaggtctaactgcaactccaagattacaagtcctacctagcaactattggcattcgccgatcagaactcagctctcacagggcactgccagtgcaatgaagtgtcttttaaaacaacaggkaaatctcctctttccccaacaaaatcctaaccttttttgttgttgttgttgttctctggacataccagaggccaccctgctccatatatacatcccggattacagtgctacttctcgtagcttattcccaaacaaaacctttcctatttagagattcatctctctatgttttttatgttgactgaagccagacacacaaaaaagtacatcgtatataactccaataataaaacgttcaaaaaggtgcaaaaaaattgttttagaagtcaagatactggtgggagagattgtatttggaggggaaccttaaagagaagttctgagtgctagtaatattgtttcttgatctgggttacatgagactgttcacttt

SEQ ID NO: 771939 - DNA, 653 bp, Homo sapiens
tgatttgcctagcaacaacaactatcacaagaaattttttccatactgcagcgactatgtgagttgtgcaaggacagctagcagcacaaggacagctagccacgtacacagaaacacttgcctgacaaattgtttcacaagcccaatccaaaactgccaaaggtctaactgcaactccaagattacaagtcctacctagcaactattggcattcgccgatcagaactcagctctcacagggcactgccagtgcaatgaagtgtcttttaaaacaacaggtaaatctcctctttccccaacaaaatcctaaccttttttgttgttgttgttgttctctggacataccagaggccaccctgctccatatatacatcccggattacartgctacttctcgtagcttattcccaaacaaaacctttcctatttagagattcatctctctatgttttttatgttgactgaagccagacacacaaaaaagtacatcgtatataactccaataataaaacgttcaaaaaggtgcaaaaaaattgttttagaagtcaagatactggtgggagagattgtatttggaggggaaccttaaagagaagttctgagtgctagtaatattgtttcttgatctgggttacatgagactgttcacttt

SEQ ID NO: 771940 - DNA, 616 bp, Homo sapiens
gcatgatttgcctagcaacaacaactatcacaagaaattttttccatactgcagcgactatgtgagttgtgcaaggacagctagcagcacaaggacagctagccacgtacacagaaacacttgcctgacaaattgtttcacaagcccaatccaaaactgccaaaggtctaactgcaactccaagattacaagtcctacctagcaactattggcattcgccgatcagaactcagctctcacagggcactgccagtgcaatgaagtgtcttttaaaacaacaggtaaatctcctctttccccaacaaaatcctaaccttttttgttgttgttgttgttctctggacataccagaggccaccctgctccatatatacatcccggattacagtgctacttctcgtagcttattcccaaacaaaacctttcctayttagagattcatctctctatgttttttatgttgactgaagccagacacacaaaaaagtacatcgtatataactccaataataaaacgttcaaaaaggtgcaaaaaaattgttttagaagtcaagatactggtgggagagattgtatttggaggggaaccttaaagagaagttctgagtgctagtaa

SEQ ID NO: 771941 - DNA, 618 bp, Homo sapiens
ttggaagtctgatcatagatacttttttctcaatttccattttccacaatccaagatattagatattttgatatttgctactacttaataatttaggcttatcatctgaatttgtgatttaaatatacagccatgactatgatgccttgaccatgtgtttgagccaaactacaaaaccttttacgtgagattcatctgaatcaaggtctttacagattgttcacygaatttacaactttattgaaagtataacttaaaataactaaatttggttgagacattaatgagctttccttccccacccataggccaagatcacatttttttgtccaacagtatataaatctgtaagttctggtcctggacttcagtttttgtgaaagtgtttaaaaggaatgatggttttctgagaaaaaaatcctagcaatgcctgctgaagccctctttacaggggcaagaatatgttaggttatttaagatctgttacaaaacactagccttgccttctacaaatgtcaaatctaaaagatgtgtcttcttttagtagacagtacttaggaactaaaagttatcaactattaagctaacttcgttttttttaaattaagggataattta

SEQ ID NO: 771942 - DNA, 596 bp, Homo sapiens
gccagagcagccaagagagtgcttgcaccacctctctaccaagctcaggcaacacagctcacagttctgggagagacctcttccttctgcttgaagagaggagagggatgaataaagaggactttgtcctgcctctgggatgccagctcagccacagtaggatagggccctgggcagaggcctgaggccctgattccaggcactaactgtcaaatgacatttctagacacaccctgggcaagcaagaaacttgctgccttgaagagaaggacccagtcctggcaagattaatcatcttctgactaaagagccattggcccttgaataaccagcagtggtacccacgcagtactcgccatgggccttgggtgagactgagagatgtwctggctttaggtgtgacccagcaaattcccaactgtggttgttatggagagggactccttctgcgtaagaaaaggaaagggaagagtgaatgggactttgtcttgcaggttacataccaattcagccacagtggggtagagcaccaagcaaggttccctgattccaggcactggctctcagatgacatttcttgacactccctgggccag

SEQ ID NO: 771943 - DNA, 595 bp, Homo sapiens
gcctggaagcattcactacaagctgactgaggagtccttgggccttgaatgaacataggcagtagctacgcagtacctcactgtgggcctgaggtgggttatattggttgcaagcctcattgtaaccacaaatcagaaaacatacaacagatacataaaaaatagaaaaagaagaaattaaaacataaccccagagaaaatcaccttcaccaaaaggaagacaggatggaaggaaagaagaaagagaagaccacaaaacaatcagaaagcaaataagaaaatggtacaagaaaggccatacttatcagcaataacatagaatgtcaatgaaataaactgtccaatcaaaagacttacagtggttgaatggagaaacaaaaagacccaatgatctgctggttacaagaaacacacttcacctatgaagatacacayagactgaaaataaacagatggaaaaacatattccatgccaatggaaaccaaaaaggaagaggagaagctatacttaatatcagacaaaatagatttcaagacaaaaaccataagaagagaccaaaaaaatcataatgtgataaaggggtcaattcagcaa

SEQ ID NO: 771944 - DNA, 454 bp, Homo sapiens
taaccacttcttgacaagaaaggcaggacacagaaagttgaatggtttgtcttggtttctcacaaaataagaaataatcagaatgagatttttatggtgtgggctctcctgcctgatttattattttgaactttttatgtggttctgtctatggagaaattgaaaagtaaacagatttagggactgattgctgtatatacattgttttcagaccataggagagacaaacttccagttccagttatttctgtttaacatttctctgcaaatcagcaaggcttgttttatccaggcttggccaagttaaatatrttccctgtatttttcccttatgtttggatatctagcaaaatattcctcattatactgtttattgaagtgaaaacttgtatgtgattgtatgaatgcctaatagtcttgaagtaaaggccatcaaattcaataatgcctggag

SEQ ID NO: 771945 - DNA, 498 bp, Homo sapiens
gaaagctatggagtcttttttgggcactctagtccattacttttagctctttcatctaaaggaatttattctgcactttgttgcttattctctactgctgtttcttgattatttgctgaaaggtacctatcctgttgaggrtggctgttgatattgcgtatttagtatttgtcctacggtttttatcctaatataaaaagcctgttctttcttctgtgctctccccgtctctctacctccgctgagcttcagattgcttttaaagggtgacctggcacacttctgtgtgcatgcactggtattacaaaacacaccttcccatttacttgtgagattaaatatatatatatatttatttatttatttatttatttaaagggattatgcttatatttaagaaaagaatttatgtctatataaaggaatatccatatcaagtattaggtcatatttatctcaagatgggaaataggacatattttaactacatgggtgagt

SEQ ID NO: 771946 - DNA, 580 bp, Homo sapiens
tctagatgctatgtagaaattggcccattatgcaagataaaaatcatctaagattataatgcaaatcagtcatcataaaaaatataaagatctagaatttatagaaattctactgagcatttattttatgtgaaagaaaaatacatccacagtacatacataattaaatgtaaatgtwtgctgaaaaagttcataatcatgaaaaatacatatcttgatggactacttttatttggcaacctttaccttccaatatctgtcataatattagagtagattagaaattatatctacagtctcaactcattttatgaaatatgagtaacggtaggtatagataatttattttccctcagctgtacataaagatggataattacatctttctaaaaaaatgaagctgaccaggcgcggtggctcacgcctgtaatcctagcactttgggaggccgaggtgggtggattgcttgagctcaggagttcaaaaccagcatgggcaacacagtgaaactctgtctctactaaaaatacaaaaaaaaattagccgggtgtggcgatgtgcgactgtagttcccagttat

SEQ ID NO: 771947 - DNA, 622 bp, Homo sapiens
agcttttattcccttatttttcccctcccatgctccatttctgtcctatcagaatgccctttttcaatcctccctgcaattggctttcagagtcctgctgattggtgcgttttacagaccactgattggtgcgttttactgattggtgagttgtgcagggcactgattggtgcrttttacaatcctcttgttaggtacagagcactgattggtgcgtttttatagagcactaattggtgcattttacaatccccttgctagctacagagcactaattggtgcattttacaatccccttgctagctacagagcactgattggtgcgttttacaatcctagctacagagtgctgattagggcattttacaatcctcttgtaagacagaaaagttctccaagtccccacttgacctaggaagtccagctggcttctcctctcagtgatacttaggaatattgtaaaagagcttgatttcagaacatctaaattttccaagttaacagtaagagggcggtttttgtgcctagaagtaagatcacttctttccagatccacatgctagctatgtaatatgggaattgcctagttctcaaaacctcaatgttctcaattaggattatg

SEQ ID NO: 771948 - DNA, 622 bp, Homo sapiens
agcttttattcccttatttttcccctcccatgctccatttctgtcctatcagaatgccctttttcaatcctccctgcaattggctttcagagtcctgctgattggtgcgttttacagaccactgattggtgcgttttactgattggtgagttgtgcagggcactgattggtgcattttacaatcctcttgttaggtacagagcactgattggtgcgtttttatagagcactaattggtgcattttacaatccccttgctagctacwgagcactaattggtgcattttacaatccccttgctagctacagagcactgattggtgcgttttacaatcctagctacagagtgctgattagggcattttacaatcctcttgtaagacagaaaagttctccaagtccccacttgacctaggaagtccagctggcttctcctctcagtgatacttaggaatattgtaaaagagcttgatttcagaacatctaaattttccaagttaacagtaagagggcggtttttgtgcctagaagtaagatcacttctttccagatccacatgctagctatgtaatatgggaattgcctagttctcaaaacctcaatgttctcaattaggattatg

SEQ ID NO: 771949 - DNA, 634 bp, Homo sapiens
aaagcattcagctttttgccattaagaatagtgttagcgacctggcacggtgactcacgcctgtaatcccagcactttgggaggccgaggtggatggatcacgaggtcgggagatcaagaccaccctggctaacacaatgaaacctcgtctctactcaaattagccggccgtggtggcaggcgcctgtagtcccagctactcgggaggctgaggcaggagaatggcrtgaacccgggaggcggagcttgcagtgagcggagatcgcgccactgcactctatctagcctgggcgacagagcgagcctccatctcataaataaattaaaaaaaaaaaagaaagaaaaagaatagtgttagctctgagtatttgtagatgctctttgtcaagttgatattcgcattttttctgagagttttaaaaattatgaatgggtgttgaattttgtcaaatgctacttctgcatcaattaacatgatcatacaatttttctttcttagcctattaatataacaggttacaactgactcattttcaaatgtttaagcaaacttgtatgcctggataaatcttacttggtcacggtatataattctttttttgtaggatgctgaattctatttggtaatattttg

SEQ ID NO: 771950 - DNA, 615 bp, Homo sapiens
tcacatcttacaccaggataaatttaatacggatttaaatttttaatataaaaaattaaatcagaagtgttagaagacttgatgggatatttttaaaataatcttgctataaaaaaaatctaagtgcaaaacacaacagaagccacaaaaaaaagactgatccaatcaactatatacatttttttttaagtttgtagggcaaaccaacataagtaaatctaaaagacaaatgacaaactagaaaatacatttgcattcacgtcattaacagagagctaatttggcctaatayataaaaagtaaagtaaacaaaaagaaaaaaaaaaaaaaaaactagaacccaatagaacaaataggaatggatatgggggaaaaacagttccttcaaaagaaaatgaaaatagattttaaacataagaaagaatgttgaaatccacttgtaataagaggaatgaaagttaaaatttcaatgggactcctctttttttacctgcaagattgcagacatataaaatgattattatggtggcaagggtttgtaaaatgtgaacacatagattgttgatggacgtgtcagttagtacctccatggtggacaatctggcaatattcatc

SEQ ID NO: 771951 - DNA, 488 bp, Homo sapiens
tgggcagaggaaatccatcaaatgttataaatcaagaaaaatacagcctggagctgaaaagagaaagatgctttaaaataatatggtaacaaacagcagaaataccaaagacaattcactttgctttgcacttagtggactttttactagcctgctgcatttaacctgttggctggcttagcacttaggcaaagtcaatgatcaaaacatctgttcacacatgaatccagctcgcaaaccaagaaattaagtaaatctgcagggtaggagggatggagaaagacacraagagagaggaagagggagggaaagagaagggagaagtgggagggagaggggagaggcaagggcgggtaatggtagcaaggaattcagaggattggggtttcatatacagctcaccctccgacaacagcagggctaggggtgccaaccctccgtgcagccaaaaatccccatataacttgtgactccccgcaaagcttaac

SEQ ID NO: 771952 - DNA, 644 bp, Homo sapiens
caacttttacctcacgtcaaattcattagagattctctgagggcaaataactgggaagagagggaagagtggggtcttgcaatcacactgctaatgatttatcatgaaacttgaggctgggtgcagtgctcacacctgtaatcccagcactttgggaggccgaggagggcagatcccctaaggtcaggagttcaagagcagcctggccarcatggagaaaccccgtctctactaaaaatacaaaaattagctgggagtggtgcgggtgcctataatcccagctactcaggaggctgagggaggagaattgcttgaaccccagaggcagaggttgtggtgagccaagatcatgccactgcaatccagcctgggcaacagagtgagattccatctcaaaaaaagaaaaaaaaaaccttaaatcatcagtccggatcaaaagagggtttaataaatcagcttaaaccagagtcaataggcataggtagaggtctagatttgtttttcatcttttaaacatagaaaacatgtaaggctcagaaaagctaaagtttattcgaggccacacccaagacaggtgggcagcatgcaggtctcttgactcctccgtggcagtttgagtcccgagctatgggttgtggaatggg

SEQ ID NO: 771953 - DNA, 644 bp, Homo sapiens
caacttttacctcacgtcaaattcattagagattctctgagggcaaataactgggaagagagggaagagtggggtcttgcaatcacactgctaatgatttatcatgaaacttgaggctgggtgcagtgctcacacctgtaatcccagcactttgggaggccgaggagggcagatcccctaaggtcaggagttcaagagcagcctggccagcatggagaaaccccgtctctactaaaaatacaaaaattagctgggagtggtgcgggtgcctataatcccagctactcaggaggcygagggaggagaattgcttgaaccccagaggcagaggttgtggtgagccaagatcatgccactgcaatccagcctgggcaacagagtgagattccatctcaaaaaaagaaaaaaaaaaccttaaatcatcagtccggatcaaaagagggtttaataaatcagcttaaaccagagtcaataggcataggtagaggtctagatttgtttttcatcttttaaacatagaaaacatgtaaggctcagaaaagctaaagtttattcgaggccacacccaagacaggtgggcagcatgcaggtctcttgactcctccgtggcagtttgagtcccgagctatgggttgtggaatggg

SEQ ID NO: 771954 - DNA, 644 bp, Homo sapiens
caacttttacctcacgtcaaattcattagagattctctgagggcaaataactgggaagagagggaagagtggggtcttgcaatcacactgctaatgatttatcatgaaacttgaggctgggtgcagtgctcacacctgtaatcccagcactttgggaggccgaggagggcagatcccctaaggtcaggagttcaagagcagcctggccagcatggagaaaccccgtctctactaaaaatacaaaaattagctgggagtggtgcgggtgcctataatcccagctactcaggaggctgagggaggagaattgcttgaaccccagaggcagaggttgtggtgagccaagatcatgccactgcaatccagcctgggcaacagagtgagattccatctcaaaaaaagaaaaaaaaaaccttaaatcatcagtcyggatcaaaagagggtttaataaatcagcttaaaccagagtcaataggcataggtagaggtctagatttgtttttcatcttttaaacatagaaaacatgtaaggctcagaaaagctaaagtttattcgaggccacacccaagacaggtgggcagcatgcaggtctcttgactcctccgtggcagtttgagtcccgagctatgggttgtggaatggg

SEQ ID NO: 771955 - DNA, 534 bp, Homo sapiens
atgagcaacttcattttgatttggtctggtctattggagcctagtgcaggaactcagtctaagacaatggcctctcataatttttgtttaatgatagaaaaacactggaagcctatattaccaaactggtgggaatatgggatatttaaattttcttccttctgcttatctatgttttctaagttttcaaaaatgaatactcattactgctggattaagaaaaagaataaacattattatatttaataacacaaaggagcaaactgagaactggatgcagcttggtagttgcccgggcaggacactgtcccaagctragctcctccccaacatccctcaggcccagagccagcccttcctcctcccgagcgccctgccctgggattctcagaccttgaaagccacaagtcttgaaagtctctgaaggaagagacagggagcaaatggagtttctgatgcttctcccaggcaggtgggatcatgatgcaggatttttcttggcccctttgtgggactcacaatggtggatcccca

SEQ ID NO: 771956 - DNA, 603 bp, Homo sapiens
aaagaagagaggaagtgtattttagtggtcaagggaccagaagagatagaggtaccccaaggtttggggtacctctcacaggtctcacaggacacaaatgtcctggctgcatagtgttcctgggcacggctgtagctgaatgcttgtatgtcaaaggggagttccctagcaatggaacaaaactgatgatttaaagagaaggccctgaaaggaggtcatgtgtctgaaaatctggaaccacttgtcaatctcactcctactttgaacgggagtcttccttgtacggaaagtacttttctattatctttgagcattcaataggggctcaatacatgctygttaaataatcattgtgaaaggtgagcacactcccttgcaaacatctcccactccagtgcacactcttccttttaggtttgaatttgtttgttttttctcaccaaacaaacacagaggcctttttatgaaaggatcgttttctaaaaattacccaggaatcaaatgtgaaatggatactttctttggtaaactaacattttacaatgttatagggacattgttttatttatttatttatttatttatttatttatttatttattt

SEQ ID NO: 771957 - DNA, 599 bp, Homo sapiens
ccctcttgctccctgcctggtagagccaaaagagtcagcaagaaaataagaaaaagtagtttgagacatatttgaaaataaattcacaatacaaaaaggatctcttgcccaatcattaaagaataataaatcaataataaattatgcaagtaacatctgccaatataaatatgcagtgtgactagaaaccaataacaaaaagtaaaatctacctgattggagacaagaatccttttaaaaataaatcttgagtcaaaggaaatatacaaatcaaaattatagaatttytacaaaaaaagcttatagaaaccatgttaacatttttaaaagaaagaaaataaaagcaataaacatacaattcaaaagttaagaaaacacacaaagacactaaaaagtcaaaataaggaaagagggagaaatacaagtggaaaaatcagtaaagtaggaaaaaaaaaaaaacagaaaaaaaatgcccaggtcatttattgttcacagttttaaacccaggatgtatgtatctgatatgcagtagcaggggcttttgagggccctggccacttaaatagtagcatgctctcttcagggtaaattggatggga

SEQ ID NO: 771958 - DNA, 640 bp, Homo sapiens
tgtgcatgtgtgtatacacacatacacacatagacacatatatatgaaaatttttaattcatacatatatactgtgatatacatattctaatgtaatagtacctggtcataaatatcaccccaagtgcttatgaattatacatatctgattagtatgaacttatacctaatcacaagtacttagaaatataatattatctactttttgaaagtcacagaccttactttagagctgttctatatacactgtaaactttaaaaatcagaaaaatagacattaasttgttgatatgattctagttgtgcttcaactctcttttctcatcaaaactatgtcctgaacttaggtatcacagcaactgaaattaaatgaatgggtagagcattgcaattctctggctagagtttctttaaaatgaaattgctttggagaaggattagctcattgatttattaggaccttgttaggaattatttatgtgtcagaggctttctattaaactagacaacttgaggctacaaagagacactgccaagggtctatggaaaaggatttggtgtgagacacacccttacccataccatgggcaggcccaggcatggtgatgctttgcttgttagaatgctggccctgagaggg

SEQ ID NO: 771959 - DNA, 640 bp, Homo sapiens
tgtgcatgtgtgtatacacacatacacacatagacacatatatatgaaaatttttaattcatacatatatactgtgatatacatattctaatgtaatagtacctggtcataaatatcaccccaagtgcttatgaattatacatatctgattagtatgaacttatacctaatcacaagtacttagaaatataatattatctactttttgaaagtcacagaccttactttagagctgttctatatacactgtaaactttaaaaatcagaaaaatagacattaacttgttgatatgattctagttgtgcttcaactctcttttctcatcaaaactatgtcctgaacttaggtatcacagcaactgaaattaaatgaatgggtagagcattgcaattctctggctagagtttctttaaaatgaaattgctttggagaaggattagctcattgatttattaggascttgttaggaattatttatgtgtcagaggctttctattaaactagacaacttgaggctacaaagagacactgccaagggtctatggaaaaggatttggtgtgagacacacccttacccataccatgggcaggcccaggcatggtgatgctttgcttgttagaatgctggccctgagaggg

SEQ ID NO: 771960 - DNA, 621 bp, Homo sapiens
tgtgaactttagtttcagagcttccttacatgaattaagaggagaataagcctctttggtcagatcatcacatagtcagattgcaaagtgcaataaataataccttataattttttttttttttttttgagacgggagtctcactctgtcgcccaggctggagtgcagtggcrtgatctcggctcactgctgcaagttccgcctcctgggttcacgccattctcctgcctcagcctcccgagtagctgggactacaggtgcccaccaccatgcccggctaattttttgtacaggggtttcaccgtgttagccaggatggtctcgatctcctgaccttgtgatctgcctgcctcggcctcccaaagtgctgggattacaggcgtgagccaccgtgccctgccaataataccttataattttcaaagtgttttcacaaaacattttttcacttgatcatcgaaacagctcaaattaggtaagtaggtcagtattatttttatttcacagaggaagagacagagtcctgcaccacaaaatgatgttttggtcaaccatgaactgcatataagacattggtcccataagattataatagcatacttttattgcaccttttctatg

SEQ ID NO: 771961 - DNA, 579 bp, Homo sapiens
ggtgctggtatcctgggctgagagacctggagatggttcacatcacaggactgtacagacaacccccagtaccagcctagagcctggtagacctattgggtggctagatccagaaaagagataacaatctctacagctccactctcaagaagccacatccttaggaaaagggtgcgagtactacatcaagggaacaccctatgggacaagagaatccaaatagcagccttaagccgtagaccttccctctggcatagcctacccaaatgagaaggaaccagaaaaagaattctggtaatatgacaaaatacagttctttgacacacccaaaaaatcacactagctcaccagcaatggatccaaactaaaaagaaatctttgayttacctgaaaaataattcagaaggtcagttattaagctaatcaagaaggcacaaagaaagatgatgtccaagttaaggaaatcaaaaaaatgatacaagaaatgaggggagaaatcttcagtgaaataggtagcataaataaaaacaatcaaaatttcaggaaatgatggatgcacttagagaaatgcaaagtgtt

SEQ ID NO: 771962 - DNA, 605 bp, Homo sapiens
cacattccttgtattcagaattattatctctgtgatggtggggtcttgctgtgaggttgctggaaggccacaacattttggattgattgtacaggtgtttaaaaaatgaaacaaaacaaaacaaggcctttcttctctgtaagatgccctttgccaatattatggtgagaaagaaaaaggaaccttatagaaatatgcagaaaatgaattggtttgagaactagaatgctgctccaactgatrgtttctctcttggagaggggtagagttggccttaacttcacagaagctactggagatggacttagcacttttttggtaaaagatatgctaaccttcccatcatactctgaggaaataatctgagcagagttctcaactttaggttttccaaattggataacttgatgaaataacaatgaaaattaatttccttgttcccacattgtccaaactgattgctgcagacatctcatctctcttgctagaatggttactgcaaaatatatttcccttgtaaatgttttggttcttcctcttcctaaatcaacattccttaaatatattttctgtaaactaagattcttttcagattctaaaagtta

SEQ ID NO: 771963 - DNA, 632 bp, Homo sapiens
taagttctcattagcatgtggtcttcatctcaacagtgtaaagctatggagtaatttgaagtatgcctctgaaattgccttccacactgactaaaaaatgaaaataggccgggcgcggtggctcacgcctgtaatcccagcactttgggaggccaaggtgggtggatcacgaggtcaggagatggagaccatcctggctaacacagtgaaaccctgtctgtactaaaaatacaaaaaattagccaggcgtggtggcgggygcctgtagtcccagctacttggaggctgaggcaggagaatggcaagaacccaggaggtggagcttgcagtgagccaagatcatgccactgcactccagcctgggcgacagagaaagactccatctcaaaaaagtgaaacataaaaaaaaaaaagaaaaaatattacctctccaggctttgaacataactgtgtaatttggaaataatttattctcccactatcttagtgtttaccatttaagagacatgtttctctaggaaaaaaatgtttatcaggaataacgttttttaaaatgctgagaaggttactctcctgctattttataatgttcatcagaaaaagcataaatgtacattctgacaactttcagg

SEQ ID NO: 771964 - DNA, 631 bp, Homo sapiens
tttaaaattcttctgcaggtcttacaaattcaaccctgaaaattgtcaaaatgtccataaccctttattttcaaaatactttcttttcatttttactatcaagacacacaataatcctaagcaagagatcaatattttctccagtataagtaggtgaatagaggtgaaaaaawtttttttcaatgactcgtacttttctcataatgagtcagatacacctggactctatcccaaactattactatgccttgattcaaagttcctcactcccggaaatgtagggtatactttgccaaatgcttttagatgagcatttcatacatacagattaattgcttttctccattttgatcatcttccctatggattcattttttttttttttggttgtgagaattacaaagtgaattttcagctgacatatgttagtaggtcatttcaatatcgaaaatatgatttgagaataattgtgcatgctaagtgctacactgtgactaagatgatgaagaggattatgttcttaggtaggttgtgttatgacactattttcagaagtaaatatactaccttgaaagtcatgattacacacaacctgagtggtgatgttcaccacgctgttcaaaattttctg

SEQ ID NO: 771965 - DNA, 500 bp, Homo sapiens
ctagaaatacaaaaattagccagggttggtggcatgtgcctgtaatcccagctactcaggaggctgatgcaggagaatcacttgaacctgggaggtggacgttgcagtgagctgagatcatgccactatactccagagactccatctcaaaaaaaaaagaaacgaaaacacaggagaaaatatttgtgactttgcattagctaaagattgcttagatggccagacacaatggcatgcacctgtagtcccagctattcaggaggctgaggcagaaggatcatgtgagktcaggggttcgaggctgtgaacagctactgcactccagcctgggcatcatagcaagacccacatctttttaattaaaaaaaaaagatgatgattgcttagatacaacaccatgagcatgatccctaaaaacagaaaaaaaaaagatttaaaaaaactgacattatcataattaacttctgttcttcaaaagatactgttaagaggatgaaaag

SEQ ID NO: 771966 - DNA, 636 bp, Homo sapiens
tcccattcttttaactttctcaacttctaaagaagtaaatatatgcgagtgttttccccttgtctctctgaaaaagtgtccctttgcagcaccacctaaaaaagatccccatcttcccagggggagcctccccttggccagcctctctggacagcctccactccccaacacaaagtactaagagggtaggcacctcggcgccttgtccttgaccttctgactcttcctacagcgatcttaaaagggaactcctgccaggcacggtggctcacgcctgtaatcccagcactttgggaggccgaggcgggtggatcacgaggtcaggagatcgagcccatcctggctaacacagtgaaaccccatctctactaaaaaaatacaaaaaaattagccgggtatggtggcgsgtgcctgtagtcccagctgcttgggaggctgaggcaggagaatggcatgaacccgggtggcggagattgcagtgagcggagattgcagtgagccgagattgcgccactgcactccagcctatgcaacagagactccatctcaaaaaaaaaaaaaaaagaactccttcagggtatgagctactcacagaatttcggaatgttgttctctttcctcaagaggcttggcctg

SEQ ID NO: 771967 - DNA, 517 bp, Homo sapiens
atcacctgaggtcaggagttcgagaccagcctggccaacagggcgaaaccccatctctacaaaattataaaatacaaaaattatccaggtgtggtggcacatgcctgtaatcccagccacccaggaggctaaagcacaagaatcacttgaacctgaggggtggaggttgcagggagctgagatgacaccactgcattccagcytgggcaacagagtgagactctgtctccaaaaaaaaaaaaaaaaaaaaaaactacgttacagaatagacttgctgtagtttaggtttgtaggcctttgattaaactcctatagagtaaacaatagaatgaaagttcctaagaattaacaagcaacacagatgcaattaagctcagagacaggctctatcaagtatgctctcttgaccaaaaaataactactgtctacctacactccctcatctctaaaaggaaatgttacccaccttgcaatactattttaaggcttacaaataattatataaaatacccagtca

SEQ ID NO: 771968 - DNA, 537 bp, Homo sapiens
ggaaaaaggattgccattttaaagtgaaaagcccaagagattttataaacaagctgatcgggagaggtgcttcatttacataaggtgcgacaaaccagtcaggactaggtatgtcattgtgtcctttgcataaggtgcaaacttctgacagtccccactccaacgtgtttttttgagacggagttttgctcttgttgcccaggctggagtgyaatggcgcaatctcagctcactgctgcctccacctccctggttcaagcgattctcctgcctcagcctcctgagtagctgggactacaggcacgtgccaccacacccggctaatttttttatacttttagtagagacaggggttcgccgtgttagccaggatggtctcgatttcctgacctcatgagccacctgcctcggcctcccaaagtgctgggattacagccttgagccaccgcacccgaacaagccctaactcttaaatgagaccatacgtctttttattttagccccagttcggttcatggcatgtttttaattttgggg

SEQ ID NO: 771969 - DNA, 537 bp, Homo sapiens
ggaaaaaggattgccattttaaagtgaaaagcccaagagattttataaacaagctgatcgggagaggtgcttcatttacataaggtgcgacaaaccagtcaggactaggtatgtcattgtgtcctttgcataaggtgcaaacttctgacagtccccactccaacgtgtttttttgagacggagttttgctcttgttgcccaggctggagtgcaatggcgcaatctcagctcactgctgcctccacctccctggttcaagcgattctcctgcctcagcctcctgagtagctgggactacaggcacgtgccaccacacccggctaatttttttmtacttttagtagagacaggggttcgccgtgttagccaggatggtctcgatttcctgacctcatgagccacctgcctcggcctcccaaagtgctgggattacagccttgagccaccgcacccgaacaagccctaactcttaaatgagaccatacgtctttttattttagccccagttcggttcatggcatgtttttaattttgggg

SEQ ID NO: 771970 - DNA, 542 bp, Homo sapiens
ggacttttcctttaactctgtgtctgccggcgaagctgtttttatttttatttttggctttttgtaataagccaataaacagggctggatttatgtcggttttgtttatattatatttaaccatgagtcaatttaaaagaatttggtctgggtrccctggctgtcctctgacccctgtcaccaccttaaatatatggctaattgttttttagtttacagttcctttggttggctatttaatactaaaagagggttattttaatttacagagagtttttaacttttggggggttaacttaactttataattttctgtaaaacttttaagtttttaaatatatattttaagggactaggttttgatgagttttttcccattttctcccagttatgatgctgcacatttacttttgtacagttatttttcttctcattttggccgactatatgctgtctcctattacaggagttttcagacgctgcttggctttggagagttttttatttttgttataacttggagttgtagggcagctcctatt

SEQ ID NO: 771971 - DNA, 556 bp, Homo sapiens
atcctataagctggggacgatcctccttgttttgtagaagagaaaattgaagcttaaatctattaggaaacttgtcaatgaatcaaataataataaagaaacaaatrctaaaagagcaggcagcatactgagataacgaaaaaggtcagtgagattattttaacttggtcttcattgttgcttcctcatttccttaggatgggcttttcaagttggcattataattaatattaaataaatattccaaagtttatttgtttctagacagcctggccagaaacctcaaataatttcacttaattgcaagttttacattcagatgggactgactgaaagtttctcctataacacaggtgagaaagtggggcatatgggaaactgcttggctcatgactgagaggaaccccaagaagcagaggaggtgttagcctagaaagcaagtaaaagtagatttactatgggactcgctgaaagtaaggaatgaaggtgtggaaattgatgtaggtgtgaaattttaaaaatgcctcctcaagcagataaaatgcaaaaagtcacc

SEQ ID NO: 771972 - DNA, 556 bp, Homo sapiens
atcctataagctggggacgatcctccttgttttgtagaagagaaaattgaagcttaaatctattaggaaacttgtcaatgaatcaaataataataaagaaacaaatactaaaagascaggcagcatactgagataacgaaaaaggtcagtgagattattttaacttggtcttcattgttgcttcctcatttccttaggatgggcttttcaagttggcattataattaatattaaataaatattccaaagtttatttgtttctagacagcctggccagaaacctcaaataatttcacttaattgcaagttttacattcagatgggactgactgaaagtttctcctataacacaggtgagaaagtggggcatatgggaaactgcttggctcatgactgagaggaaccccaagaagcagaggaggtgttagcctagaaagcaagtaaaagtagatttactatgggactcgctgaaagtaaggaatgaaggtgtggaaattgatgtaggtgtgaaattttaaaaatgcctcctcaagcagataaaatgcaaaaagtcacc

SEQ ID NO: 771973 - DNA, 639 bp, Homo sapiens
gtttctcaccttccatcctctgctagatacctttgaacagggcacaaacttagcaatgacaagagtgccactggacatgaggagccaacttaaaatttaaaggtgagcccactaaggcttttaccatagaaggatcaccttcaatgatagaaacagttcttaccwccatttcagggcatatagtcagctttttccacagatgctttgcacaggtcctattactacacctatacggtatattttaagggtgaaacaaccacatacaaataaaagctaattttatattggaaggtgtattgtgcaatggaaaggtgacctcaactgtactcagtaagagtgatataaaatcataaatcctagccacagctgcggtatattagaggccacacattacatttgtaaacaattgcaaatccattctggggacagtgctgagtgacctggttttaggtgctgtaagggacagcattggaaacatgtatttaaggatacactgctaactccttagctacaagaagaaaagccatatgtcaattggccagccatacacatcccacgttttatagaaattctaaaaaggaggcacatttgtaatttatattttaatgttgattaatcacagatatgttaaatttttac

SEQ ID NO: 771974 - DNA, 619 bp, Homo sapiens
gaagcagttcagttagatgacttctcaaatttttgcagctctgtgattctaacaattggtaatttgcccatctctcactccctctgccaacctgaattggaccagtttactattttctaaaaatccaggtttttaataccaaaagatgtctgaattactaacatgctacttgtgttcatattattgtatataagaagcttctgaaaaacctgttctatttttatttcaaaaacagtacaagtgaaagtgtagtctctytttcatgatgccaccatggaggcacagatttcaggacccctgcaatagggaaaggtagccaagggtcttacatgacattgaatatgctttttacttggaaacacaaaatcacctccactcacattttgttggccaaagcaagtcatatgatcaccaaggggatgaatgcccagaaagagacaaaacaagaacaagaatcctgatctatcacatattcaaaaaaaaaaaaaaaaaaaaaaaggacattcttttgtaactactccttttcccctgacctaatttgtgcataatataccatggcactaaaaatattgcacttattgaattcaataagtttttgaattcaattttgtgaacagac

SEQ ID NO: 771975 - DNA, 634 bp, Homo sapiens
aacacaaagaaagaaagaatttactgagctgtgaaagtgacggacacacagaaagttctaaacaaaatgaaacaaaacaaaagtggatttatctcagcctctaacaagaagtaaagtttaaaaggcattgggttatgagaggaccatctagaygatagaatcaacatgatcagaagaatagtgacaagaaatgttgagatgtatttagaaaaaaaaattgaccatttgaactaaaataaaaacgtgtctttctctttcttttttaaatagacatagaaaaaaagcaggaagaacatcaggctaaaatatacagaaaatttaaggtcagcttaaatatgtaaaatgtctatatgtttcattgaaacttttggcagtgacatacagaaaggaaagggagagtgaaagctactgccagagtttggaattgatgccataaggggaaaaattttagtagggaggttggcagagaagaggaaaaggtaacagccactgtaaaggatgagatattaacaagctgaatgaagggatgaggaagaaatcgatgatgacactatgggcttgagcctggggaactagaaaatatgcagagcactaacttaaaatacaaatgaggggaatatgtgggtttcatgga

SEQ ID NO: 771976 - DNA, 634 bp, Homo sapiens
aacacaaagaaagaaagaatttactgagctgtgaaagtgacggacacacagaaagttctaaacaaaatgaaacaaaacaaaagtggatttatctcagcctctaacaagaagtaaagtttaaaaggcattgggttatgagaggaccatctagacgatagaatcaacatsatcagaagaatagtgacaagaaatgttgagatgtatttagaaaaaaaaattgaccatttgaactaaaataaaaacgtgtctttctctttcttttttaaatagacatagaaaaaaagcaggaagaacatcaggctaaaatatacagaaaatttaaggtcagcttaaatatgtaaaatgtctatatgtttcattgaaacttttggcagtgacatacagaaaggaaagggagagtgaaagctactgccagagtttggaattgatgccataaggggaaaaattttagtagggaggttggcagagaagaggaaaaggtaacagccactgtaaaggatgagatattaacaagctgaatgaagggatgaggaagaaatcgatgatgacactatgggcttgagcctggggaactagaaaatatgcagagcactaacttaaaatacaaatgaggggaatatgtgggtttcatgga

SEQ ID NO: 771977 - DNA, 634 bp, Homo sapiens
aacacaaagaaagaaagaatttactgagctgtgaaagtgacggacacacagaaagttctaaacaaaatgaaacaaaacaaaagtggatttatctcagcctctaacaagaagtaaagtttaaaaggcattgggttatgagaggaccatctagacgatagaatcaacatgatcagaagaatagtgacaagaaatgttgagatgtatttagaaaaaaaaattgaccatttgaactaaaataaaaacgtgtctttctctttcttttttaaatagacatagaaaaaaagcaggaagaacatcaggctaaaatatacagaaaatttaaggtcagcttaaatatgtaaaatgtctatatgtttcattgaaacttttggcagtgacatacagaaaggaaagggagagtgaaagctactgccaragtttggaattgatgccataaggggaaaaattttagtagggaggttggcagagaagaggaaaaggtaacagccactgtaaaggatgagatattaacaagctgaatgaagggatgaggaagaaatcgatgatgacactatgggcttgagcctggggaactagaaaatatgcagagcactaacttaaaatacaaatgaggggaatatgtgggtttcatgga

SEQ ID NO: 771978 - DNA, 489 bp, Homo sapiens
acagagttaccctgtgacaatgaatattagaaggtttagattacattttaataactattcaaagacattgtaaaaattgagatttctgtttccataaaaattcatttaggaccacatcaatttcttgatgaagccacatawaatttcaggcagattaaaatgaatgcttgcatgtgtttgtttgtattgttgaccctttaacaacacagttttaaactgaatgggtccatcttcttctgcctccgccacccctgaaataccaggacccacctcccctcttcttcctcctcctcagcctaaacaatgtgaagacaaagagaaagaagacttttatgatgatccacttccacttaataaattgtaaacatattttctcttacttatagttttcttaataacattttctgttctctaccttactttattggaagaatacagaatataatatatagaacatacaaaatatgagttaatcaactgtttatgtta

SEQ ID NO: 771979 - DNA, 510 bp, Homo sapiens
gaggaaaaaaaaaactgacctcatgccatatatgaaaattaacttcaaatggataaaatactaaaatgggaaagaaaaatctacattgacaacaaaaaaaatagtataagatactatgtttggaactctgagacagaaaagctttyttaaatatgactatgtatcataaatactaaaaaaaaaaaaaaaaaaaaaaaaaaggaatggctgggtgcagtggctcacgcctgtaatcccagcactttgtgaggccaaggcaggcagatcacaaggtcaggagatcgagaccatcctggctaatacggtgaaacctgtctctactaaaaatacaaaaaaaaaaaaaaatccgggtgtggtggtgtgtgcctgtagtcccagctattcgggaggctgaggcaggagaatcgcttgaactagggaggcagaggttgcagtgagctgagatcatgccatcttgttccagtctgggcagcacagtgagactctgcctcaaaaaaaaaaaaaaaaaaa

SEQ ID NO: 771980 - DNA, 510 bp, Homo sapiens
gaggaaaaaaaaaactgacctcatgccatatatgaaaattaacttcaaatggataaaatactaaaatgggaaagaaaaatctacattgacaacaaaaaaaatagtataagatactatgtttggaactctgagacagaaaagctttcttaaatatgactatgtatcataaatactaaaaaaaaaaaaaaaaaaaaaaaaaaggaatggctgggtgcagtggctcacgcctgtaatcccagcactttgtraggccaaggcaggcagatcacaaggtcaggagatcgagaccatcctggctaatacggtgaaacctgtctctactaaaaatacaaaaaaaaaaaaaaatccgggtgtggtggtgtgtgcctgtagtcccagctattcgggaggctgaggcaggagaatcgcttgaactagggaggcagaggttgcagtgagctgagatcatgccatcttgttccagtctgggcagcacagtgagactctgcctcaaaaaaaaaaaaaaaaaaa

SEQ ID NO: 771981 - DNA, 634 bp, Homo sapiens
tgacattgttcttagctatttgcttatttttcttttcttctctatatgacttcgtcaaaactacttagatgttttcttttcattagtttctagtagaaatatcaaagtataagttcccaagactcactgaacggtgtgtctgcaaagctgatgatggtggttagcaaatcacaggtactggttgaattattagaaattgttttgttggtaatcaaatgaatacttgaagaaagatggatgaaacaactaagagtaggaccttagccaaggcctgtgatacatattttatcataactgaaccttttgtgaattccagaagaaactttgtgaaaagtatcaagagtaatgacccttaggttgaatgagctgctgccatttttgtttttwaataggcagatacctacagcactgtgaaaggaagtgaagatttttggagtgtcactgaataaacggagctcacttaattgcctgagatgttatgtaaacactctgtagttgtttcatatggctgctgtaagaaaattgccacacacttggtagcttaatacaacagaaatttattctttcacagttctggaggccagaacccaaatgagtatcactgggtagaagtcaaagtattggcaaggtcacg

SEQ ID NO: 771982 - DNA, 634 bp, Homo sapiens
tgacattgttcttagctatttgcttatttttcttttcttctctatatgacttcgtcaaaactacttagatgttttcttttcattagtttctagtagaaatatcaaagtataagttcccaagactcactgaacggtgtgtctgcaaagctgatgatggtggttagcaaatcacaggtactggttgaattattagaaattgttttgttggtaatcaaatgaatacttgaagaaagatggatgaaacaactaagagtaggaccttagccaaggcctgtgatacatattttatcataactgaaccttttgtgaattccagaagaaactttgtgaaaagtatcaagagtaatgacccttaggttgaatgagctgctgccatttttgttttttaataggcagatacctacagcactgtgaaaggaagtgaagatttttggagtgtcactgaataaacggagctcacttaattgcctgagatgttatgtaaamactctgtagttgtttcatatggctgctgtaagaaaattgccacacacttggtagcttaatacaacagaaatttattctttcacagttctggaggccagaacccaaatgagtatcactgggtagaagtcaaagtattggcaaggtcacg

SEQ ID NO: 771983 - DNA, 617 bp, Homo sapiens
acattgaaatttcattttttcttatggtgcatcactgcaataggaaaacactgggaaattaagttttattctcacagtgttaatttgtttacttccttgaaaaatcaggtgggtgaccataggcaattcatttaatttgactcagacataattatttcatctaccaaagacaactactaacttctcaaaattggtgyaagtgtggttaaatgggctaatagaggtaaaaagcctagcacagaaatattagctcctctcactacccaccttactctatttcttttcctgtctttccaacaggattaccaaataatcctcatttctgatagttcccattataacagagtgaactttccagtttcctaaataagcattagctgtctctgagttgtatgctagctctgctcttgaatccagccatctatttctcgctgcaaagcagaaaacatatacaaggtttcctacgtgagacagatatttgccacatttttattgcctggttttctagcatctagcagggactagttccttgatcttctgcattgctttattgcttgtcttaacctcagccctcatgtcctttgtactccttgttctgccttgctaaccttttcttc

SEQ ID NO: 771984 - DNA, 511 bp, Homo sapiens
gcacgttttgggggcatgtcaatataaggagagtccaacaaaccgcccccaagcattttcagacatgtgttagcctatcactaggcacacttcactcacctcaccagaggccccatcacagagaaacagagtaaaagagcaaaaatgtaaacaaagaagtcctcagagcaactatcccttctatcrtattacaagctccctgctcacaactggcaaagctacccaagaacaactcaaattccaccttctcatgtccgcctctgagctctggggctattggaaatccgggccatcaccagtcatggcctctagtcacaaccagctcctcaaatagcacagccagccttgattacttccctagtgagagaaagctctactccaggaccactcttccaagccttccctacccttctaaaaccctcaagacattacctcttatttcaccaagaaaataaaagccactgatgagcactctctcaacttcatgccaacataccaacattccttctta

SEQ ID NO: 771985 - DNA, 612 bp, Homo sapiens
aacataaataacaacaaagacaaaccaacaaaaatatccttattcaccttggtatattacccaaatattcctatttgggtaatataccaaggtgaatgaggttcacagtaaaattgagtacaaagtacaaacaacaacaacaaacttgtygttttgtctttgtttctttgttgacaatcaacttatattcacacaaaacctacacatggatgtttatagtagtagctctattcgtaattgccaaaacttggaagcatccaggatgtcccttgtgaatgattaaataaactgttatgcatccagacaatggaatattactcagtgccaaaaacaagtaagctatcaagtcatgaaaagacacagagaaaccctaaacgcatattactaagtgaaagaagccaatctgaaaaggctacatgctgtatgattgcaactacataaaattatggaaaaggcaaaactatggagaaagtaaaaagatcagcgattgtcaggagtagagggacatgagggatgaataggcagaaagcaaaggatttttagagcagtgaaaactatttcatatgacactataatggtggatatgtgtcattatacttatgtccaaagcta

SEQ ID NO: 771986 - DNA, 612 bp, Homo sapiens
aacataaataacaacaaagacaaaccaacaaaaatatccttattcaccttggtatattacccaaatattcctatttgggtaatataccaaggtgaatgaggttcacagtaaaattgagtacaaagtacaaacaacaacaacaaacttgttgttttgtctttgtttctttgttgacaatcaacttatattcacacaaaacctacacatggatgtttatagtagtagctytattcgtaattgccaaaacttggaagcatccaggatgtcccttgtgaatgattaaataaactgttatgcatccagacaatggaatattactcagtgccaaaaacaagtaagctatcaagtcatgaaaagacacagagaaaccctaaacgcatattactaagtgaaagaagccaatctgaaaaggctacatgctgtatgattgcaactacataaaattatggaaaaggcaaaactatggagaaagtaaaaagatcagcgattgtcaggagtagagggacatgagggatgaataggcagaaagcaaaggatttttagagcagtgaaaactatttcatatgacactataatggtggatatgtgtcattatacttatgtccaaagcta

SEQ ID NO: 771987 - DNA, 612 bp, Homo sapiens
aacataaataacaacaaagacaaaccaacaaaaatatccttattcaccttggtatattacccaaatattcctatttgggtaatataccaaggtgaatgaggttcacagtaaaattgagtacaaagtacaaacaacaacaacaaacttgttgttttgtctttgtttctttgttgacaatcaacttatattcacacaaaacctacacatggatgtttatagtagtagctctattcrtaattgccaaaacttggaagcatccaggatgtcccttgtgaatgattaaataaactgttatgcatccagacaatggaatattactcagtgccaaaaacaagtaagctatcaagtcatgaaaagacacagagaaaccctaaacgcatattactaagtgaaagaagccaatctgaaaaggctacatgctgtatgattgcaactacataaaattatggaaaaggcaaaactatggagaaagtaaaaagatcagcgattgtcaggagtagagggacatgagggatgaataggcagaaagcaaaggatttttagagcagtgaaaactatttcatatgacactataatggtggatatgtgtcattatacttatgtccaaagcta

SEQ ID NO: 771988 - DNA, 623 bp, Homo sapiens
  misc_feature 617, 618, 619, 620, 621, 622, 623: n = A,T,C or G
aatattgttaaaatgcccataccactcaaagcaatctacagtgcaatccctatcaaaataccaataacaagccaggcgcagtggctcatgcctataatcctagcactttaggagactgaggcaggcagatcactagaggtcaggagtttgagaccagcctggccaacatggtgaaaacccatctctactaaaaatacaaaaaaaattagccaggcttggtggtgtgtgcctgtagtcccagctactagggaggctgaggcaggagaatcacttgaacctgggaggtggagggtgcagtgaggttgcagaggttgcactccagtctgagtgacaaagcaagacacygtctcaaaaaaaagaaaaaatacagaagacattcttcacagaaatagaaaaaacagtcctaatatttatatggaactgcaaaagatccagaagagacacggccattctgagtaaaaagaacaaaacaggaggaattacattacctgacttcaaattatactacagagctatagtaaacaaaacagcatggtactgtcataaaaacagacatatagaccaatggaacagaatagagaacccagaaacaaatccatccatctacagtgaattcnnnnnnn

SEQ ID NO: 771989 - DNA, 579 bp, Homo sapiens
aacacatcaactcatcatttactctaggtatttctcctaatgctatccctcccccagccccccactccccaacaggccccgctgtgtgatgtcccccaccctgtgtccaggcgttctcattgttcaattcccacctaygagtgagagcatgcagtgtttcattttctgtccttgtgatagtttgctgagaatgatggtttccagcttcatccatgtccctgcaaaggacatgaactcatcccttttttatggctgcatagaattccatggtgtatgtgtgccacattttcttaatcaagtctatcattgatggacatttgggttggttccaagtctttgctattgtgaatattgccacaataaacatacgtgtgcatgtgtctttatagtagcatgattcgtaatcctttgggtatatacccagtaatgggatggctgggtcaaatggtaattctagttctagatccttgaggaatctccacactgtcttccacaatggttgaactaatttacactgccaccaacagtgtaaaagcgttcgtatttcctccacatcctctccagcatctgttgtttcct

SEQ ID NO: 771990 - DNA, 629 bp, Homo sapiens
cttctagctattttgaaatgtacaataaattattgttaactatagtcattcttttgtgctactgggcattagagcttattgcttatgtctaactgtatttttgtgcccattaaccaacctctctctctctctcctaccctttccagcctctggtaaacatcattctactctttctgagatcagtttttttagctcccacatgtaagtaagaacatgtgatacttgtctttatgtgcctggcttgtttcagttaacataatgttctacataatgtttgtccatgttgctgcaagtgatatgatttcatttttttgtagctgagtaatattccattgtgtatatataccacatttgctttatccagacatccactgatggacatttaggttgattcaatatcttggctattrtgagcagtgctgtgataaacatgggtgtgtagatatctctttgatatacatatactgatttcctttcttttggatatgtactcagcattggattgctggatcatacggtagttctagttttagtttttgaggaacctccatactatttttcatagtggctgtactactttccattcccaccaacagcgtacgagagttaagaggaaactattttagatg

SEQ ID NO: 771991 - DNA, 601 bp, Homo sapiens
tcttctttctctctttgaatccttcttctgaaagaagtgtttattcttttctggctatgaggttaatttagtattaagagcattttgcttttgggtgaggcttatactatccagctctgccagtgtctgggtacataggattaattcagggctgakatattagaaaggccacttggcccagaatttagttatgttgtccaaacagcattatcagttaacagggaaaaaaaagtcgatatttttaaaaaagtgaatttttttttacctttgttttcctgccttctgtgttttttttctcaatttgttttaaccttaagagaagaacagaataaaccagggcctgggtgaactgatacatgtgggtgccacaggtgggcttataattgagtgatcctttaaatcaatatgttaaaaatactagtttaacatttaaataaggaaatagaacaaatatatatatttttatattttttgctaatgaaatttctatgcctcttcctttatgtccaaaattatttgtgctgtgataattataggtgtcccattaactctttttatgcttaaaatgtggggcatatgcacagcttgtcatatgtattgc

SEQ ID NO: 771992 - DNA, 486 bp, Homo sapiens
taactatgcaatttaaaattttacctatcccctgtttacatgcttgccactacttttactttgttctacttcttttcccccaaagccctggtcactttctagcatactatacagttaatttatttattaaatttattttgtgcctttccctgggagattacaaactctattagggcagagatccttgtctgttttcttwactactatatgcaaagtgtcaactaggcatggtggctcacgcctgtaatcccagcactttgggaggctgaggtgggcgaatcatgaggtcaagagattgagacaatcctggccaacatggtgaaatcccgtctctactaaaaatacaaaaatgagctgggcgtggtgctgcctgcctgtaatcccagctactcaggaggctgaggcaggagaatcacttgaactggggaggcggaggttgcaatgagccgagattgtgccattgcactccagcctaggtaacaagag

SEQ ID NO: 771993 - DNA, 558 bp, Homo sapiens
aagtgtaggggaaagtcacttctctcttaatttttgtgccatgatgttaaatgtattttctttgtgggacatttattcttgaggtccaatcagtcactttgaagaacaaagtgtgacatcttcagcccagctgggcccatgtgcccatgcctgcctgagttgctcaagccctctcattggtcctaaacgagacactgctactttagacagggtttaggttggctgatggggaggaggaacatataacatgtgaatcagggtcatggatccctgcccaggcataaggggcaggcataagtgtgtgtgtgtgtgtgtgtgtgtgtgtgtgtgtgtgtgtgtgtgtgtygcaggtgagttggaagccacatctcaaagctggctgctgcttttcaccttccttctctgatgctcctgccctgcctatctaccacatgtggggaacacctaggtgcttcattacaaagtctgattgcttagctagttagagtcaaagtgactcagtgctttcaagtctatcttggttggaagagagcttctacctgaaatttgcagccataa

SEQ ID NO: 771994 - DNA, 542 bp, Homo sapiens
aaaggtttaatatctagaattcctaagaaacttaaacaaatgtacaagaaaaaaataaccccactaataagtgagcaaagaacatgaacagacacttaccaaaagaagacattcatgtggccaacaggaatattaaaaaatactcaatatcactaatcattacagaaatgcaaatcartacgacaatgagataccatctcatgctagtcataatgatgactattaaaaagtcaaaaattaacagatgctggtgatattacagaggaaagggaatgcttatatactgctgatgggagtgtaaattagttcagccattgtggaaagcagtgtggtgattcctcaaagaacttaaaatgaaattatcatttgacccagcattctcattactgggtatatactcaaaggactacatattgttttatcataaaggaacatacatctgtatgttcattgcagcactattcacaatagcaaagacatgagctcaacctagattcccatcaacagtagactagataaagaaaatgtggtacacatacata

SEQ ID NO: 771995 - DNA, 639 bp, Homo sapiens
caaaaaaaaaaaagaaaaaagaaaattctggaattgggtacaacagtatcgaggaaagaagaggagttagctgataaccttaataatatttctccagtttggagagaaatatattaagaatactagaagtaaaccagggaaaatttttagaatgaaaatagctcttgagattggaggattttacacagcaatgtaggactttggcagaggtagaaaaactcagagtgattgctttcttgaggtgggggacaggtgtgggaggttgctgacttgcagaacccctacctgtctaggagagctggctctagtacaaaacattcartttcgaagaagagaatggagctatgtgctccaacaaggaatggtctcagctttatccaagataaagctgtcttcatgacttcaggtataaaaaagtagattatttttagtatccaccgttcaaataataatttcaaaggaaaagcaaaggtactagataagatggtgaaagtgtgaagaattcattcacttacattataacaaagtaaatagaaggtgtagacagagctgcccaaattaatgatgaatgagattttaaaaatggcatataactttgcaagcgtgtttggtcaagggtagggtgtgtgttgagaggat

SEQ ID NO: 771996 - DNA, 614 bp, Homo sapiens
aagtatttttgccacatgcatatgtgtgtaatatctgtaagtctacgaagattttccataacaactttagtatattcgttgtttctctcctcctttcacgatcttttagttttttattacgtattatgggtaaatagcagtatttaggaagtagtaactaaatggtagaatgtaactattaatattaagacaatttgtaaccaaatggctgtttttaagtttgtcattatacccctccatatgctgctccctgaatctcacatgatctgtatttaactaatgagttctggtctgtttttgttgacaaatagctcccatggcagctcaatccatttaaaaagtgagaggaatgacaatggctcccattacttctctmcctcagaaaaaaagtcacctggtcctcctctggcactagtttgatcctgaggcctgaaaaagtgagtgatgagagatgattcgtatcttgcagagctgggggaactcacagataaatttcttttctatattttaattcgattctaatgcagaaatttgggagtttctttcattctcctaaaagaaacttaaaagtaaacaactttttgttctaatatttaattggaatatccacatag

SEQ ID NO: 771997 - DNA, 650 bp, Homo sapiens
aagagacataaatgtggagcgaaagggttgcaaaatgatttgttgggtactattgttgagccctaatttaaatcacttggttttctccattattattccaaagcctcatctgaatccttctgacattgaatgtactttataggracagtatattcctataacttgtaaaatctttaatgtaagatttatattatcttcagtaagatggatgagaataattactttaagtcttgttaagttcctcaaccaatgctgttacaaatttgtacaacagaaagaattaaaatgtcacaagatatatttctgagcataacaatcacagcatttaaaaatattcttaagcatagtatttttaaacaaaattcatggattatctttgcatatacttatacacgaggacagtatggttttcttgaaaacattagttacaaccagctttcaggttcatttttaagtatgggccatattgctgtatgtgaaagctgacgtttcaccagagccacagggacgttaaagtttaaaacagcaaatgtaaaatcatgccactggtcatttgataaacttgaaaagagaggacacaaatgtcagtatctgtcaaagtaaacacaattcatttttttattcatagcagggaaagtcatatgtcaaag

SEQ ID NO: 771998 - DNA, 601 bp, Homo sapiens
ttccatttgttttactaatgtaaaaggtatctttctcagaaagacacacacagaacttggtgggactttcttgagaacaatattgagtcacagtttatttccattttttcctcatgagaagaaaatgcacaagcaattaatgttgtggtgagaattatggagaatttggctaaatgtcctaaaataatcagtaagaaaaagaaggacatatttagcaacattaagaacaataaaaattaaacccacatatgtcaaagacaaaggccagcataaaaaggtaaaccaagccaggtgcagtggtacacatctttagtcccaggtactcaggagactgaggcaggaggatcccttgagtccagaagtttgagtccaacctgggcagcatagtgggaccctgtctcagaaaaaaaaaaaaaaaaaaaacaaatgataaatgtgtgtaaaattttgcggtaaatgaraaagacaaaccctaggctctatatagtgcacattgattgtgttttggcccccaccatccatttgccttacttctggtaacatttgaggatctgtgctctttcttatttttctgtccatgtggttctgaacagagcccaaa

SEQ ID NO: 771999 - DNA, 640 bp, Homo sapiens
atgatcactgagacttttgatgatatggaaaaacttataatattaagtgaaaaatcaagatataaagctatatacatatttgataaataattgcataaatatattcacatgcatatacactttcaatcttcgcttaaaaataaatttgtactataatcaatcttttaaggtaagaactrttctttaagtattgtctaagtggagtttcaataattctttcttacataaagcacactgatagtgatttttaatgtacacccaagtttaagaaccattggtatactctatataggtgtgtgtctgtctatatatgtaaatttttttacgtgtaagaacactccaaaatgttaacagagctataactgggtgtaatttctccattataatgaactttatattactgtgtctttgttttcatttgtttgttttttgacacagggtcttgctctattacccaggctgtagtgcagtggcaccatcatagctcactgcagcctctaactcctgggctcaagtgatcctcccacctaagcctcctgagtacagtcatatgccaccatgcctggctaatattttttcaattttttgtagagatgggggggtctcgctttgttgcccaggctggtctcaaactcttggc

SEQ ID NO: 772000 - DNA, 640 bp, Homo sapiens
atgatcactgagacttttgatgatatggaaaaacttataatattaagtgaaaaatcaagatataaagctatatacatatttgataaataattgcataaatatattcacatgcatatacactttcaatcttcgcttaaaaataaatttgtactataatcaatcttttaaggtaagaactgttctttaagtattgtctaagtggagtttcaataattctttcttacataaagcacactgatagtgatttttaatgtacacccaagtttaagaaccattggtatactctatataggtgtgtgtctgtctatatatgtaaatttttttacrtgtaagaacactccaaaatgttaacagagctataactgggtgtaatttctccattataatgaactttatattactgtgtctttgttttcatttgtttgttttttgacacagggtcttgctctattacccaggctgtagtgcagtggcaccatcatagctcactgcagcctctaactcctgggctcaagtgatcctcccacctaagcctcctgagtacagtcatatgccaccatgcctggctaatattttttcaattttttgtagagatgggggggtctcgctttgttgcccaggctggtctcaaactcttggc

SEQ ID NO: 772001 - DNA, 660 bp, Homo sapiens
ttacaaatccaaaatctgaaatttgaaatgcttctaaatctgcaacttcttgagcaccaacatgacgctcaaaggaaatgctcattggattatttcggatttcaaactgtcagatttgggatgctcaaccagtataatgaaaatattccaaaattggaaaaaaattgaaatctgagacacttctggtccccaccatttctgataagggatactcaatctataatagctacatgccagtttacatgctcctccctggttcaaacaatggaatcagatcaatttacagagtctttcaaagaattacagcatacatatatatgcaaagaacaagtataagtttattttagttgcatataactttttccttaatatgagataaaccattttcctaacttatgtttttgcctttggggagcctctattytcagatgcacagaaagcagaaaacacattggggaaaaaatcgctcctcaaggagtggtgtgatcaatgctctttccatgcaccacctctcactccacttccacctggaagatgtaatgcagcaggagaaaccagaccctaaatattttaccaggtgtttttctaacagtttatgattctagaattcaaattagatttttaattttagaataaggatttttaaatcattaaaattct

SEQ ID NO: 772002 - DNA, 358 bp, Homo sapiens
aactttataaccttcttttgtttcctatacccaccactcagtgcagggaggagctcaatctggaatttctttatctgactgaggaaacttctttccaaaagaagtgtaattgttttaagactctctccctagacatctcattaaataatagcaaaagattaactaagaagaagaraagagaacacatccagaaagatttttcatctatttttctgaggggagcgctgagaaattacctgtgagactgtatctgcacaatcagacaacctttgttcatagtgcagttctgcccctcatttttgtgtatctagtccacaagatattgcttgtccttagtttccatttattgtgcaaagag

SEQ ID NO: 772003 - DNA, 636 bp, Homo sapiens
agccctccttcatattaaaaactctcaataaactaggtattgaaggaacataccgcaaaataataagggccatctgtgacaaacccacagccaacatcattaaatgggcaaaggctggaagcattgcccttgaaaaccaacacaagacaaggatgccctctttcactactcctgtttattcaacatggtratggaagtcttggctggagcagtcaagcatagaaagaaagaaaggggatccaaataggaagagagtaagtcaaactatctgtttgcagatgacatggttctatacctagaaaatcccatagtctcagccgacaagcttcttaagctgacaaacaagttcagcaaagtctcagaatacaaaatcaatgtacagaaatcactagtattcatttctgtcagtacaaagacttgggaactacctgacttataaaaggatttgttatctagtctttagagtcatccacttttccaaactgtagtattttttattgccttattttgttattccagagaattttataccccagggacatgtataaggtaaacttctgggtgggtaaaagataagtgacaagcctacctgctttgctgccatcccttccttacaaccttctgtacaaagtgaga

SEQ ID NO: 772004 - DNA, 636 bp, Homo sapiens
agccctccttcatattaaaaactctcaataaactaggtattgaaggaacataccgcaaaataataagggccatctgtgacaaacccacagccaacatcattaaatgggcaaaggctggaagcattgcccttgaaaaccaacacaagacaaggatgccctctttcactactcctgtttattcaacatggtgatggaagtcttggctggagcagtcaagcatagaaagaaagaaaggggatccaaataggaagagagtaagtcaaactatctgtttgcagatgacatggttctatacctagaaaatcccatagtctcagccgacaagcttcttaagctgayaaacaagttcagcaaagtctcagaatacaaaatcaatgtacagaaatcactagtattcatttctgtcagtacaaagacttgggaactacctgacttataaaaggatttgttatctagtctttagagtcatccacttttccaaactgtagtattttttattgccttattttgttattccagagaattttataccccagggacatgtataaggtaaacttctgggtgggtaaaagataagtgacaagcctacctgctttgctgccatcccttccttacaaccttctgtacaaagtgaga

SEQ ID NO: 772005 - DNA, 517 bp, Homo sapiens
gctaggcttctctaggtatagaatcatattctcaatgaaaacagataatttgacttcttttcttttttcttatttggatgccttttgtttctttctcttgaccgatttctctgactagacttccagtactacgttgcataggagtggtcagcatgagaatccttgtcttgttgcagtctcaagggaatgtttccagctttttcccattcagtaacatgttgcctgtgggtttttcaaagatggctcttattrttttgaggtatgttccattgatgtctacttcgttgaggttttcttaaaaatcatgaaaggatgttgtattatattgaaatcttttttttgcatctatagagatggtcatacaatttttgtttttaattatgtgtatgtggtgaattacatttgttgacttgtgtgtgttgaatcaaatttgtatcccaggaatgaagcctactttatcatggtgaattaactttgatatgtgctattgaatttgatttgctagtattttgttaag

SEQ ID NO: 772006 - DNA, 499 bp, Homo sapiens
tagtaagagcttgaacctatttatctaatttttactttaaaatgtttgtctacatttcacttctaattaaatagcaaaatactataataaaaattatgttcaagttttatttataactaaatgtacttgaaaatattctatactttctctctatatatatttttacaataagcccattatggattgaatcgtgtctccgcaaagaggtatgctgaaatcctaacctctagcacctgtgattgtgactatttggaaatggggttttgtggatgtaatcaggttatgatgaagatattaaagtgggccttaatgtaatctgactggtgtccttttaagaakagaagtcaaagagggtcagaggggagattgccatgcgaagacagggcagagattggagttaggctgccacaagcccagaaatgtccaaggttaccagaagctgggagagagaaagaatgattctcccccagaggtttctgagggagcctggccctccatt

SEQ ID NO: 772007 - DNA, 584 bp, Homo sapiens
gattgtagacttccattatctagaactgtgagagagtaaatttctactgttttaagctactcagtttgtgataatttttatagtaggaaaaaaagaacctttaataatttttaaaaatctgttaacagtaactatatctgggttcctttggtatggtagttctcagcctatgcctataaaaaaaatctcagtcagaatctttttttataacaaatattttataactccctttttastaccctaaaatgaaaatcatacataatgtaacttacgtacgtaatttccaaaataccgatattataccatgattgtaagctaatcaatatacaatattaatttttaataaaacaatatatatttcaatctaaatgttttgacaagacttcattagaagacatagtgaaagagtccattgtttgcacctacatatagaatcaccttgagtgaagcacataggttcacacaggttttgttttgattgttttgtactaacaaatctaataccccaagcagtgttactgtttgtattacaattttctgaaataattaacaattttgttgatttccaactaagtgcaatcact

SEQ ID NO: 772008 - DNA, 584 bp, Homo sapiens
gattgtagacttccattatctagaactgtgagagagtaaatttctactgttttaagctactcagtttgtgataatttttatagtaggaaaaaaagaacctttaataatttttaaaaatctgttaacagtaactatatctgggttcctttggtatggtagttctcagcctatgcctataaaaaaaatctcagtcagaatctttttttataacaaatattttataactccctttttactaccctaaaatgaaaatcatacataatgtaacttasgtacgtaatttccaaaataccgatattataccatgattgtaagctaatcaatatacaatattaatttttaataaaacaatatatatttcaatctaaatgttttgacaagacttcattagaagacatagtgaaagagtccattgtttgcacctacatatagaatcaccttgagtgaagcacataggttcacacaggttttgttttgattgttttgtactaacaaatctaataccccaagcagtgttactgtttgtattacaattttctgaaataattaacaattttgttgatttccaactaagtgcaatcact

SEQ ID NO: 772009 - DNA, 398 bp, Homo sapiens
ttttctaaccattttatacttttgggaaccaaaacagcattttacttttgaagatcctaaattatccaatgttaatgtataccaatatgtagcttccccacaatacaggggaaggggaagaaggtaccaaacttacagagatgacctaaaataattagcgagaccagaatcagactcgggatggatcagaatcacytggaacagcttgttaataaacagatgacaagatcccatctgctgagattctattttggtaagcctatgatggaccagatatttgcattttaacaagatcttcagatggtcctgaagcccagggcaatttgagcttcactgaacactagtggaaggaacaaaacaaagatctacaagtaattatctgaacaatcaagtcttaa

SEQ ID NO: 772010 - DNA, 537 bp, Homo sapiens
tatatatgccctatacagcttgccttcatacatttcaggatatacaacagtacttataaatggctgtgagtacaagatcaaaattcattctaatgatgcatcaacaatctctgtattttaaaaatgtataatatcacaatcttaggttctgtgtctaatgcgtttctgatacaggagcttgatagtacygctgtgtcacagagacacatgtttttcattcctcagtcccaggagtggaagccacagtgggaactatggtcttttgagcagcatgagcgggtcccaagtggagagggccctgccacctgggccgcatgacccccacacactgctgtctccgcgtctcactggtggaaaacgtgccagtggagcttggggaaagtgcccagggagaagccaagcagcttggagtagagaatcgcacaccctcaaaagcagccctctgggtagcccagagccaccatgtgaccatgtgactgaagctgctcacctggcatctacaaatcctcacattatccaaaaagaatggaacgtgcc

SEQ ID NO: 772011 - DNA, 588 bp, Homo sapiens
tttaagttatttgagttattcagaggaatgatgctatgaaatttaaaaattattttaatatcaaaatattaaatctttatattatatacctagatatttgcacactaaattaaaccaggaacagaaatacatgcagtttaaaatgattaaattgatcatacaagagacaaacttctcagtattatctattatataggcatatctgtgacatccacaaacacacatattcatagcaatcttatattggataaacttgtcttgttctctgaaacaattgtacctattttgcctctgtaatttaatgggttgctggggaacttggtgtttttggatttatttcttaaaaaggtcatacaatgagyagccatcccagaatacactttttcaaaagctctttttcagtgtccctaatagaagcctcatttcagtgtgtaagcagaacatttgcaatttggttttaattttttccctgtggcactcatttgtatttcacgtgctttggcctctcttgtctcttttcattttttctgtgcattaattatcttttgctatgttttaagtgtcagaaatgtgcttcttggcttttaa

SEQ ID NO: 772012 - DNA, 577 bp, Homo sapiens
tgaaagaggaggtaggagggcgggagataaccccgagaaatctgcagaagggggaatttaatcccacaaagacaccaggaaggagagcaggagaccaagccccaccctgactttccacaggggcttggatgagctcccgagggcaggcgctcgcacagcctgagtctcaaacacaccatgctcttttcctctgcgagttgctaaccagcgatgttcagggatgtaatcatwtcagggcctcagctactcccacatgtgaaagagcttccctggcaaacgcttggtttgaatcaagccagcttgacggagctgctgctgtgaagagctcagagaaatttggcagaaattccgggaacagttttcagttctctttaagagaaacactcagtgtgaatcacacagcgtgatgtacatttggacaattttaccttcttgtatttttcagagcagtttcaaagttgaatatcaattatatctaaaaaaatgtttcccagtgggtgtagcttctggatggaaagcacggagttttcttatgttggttggtagtaaatagtgtggagaggcctcactcagggtg

SEQ ID NO: 772013 - DNA, 620 bp, Homo sapiens
atggtatctctaattttttaaaagataaatatatatatatatatgtgcacaaaatgagaaatatgttccaaatttcgtactaacatgtaaagtaaacctatcatccctcttggtaagcctccagttaattctagaggctgggactgtccactyatcagttccaggaactacatctatatctggatattctagaatctagagtcttctagaatccctacaataggggtagactatttaggttttttaaaaaatattaatttattttactttattacagctctcttccattggaaactgtaacattttcctctttaaatcacagcctcgtctccagccctgaaactcgtgcctcattatgctaattcccatccctggcctgcttaccccacctctacaattgtccacttttaaactcccaatattcttctctcctgatccttgagaacttcttgcatgagccaccttctcatttgtctgagcagggctctacacagtctttattttatcctttcattcaataagcttttattaagcaactattatatgacagctgctgtcatcatagtttagatagtggtaaatcttaagaagaaaaaataaatcatggaagaggaataaag

SEQ ID NO: 772014 - DNA, 620 bp, Homo sapiens
atggtatctctaattttttaaaagataaatatatatatatatatgtgcacaaaatgagaaatatgttccaaatttcgtactaacatgtaaagtaaacctatcatccctcttggtaagcctccagttaattctagaggctgggactgtccacttatcagttccaggaactacatctatatctggatattctagaatctagagtcttctagaatccctacaataggggtagactatttaggttttttaaaaaatattaatttattttactttattacagctctcttccattggaaactgtaacattttcctctttaaatcacagcctcgtctccagccctgaaactcgtgcctcatyatgctaattcccatccctggcctgcttaccccacctctacaattgtccacttttaaactcccaatattcttctctcctgatccttgagaacttcttgcatgagccaccttctcatttgtctgagcagggctctacacagtctttattttatcctttcattcaataagcttttattaagcaactattatatgacagctgctgtcatcatagtttagatagtggtaaatcttaagaagaaaaaataaatcatggaagaggaataaag

SEQ ID NO: 772015 - DNA, 586 bp, Homo sapiens
ctgagcataatgaataatcttgaacattatgagtagaacaagcattagacagctcagaaggcagactggctggggcctcaggatgcaagaatggcacagaggtgagttcttggactcacctcagggcagaggactccagcaatatagaaatgctaacaggcacaaagaaagccctggcagaagaaaggagcagcctacccagacagaaaacttagacagtacccactcgactccagccacaacacatgcaaaacactgctgcccttccccatccacacaagccagatggggccccagactctcacccccacctggcagtaacaagccatcagtcacttctaagccagagcagtatcaaaggaaccagctgcaacagaaggttccagtgagataagtaagacccagagtcttctgacatagtaygaaatgtgcacctctttcaatagaaaatccctgtcatgccaagaagcagcaagatcacaaagtggatgaaacaaggcaagccatagatgccaacatccagcatagaggtgctatcatagagtgacctcacagggacttaaagcagccacagtaaagatacttc

SEQ ID NO: 772016 - DNA, 457 bp, Homo sapiens
cctattttacagaccaggaaacaagctcaagtgtggttaagtccagaacttggccatgatcagcaagtaagaggaagaagcaggactcaaacccagacagcctgtcaactggccaccaagcataattatcatgcctgcttggtttcacatcctcagaggtcaagatgttcatacccacagagaacgggagagaacaccaggtgcatccagataaatcaagmcaatggggaacagaagatatttccagtgctctaggaaataaatattttcacctaacctaaacactgagtcgcaatggtgaagaatgttgggagtgggggattaactcagaggaaaacttccaagccatcagtagtcaaactttaggagccagactctcctgggaacagggcatatttgagaagccatctgttctcagaactaaagagcatacagggacagaaataggtcaagcatc

SEQ ID NO: 772017 - DNA, 591 bp, Homo sapiens
agaagaaaaagaaaatgatgtgcaacggttaaaatgtttgagagccttacatgtggccagcgagctcagcaaaggacactggtttctttttctctcttctttagtcttttattccctactctctgttctccttgcagcaaaacaaatatttttcctaccacaaatatttttaaggtgctacttttcaattaacgatgttttatttcttttgtgtgatggggtttttctttttcgcactgaaatgataaagacactgaagatggcaaagggaagccctaggaacagccttgctacaatccatcagctgcgataatatcaagatgaatatattgtcaggaatctgtatgtagcatttcatttatcctacccactctsctaagagcggctcccccggggattacattattattcaagcttcctggactcactccaaatgcatattgcaactacaattcaaagggaaacttataaaaggtgataggaaatagaccttctacagaacattttttaaaaattaaccttttcagagtttaattccatcctatatacctataaatagaccagctttcaggaactaaaaactaatcctat

SEQ ID NO: 772018 - DNA, 664 bp, Homo sapiens
accttctacagaacattttttaaaaattaaccttttcagagtttaattccatcctatatacctataaatagaccagctttcaggaactaaaaactaatcctatagtaataacacaaagctcaatttctcattccatacgatcattaatattactttaaaaatcacgagaaatctcttcaacttcttaagcattgtaattcatttctgtacaccaattcaagaaacctcattagtttaggtggcctttttgcaataccatccaaggcacgcaaatatttggaatttttaccttaggtcagagtttaagaaaaaaatgatttctcatttccagaaaggatttatgaatgtagaaaaatgcttttrtgacagtgacatgtttgtgttacctaattcacaaataaaataagctatatagaatatatgaagtaaaaatcaaaaggaaaaaagagaaaggattttatataaatggtggataatttttaagtaaaaaaaaatcttgttacatccttaacatttttaaatcttgttacatccttaacatttttttctataacccagtttcaatactccaatcaaatgtaagatggaagagctttgatttgagagaaaaaaaatcctttgaacattgatcgacatgtgatttgtgcaattatttaacctggat

SEQ ID NO: 772019 - DNA, 664 bp, Homo sapiens
accttctacagaacattttttaaaaattaaccttttcagagtttaattccatcctatatacctataaatagaccagctttcaggaactaaaaactaatcctatagtaataacacaaagctcaatttctcattccatacgatcattaatattactttaaaaatcacgagaaatctcttcaacttcttaagcattgtaattcatttctgtacaccaattcaagaaacctcattagtttaggtggcctttttgcaataccatccaaggcacgcaaatatttggaatttttaccttaggtcagagtttaagaaaaaaatgatttctcatttccagaaaggatttatgaatgtagaaaaatgcttttgtgacagtgacatgtttgtgttacctaattcacaaataaaataagctatatagaatatatgaagtaaaaatcaaaaggaaaaaagagaaaggattttatataaatggtggakaatttttaagtaaaaaaaaatcttgttacatccttaacatttttaaatcttgttacatccttaacatttttttctataacccagtttcaatactccaatcaaatgtaagatggaagagctttgatttgagagaaaaaaaatcctttgaacattgatcgacatgtgatttgtgcaattatttaacctggat

SEQ ID NO: 772020 - DNA, 561 bp, Homo sapiens
tacacgatttcatccaatgattccatgtttcttttcctttaagaactccgggtataactgatgtaattttagagttcatgcctctctcccttcaaaacagactagcaatgactagcaatactctaaaggttgaaataattgtgccaagaagaggacacagcagaggcaaattgtccccattccaaaagcagctaaagctataaacagaaaacagtgttgaatccaaaatccaagaatttgacctggggatgttgctagctgtgttcttctgggacttttttattttgttgctcagcaaccacaatccccattctttgttcagacagatgctccagacctccagatccagagatgagcaggcttstaatttccttcttgaacttactttcaaactagtgattcaaggtagaagggagagaggcataaataaagaatcttccaatgaaatctttaagacattcatttatttactcaacaagcatttactgagctcctatcatgtacttaggaattgtggccacaagggatatgatggtgaacaagatttcccttcttcatgaa

SEQ ID NO: 772021 - DNA, 614 bp, Homo sapiens
agtgataggaattactgtggcttttttggcccattttctacagggaaaaaagggaattttatttcttaaccatttcaggggaatggttgcatgcgtaattatgcagggaaaataaaaaaggtgtggacggtgggtggttgactttctagctgatgactggctctcatcaccatcctccaacagtgtgtaacccaaatccatgtctcagcaatgctaaaaataacaacttcgtggcccttttggacactttccaggagcattcattctgtaagcgttgacagtcatatactgccaagcagcagaaggagcaaacctgctctatgttgctgcatgaggagacaatatgaggataagcagtaaaaaatacaatggagcagatttagagccttcatgagaactttctagcasaattgttcagtaatataatgaatagggtaactttcatgatagaggcactcaaaggctgaaagactacctattatagatgccactaacaatatttttaaattagagtatttttctcaaaagtttatgtaaaatcccagaatataacacaaataaaaatagcactgctctagttcaagtgtgagacagaagacctgtgacctgcaact

SEQ ID NO: 772022 - DNA, 613 bp, Homo sapiens
tctctctgaatctgtttctgtatctgtagaagggggcccatacctgacttaatatcctcctggagttgtcaggaattgcacaggcaagagtgaataataaaacacctagcaacttttagaagccctgtacaattctaagattattacagtggcagctcttctacaaaccaggctaagaggctcggagttcatcagtcccctccctacccccaccatcagctcaactgctctaagaatttgggcaaacagatttttgggggaaagcaagggagtttygctttttccgtcacttagtcccataagctacatggccctccagaggctagaaggaccccttatttacagaggaaacagaagacaatgcatgcacccccaataggctttaaatgacactctatacacttccatggagaatcttcaacttaaaaaatcaatggcaaaagaaccctaacccatgctgccaattagacgagacggaggagtctggaatacaaagcaacagtgaccccagtctggctccagggaatggctaggctaaccctacgcattacccacttcaaattttcatgattctgtcatgcatatattatacaaccccacacagaataaacat

SEQ ID NO: 772023 - DNA, 613 bp, Homo sapiens
tctctctgaatctgtttctgtatctgtagaagggggcccatacctgacttaatatcctcctggagttgtcaggaattgcacaggcaagagtgaataataaaacacctagcaacttttagaagccctgtacaattctaagattattacagtggcagctcttctacaaaccaggctaagaggctcggagttcatcagtcccctccctacccccaccatcagctcaactgctctaagaatttgggcaaacagatttttgggggaaagcaagggagtttcgctttttccgtcacttagtcccataagctacatggccctccagaggctagaaggaccccttattyacagaggaaacagaagacaatgcatgcacccccaataggctttaaatgacactctatacacttccatggagaatcttcaacttaaaaaatcaatggcaaaagaaccctaacccatgctgccaattagacgagacggaggagtctggaatacaaagcaacagtgaccccagtctggctccagggaatggctaggctaaccctacgcattacccacttcaaattttcatgattctgtcatgcatatattatacaaccccacacagaataaacat

SEQ ID NO: 772024 - DNA, 632 bp, Homo sapiens
atatggaggggtgtttctaattattcttcagcctcgtggctagccaacacagttcatcttcatcttctcaaaaaaaaaaaaaaatcatgttttgacttttcatgaactaatctgaattcttggcatatcttgtcttttgcagtggaagtagcttagccataccctttgctccaattcctcaactctgtcccttatttcatcttatttttttcttcttggctcatggakgatatggagcagagatgagaagctcatataataattggagaatcaggtctttggtgaccaaactctaaggcttctttctggatagtaggactttgctggcttcttgcagggcgtaaaggttaagcttgtgagcttttggggtcagatttgccttggttcaaatccccgctccacaacatagctattgtgtggagtttggtaagctacttagctcctcttaagcctcagtttacacagtgaaaaaaggggaaggcgtagccataatacctatatcatgagattcttatgaaacacatgtaaaacattcggaaccatgcttggcccatcatcaatactcaaaaaagttatttatttaaaagacataccagcgttttaaactctgctacatagataggtctaagctg

SEQ ID NO: 772025 - DNA, 632 bp, Homo sapiens
atatggaggggtgtttctaattattcttcagcctcgtggctagccaacacagttcatcttcatcttctcaaaaaaaaaaaaaaatcatgttttgacttttcatgaactaatctgaattcttggcatatcttgtcttttgcagtggaagtagcttagccataccctttgctccaattcctcaactctgtcccttatttcatcttatttttttcttcttggctcatggaggatatggagcagagakgagaagctcatataataattggagaatcaggtctttggtgaccaaactctaaggcttctttctggatagtaggactttgctggcttcttgcagggcgtaaaggttaagcttgtgagcttttggggtcagatttgccttggttcaaatccccgctccacaacatagctattgtgtggagtttggtaagctacttagctcctcttaagcctcagtttacacagtgaaaaaaggggaaggcgtagccataatacctatatcatgagattcttatgaaacacatgtaaaacattcggaaccatgcttggcccatcatcaatactcaaaaaagttatttatttaaaagacataccagcgttttaaactctgctacatagataggtctaagctg

SEQ ID NO: 772026 - DNA, 612 bp, Homo sapiens
ggctggctcactaagagactcctggcactgtgttgagtctagcatggagccagcgccccctggactcatcaatgagatatggaggggtgtttctaattattcttcagcctcgtggctagccaacacagttcatcttcatcttctcaaaaaaaaaaaaaaatcatgttttgacttttcatgaactaatctgaattcttggcatatcttgtcttttgcagtggaagtagcttagccataccctttgctccaattcctcaactctgtcccttatttcatcttatttttttcttcttggctcatggaggatatggagcagagatgagaagctyatataataattggagaatcaggtctttggtgaccaaactctaaggcttctttctggatagtaggactttgctggcttcttgcagggcgtaaaggttaagcttgtgagcttttggggtcagatttgccttggttcaaatccccgctccacaacatagctattgtgtggagtttggtaagctacttagctcctcttaagcctcagtttacacagtgaaaaaaggggaaggcgtagccataatacctatatcatgagattcttatgaaacacatgtaaaacattcg

SEQ ID NO: 772027 - DNA, 632 bp, Homo sapiens
atatggaggggtgtttctaattattcttcagcctcgtggctagccaacacagttcatcttcatcttctcaaaaaaaaaaaaaaatcatgttttgacttttcatgaactaatctgaattcttggcatatcttgtcttttgcagtggaagtagcttagccataccctttgctccaattcctcaactctgtcccttatttcatcttatttttttcttcttggctcatggaggatatggagcagagatgagaagctcatataataattggagaatcaggtctttggtgaccaaactctaaggcttctttctggatagtaggactttgctggcttcttgcagggcgtaaaggttaagcttgtgagcttttggggtcagatttgccttggttcaaatmcccgctccacaacatagctattgtgtggagtttggtaagctacttagctcctcttaagcctcagtttacacagtgaaaaaaggggaaggcgtagccataatacctatatcatgagattcttatgaaacacatgtaaaacattcggaaccatgcttggcccatcatcaatactcaaaaaagttatttatttaaaagacataccagcgttttaaactctgctacatagataggtctaagctg

SEQ ID NO: 772028 - DNA, 512 bp, Homo sapiens
ggagagaaaaagcctcttctacttcacacccttaagtgtacaatttcctctttgttttcattaacttgctaacttcttattcttgtcttatgtgtccatcaattttgcagtagtgatttacatgagcacatatgtttaatgctgctgacaataaaagattytagtatgctatgccattccgtactaaaacctggacccaccactgtaaacatccctacctaggatcaaattgtatcttttgtctccaggatgaaatcctgttatattcggtcacagttcttctcttttaatttaatatgcgttgaactgagcagctccaacatctagtaatgataatgagcaacatttattgattacttcctatgtagtgtagacactgttctgagttttaagtacttctcttcccattttgtaaatgagaaaatcttcatacagagagtttaaataatttgctgaaggtcaaatagctgtgtcagaaccagagttcaagcccagtattcggtatttctcca

SEQ ID NO: 772029 - DNA, 581 bp, Homo sapiens
gttatattccaggaggaaattctaggaggaaaaaactgtttcccaggaagtttgagagacagcaatgcttgcctggcaagtactgcctcaagtagccttaagagatgtaggccgggcacggtggctcatgcttgcagtcccaacactgtgggagaccaaggtaggagttcatttgagcccaggagttcaggaccagcctggtcgacatagtgagacctcatctcaaaaaaaaaaaaaaaaaaaaaaaaaaaaaaaaaaagagagatctcagccacaagccccccttgcaggagcccaaatcactgcatagsaaccacctgtgagaaacagaggacgatggatgccgacccgatccactgtatcaccctagcctcacccttccctaccctcccaggtcccatacaccgtgcatctccagcctcttggacgaggcacctgtgtttttatcaacatcaaaatgactgatatcacaagtgcagccaaagcagtactctggtagtgggaatcttttaaaaatccatcatagaaagacgagctgtcagaccttccgccttccccacacagctatgacatcatgttca

SEQ ID NO: 772030 - DNA, 581 bp, Homo sapiens
gttatattccaggaggaaattctaggaggaaaaaactgtttcccaggaagtttgagagacagcaatgcttgcctggcaagtactgcctcaagtagccttaagagatgtaggccgggcacggtggctcatgcttgcagtcccaacactgtgggagaccaaggtaggagttcatttgagcccaggagttcaggaccagcctggtcgacatagtgagacctcatctcaaaaaaaaaaaaaaaaaaaaaaaaaaaaaaaaaaagagagatctcagccacaagccccccttgcaggagcccaaatcactgcatagcarccacctgtgagaaacagaggacgatggatgccgacccgatccactgtatcaccctagcctcacccttccctaccctcccaggtcccatacaccgtgcatctccagcctcttggacgaggcacctgtgtttttatcaacatcaaaatgactgatatcacaagtgcagccaaagcagtactctggtagtgggaatcttttaaaaatccatcatagaaagacgagctgtcagaccttccgccttccccacacagctatgacatcatgttca

SEQ ID NO: 772031 - DNA, 601 bp, Homo sapiens
ttgtagataactagttttaaaatgattttttaaaatttctggttgcttttaatatcatctctttgtctttggtgaatgacaatttcagtactatgtttctagttatggatttcttatttttttatcttgtttggcatttgttggcttctgaaattaagggattggtgtttttcatcagttctggaaaattctcagcatttttctttacattgcttccgtcccatgcattctcttctctttccrggacttagattagatgtatactagaacttttggctctggctcctatgacccttaacctctctttcatattttctatctctttgcttctctgtgatctgaaaccagacaagatcgaggtaggtaaatatgaaagccagatttgcccaactggcaaatgcatatattatccctgggatccagtcacaaagccttgaattcaacccaagacaggaaagttgcaattgagatgttttcattaagaccaaacctttgaggggctaaagcataacatctggcctcctggcaggtataaacctagatgctgtgtgaaagtactccgagttgaaggcctcagaattctcatatattaagttcaacc

SEQ ID NO: 772032 - DNA, 496 bp, Homo sapiens
acagctgtttctagccctcggcactctcccgagccccaaaaaacaaaacaaacacaaggtcggcctcgcgaggtgaggggagaaaggaaagcagagctgggacgagccctgacgcgcgcggggtccaggctgcaagttgggagggacggcgaggcgagcgaccggcctcggcattgcctgactagggccgtggccgctgcggcgggcacgggaacccgccttctcgcgcgcggccctcccgsggggggcttccgggcgcgcggcctcggagccccacggggagacaaaggggtaggcgactgccacggggtggagggaggctgcccagccccatcggccctgccagcgtgcggtctgagctcggggaatgtgtgcgccttagccggtggaaccgcagccgctggcctttgcccccagttcgagcttgagttttcggatgccaagaaaaagcaaagacgtgctcttccctcttgcgaccgctgtagtatgagtccgt

SEQ ID NO: 772033 - DNA, 496 bp, Homo sapiens
acagctgtttctagccctcggcactctcccgagccccaaaaaacaaaacaaacacaaggtcggcctcgcgaggtgaggggagaaaggaaagcagagctgggacgagccctgacgcgcgcggggtccaggctgcaagttgggagggacggcgaggcgagcgaccggcctcggcattgcctgactagggccgtggccgctgcggcgggcacgggaacccgccttctcgcgcgcggccctcccgcggggggcttccgggcgcgcggcctcggagccccacggggagacaaaggggtaggcgactgccacggggtggagggaggcygcccagccccatcggccctgccagcgtgcggtctgagctcggggaatgtgtgcgccttagccggtggaaccgcagccgctggcctttgcccccagttcgagcttgagttttcggatgccaagaaaaagcaaagacgtgctcttccctcttgcgaccgctgtagtatgagtccgt

SEQ ID NO: 772034 - DNA, 668 bp, Homo sapiens
aaagtgattaccacaatgaagtactttagcacatacatcacctattgttaccattttgtgtgtgggggatgagaacacctatgacttactctcatagcaaatttcaagtatatgatatagtgctattaaatattattaccatgctacacattagctcagcagaatgtattctttttaagcttgtaccctttgaccagcatttcatttcctcctctctattctggcccctggcaactaccattctattatgtttctatgtgtttggctttttttttttttttttttttccccaggtaatgtttttatttttattttttwattttttttattgatcattcttgggtgtttctcgcagagggggatttggcagggtcataggacaatagtggagggaaggtcagcagataaacaagtgaacaaaggtctctggttttcctaggcagaggaccctgcggccttccgcagtgtttgtgtccctgggtacttgagattagggattggtgatgactcttaacgagcatgctgccttcaagcatctgtttaacaaagcacatcttgcaccgcccttaatccatttaaccctgagtggacacagcacatgtttcagagagcacagggttgggggtaaggtcatagatcaacaggatcccaaggcagaagaatttttc

SEQ ID NO: 772035 - DNA, 539 bp, Homo sapiens
agctgggctgttctctcccagtgctaagctacgctgacgtgggtaaaatgaaattgcttttcttacctattcagtgtggatattctggttttgttcctgccagggacaacttcttacctggattctggaattctcctaaaggtattttggtttgcwtattgttatatcagtgtttctgtggagaaacaagggctggaacttcctattttgccatcttgctaatgttacttcctagcaactcaatttttaactgggtaggttaagaacttgtaagagatcaaataaaacatgttggacattcactattataagtggtagaaaatgcactgattatgtgaatcaaccaaacttggatcaattctaaaaataaaacactcagggaatatgcttttgtgaacaggaagatagggttattaataatcacacttactgtatcaggcttcaatttaggagttgaggaataatgagtttttcctatttacaattaagtttccaaacttcctgggtcagcttttttcttaagcactgaagtgttcctg

SEQ ID NO: 772036 - DNA, 636 bp, Homo sapiens
tcccctccaaatctcatgttgaaatttattctccaacattagagttggggccaaatggaaggtgtggtcatgggggcagatccctcatgaatggcttggtacatccccacagtaacgaataagttctcgctctatyagttcatacaaaagctggctgtttaaaagaatgtagcaccttctctctttctcactccctctctcgctatgtgatatgccagctctccttccccttctgctataattggaagttacctgaagccctcaccagaagcagatgctagtgccatggttcttgcacaccctgcagaactgtgagccaaataaattacccagcctcaggtattcttctataggaacccaaacagactaacacaccagtctttaaaaatctgtagatggcacccatttttcttcagttaccaatataaaaaacactgcatttgcacagttaaattcccaggaccctcaattatttagggatggactaaatgactggtatcactgctgacaaaagaagtaccttaaatttgacggagcttatgttgagaaaaaaagttatttttatttctatcttaattaattccatttttccacaaactttttgacgtcccctcatattaacttaagaaaatgcaa

SEQ ID NO: 772037 - DNA, 636 bp, Homo sapiens
tcccctccaaatctcatgttgaaatttattctccaacattagagttggggccaaatggaaggtgtggtcatgggggcagatccctcatgaatggcttggtacatccccacagtaacgaataagttctcgctctattagttcatacaaaagctggctgtttaaaagaatgtagcaccttctctctttctcactccctctctcgctatgtgatatgccagctctccttccccttctgctataattggaagttacctgaagccctcaccagaagcagatgctagtgccatggttcttgcacaccctgcagaactgtgagccaaataaattacccagcctcaggtattcttctataggaacccaaacagactaacacaccagtctttaaaaatctgtagatggcacccatttttcttcagttaccaatataaaaaacactgcatttgcayagttaaattcccaggaccctcaattatttagggatggactaaatgactggtatcactgctgacaaaagaagtaccttaaatttgacggagcttatgttgagaaaaaaagttatttttatttctatcttaattaattccatttttccacaaactttttgacgtcccctcatattaacttaagaaaatgcaa

SEQ ID NO: 772038 - DNA, 645 bp, Homo sapiens
gccatgttaactctggggtggagacttaacaagtagtatcacaattaggccctatacatcaaaagatgaagcagaggaaatggaggcccactgtgtgcagcctccctacatagactggccagaaccactccatcatcagtggtcttttattaggaaggaatgctggtcagttgctgtgtcaaaactgcaaaaagaaggaacaacagtcaggtagttgcttgaaatcagcaggggaaaatttcrgctggtttctgtttaactcttagggaagaaagactaatggtggctaataagggaggaggtattacaaggtgtgtccaagctctcactccatcttggccaggaactcatttttaagctttctctggggtccccttggctgagaggggagtctagtcattggggggaacaggattttttccttctcagaacctaactgaattacacattatgacataacctcagtgaagtgactgtggtgataaggaagctaactaactttggaaatcagtgaaatgactgaaaactgtatggatgataaaggaactgtacatcgacagtgtactctatcaacatggcttttcatggtagcgaggagcaggtaacaattctgcaactgctttgcatatatactaggtttaaatt

SEQ ID NO: 772039 - DNA, 626 bp, Homo sapiens
aaaaagaaggaacaacagtcaggtagttgcttgaaatcagcaggggaaaatttcagctggtttctgtttaactcttagggaagaaagactaatggtggctaataagggaggaggtattacaaggtgtgtccaagctctcaytccatcttggccaggaactcatttttaagctttctctggggtccccttggctgagaggggagtctagtcattggggggaacaggattttttccttctcagaacctaactgaattacacattatgacataacctcagtgaagtgactgtggtgataaggaagctaactaactttggaaatcagtgaaatgactgaaaactgtatggatgataaaggaactgtacatcgacagtgtactctatcaacatggcttttcatggtagcgaggagcaggtaacaattctgcaactgctttgcatatatactaggtttaaattagtaagtaatggagcctggctctcactgtcaggagtagagttacagatagaacaagaagggaaagacagaatgaaccctgacctatggtactggattaaagacaaagacatcactatgaactcatgtttagtttaatacacatatacagaaaaagtacagaaacaatta

SEQ ID NO: 772040 - DNA, 626 bp, Homo sapiens
aaaaagaaggaacaacagtcaggtagttgcttgaaatcagcaggggaaaatttcagctggtttctgtttaactcttagggaagaaagactaatggtggctaataagggaggaggtattacaaggtgtgtccaagctctcactccatcttggccaggaactcatttttaagctttctctggggtccccttggctgagaggggagtctagtcattggggggaacaggattttttccttctcagaacctaactgaattacacattatgacataacctcagtgaagtgactgtggtgataaggaagctaactaactttggaaatcagtgaaatgactgaaaactgtatggatgataaaggaactgtacatcracagtgtactctatcaacatggcttttcatggtagcgaggagcaggtaacaattctgcaactgctttgcatatatactaggtttaaattagtaagtaatggagcctggctctcactgtcaggagtagagttacagatagaacaagaagggaaagacagaatgaaccctgacctatggtactggattaaagacaaagacatcactatgaactcatgtttagtttaatacacatatacagaaaaagtacagaaacaatta

SEQ ID NO: 772041 - DNA, 626 bp, Homo sapiens
aaaaagaaggaacaacagtcaggtagttgcttgaaatcagcaggggaaaatttcagctggtttctgtttaactcttagggaagaaagactaatggtggctaataagggaggaggtattacaaggtgtgtccaagctctcactccatcttggccaggaactcatttttaagctttctctggggtccccttggctgagaggggagtctagtcattggggggaacaggattttttccttctcagaacctaactgaattacacattatgacataacctcagtgaagtgactgtggtgataaggaagctaactaactttggaaatcagtgaaatgactgaaaactgtatggatgataaaggaactgtacatcgacagtgtactctatcaacatggcttttcatggtagcraggagcaggtaacaattctgcaactgctttgcatatatactaggtttaaattagtaagtaatggagcctggctctcactgtcaggagtagagttacagatagaacaagaagggaaagacagaatgaaccctgacctatggtactggattaaagacaaagacatcactatgaactcatgtttagtttaatacacatatacagaaaaagtacagaaacaatta

SEQ ID NO: 772042 - DNA, 603 bp, Homo sapiens
atgttagtatttttagtggttgtgtaatggttgtattaatagacacagtctttaaaataatgctctactcttagacatttactttgttttcagtttttccatcctgtaaataatgtgaacatatttatcaatcagactttggtcatatttctgagatttccctagtgcaaatgcttgcggaattagtggattgaagggtgtgatcattttaaaggctgtggatttgtatttccagactgtttaccggaaaggcagtaccaatttatacctctctctagtgtctgagratgctgtttgtattgcatctttaacaaaccttttttcttaagattaatgactttattttttagagtagttataagttgatggaaaaaatgacctgcaaatttgagcagaaaagtttgacaaataataaggacatgtatcaaccattacagtatcatacagattagtttcactgccctaaacatctcctgtgtttcaactgttcatccctccttccgtcccccaaacccctggcaaccattgatctttctactgatttcataattttgcccttttcagaatatcatacagttgaaatgagagtatgtagccttttca

SEQ ID NO: 772043 - DNA, 614 bp, Homo sapiens
aactctgcaagtatattccctttgttgtgttatgtatattttgcaactttttatttaactagagtcaccagtttattgaaattccttcatttttcaaattagctcacatttatctatcaactctgttttcttctatattgagtttggcttcatcttctttaattttattaggattgcttttccctccttttctaatttattgagttgaatgtttaaatcatacacgttttagctttctttttggtaaacaatgcatttaatactatgactgtcttgaggaatggctttattcttataagaaatagtgtttttattttcattactttccaaatattctgtagattgtattttgttcctctgtgtttcagcagttaagaagatttttttaaaaaaattacagttacttatcgtttaattttgttttratcagaaaatgtgatctgtgcaacgtacgttttttgggacacaataggatgttcatgaccagtgtatcctcggttctggtcagtgtcccatggatgcttgaaaataaggtgaaaatgaggtgcattctttacttgtgtgcgcaaaagaagacacgttattgattataccgttaaaatctccattacctt

SEQ ID NO: 772044 - DNA, 558 bp, Homo sapiens
cagggacctagaataactggagggtccacgtggatccctccttccgtgattgtcatcacgggagaagaggaccatggtgaatctctcttactagctgttaaagctttcaccggccaggtgtggtggctcacacctgtaatcccagcactttgggaggccaaggcgggcagatcacaaggtcaagagtttgagaccagcctggccaacatggtgaaaccctgtctctactaaaaatccaaaaattagccaggcatggtggcgagcgccagtaatcacagctactccagaggctgaggcaggagaattgcttaaacccggatggtggaggttgcagtgagccgaggtcaagccactgcactccagtataggcgacagagtgagactctgtytcagggaaaaaaaaaaaaaaaaaaaaaagctttcacccagaagggccattcatcacgtacactcacatttcattagcgaaagaagtcacttggccatacttaacttcaaagggacagggaacagtattcccaatgtgcactgagaaggggtgtggaaaatttgtgacca

SEQ ID NO: 772045 - DNA, 560 bp, Homo sapiens
ttcattggtaaattttccaaatatttaaggaagaaataccagttttacaccaactcttccagaaaacagaggaagaaaaaacacctcccaactcattttatgaggatacagaaccccaaaactgaaacctgacatggacgttacaagaggcaggtggatcacttgaggccaggagttcgagaacagcctggccaatatggtgaaaccccatctctatgaaaattagccaggcatggtggtgggtgcctgtaatcccagctacttgggaggctgaggtgggagaattgcttgaacccaggaggtggaagctgcagtgagccgaaatcgtcccactgccctccagcctgggtgacagagcaagattccgtctcaaaaaaaaaaaaagaaaaagaaaagaaaattgcagaccttaatcyctcgtaagcatagatgcagcaatcttaaacaaaatattaggaagttgaatactgcaatgcactgaaaggataatacatcatgaccaggtattgggggttaaggattcaacatatgaatttgagtgggacataattcaggccata

SEQ ID NO: 772046 - DNA, 567 bp, Homo sapiens
ccccttgggagcccagctgcctttctctctttttcttaccttatctctctctcctgtttcctgaattactgctggaagtatggaactacgtacataaaacaataaataaggcctcaaaccttaagagaaaaaaaaaacacccatttatgtgaccagtattgtctstcttttttttaatccaataaaactttcaactacaatcggtgctgatgtcaccatgttagcggcacacactcttgactctggtttgcacagttcacatggcaggtgggtccaccgcctccctggaaggccagtgggacaggaagggctcaccccctttctcagctgaggaaactgggactccaccaggggagatggcctcaagctacaggggtgggcaccctgggatggcaaaaagtcacctgtcctgactcgagataattggggtctggactcagctctgccagtaactagttatgtaagttcagacaagtcactgagcaggtgagaagggaagagttggcagcaaggtccttccaggaggctaggaagccagacccttcctctggatcccaccggcaggat

SEQ ID NO: 772047 - DNA, 601 bp, Homo sapiens
aatcaattagtggtcacccctgtataccttttaaataaacccctctaatagttgacagtagtggcttctggctcactgggtatcacagaaaactttagcttaacttagtttaaacattaggaacacaaaattaggtgactatgagaattttccagttgaccaaaattttttcaactgacttgaaaaatccagccacctgctaaaggttggaaagacatgactggaatacttagctggactcctaactcargttgcatacaggaaagcagactacagtggcccagggatgagcagcaattttctaggactaagtaatttctggagcttgtacatttagaacacatttacaacaatttgtcatgggactcaatctaaaggggctaaattgctacttttatttatcctctgggagggaatgtgagaaataatggatcaagtcacatgataccaattcaacagatatgccaaatccttaatgttctagaatgggtttctgaaatcctatgatttcattggttttagaaagctttgattcgaagaatcttttggtgtacaagttaattcagctgtaagttagttttgaacatgtaaatttcttcca

SEQ ID NO: 772048 - DNA, 601 bp, Homo sapiens
aatcaattagtggtcacccctgtataccttttaaataaacccctctaatagttgacagtagtggcttctggctcactgggtatcacagaaaactttagcttaacttagtttaaacattaggaacacaaaattaggtgactatgagaattttccagttgaccaaaattttttcaactgacttgaaaaatccagccacctgctaaaggttggaaagacatgactggaatacttagctggactcctaactcaggttgcatacaggaaagcagactacagtggcccagggatgagcagcaattttctargactaagtaatttctggagcttgtacatttagaacacatttacaacaatttgtcatgggactcaatctaaaggggctaaattgctacttttatttatcctctgggagggaatgtgagaaataatggatcaagtcacatgataccaattcaacagatatgccaaatccttaatgttctagaatgggtttctgaaatcctatgatttcattggttttagaaagctttgattcgaagaatcttttggtgtacaagttaattcagctgtaagttagttttgaacatgtaaatttcttcca

SEQ ID NO: 772049 - DNA, 598 bp, Homo sapiens
gtgaaaccctgtctctactgaaaatacaaaaaattagccagctgtggtgggcatgcgcctgtaatcctaggtactcgggagtctgaggcaggagaatcttttgaactcaggagacggaggttgcagtgagctgagatcgtgccattgcactccagcctggggaaagagcaagactccgtctcaaaacaaaacaaaacaaaaaaacccccagatctctagtgcataatgggttatattatgcagttacacctcccttggaagttgggagagaaaaagagaagattgtctcctatttttactttacttcaataagaagcaacattaaagtagaagccttcacagrcaaagctatattttctcatagatcataacttttggttaatatagatgtcactgactgactgtgacatcaactatttgaaagacaacattttaagtggcatgggttgatacaccacttatcaaatcaaatattacttcagtggaagtaatatttgcgctgtattttaaagataatttggaaagcaatacctatatgaaaatcttattgtatctgcttttcaaagtttcctattttgtccaaatgagaaaactttgg

SEQ ID NO: 772050 - DNA, 485 bp, Homo sapiens
ttaaaaaatggacatgaggcaaaataaaatttgtcagaattcctgtttctagggcagaaacctgaagagtactacaatgagtatacacatgtatgaagtcatgggttttatttatttatttgtttgtttgagatggagtttcactctgtcaccaaggctggagtgcagaggcacaatctcaactcactgaaatgtctgcctttttgggttcaagtgattctcctgtctcagcctcccgagtagctgggattacaggtgagcrccaccactcctggctaattttttgtattttttgtagagatgggattttgttatgttggccaggctggtctcaaactcctgggctcaactgatccccctgccttggcctcccataatcctgggattacaggcatgagccaccacacccagcctgaagtcatgggttttatacattccaacacatggggttgcattttttaaaatttattttttatttattatta

SEQ ID NO: 772051 - DNA, 644 bp, Homo sapiens
cagcaacctagatcatgtgcagttcactacagggtttgtgctcctatgagaatctaatgctgccactgatctgacaggaggcggagttcaggtggtaattcttgcttgcccactgttcacctcctgctgtgcggcctggttcctaacaggccgtggacaattaccagtttgtggcatggggggttggggacccctgctctatagataacaacttgaacattataaaacattaagttttcctctttgagataatctgtcaagtcctgcataccagtgaaactactgacaccagctggtctgaaggacccaacaagaagctgactcaccaaataatgcagttgccatgtcctgattatttcattccttttaccacaactaatgacttccattttccagcccctcatcccccatgattcacttaaaaaccccagcccagaagtccttggggagattratttgagggcctcctcccatctgctggccctgtgcactgtgatcattaaactctttgtctgctgcaaactctgctgtctcagtctgttactgcacatctggcatgcaagctgttggtcctaaaacattgctacagcatcccatgggggaaggtagaagggcaagagagcatgcatgcaagaaagcaagag

SEQ ID NO: 772052 - DNA, 552 bp, Homo sapiens
aactgatagaactgaagtaacagacaaatccatgattataactagcaggtacaacacacctctcccaaaatttgataggacaactagacaaaaagtgagcaagaatatattttaaaaaaatcaacaacataggccaggtgcagtggctcacacctataatccaagcactttgggaggcagaagcaggcagatctcttgatgccaggagctcaagaccagcctggccaacatggtgaaaccccrtctctactagaagtataaaaattagctaggtatggtgccgcacacctgtaatcccagctactcaggttgctgagggatgagaattgcttgaacctgggaggtggaggttgcagtgagccaagattgtgccactgcactccagcctgggtgacacgtgagactctgtctctaaaagaaaaaaggaaagttgcaaaatcaacatcaaccaacaagatctaaacattatagagcacattatagcagaatacgaatacttttcaagtgctcacagaacatataccataagatagcccttatcctgggccataa

SEQ ID NO: 772053 - DNA, 596 bp, Homo sapiens
tcctcctgccttggcctcccaagttgctgggattacaggtgtaagccaccacgcccggcattcttcttcttttctaagagtagaagtgtttttgtagctgtaagggtagaatacctaaaaatcaaggagaaaattcaatgtttgattacattaagcatatttctagaagtatgggacatgtctttaacttgtttcaacttttaatatccattatgagtaaattaggggataaaagacacgtaagactaataaaaataaattcagatcagaatgagagaagacctggaagacagtgtgagaaggtctagtatatatttaacacaagtcttggaagaagaaaagataaagagtgagaccctgttcacaaccatcaataataaacaaaagaataaaacaccarttaatcagcccaccccaacagacaaagtaatttgactgtggatacccttggtgagctcacactcccttcttttgtctaggtaccaattcttcactaagtttacattgcaattcatctcccctatctaattaatgagattatattcaatttctgttcagaaattgtcttatgtaagagtcagtgtttggtgacacaa

SEQ ID NO: 772054 - DNA, 596 bp, Homo sapiens
tcctcctgccttggcctcccaagttgctgggattacaggtgtaagccaccacgcccggcattcttcttcttttctaagagtagaagtgtttttgtagctgtaagggtagaatacctaaaaatcaaggagaaaattcaatgtttgattacattaagcatatttctagaagtatgggacatgtctttaacttgtttcaacttttaatatccattatgagtaaattaggggataaaagacacgtaagactaataaaaataaattcagatcagaatgagagaagacctggaagacagtgtgagaaggtctagtatatatttaacacaagtcttggaagaagaaaagataaagagtgagaccctgttcacaaccatcaataataaacaaaagaataaaacaccagttaakcagcccaccccaacagacaaagtaatttgactgtggatacccttggtgagctcacactcccttcttttgtctaggtaccaattcttcactaagtttacattgcaattcatctcccctatctaattaatgagattatattcaatttctgttcagaaattgtcttatgtaagagtcagtgtttggtgacacaa

SEQ ID NO: 772055 - DNA, 621 bp, Homo sapiens
ccaaaaaactgcagccaatttaaaattggtttaaaggctcatatttgaggcacttaaattgcttcagaaatcagcaattccttggtcttctccatatagaattaatctttatctttgttttgtttcttttcttttctttttttttttttgagacagagtttcgctcttgttgcccaggctggaatgcaatggcgccatctcggctcactgcaacctccacctcctggattcaagcaattctcctgcctcagcctcccgagtagctgggattacaggcatgtgccaccacgccctgctaattttgtatttttagtagaggcagggtttctccatgttggccaggctggtctcgacctgctgacctcaggtgatctgcccgcctcggcctcccaaagtgctgggattacaggtgtgagccaccgcgcccagcctttaggattgatctttatctaaaagaacaatcaatagcaawcactaacaattttatcacctacatgaagcctaggtagtgcatactatagtttgggaaactgccgcatggactcaagccaagggagtaaaaggcatggaaagtttctttgagtagcagggccaccaatgaggtgcataaaacacataaaa

SEQ ID NO: 772056 - DNA, 612 bp, Homo sapiens
ctaatagggtttcccccaagagcaaaatctgagagaagggcgtggatccaggtagtttatttgggaggtgatgccaggaagcaggagtagggaatagggagaatgaaaccaaaaagggggaaaagccaacacgaattgtctgaatgaggtgtgtgaatcctgctgggaccttcgaaggaaccataaagaaagcacatcaagaagtgctccacttaggccaggcgcggtggctcacacctgtaatcccagcactctgggaggctgaggcaggcggatcacttgaggtcaggagttcaagaccagcctggccaacatggtgaaatcccatctctactaaaaatacaaaaattaactggtacggtggcatacccctgtagtcccagctattygggaggctgaggcaggagaattgataggacttgggagatggaggttgcagtgagcagagatcacgccactgcactgcagcctgggtgacagagggagactccatgaagaagaaggagagggagacgaaggagaaaaaagaaggaggaggaggaggaggaggaggaggaggaggaggagaactccgccagcagatggaggctgcagcatctaagcactgctccc

SEQ ID NO: 772057 - DNA, 621 bp, Homo sapiens
cagttctaatggatgacttcaagatttctatcttgagcaactaagaaggtaaagtttccattaatgacatgaggaagactgcataggggtaaagatccagagattttaggtttaggatatctattaaatatccaaaaggaaataatcgtgcatataattggttggcctaaagtttggggaatatgtgtaggctagatacataaatgttgaggggtgtcagtgtacaggtagtgagtaaagccatgagactgaagggagtgaacacagacagaggaaacatggaagaacagaygactaggatactccaataatttttaaagtcaccagagagataagaagggaccagaactcatttagtatccacacatttaatctccattgacaccttataaactattattcttattttgtagttgaagtagctgaaacacagagagatgtaacaattgtccagggactttatacctaaaaagttctaaatcagggttcaaacccaggcaatctggcctcaaactgtatgtaagactttttagacttcctctgaagacttgtactatatatcctggctggcacactttaaaaacacttaggaggtgctcaataaatgtaatcattatcatc

SEQ ID NO: 772058 - DNA, 756 bp, Homo sapiens
gcaaactagagagatgtcatatttgaagaaggcagtcactattcactgctagccagttgtaaaatgaaggcaacattttgccaaaccttcaaacttgttaagagatttctcgacacaaatcagatacagatttttatgtttcatttgccaacttgtaaatgttgacaactaattaaatttgcttgtaaaacaccgtattaaattaaatgcacacataggccatatttggcctaggggccacaaatgtgcagcttctctactgaaaggtgaaatgggtggatacaggaaggcaggagatgggggaaaaaaatagacaagacaaaaaagtccgggcacagtggctcacacctgtaatctcagcactttgggaggccgaggcaggcggatcacttgaggtcaggagttcgagaccagcctggccaacatggtgaaaccctgtctctactaaaaatacaaaaattagccaaacatggtggtgggcacctgtaatcccagctactcgggaggctgaggcaggagaatcacttgaacccgggaggcggaggttgcagtgagccraaattgagccactgaactctatcctgggcaacaccgtaagagtctgtctttaaaaaaaaaaaaaaaaaagcgggggggtgggggtgggcgagcagcaaaagcccttaaatgtggctttctgtgagcagttgagagggagaggagtggggaaatgattttgagaagttctgtgagattttaattggatcccatttgatg

SEQ ID NO: 772059 - DNA, 591 bp, Homo sapiens
aagatacttaggaataaatttaaagaaatgcaaaattatatagtgaaagctacaaaacattattcaaagaaatttgaaaagacctcccatattaaatgggaggaaatggaaagatctcccatattcatggatcagaagacttattgttaagatgacagttmttttcaaattgatctacagattcaatgccatttgtatcacaattccagctgcctcttttgcaaaaatgtttaagctgatcctaagatgtgtatggaaatgcaagggacccagaatagccaaaacaatcttgaaaaaaatgatcaaagttggagggctcacatttccccatttcagtacttactacagagctacaataatcaagacagtgcatattggtatgaggataggcatgtaaaacagtaaaataggatcgagagtctagaaatagaccctaaatttacggtcaaatgtttttcaacaaaagtgccaagataattcaatggggaaaaaaagccttttaacaagtggtacagggtcaaatggatagacacatgcaaaaaaaggagttggatcccttctttaagcattcaaaactcaaaagggggtgta

SEQ ID NO: 772060 - DNA, 584 bp, Homo sapiens
acagcatgtcaagttttttttgtattgcatcattctgacttctttttctgcaccccttttccatagctaaggactgctgtgatcacactggccccatccagataagccgggatagcctccctattttaaggttaattgggtggcaaacttaactacatctgcaaccttaatttccctttgccacatagcctaacttatttacaagttccaaggattagaatatgaacgtctttggcagggggtgaggggaagggaaaaattattctgcctgccattttcctcaaatgatctgtaaattcaatacaattccaacaaaatactggcatatccttttgtagraattgacatgctgatactaaaatgtacgatgaatactaaacaacttagaacacttgacccttgtgcaacatgagggttaggggcaccaacccccatgcacttaaaaatttgcatataacttttgactctcaaaaaatttaactactaactggaagccttactgataatagtcaattaacacttattttgtttgttatatgtactataagaaactgtattcttacaataaagtaagctagagaaaa

SEQ ID NO: 772061 - DNA, 629 bp, Homo sapiens
gtttaaaaagacatgacaaaacatcaaggcaattcaagatgaagtttcagtactcatttgttatggcattggactccctggaaaataaacatcattaactgccagctgaaaaacactcatcattctggcatttttaatttgataaaaaatgaaaagttcctacacttggaaaaacttaaggcaattaaattcaattcatggactattaataactaaaaccattatggtgaatattcaaaggattaaaaactgaggaatgctttggcagctgctatatgaacttggaaaactctaatgagaaaggaatggctgtggacattagaagctctatttaactcatctctaaattgaagtcttgtgaactacatggtttttcaatagactgattttgctgggaacttcacatgctcagagtttgaragctgtttgtttttaatttaacaatttaaatgaaactcatgggaataaatagcaaatgaaatctgcaagatgacagcatttaaaactttcatctttagacaatcagcagcttttgactatttcttatttacttttaagaaattccacagcataaaataaccatcatgggagaaattaaaggtatttaagactattttatcaaaagggaa

SEQ ID NO: 772062 - DNA, 656 bp, Homo sapiens
ccactggacttcatccagggagacagagcaagaccctgtttctcaaacaatttaaaaaatatataaagaaatttgtaagtagttttttcaataccttctttattatgtctataaaattatatgtagcattggaaatgttattgaatatgacaccaacaacgtgctattgtattttttaaattttgacttcttttaaagaaggtgataacaatctgtggaaaatgcttttactgtatcatgccaatatactgcaaggagtatttcaaaataatataaaagtaattcacagacttagattaagtgaagatcaaatgaccccaaaatttttcttccttagtttttcacagcaactgctaaagtccataagctgatttttccaagaaaattattctawtaattttgagtgttcaatccgtgcaatggtccagtcaggctttactccttgtgtgaactccctctgaaacctaggaaagacattgcaaataatgtaaatcttacatcagtccaagtatgtgttaaataactatgtaatttgcaagtgtatatttaaaagaatttttggcaacaagataatggttaatattaaatcaaaatcaaaacaaaaaaaagtttaacctacccattcaatcacaataaatatacccacaaaattgaag

SEQ ID NO: 772063 - DNA, 637 bp, Homo sapiens
tgtctgattggaaaatttgggaagaatatactgggcatggttagctcaattcattccttttacctgttctctgcaggtgggtaataaacccataaatttctctgtaatcctctgaccttgtgccaagatgggaagaggtctgccctggtgcagtgctgcactgtgggtgggtgaatgtgctaattctggggtttggtattaggaaactcatttgcccacacatgtaaagtatattcattaatatatcagcttaataaaggtgayaatttggcttcttctatcttatttctttgtctcctttctcagttgttcagaactctagcagggaagattttggttaatttaatttcctcaaagtcctcaaattcatatctcccttctctcttctctatattgttaatataaacatgagcagtattttatgaattattctgcactttattgttttcgcttaattatatatcctagaattctttctctatcatcacagacaaatttacttatttcttttaatagatacatggtatttcaatatgtagtagtaccccaaaaatgtatcatttattgagacagtgttgctattgatgaacattttggttttctgtcatttgataatacaaagtgctacaactgaaat

SEQ ID NO: 772064 - DNA, 609 bp, Homo sapiens
tccctagagcactctctctattgagaaactttgcaaaaaaacagaatatttggcttgatttattgctcctgcccattttttccctcctattaatttttgtcactaggcaattgctgtcatggcaacacaccactctagtttgatatcaacactctggctgtgggatgaacccacatacccttttcccttcaaggtgggttttrtgaagatttccccctccacctatcctgataccaagaactggatttggcattggttttaagttgctcaggttggttcctggttttgtggttttcatggactataccataagttatttgagacatgggtaaggagaactcatccttgtccaaggcatcagcatcactctcgagtttacatctcgagtttcaaactctcatcaaaactctgtcccatggtagcctgtgtcagttggacacctgtgctcggtgtcaggatgcttagtcagtctgtgatctaaaactccatctctggaggcatctttaactcctgtctcccctatcaacctatttatcaccatgcaatctgcttctccttgggaattaattctttgttctcaactctgtgtagccattcatgtcctacact

SEQ ID NO: 772065 - DNA, 619 bp, Homo sapiens
gctttagcaaagagactggcagcaatgtacccctgctctagagagctgtgaactttgaacttgggagagattttttggggtatctggcagaagaaatttctaagcagcaaagcctttgagatattgcctggctgcttctaaagcctatgctcatttgygtaaacaaagaaatgacctgatactagaacttatatttaaaagggaaacagagcataaaagtttggaaaatttgtagtctgaccatgtgttagaaaagaaaaacccattttctgggaagaaattcaaggttttagaaatttgcataagtaaagaagagtcaaatgttactagtcaaaacaatggggaaagtgcctccagagaatttcagagactttcacagcagcccctcccattaaagacctggaggcctaggagggcaaaatgttttaatgggccaggcccagggccccattactctatgcagcctcagaacatggcactgtgcatcccagatgctccagtcatggctaaaaggggcccaggtacagctccggctgttgcttcagagggttcaagccataagccttggcagtttccatttggtgttggacctgtgggtgtacagagggcaagagttgag

SEQ ID NO: 772066 - DNA, 619 bp, Homo sapiens
gctttagcaaagagactggcagcaatgtacccctgctctagagagctgtgaactttgaacttgggagagattttttggggtatctggcagaagaaatttctaagcagcaaagcctttgagatattgcctggctgcttctaaagcctatgctcatttgtgtaaacaaagaaatgacctgatactagaacttatatttaaaagggaaacagagcataaaagtttggaaaatttgtagtctgaccatgtgttagaaaagaaaaacccattttctgggaagaaattcaaggttttagaaatttgcataagtaaagaagagtcaaatgttactagtcaaaacaatggggaaartgcctccagagaatttcagagactttcacagcagcccctcccattaaagacctggaggcctaggagggcaaaatgttttaatgggccaggcccagggccccattactctatgcagcctcagaacatggcactgtgcatcccagatgctccagtcatggctaaaaggggcccaggtacagctccggctgttgcttcagagggttcaagccataagccttggcagtttccatttggtgttggacctgtgggtgtacagagggcaagagttgag

SEQ ID NO: 772067 - DNA, 533 bp, Homo sapiens
cattaaaaagaacaagaagttttgatgttaaagaaagtagctaagtcagaaaggttacgagacttttcttttgagtgctggtagctttctattaaaaaatacctgagtccttgcctgatttataggtgtttggcatactctaatatgaaaagagggcagcatcagatgaatgggtgtaagttccagggataactttcactctcacctggacaattgcagtaaccttctgactggtctcctgctttcacttccctcctcttcaatccattctccacatggattgtggagccagagtgattctcttaaaatcacatgtcatcgcttacctcagcaaaagcargttcccgttacagtgggtaaaatcacattcattgcttaagacttcacggcattgtctgcttatacctgtatctttaaatgtattatcatttgcttgtctcttctttgtttaccaagctccaggcaccatggtgtctttttagctcctgcaacaagataatcttattcctgcatctgcaatgttccatctcata

SEQ ID NO: 772068 - DNA, 562 bp, Homo sapiens
atggaccccagcaagtccccctctgcaggtcaggtggggatccagggaagatgctggagaccatgttacagctccaatccaaagggactctgaaggtaaaataccctcctttcgggaaaactcagttttttttcttaacaccttcaattgattgaatgaagctaacccttagtacagaggttaatctsatgttctcaaaaatctattgatttaaatgctaatttcatctaaaaatgataccttcacagcaacatgtagactagtgtttgaccaaatacctgggcatcacgatcctagctaagtcaacacaaaaaattaaccatcacatccattataactagagtgatcacaccattcatcattctaatggaagttattaataattgttagaacaataagcacaaactggggctgtctctggcaaaccaggacataagaccatcttcattacagtctcatcacaatgtgttttgatagctccatgggagttcccatggatctctgtgtccctagaaaaagttggtgccctgcacactgttgtattcgagaaatgttgacggcc

SEQ ID NO: 772069 - DNA, 495 bp, Homo sapiens
aacttgactaagatggctgtggttagatattgatataatgtcctttaagtgcttagggcactgatcagcatgtaagacacagaatgtggctgtgcattcagtgacttagttgttaagatacatgtgcatttatatggtttggggtcatgcttagattgccccaraacactacagacctctctcatggcacaccacatggtgaactggacagccgcagtgttgcaccacctcatatggatcatgtcgggccaactccgtggctacatgtctgcctgttcactggccttaataagtctctgctggtaggggtgaggaggctgagcctcctggcagttgcaggaacctcagggacagataggcaggacctcagggcctttgaggatgtcagcagttgaaaaactagctagctatggatagacagtagagcttcgtgttcatggatatccattcaaatccaggcttggagcctctcaaatttagctctctcatcactaa

SEQ ID NO: 772070 - DNA, 631 bp, Homo sapiens
ttttagtaatgagacctttttgtttgacttctacacataaattggttttgagtcagccaaatatgctcgtaattaggagataaatagcagaggccagtaagtagcattttgtttcacttatttaaatagtaggcttacttggagtgaagccatattgatcctgaggaagctttattcaattagtacccatgtttgcattcagcactatgtagtcagtgaggactcgggtggacttgggagtgactctgggttcttcccaggggtgtytggtcaccacgtatcttgcacaagaaattgagacactctggcttctacaagatggcattcatgctggccctacaggcaccaactgcatccgtaccaggagggcccatccaatcctgctggaaatccagtaaaacccacttctgtgtgcccatcacagcctgcaagttctggggaagaaaagtcatggttctcagcttaacagaaaaaaggaagttaggtgttagtaagcacctgttgtatcgcaggtactattctaagttgttgcctgagagcaaatcatttaatcattactccctcttatagcaaggagaactagactcgaagtaaatgccttgtctaaaatcacacaaagtgacaggaaccc

SEQ ID NO: 772071 - DNA, 666 bp, Homo sapiens
gcatttattgctgtgaatttcagtctaatcacttccttaactgtacacaacatctttgatctatttgtgcttttattttctttaagttctattttttttctaatttatcttggaactttctctttgactcacagattattttaaagtggggtaggtaatatgcagatgtttgctgatttttcagtcatctttctattattgatgtctagtttaattccatgaaagtctgagaacattgtagagtttaattattttaaacttcataaagttttttaaatgattcaggttatggagtatcctggtaaatgtaccatgtggacttaaaaagaatgggtattctgctgtcattgagtgtagtgttctgtaaacatcaattatatgcaattggttgatagttttattcarttcttcaatgtccttgctgactatctgccttctagttctctatattactaagtgatatattgaaatctcctaatataatcacaaatgtttgtatttgtcctttaatttctgtcagttttgcatatttaagctctgttgttaaatacacatgcatgtaggattgttattgttatttcatatgcaaggactccctgtaattttctctgctctgaactatccttttctcatattagtatagccaatcaggcttttgtgggttaa

SEQ ID NO: 772072 - DNA, 588 bp, Homo sapiens
ttaaattctgcacgaggtacaattttccctgacgtttcaggtaaataaaccaaggttccaagattagagccaatttgttcaagtttatgaaacatttaaataaagggcagactcagtttggttccaaagctcatgacatttctgttataaagctggctctccagacatctgcaaaggtggaccagtgatgagaagtaacaaaatcaacgttagagcaagagcaattctacctttgtcacagggaccttagggctcagactgggctgcaacaaattcaagattttggctaaaagattcctaagtgctttgataccctctcctcctatatacattaataaaawtgatattggtcctaataattagttttcatagttatccttaatggttagacttaggattcaattgatccagagagacattaggtgcgagtagcgtgtcttcaatcaaaacctaaggtggaagtagagaacatacattgctaggatctccaattgccctaaattctaattttaccctttaggatactatttaaagttttaaattttattcaaaccaggtaaacattcttttacgttccaaagtaattac

SEQ ID NO: 772073 - DNA, 538 bp, Homo sapiens
ctgagagtataatcattttatgcagcagacagcatgggcagaggtgctccagtaggatgaacagtggtccactatgtgaacagaaagaaggctctggaggctgagatgagcctgacaacgtgctgacacccataactcacagaggacagagatagcttctaatactcatacctgwaaagcttctcatacttatgctcatctggacctacttcaagcatcctttctctggagagctgatttttttaaaggccaatcactccattcatggcctgcagctcacgcccaccatcttcaaatatttcaacatttttagttttttctgggttcagcctcattgatatccctttctcttttgcagaattaccattagtatataaacatactctaatatctcctatctaaaagaaagaagaaaaatttccattaatgcttttatttccttaacatctgccatacagttgctccccttccttccttccttccttcctctttctttcctttctttctctttctttcttttcttgcttccttgctttct

SEQ ID NO: 772074 - DNA, 585 bp, Homo sapiens
attttatgtatataacacattttctttactcacttatttgtcaacagacaataaagtttcacaacttcattgtaaataaatatgcaataaatatgagtgctaatatctcttcaagacactaatttcaattatttggacagatacccagaaatgaaactgttgtattatatagtagttctattttttagtttttccataaacctccatactgttttatgtagtagctgtactaatttacattcccgccaattgtgtrcaagtgtttccgattctctgtgtccttaccggcatctattgttttttgtctttttaataatagccattctttgataatagctatcctgacagttatgaggtgatacctcattgcagcttggatttgcattttcctgataattagtgatgttgagcatccttcatatatctgttgggcagttgtatatcttcttggggtaagttcatagcccattgtttaacctggttatacctgttactttactattgagttccaggagtttcttatatattttggataataaatcattatcggaaatatgatttgcaattttttcccattctgtgggt

SEQ ID NO: 772075 - DNA, 612 bp, Homo sapiens
ttatgccagtagcatacgctttggttactgttgctttgtagtttattttttaaaatcaggccatgtgttgtcttctactttggtatttctcaagattcattggctatttatgctctttaaggatgccatattaattgtaaaacttttttaaatgtctataaaacagtcactgggattctgatagcaattgcattaaatctgtagattgctttagtgaatatgaatatttttacaatattaagtcttttagttcataaaactttattcctaggcatttaattcttttgaagctattgtaataggactttttcttaatttccttttcagatagttcattgttagtgtataaagacacacaaaaagttgtttgttgattttgtattccgcaactttatcgaattcttcataagctctgacattttttgtggaatatatatatatatatagtatatatatattatatatatacacacayatatatatatatatactatatatacatataaaattatctgcaagtatggacaatttcacttcttccttttcaattagaatgtctcttaaattttttcttgtctaattgccctggcaaagacttccagtactatgttg

SEQ ID NO: 772076 - DNA, 588 bp, Homo sapiens
aaacaatttttaaaaggaaaaaaatagaccatcaaatagggaggtaaaattcagcatgctcctcttcattaggaaacagcaggtagccggcgaggcccaatcctgtacagagttggtatttgacagaactcagtttggatttttaattttcactttttggggtggctgcattagctcaggacccatcttacagacaggaaagtggactgacaagagtgaggagatgtgcaaaaagatggaaaaatcacagcctcttaaaattaagaagaaatgagaaaatagacgatatgctacttgtagtataattgaaaacctgccaatkttaattatgactggtgaaaaaaggacaatttttatctgtgttgtaaatcagcatagttgctgaatattgttcactgccgcccattctgtttagggcaatttatttctattgccctataggtaagtaagctaagcttactttcagcaactgcaaccagttgagtcctgatgtacacaattaaattaaaaaaaaaaacgtgagacacttgctgaagtgagaagacttggggaatttttttccaaagtgtaaattagctggagaacacg

SEQ ID NO: 772077 - DNA, 641 bp, Homo sapiens
ttagggaggactccctcctcactttctggaatagtttcagtaagaatggtaccagctctttgtacatctggtagatattacttcttttcttttactaattttgggtttggtttgctattactttttttagttctttgtgatgcatcattagattatttactcttttttgacgtaggtacttatagctataaatatccctcttagtactgatttggatgtaccacacaggatttggtatgttgtgtttccactgtmatttgtttcaggaaacttttctttttaatttcttcattcccactggtaattcggagacatattgtttaatttccatgtatgtatagtttccaaaattccctttgttactgatttctagttttattccactgtgatcaaagaagatgcttgatattatttcaattttttgaatatttaaagacttattttgtgatgtaacatatggtctatccttaagaatgatccatatactgaggaaaaaactgtgtattctgtagttgttcgatgaaatgttctgtaaatatctattagatccatttggtctgtagtcaaatgaagtttgatgtttctgtgttgattttatctctagaagattctgtacaatgctgaaagtggggtgtcaaagt

SEQ ID NO: 772078 - DNA, 667 bp, Homo sapiens
ttcattaatgtcctttttttcctacttgaagtactccttttagcatttcttgtaggacaggtctgggaataaagttcctcaacttttgtttgtctggtaaagtctttatttccccttcatgtttaaaagatatttttgccagatatgctactctaggatacaagtttttttctttagcacttaaatatgtcatgccactgtctcctggcctgtaagatyttcactgaagagtcttctgccagatgtattgaatatccattgtatgttatttgtttcttttctcttgctgcttttaagattttttctttatccttgacctttaattattaaatgacttgagctagtcttctttgggttaaatcagcttgatgttctataaccttcttgttcttcaatattggtatttttctctaggtttggaatgttttctgttattatctccctgaataagctttctacccctattttcttctctacttcttctttaaggccaatcactcttagatttgccatttttaggccattttctcgatcctgtaggcatacttcattgttttttattcttttgtcttttgtctcctgtgactgtgtatttttaaacagccagtcttcaaggtcactaattctttcttctgcttgatgagttctggtattaaaggaaggactc

SEQ ID NO: 772079 - DNA, 586 bp, Homo sapiens
agatgggtatgataatatgcttacatgagccaattttatagccccaatccggggtagccatcaattgcagtggggaaagtatattttatcactgggcaagactatggtcagtaaatttgtttgctcactttgattaagagaagaaatagaggtatccatgtgtgctgattcatgggcaatggctaayggttacgtctaatgaccagtgacttggaatgacaagatttgagaattagtgacaaggagttctggaaaaagagatgtatgtgtgaatctcacaaaattggccctaattggaagatagttgtttgtgtgaattcacaccaaagagaatccacactagggaaatcctcagtaatcaggttgtcaaaatgacaaaattgtggatgtagtcaacatctttccttagccgctaaaatagttgtttacggaactcaagagttgaagtggcagccagagcagcaggaatgaacaatatttatgggctaaacctcataggttctccctggccaataccaacccagacaactttgtgtgtgtgtgtctaccagccaatgatagagaacaacattgtacccccaataca

SEQ ID NO: 772080 - DNA, 544 bp, Homo sapiens
ataatccttacatttatattaaggaatagtgtgctggaatgaaatgatcaggcaggcaacaaaaccaaaatgcccacaatctcttctcacatacaatggactcttgctagtttctttatctgtaaaacaagggaggytggactagttcaagggtctatttataactcagatgctcacaagggtcaagcagataaactgacaattgggcagaatgtaaacattagagagagatgaagtctggcaaaatgaataggctatctcttgattaatgacattaaatatatattttttaactaagggccacagataatgcatctgtgggtgttccactcatgggcagtcagtttataaccccaggactgaacgatctaagaaaggtctcacctagctctactatcatgatagtatttgtttacaagagacagtgtatagaaattaaaaggaccttactgataagaatgaagatgtaactgtgaactatgttacagggaggtgcctgtaatacactacaactccaccaattactctagctttagctattcat

SEQ ID NO: 772081 - DNA, 584 bp, Homo sapiens
  misc_feature 109, 131: n = A,T,C or G
gaattcagctacattaaaattaaaagattctgttcattataagacaccgttagggtgaaatgataaaccacaagtggtagttgcaacatatataattcacaaaggactngctatccaggataagtgaacanaaataagattttatatatctataggagaattggaaattgaacagcagacctgaataggtatgtaacaaaagagaaartatgagtagccaataacaaaatacagaaattgagaacttgaaaattaaggccaaaatgaaatgccatttcacagtcattagattggagggaaaatctgtggagcatatatagactattggaactttgcaccctgttggttggggcctaaagtaatacagcaactttggaaacattatcttggaagtctggctgtgtgcatacctctgtgcccagcacactaggtgtgtgtttagaatacggttgattatgctgtaatgtctagagcatttgcattagaatcgtcttgagtgtttgttaaaatggagacctctgggtctctagaagctactgactcagaatctctggggaatggtgacctgccttttataataaaca

SEQ ID NO: 772082 - DNA, 534 bp, Homo sapiens
  misc_feature 96, 118: n = A,T,C or G
ttaaaattaaaagattctgttcattataagacaccgttagggtgaaatgataaaccacaagtggtagttgcaacatatataattcacaaaggactngctatccaggataagtgaacanaaataagattttatatatctataggagaattggaaattgaacagcagacctgaataggtatgtaacaaaagagaaaatatgagtagccaataacaaaatacagaaattgagaacttgaaaattaargccaaaatgaaatgccatttcacagtcattagattggagggaaaatctgtggagcatatatagactattggaactttgcaccctgttggttggggcctaaagtaatacagcaactttggaaacattatcttggaagtctggctgtgtgcatacctctgtgcccagcacactaggtgtgtgtttagaatacggttgattatgctgtaatgtctagagcatttgcattagaatcgtcttgagtgtttgttaaaatggagacctctgggtctctagaagctactgactcagaa

SEQ ID NO: 772083 - DNA, 579 bp, Homo sapiens
taattcttctctccccaccacacccctgctcatgaggcttttgggttcttgaccacattctggtagtgtccagagatggctccctccatgccacagatggatgtgggaagccccagatttactgactcatcccaggggttgtggccacrcctggctcaccaggctccagcgcccgggaggaaatgaggaatcgtggaggaactccgtggactcagtccctccgggtccaggcctttgtgaataactaagagagcccaatgctgctctcaggatacagcctcactgctctactggtgcttctcatagagaacattttgtgaaggtagaaaatgatgctgcacgcccacctcggccttcacagactcggctggtccaccccatcttctcctcttcgatcccatccttcctcactctgccctcttccttttttctgtgaccatcaacctccatctctgaccctccctctaggacacctggtgctccggggcctcttctcccccagggctccctcttgtctcatagacctttgcaaatttcaccacaaagtgcccaggcccacctcagcgctgccacttgtca

SEQ ID NO: 772084 - DNA, 621 bp, Homo sapiens
tgtgaataactaagagagcccaatgctgctctcaggatacagcctcactgctctactggtgcttctcatagagaacattttgtgaaggtagaaaatgatgctgcacgcccacctcggccttcacagactcggctggtccaccccatcttctcctcttcgatcccatccttcctcactctgccctcttccttttttctgtgaccatcaacctccatctctgaccctccctctaggacacctggtgctccggggcctcttctcccccagggctccctcttgtctcatagacctttgcaaatttcaccacaaagtgcccaggcccacctcagcgctgccacttgtcacatagtggatccgttggccctccatgctcagcagcacacgcacccagacgtccgcacgcacactcgctcaagcctgggcgtctgtccrtcacgcccctctgccctgggctgaggcagatactggattgactatttccgtgaatcacaaccacaccatcaaagcgggggcaggggcttctgcagctggagcagagaacagggccaagggtgcctctgtcgtttgtgggcacatgtgtgcactcacacgtgtgcatgtatgtgtgtggtgtgtggatac

SEQ ID NO: 772085 - DNA, 698 bp, Homo sapiens
tgggatggctgggtcaaatggtatttctagttctagatccctaaggaatcgccacactgacttccacaatggttgaagtagttcacagtcccaccaacagtgtaaaagtgttcctatttctccacatcctctccagcatctgttgtttcctgactttttaatgatcgccattctaactggtgtgaggtggtatctcattgtgtttttgatttgcatttctctgatggccagtgatgaagagcattttttcatgtgtcttttggccttataaatgtcttctttggagaagtatctcttcatatcctttgcccactttttgatggggttgtttttktcttgtaaatttgtttgagttcattgtagattctggatattagccctttgtcagatgagtagattgcaaacattttctcccattctgtaggttgcctgttcactttgatggtagtttcttttgctgtgcagaagctctttagtttaattagatcccatttgtcaattttggcttttgttgtcattgcttttggtgttttagacatgaagtccttgcccatgcctatgtcctgaatggtattgcctaggttttcttctagggtttttatggttttaggtctaacatttaagtttttaatccatcttgaattaatttttgtataaggtgtgaggaagggatccagtttcagctttctacatatggc

SEQ ID NO: 772086 - DNA, 473 bp, Homo sapiens
agagatgtgcaaggggacatttctttgtactccatgcatcaggacacaggttaatgtcgatgctagtatggaagtctttctcttccctttccaaactcccaatcccacctcaccttccccctctgacgcatccagtggtagccatgggacagggatgaaaaaataggagtaagaatcagaattcagggttggcctggggacataggctattttagtgtaaggtcaaagttatgttaggggtaaaatargaatttcacttgtggatctggcatggactattagctgtagattaatctttgaagtataggatacagtgggcagtggagttgatctcccattactttctgggtgatggagtagcaaggatatctacttgtgatcactcggtccaagaaactgtaatgggttttgctccccaagggcagctacagacacatcctttgggtcaaaataagaagcccattcctggggcc

SEQ ID NO: 772087 - DNA, 549 bp, Homo sapiens
tcacagctggggctttatttgatcttcataacaagtattgggatagacattattatcctcctttacagatgagaaaactgagccctatgaggttgagttattcacccttttccagactggtctgggtccttcctggatatgtaacaccctctctgaggctttgaaagctctgtattatggaatacatggtagcctctcagggaccttttgaagtctgcatgtttattgccataaatggctgacagaatgaaagagacactggtcgttgggaggcaatggctgttttctccatttttccaaaggggagactaaggcccaaggaacattgttccttccacaccatctgctggtaactgtcttctccagtctcaaaagctgccccatcaacctctgtttcttgaacggcttgwtctcatccagcactggctgggctttgggggaggaggtgcttctctgatttgcacttgcatgtgaatcatctggagagctggttaacaacgcagatttggatcctatagttctggggtgggacctgagattctgctccta

SEQ ID NO: 772088 - DNA, 464 bp, Homo sapiens
acttgtctcgccaatacaaacctgagatcacaaggggctctatgagtaagaccgtggctggctggcagcaaacaagggccatggtggagaaacactccaaggcattcacccgacagcctaggagatgggcacacagttatcctcatgaacaaaagcctgacagtttgagccaggtatagtggctcgtgcttgtaattctagtgctttgggacatgaaggtgggaagatcacttgaggccaggagttttcaagaccagcctgggtaacacagcaagacaccatctctaaaaaaataataataaacaaaaggaaaatytgacgactccattaatctcattactaacaagtacttacatttgttgctgtctgattacgtcaggcactgtgctgtgcctgctcttatgcatcctcccaacagtccaaagagtgctatctcttttcacatttatagtcaaagaaactga

SEQ ID NO: 772089 - DNA, 657 bp, Homo sapiens
caggtgactagaggaagagaagagctggagcccttctgcaagcccagacctcagggctccccaagtgagagctgtgagtagtggtaacaccctcttttgggctctgtggttcctagcatctccaagcttctgggccccaccacattcccctcatccagacactggtgcctgcagtggaagccacttgcagtacgtctgctccagtcacagcctcacacagagctggctgccctgccgcagcagccagcatgcttggctgtgtgcagcagccggaccccacgctcactcgctcacacacccctcgtcactrtgtgcctggcttgctcttggcaggcatgggatctgggccagtatcgcaagccgagtgcagcccgccaggtcaagtgaatggaacaagtccagcgggtgcgagcaaaactcaagcagaggcactgccagccacagagctttctggcttgtgaagtgacacccaaacgatcctgtgacactattatgatagttggaagtttaactttctcatacagctattatcccacagctcctcctctattcttccaacagagttatatcaaaattggcttaaattgatagtcagcatttacactgttatgactatgtaattattatgcaatattgagccacatggtatgccatgat

SEQ ID NO: 772090 - DNA, 620 bp, Homo sapiens
gaagtatgtattgttcagaacagtaaatatcatagtggttatgtagaagcaactgatacttaaaagttgtagtagttaatataaaacttttaatcatatccttattttactaaaaaaatcattacaaactataaaaactcaaacctgagaaaagcaggcccraaacgcttaaaacttactttgatggtgtcattatgaactatcttcctactgaagtcaaagtaaagtaaaagtgatttcaaggggacttcctgaacactaaacacaaagtagaaatctgtgagcttaattaatatcttcaagagtctctcatgggcagaagcatcctcctctcgagagatctaaaatgtacaaaagtgtaactgatgtgaacaaatgttatccctctctgtggtagttttgtaataatgccttacagacagcaggcactactcagtgtttaaagttcttctacatacactttatcatttaatccctactctgtgaaatagatgttactcttctcactttacagataagaaaactgagtctcagagaaattatggcttgtcctgggtaagtaacaaagcctgtgtaatattctaaagcaaaagaatgaaactgtaatgatgaaactttct

SEQ ID NO: 772091 - DNA, 613 bp, Homo sapiens
tgtacatcctatggtgccaccatgaaaatcaagacatgctgtcacttaatcgctctcatttcactagaggacacatgagctcatgaataacggttgaccccttagccaaagatcctctattgtaccctctggagaaaataaatctctagttaccttaaaagctgatctagaggtaaaatgtctgcaacattcagcaatgaatttagattwtctttgaaaaaaagttcattttcaagttgttttttttgtttcgtttttttttttttttttttgccaaaaaatttctttttttttctgttacttagtagcatgaagtacaatgtttggtttgcaatttctgttctttgtaggaagaaaaactttagtggaaacaaccagtacttaaagaccattttatgaggctgtcatttacgtattatctcttttgctgtttttgttaaaatgatataaggtgggctttatatgctttctgtatatcctttggaatgtgtatttaaattaaaaacttaaaattaaaatattcatcctagactcaggttaagttccaccaacagtacacttaaaataggatgagcccaacctaagcgtacaacctacctgcttcaagtgtgta

SEQ ID NO: 772092 - DNA, 613 bp, Homo sapiens
tgtacatcctatggtgccaccatgaaaatcaagacatgctgtcacttaatcgctctcatttcactagaggacacatgagctcatgaataacggttgaccccttagccaaagatcctctattgtaccctctggagaaaataaatctctagttaccttaaaagctgatctagaggtaaaatgtctgcaacattcagcaatgaatttagattatctttgaaaaaaagttcattttcaagttgttttttttgtttcgtttttttttttttttttttgccaaaaaatttctttttttttctgttacttagtagcrtgaagtacaatgtttggtttgcaatttctgttctttgtaggaagaaaaactttagtggaaacaaccagtacttaaagaccattttatgaggctgtcatttacgtattatctcttttgctgtttttgttaaaatgatataaggtgggctttatatgctttctgtatatcctttggaatgtgtatttaaattaaaaacttaaaattaaaatattcatcctagactcaggttaagttccaccaacagtacacttaaaataggatgagcccaacctaagcgtacaacctacctgcttcaagtgtgta

SEQ ID NO: 772093 - DNA, 613 bp, Homo sapiens
tgtacatcctatggtgccaccatgaaaatcaagacatgctgtcacttaatcgctctcatttcactagaggacacatgagctcatgaataacggttgaccccttagccaaagatcctctattgtaccctctggagaaaataaatctctagttaccttaaaagctgatctagaggtaaaatgtctgcaacattcagcaatgaatttagattatctttgaaaaaaagttcattttcaagttgttttttttgtttcgtttttttttttttttttttgccaaaaaatttctttttttttctgttacttagtagcatgaagtacaatgtttggtttgcaatttctgttctttgtaggaagaaaaactttagtggaaacaaccagtacttaaagaccattttatgaggctgtcatttacrtattatctcttttgctgtttttgttaaaatgatataaggtgggctttatatgctttctgtatatcctttggaatgtgtatttaaattaaaaacttaaaattaaaatattcatcctagactcaggttaagttccaccaacagtacacttaaaataggatgagcccaacctaagcgtacaacctacctgcttcaagtgtgta

SEQ ID NO: 772094 - DNA, 592 bp, Homo sapiens
caataagtaaacaacccaattaaagagtatacaaaatctattaatttaaattaaaaaaatctgagcagacatgtcaccaaaggtaatatagagatgacaaataagtttgatgaaaatgttctcaacatcgctttacattaggagattgtaaagtaaaatgtttagatgttggtcaaacaatcttttgaccattatctccccattccttcctccccactaactactctagcctctggtaaccaccattctattttctaatttgaggagatcaacttttttagacttcatttatgagcgagatcatgttgcatttgtctttttgtgccaggcttatttcacctatcacaaggtcctccaggtacatccatgttgttgcaagtgacaggattttgttctctttcatcaataaayagtattctgttgtatatactgcagcactgttcacaatattcaatggaaagcataggtttttgttgttgtatacaacctgtatctaataatgtaattgcaatatctggaattattggaggtgtgtttctgttttctactgtatttgctgatcctggcttgtgtcttctttatggtggttgtt

SEQ ID NO: 772095 - DNA, 592 bp, Homo sapiens
caataagtaaacaacccaattaaagagtatacaaaatctattaatttaaattaaaaaaatctgagcagacatgtcaccaaaggtaatatagagatgacaaataagtttgatgaaaatgttctcaacatcgctttacattaggagattgtaaagtaaaatgtttagatgttggtcaaacaatcttttgaccattatctccccattccttcctccccactaactactctagcctctggtaaccaccattctattttctaatttgaggagatcaacttttttagacttcatttatgagcgagatcatgttgcatttgtctttttgtgccaggcttatttcacctatcacaaggtcctccaggtacatccatgttgttgcaagtgacaggattttgttctctttcatcaataaatagtattctgttgtatatactgcagcactrttcacaatattcaatggaaagcataggtttttgttgttgtatacaacctgtatctaataatgtaattgcaatatctggaattattggaggtgtgtttctgttttctactgtatttgctgatcctggcttgtgtcttctttatggtggttgtt

SEQ ID NO: 772096 - DNA, 545 bp, Homo sapiens
aatttgtaatttcaaaaaaatcaaactgataatttgatcattgaatataggataatcatattataatattatgacagcttagctgaaaaatcacctttttaatggatatacagtacagcaatatttattagatccaatgacttataatacagacagctgtgaatgcagagtttcttattaatcscctgggatataatggaacatttggccctcactgaaacatcttgaagaggtaatttactgttctcactgaagctgtaaagaaaaggtgcaaaatccaattccgtttaagcagaagaatcaagagataatacaactaatgaaaagtgcactcttcaataatctaaatgtgggttaattcccacccagcaggaatcattgtaatggaaatattcaagactatttgcagagaaaagcttaaatggtcttagcacagttttttaaaacttttcaaaatgaggtatcaaaatgtatacaaacattcgaaaaccgaacttttaaagcctcaaaatatttttgtaaaagtacttaatgatcatatttct

SEQ ID NO: 772097 - DNA, 644 bp, Homo sapiens
tcactcactctctctctctgtgtgtatgtgcgtgtgtttatagagagaaagagtgcaaaattaaatatagttccttgttaattaaagtcatgaaaatatattgctctaattttaaagttatttaaggtattttttaattcatacattagccacgttattaatgagcaattacacatgctatattatagactatgtttttaacaaccacaaataagtttatagtaaggttacaatagtcacatactatgacacaaacatagccgtttagctgcacctgaagagcaatttttctagaattgtagatttcatgattcttttttccatgaaaagaatttactatcgcattgatttaatgattctttttccataaggattatttactgaaagctcaatctataaagtaatctcacagtaactaaacgaggacatatgtgacgctggaggaccaattcttgtttctcttaaacctggctgtaccactaactgattgcatakatttaagcaagttaaataacctctcctgtctcattttccttctctgtattacggaaatgatactagtgcataatttatatttttgttatgaagaataccagcaataatatatgtaaatggttcagtgactgacaaagagttgaccctca

SEQ ID NO: 772098 - DNA, 544 bp, Homo sapiens
aagggaaaagtgatcaagatgtctgcaaaaaagattatgacacaaagctggagagttgatatacccctgatgtaggacagtgaaggtatgttgctggtcttgccagctgaatgcacattgcttctggcgggccttatggacagaaatggagaagaaggcatacgtcaaatcaatggcttcayaccaggtaccaggagatgtgtaaattaacagctgcaattggagtcaccacttggttaagtttgtgataatccactgtcattcttcaagatccatctgtcttcttcacaggccaaataggagagttgaacagggatgtggtgggaatcaccacccctgcatctttcaagtcctagatagtggcactaatctctgcaatcccaccaggaatgagacattgtttttgatttactatttctctaggtagaggcatctctaatggcttccatgtggcctttccacctgatagctcttaccctaccagtcagggagccaatgtggggatcctgccagctgctaagcatgtctatgccaattatgcact

SEQ ID NO: 772099 - DNA, 581 bp, Homo sapiens
agcccaggaattcaagaccagcctgggcaacagacttcatctctacaaaacatcttaaaaaattaactgggtgtggtggtatatacctgtggcagggctgcagtgagctgtgattatgccactgaacttcagcctgagtgacatagascctgtctcaaaataaagaaaaactaaacattgtttgggacagtccactttgaggaggtaatgtttaaagagaagtaaactgagagaattatccatctaaatgactatgaaaagagatttcaggatagaagatatagtgtgtgcaaatgaaataaggtaagaacagtctctcttgagaggcaacaaaaaggctagtgtggctggaatttaagagatagccattgccaagtcactaatagtcttataggccatagcaattatttttattataatttcaacatgttgaaattccatgggatggttttaaatgagagagtgaaataatctatattctaaaacgatcacttgaggtcatacttgacaatggaatgaaagtaaacgcatggtccagccaagaaatgatggcagttaagaccatggtgatagcatgaaga

SEQ ID NO: 772100 - DNA, 581 bp, Homo sapiens
agcccaggaattcaagaccagcctgggcaacagacttcatctctacaaaacatcttaaaaaattaactgggtgtggtggtatatacctgtggcagggctgcagtgagctgtgattatgccactgaacttcagcctgagtgacatagaccctgtctcaaaataaagaaaaactaaacattgtttgggacagtccactttgaggaggtaatgtttaaagagaagtaaactgagagaattatccatctaaatgactatgaaaagagatttcaggatagaagatatagtgtgtgcaaaygaaataaggtaagaacagtctctcttgagaggcaacaaaaaggctagtgtggctggaatttaagagatagccattgccaagtcactaatagtcttataggccatagcaattatttttattataatttcaacatgttgaaattccatgggatggttttaaatgagagagtgaaataatctatattctaaaacgatcacttgaggtcatacttgacaatggaatgaaagtaaacgcatggtccagccaagaaatgatggcagttaagaccatggtgatagcatgaaga

SEQ ID NO: 772101 - DNA, 581 bp, Homo sapiens
agcccaggaattcaagaccagcctgggcaacagacttcatctctacaaaacatcttaaaaaattaactgggtgtggtggtatatacctgtggcagggctgcagtgagctgtgattatgccactgaacttcagcctgagtgacatagaccctgtctcaaaataaagaaaaactaaacattgtttgggacagtccactttgaggaggtaatgtttaaagagaagtaaactgagagaattatccatctaaatgactatgaaaagagatttcaggatagaagatatagtgtgtgcaaatgaaataaggtaagaacagtctctcttgagaggcaacaaaaaggctagtgtggctggaatttaagagatagccattgccaagtcactmatagtcttataggccatagcaattatttttattataatttcaacatgttgaaattccatgggatggttttaaatgagagagtgaaataatctatattctaaaacgatcacttgaggtcatacttgacaatggaatgaaagtaaacgcatggtccagccaagaaatgatggcagttaagaccatggtgatagcatgaaga

SEQ ID NO: 772102 - DNA, 482 bp, Homo sapiens
aaagcaaagctgtggtcacgtcccaatagctgagcctgggtgctggcatgacccggctgggtgtgtgcatgcttggggtggtgctgacacaccaacccccagctgcctcagtctsctctggaaactgcttctgagactgaaactttggttactgacgagcacgggagggaggccagggggctgagggtggctcggctcaggcctgtgggtgccccttggcatggacagcctgaatgccatggacagcgtgttgatggcagcaggaggcagacaggttctaggcaggaaagggtgggtccctgttgaaaccccaccttcaagccagggacagcctgaagcctggggaactttaccaagttccaggtgaagtctgacacccagagtgaccacttctttgatgccttttagccaatcaagtgatgctttttccatgtcctcccatgaaccaattagcacatacctcctcctgcccgtggaccaat

SEQ ID NO: 772103 - DNA, 605 bp, Homo sapiens
aagaaaaaaccacatccccacaatctaaagagacaggcaaatccagaaagtcacagccagcatttgcttatctggggtggaagccatgggaatagtacactagtaggaacacctgacgataattttgatgaattgctagaagctgactataatgaaaatgagaaagagaaactcctgaaagaatgtagttgtaaggctgttcccacacttttgagttctkccttcaggaacctgattaggttttctcttcatgggaaaatattttgccagattattattattattgttattatttgagatggagtctcgctctgtcaccaggctggagtgcagtggtgcaatctcagctcactacaacctccacctcccgggttcaatgattcacctgcctcagcctccaagtagctgggactacaggcgtgcaccaccacggccagataatttttatatttttagtagagacagggtttctccatgttggacaggatcgtctggatctcttgacctcgtgatctgcccacctcggcctcccaaagtgctaggattacaggcatgagccaccatgcctggccttaccagattattattccatctgaggggaacta

SEQ ID NO: 772104 - DNA, 605 bp, Homo sapiens
aagaaaaaaccacatccccacaatctaaagagacaggcaaatccagaaagtcacagccagcatttgcttatctggggtggaagccatgggaatagtacactagtaggaacacctgacgataattttgatgaattgctagaagctgactataatgaaaatgagaaagagaaactcctgaaagaatgtagttgtaaggctgttcccacacttttgagttctgccttcaggaacctgattaggttttctcttcatgggaaaatattttgccagattattattattattgttattatttgagatggagtctcgctctgtcaccaggctggagtgcagtggtgcaatctcagctcactacaacctccacctcccrggttcaatgattcacctgcctcagcctccaagtagctgggactacaggcgtgcaccaccacggccagataatttttatatttttagtagagacagggtttctccatgttggacaggatcgtctggatctcttgacctcgtgatctgcccacctcggcctcccaaagtgctaggattacaggcatgagccaccatgcctggccttaccagattattattccatctgaggggaacta

SEQ ID NO: 772105 - DNA, 597 bp, Homo sapiens
ataatggggattgcttgattgaatgataattccattttaagttatttgagaaattgcaaaactgctttctacattagctgaacaaatttatattcctaacagcagtgtgtaagtgttcccttttctccacaactttgccaacatctgttattttttgactttttaataataacctttctgactggtatgagatggtaccccattgtggttttgatttgcatttctataatgactagtgatgttgagcttttttttgtatgcttgttggccaagtgtatgtcttttttttttttttttttgagatggagttttactctttttgcccacagtggagtgcaatggcacgatctcgacacactgaaacctctgtctcccttgttcaagcaattctcctgtctcagcctcttgagtagctgggattacaggcyaattcttggtatttttagtagagatggggcctcaccatgttggccaggctggtctcgaactcctgacttcaggtgatccattcgtcccggtctcccaaaatgctgggattacaggtgtgagccaccgcactagatgtgtatgtctttttttgagaagtatctcttcatg

SEQ ID NO: 772106 - DNA, 604 bp, Homo sapiens
tagaacttctatagaactatagaaatcatttgaatacaaatcttgaagacagccactgaggtaagacagactccaaatgagtagagtcagtgttccaaagtggtgaagttaaggtttcatttatacaggaagagacagaaaagtttaacagggttgcaccattctccatatgaagatgctacatatgttacagccgtttgattggttatagtttgctgcattttaagaaagattgctttaacaatccataaggaggggtaatggacttgagggaggtcttatctctggcatcttttcagtctttcctattcatttacagtayaagaacaaggaagggaattcatctataattagagaagcagaagccacagctgcatgctacattactcaggccacatagtcacatttctctcaagattcaaataatttaatgtcctaacagttttaagtttaaattatttaattttgcaagttctaactttagtcattgcttgattcaagggcttcaaaaatgtcagtggggcaaattctgtgttcttctatttcctctccatacttcttgtgttcacattccttcaattggttttaatctcgagccatcttt

SEQ ID NO: 772107 - DNA, 633 bp, Homo sapiens
taatgctctcccttcccttgcccccgacccccggacaggtcccattgtgtgttgttctcctccctgtgtccatgtgttctcattgttcaactcccacttatgagtgagaacatatggtgtttggttttctgttccygtgttactttgctgagaatgatggtttccagcttcatgcatgtccctgtaaaggacatgaactcatccttttttatggctgcaaagtattccatggtgtgtatgtgccacattttctttatccagtctaacattgatgtgcatttgggttggttccaagtctttgctattatgaacagtgctgcaataagcatacatgcgcatgtgtctttatagtagaatgatttataatcctttgggtaaatacccagtaatgggatcattgggtcaaatggtatttctgattctacttccttgaggaatcaccacactgtcttccacaatggttgaactaatttacactcccaccaacagtgtaaaagcattcctatttctccacagcctcgtgagaaatgagagaatcacttgagctcaggaattcgagaccagcctggtcaacatagtgagaccccatctctatttttaaaaaaaaaaaaacgggcagtctggatcgggacg

SEQ ID NO: 772108 - DNA, 539 bp, Homo sapiens
cgagcaaggaagtttctttttatttcttatttgttgatagttttcttctaaaatcacggatggatcttggattttgccaagtgatgttcatgcatttattaagaggattgtgtgagtgcatttttaattctaattagtaaggtgtcatacgaattaatatttggatgttaaaccaatcttgcatttgggtttaaataccaattggtcatggtacattctctttttttatatgttcttggatttgatttactaatattttgttgaagattttgtatgtatagtcatgaagaatattggtctgtagtgttcttgtgatatttttgtctggctttgctatcagagtawtattgacttcatacaatatgttggaaagcttctcctctatcttgagagagtttatgagggattgatatgctttcttctttaaatgtctggtagaattcaccggtgaggttatctatgcttgagctttatttttgtgggaaggttttaaactacaaattcaatttcttttttactgtgggtatattcatattttc

SEQ ID NO: 772109 - DNA, 632 bp, Homo sapiens
tttttgtctggctttgctatcagagtattattgacttcatacaatatgttggaaagcttctcctctatcttgagagagtttatgagggattgatatgctttcttctttaaatgtctggtagaattcaccggtgaggttatctatgcttgagctttatttttgtgggaaggttttaaactacaaattcaatttcttttttactgtgggtatattcatattttctattgagtcaattttagtgatatttttcttttttcaaaaattttttttcctctatttcttttcttttctttcctttttctttttctttttcttatttttattttgagacagcgtgttactctgtctcctagtctggagtacagtggtgsaatctcagctcactgcaacctccacctcccaggctcaagcaattctcatgcctcagcctcccgagtagctgggattacaggcatgcaccaccacacccagctaatttttgtatttttagtggagacagggtttcaccatgttgcccagcctggtcttgaactcctggcctcaaatgacctgcccaccttgaattcccaaagtgctgggattacaggtgttagccactgcacctggtctaagttaatttattgccataaaat

SEQ ID NO: 772110 - DNA, 514 bp, Homo sapiens
tgactttgtaattttgaaattactttttttttttttttttttgggggaggtgccagagaatgaacttgggaccgcatactgaaattactttcttaagagttcattttcctcattatagctgactataaatttgtcattttatgaccatctgtggaagcccatgtttttgattcagtaatacttctaccttcaagagaacagacacgtacaacataacgcatttacactattagcaaatatctaagtaggaatagtctggacaacatacattgtgcaaaaaatgtaaaatgttaacatgtaacttattctcagarctgtgatttgattacatctaagtagatagggcagtaagagaattttgaattatgtttaatgtttgtggaattttaaatggctgaaaaaagaaataatttattttctcttggaatctttttgtaaagaccatttcaagaagaaaaaatgtatacgtacaggattagggtgattagagtgatcctgtttgagttgaatatat

SEQ ID NO: 772111 - DNA, 514 bp, Homo sapiens
tgactttgtaattttgaaattactttttttttttttttttttgggggaggtgccagagaatgaacttgggaccgcatactgaaattactttcttaagagttcattttcctcattatagctgactataaatttgtcattttatgaccatctgtggaagcccatgtttttgattcagtaatacttctaccttcaagagaacagacacgtacaacataacgcatttacactattagcaaatatctaagtaggaatagtctggacaacatacattgtgcaaaaaatgtaaaatgttaacatgtaacttattctcagagctgtgatttgattacatctaagtagatakggcagtaagagaattttgaattatgtttaatgtttgtggaattttaaatggctgaaaaaagaaataatttattttctcttggaatctttttgtaaagaccatttcaagaagaaaaaatgtatacgtacaggattagggtgattagagtgatcctgtttgagttgaatatat

SEQ ID NO: 772112 - DNA, 535 bp, Homo sapiens
agattctcataggagcatgaatcctattgtgaactgtccatgcaaaggatctaagttgtgtgctccttatgagaatctaataatgcctgatgatctgaggtgcaagagtttcatcctgaaaccatcccccgaccatgtctgtggaaaatctgtcttccacaaaaccagtccctggtgccaaaaaacgttggggaccactgctstagatgacctggccttgtcctacttctccaattaacatgtctctcctctctccccactgctcaccatgctcaaacattccatgctccttctcatcctgtgcaccagctattccccttgtctagaatgacccctgcccccaccctttggtcatcctatgcctagtccttattcaaatctcaacacaagccttcccttcccaaccctcccctctgttccttggtcaccctgaccattactgtgatttattttcttatattaggtatatttttagtgagtataagctccatgaaggtaagggcaatgcctatctggacggtcactgtatcccccc

SEQ ID NO: 772113 - DNA, 535 bp, Homo sapiens
agattctcataggagcatgaatcctattgtgaactgtccatgcaaaggatctaagttgtgtgctccttatgagaatctaataatgcctgatgatctgaggtgcaagagtttcatcctgaaaccatcccccgaccatgtctgtggaaaatctgtcttccacaaaaccagtccctggtgccaaaaaacgttggggaccactgctctagatgacctggccttgtcctacttctccaattaacrtgtctctcctctctccccactgctcaccatgctcaaacattccatgctccttctcatcctgtgcaccagctattccccttgtctagaatgacccctgcccccaccctttggtcatcctatgcctagtccttattcaaatctcaacacaagccttcccttcccaaccctcccctctgttccttggtcaccctgaccattactgtgatttattttcttatattaggtatatttttagtgagtataagctccatgaaggtaagggcaatgcctatctggacggtcactgtatcccccc

SEQ ID NO: 772114 - DNA, 573 bp, Homo sapiens
actttacactggaaaaacctgataagcattacctcaagtcaggtgatcatggctaatatcgatagtgatgtcattttcatagtatgtacccttgatacgatgtgatgagaatggcactttacccgtgtgatcttcctccataaaacacattaccttgatctaacaatcaagaaaacaacagacaaatccctattaatgttcattctacaaaacacctgactagtaatcttcacaactgtcaaggtcatcaaaaatgagaaagcctcagaaactgtcacaaccaataagaatctaaaaagataggaygactaaatgtaatatggtatcccagataggatcccagaactgagaaaaaagacattagggagaaattgagaaaacatgaataaaatatagattttagttaataataatgtatcaacattggttcactaatggggacaaatgtaccatgctaatgtaacatgttaataatagagaaaactggatgtgggatatacaggaattctgtactattttctcaatgtttgtgtaaatctaaaactggtccagaattaaaagtctaattatttt

SEQ ID NO: 772115 - DNA, 526 bp, Homo sapiens
aggccacatgtggcccaggatggctttgaatgcagcccaacacaaattcataaactttctaaaaatgttatgagatttttttttttttacattttttttttagctcatcagctattgttagtattagtgtacttcatgcgtggcccaagataattcttcttcttccaatgtgactcagggaagtcaaaagattggacaaccctgcactacagtgtaacactatggtctcattttgtgtgtgtgcaagtcactatttaaacaacagtcatatgaagactgaatttttaaaataattctatcaaaaacagtgtccattatgtggttctgtgctccttatagaaagacctacrtgagagctctttcatgagtacaattctagagagattgcatcctttctaacaaacttgcacacatccttttagaagctaatgacagctacatgaccctacacatttcccatcagcgctaagaagcatggagttaagttgcatgcattattaattaatagctttttatttaaagctca

SEQ ID NO: 772116 - DNA, 544 bp, Homo sapiens
ggtaagcaacaaataaccatttactataagtatggaccaaatattgcatgggacatacttatactaaaatagtagccatcatttatgtgaagtgcaaatttaactgggtgttctgtatttgtatttgctaaatctggcaaccctaatcacaacaaaaagttcacatgtataaaaaaagtgaraaatcaaagtacgggaatagaagcacacggttttgagacaggaagagaactatctcaagaaacaactgaaagtgtggaagtagcttcctcttggtatcaggatttgagggtgggcaaagttccaggcaaggaactgctgtctttcttaagcctcagcaataaagtttggatattttcatctgtgtacttccataacttagacaaaaattaaaatttagtttaaaaaagggaaatagccttcaatggttttcataacatcttttgcccttccagaaaaaaactggcatgccaagttgccaagtttcaagggactataaggaaaacagcaaaaaataaaaataaaaagagagacagtaaaagtt

SEQ ID NO: 772117 - DNA, 567 bp, Homo sapiens
gaagcaggagatcctgtcttgtgctaacatttccagcttcttcaccaagacttcctctggcttctctttgaaaggttttgctggtgcaggtgacaggggcagcatttgccactaaaatgctggtgtccttcatgcctaaaggcagcctgtaccaaatgacataaacaatgcaatcttaaattactcattttggaaatgcatatgtaaacaaacacagatttttaggcctcatttgggagacaagaacattgggattcatgttccctttgattttatcagtaatttatcagattgagaaaattaatgggatttattcagcaatggatgaggaaagatrcagctggcagttctttattctggcctatgctaaataaatcatttcacatctttctgcctgatttttttttatttctggaaagctagccttccttagggcataattcacaagacttatttttaattactttgcagatacgatacagtaggattaagaaaaccctggtttaggaataagtgaaacaaatactgttaaacttttggactagtcacgcttgtggtccttagtaa

SEQ ID NO: 772118 - DNA, 656 bp, Homo sapiens
ccaggccggtgtgttttcaaaacactttctcctgtgtataatgaaaccatgacaacggttcgttgtggaaacttcatagtggaggggagggaggaatgtgactgtggctccttcaagcagtgttatgccagttattgctgccaaagtgactgtcacttaacaccggggagcacctgtcatataggagagtgctgtacaaacttcagcttctccccaccagggactctctgcagacctatccaaaatatatgtgaccttccagagtactgtcacgggaccaccgtgacatgcccagcaaacttttatatgcaagatggaaccctgtgcatggaagaaggctactgttatcatgggaactgcactgaccgcaatgtgctctgcaaggcgatgtttggtgtcagtgctgaggatgctcctraggtctgctatgacataaatcttgaaagctaccgatttggacattgtattagacaacaaacatatctcagctaccaggcttgtacaggaatagataagttttgtggaggactgcagtgtaccaatgtgacccatcttccccagctgcaggaacatgtttcattccatcactcagtgagaggagggtttcagtgttttagactggatgaacaccatgcaacagacatgactgatgttgg

SEQ ID NO: 772119 - DNA, 599 bp, Homo sapiens
gtattaaactcacacaactgcaaggtcccacagtaggccacctgcaagctgaggagcaaggaagccagtccgaatcccaaagctgaagaatttgaagtctgatgttcgagggcaggaagcatccagcacaggagaaagatgtaggctgggaggctaagccagtctagtcttttcatgttttctgcctgctttataccctggccacactggcagctgattagatggtgcccaccaagattaagggtaggtctgcctttcccagytcactggctcaaatgttaatctcctttggcaacaccctcacagacacacccaggatcaatactttgcatgcttcaatccaatcaagttgacactctgtattaaccatcacaagtccaacccttgtcaacttgaacccatacgaatctcctgagatcatacataatcttcaaataaagacaataataaggtcataattacacctaatgtaatacaactatcttttgtacaaccagaaatgcaccaatccccaacccaagtgctattatgtaaagttaagaacacttaaatgctgatatgaagtcaataaattttatgtcacatgataaaggaaaaaa

SEQ ID NO: 772120 - DNA, 599 bp, Homo sapiens
gtattaaactcacacaactgcaaggtcccacagtaggccacctgcaagctgaggagcaaggaagccagtccgaatcccaaagctgaagaatttgaagtctgatgttcgagggcaggaagcatccagcacaggagaaagatgtaggctgggaggctaagccagtctagtcttttcatgttttctgcctgctttataccctggccacactggcagctgattagatggtgcccaccaagattaagggtaggtctgcctttcccagctcactggctcaaatgttaatctcctttggcaacaccctcacagacacacccaggatcaatactttgcatgcttcaatccaatcaagttgacactcwgtattaaccatcacaagtccaacccttgtcaacttgaacccatacgaatctcctgagatcatacataatcttcaaataaagacaataataaggtcataattacacctaatgtaatacaactatcttttgtacaaccagaaatgcaccaatccccaacccaagtgctattatgtaaagttaagaacacttaaatgctgatatgaagtcaataaattttatgtcacatgataaaggaaaaaa

SEQ ID NO: 772121 - DNA, 576 bp, Homo sapiens
atttatataaactggttattcccccatgtttttttctgtcatacttaattacaataagaaaaatgttatgtttttatgaagcaaaattgtgtacctaatagctttatttggaggggacatgtagctttagaatgaaagyttttggggggataactgtttaatataccatacaattcacccatttaaagtgtccaattcagtggctgtttttagtatattcccagagttgtgcaaccattaccacagtccgttttagaacaatttcatcagttgaggaaaaaaacccctgtatcctttagctatttctgcctctaacaccctaccccacctccccgccactttcttgtctctcttcccccggcttctccagccctaggcaaccttgaatctactttctgtctctgcagatttgtctctgctggatcttttctgtaaatggaattttagaatatgtgggcttttgtgattagcttctttcacttagcataacgtttccaaggttcatccatgtgaaatcaaagctttttaaaagaaatttgatacttgggcgattatattagtgtatgacaaaaataa

SEQ ID NO: 772122 - DNA, 576 bp, Homo sapiens
atttatataaactggttattcccccatgtttttttctgtcatacttaattacaataagaaaaatgttatgtttttatgaagcaaaattgtgtacctaatagctttatttggaggggacatgtagctttagaatgaaagtttttggggggataactgtttaatataccatacaattcacccatttaaagtgtccaattcagtggctgtttttagtatattcccagagttgtgcaaccattaccacagtccgttttagaacaatttcatcarttgaggaaaaaaacccctgtatcctttagctatttctgcctctaacaccctaccccacctccccgccactttcttgtctctcttcccccggcttctccagccctaggcaaccttgaatctactttctgtctctgcagatttgtctctgctggatcttttctgtaaatggaattttagaatatgtgggcttttgtgattagcttctttcacttagcataacgtttccaaggttcatccatgtgaaatcaaagctttttaaaagaaatttgatacttgggcgattatattagtgtatgacaaaaataa

SEQ ID NO: 772123 - DNA, 570 bp, Homo sapiens
gatggttggatggatggatggatggatgaatgggtatgtgaagggatggatgtattagagtgggtagttaggcaggcatgagctgatagtcaagtgattgttaaactgcctctctaaaataataattggtctcggctggacatggtggctyacgcctgtaataccaacactttgggaggctgaggcgggtggatcacaaggtcaagagatcgaaaccatcctggccaacatggcgaaaccctgtctttactaaaaatacaaaaattagctgggcgtggtggcgtgcatctatagttccagctactcgggaggctgaggcaggagaattgcttgaacctgggaggcagaggctgcagtgagctgagattgcgccaccacactccagcctggtggtagagcaaagccctgtctcaaataataataataataataaataataataattgatctcagcgggcaccaagaaaaggcagtctcccaatagatagaaaacacccgaaactggtcatcagcagcttcccgataagatctcaggagttggatgagtgggctcaagcatatgcactaaga

SEQ ID NO: 772124 - DNA, 519 bp, Homo sapiens
tagaaaacacccgaaactggtcatcagcagcttcccgataagatctcaggagttggatgagtgggctcaagcatatgcactaagaggcaaagtggcagagtttaactggcacataatcttcctctaggaacactctaaaagtaagagaaaaacacctcaaatgagcatgtgcacatttcattaaacccattgtgtacgcggcccctccgaagcactggcaggccactgtacatgtggacatcccaccccaarggaaaaatcaagggagaagaaatacaaatcccagaaccatgccaatgtataaaaccccaagtcaagggccaggcagagcacttagatctctcaagtcacccacttagccatcttccaagtgtactttacttcctttcgttcccactctaaaactttaataaacatttactcctgctctaaaacttgcttgggtctctcactcttctgcatgccccttggccaaattctttcctccaaggaggcgagaatcaagttgctgcagacctg

SEQ ID NO: 772125 - DNA, 576 bp, Homo sapiens
tcacagtaatagaaaatacaagcttaaaatttatgtgaaattacaacagactttgaatagctaaagcaatcttgaggaagaagaaagctaaggatattatagtttctgatcttttttttttttttttttgagatggagtctcactctgtcacccaggttggagtgcaatggtacgatctcagctcactgcaacctctgcctcccaggttcaagtgattttcctacatcagtctcctgagtagctgggawtacaggtgctcgccaccatgcccggctaatttttatatttttagtagagacgagatttcaccatgttggtcaggctggtctctaactcctgacctcatgatccacccacctcggcctcccaaagtactgggattacaggtgtgtgagccaccgcacccgcccctatagtttctgattttaaattatattcaatactatagtaataaaaacaagacagcatgtgcataaaaatgaacacgaaaacctacagaacaaagtagagagcctagaaaaaaaaacctatgcctataaaatcaattaatcttgaacaaggatattgaaaatgca

SEQ ID NO: 772126 - DNA, 526 bp, Homo sapiens
tagattaatagagttagctctttttgcttaattgaacccttcaccattatgtaatgcccttgtcttttctgatctttttggtttaaagtctgttttgtcagaaactaggattgcaaccccttctttgatttctatttgcttggtaaattttcctccttccctttattttgagcctatgtgtgtatttgcacgtcagatggctcttttcaagrcagcatagtgatgggtcttggccttttatccagcttgcctttctgtgtcttttaattgaggcattaagcccatttacatttaaagttagtattgttatgtgtgaatttgatcctgtcatcatgatgctagctggtcattttgcagaattgtgcatgtggttgcttcatagtgtccctggtctgtgtatttcagtgtgtttttgtagtggctggtaacaattttttctttcaattttcagtgcttctttcaggagctcttacaaggcaggcctgagggtgacaaattccctcaggatttgcttgtttgtaaagga

SEQ ID NO: 772127 - DNA, 526 bp, Homo sapiens
tagattaatagagttagctctttttgcttaattgaacccttcaccattatgtaatgcccttgtcttttctgatctttttggtttaaagtctgttttgtcagaaactaggattgcaaccccttctttgatttctatttgcttggtaaattttcctccttccctttattttgagcctatgtgtgtatttgcacgtcagatggctcttttcaaggcagcatagtgatgggtcttggccytttatccagcttgcctttctgtgtcttttaattgaggcattaagcccatttacatttaaagttagtattgttatgtgtgaatttgatcctgtcatcatgatgctagctggtcattttgcagaattgtgcatgtggttgcttcatagtgtccctggtctgtgtatttcagtgtgtttttgtagtggctggtaacaattttttctttcaattttcagtgcttctttcaggagctcttacaaggcaggcctgagggtgacaaattccctcaggatttgcttgtttgtaaagga

SEQ ID NO: 772128 - DNA, 526 bp, Homo sapiens
tagattaatagagttagctctttttgcttaattgaacccttcaccattatgtaatgcccttgtcttttctgatctttttggtttaaagtctgttttgtcagaaactaggattgcaaccccttctttgatttctatttgcttggtaaattttcctccttccctttattttgagcctatgtgtgtatttgcacgtcagatggctcttttcaaggcagcatagtgatgggtcttggccttttatccagcttgcctttctgtgtcttttaattgaggcattaagcccatttacatttaaagttagtattgttatgtgtgaatttgatcctgtcatcatgatgctagctggtcattttgcagaattgtgcatgtggttgcttcayagtgtccctggtctgtgtatttcagtgtgtttttgtagtggctggtaacaattttttctttcaattttcagtgcttctttcaggagctcttacaaggcaggcctgagggtgacaaattccctcaggatttgcttgtttgtaaagga

SEQ ID NO: 772129 - DNA, 608 bp, Homo sapiens
agttcatttatttttactccgacctttttttcttccactgattttggatttggtttgctctcatttttcgagttctttaagatgcatcattaggttgtttatttgaaggttttctactttttcaatgtaggtgcttattgctataaactttcctcttggaactgcttttgctgtattccacaggttttagtatgttgttaccattttaatttgtttcaagacattttaacatttccttattaatttatttcctcactgttcatttagaagcatattgtttaattttccatgtgtttgtctattttccaaaatttctctttttgttatatctagctttattttattgtggtcagagaaaatacttgatataatttttttaaatgaaatttttaatacttgttttgtagcctaacaactgrtctttcttgagaatgatccaggtgttgaagagaatatgtatactgcagctgttggatacttctctaagtatctgtgaggtccatttggcgtatagtgcagattaagtttgatgtttctttgtttattttctgtctggaagatctgtccagtgctgaaagtggagtgttgaagtttccagctattattgt

SEQ ID NO: 772130 - DNA, 635 bp, Homo sapiens
ttattttgcatatgtgggtcccaacttccccggaggagtttatccaagtacataatgtaatattagcaatagcacagacattttcttatttaaccagtggataataaataatttcttgtattaggttttgttaagataccagcataaactactgattgtaaaactttaattacactattatttcgccaagtaagaaaggtagcattaagaggagtaagagtcttattatgacatggagtcatyctgatttctttaggaaagctgtatacagtgaccaaaaaaaaaaaaaaatgtgaatttctcctcctggttagaatgtctctggtcatgacatcatgtagcttggtaaactttttgggtggcccacacatcagacacaattcttgtcccttaaaattcatctcatttcagcttataaggctttaggaaaaaatcaggttttgttgttaattgtagccaaatattggaggagaattcaggttctaatcctgtctatagatacgtaataagaacttaaaagtaatgcacagaaccacaatctaataacaagtgtattataattttctttagaaacaatttttctctatacattcaggatctaatctagttaacaggtggataacaagaacttgaaa

SEQ ID NO: 772131 - DNA, 523 bp, Homo sapiens
gctttctgaagaaattttgaggaaatgattttcttaaaataaatatttgtaaaatcttgagcatatttccagaagcctcaccctttcagatattcttgtcacctagtaaagattgcttaccaaacttcaaagtcaaactatattcattaacccacgtaatttattttgttccccaagatctcccaaagggagcaaacacaatgaaatctatgaaagatttaatrctgccaaggcaaaataccatattgcagaatgccaaacaacccaatattataagttttaaatattactttgttttgtttacatcataacaaacgaataacaaggagtcatgtggtcaatattttaatgttttaaatatgacttattgaacttaattgaactacagaaatgcaaatgaacacatttataagccaataatctggaaaattcaataacagcatttgcaaagagaataaccttcatgtttgtggttgtatagtctgtgttgctttcctgaaggcctctttgatatctttgtttc

SEQ ID NO: 772132 - DNA, 639 bp, Homo sapiens
gcgagcttctcggtgtggagggccttcctgccttccccacacaccacgctaacatccagctgtgtaatcaaatgcacccccgagggaggcccagggtcataagaatgccttccttctccctcactgtttttcttttagatttgtctaagtgctgttaactttgccatcttgtctgtttycctcatgcctgttgtggggtaaacacacagagagcattagccccatttgatggacgatgaaactgaagcaaaggcaggttaagtggcttgcccaaggtcacacaagtaattaacagcaggacaactcccctggtccctagcctggtgccttctcctgcagaccacagagcagcagcctcttgccctcccctcagggactgaggagcccaaacctgatattatgggcacaaagcttttagcagatgagtggagggcaggaagctgtgtggttaggtgagctctgggtatgtgtgtgtctaattgctcttcatttcctttcctttcattcacagagtcattcattcactcaggcagacactcattcacgaggcattcactgagcacctcccacctccttggctttctgtttggcgtagaggaggatgctagagaaggaggcaggggcctcacaggagcctgt

SEQ ID NO: 772133 - DNA, 614 bp, Homo sapiens
cagtcaaccaaaaaactaccccagagattaaattcagagtattaatcaactgttgatgtctgcatttgaaaagtgttgtgcacacagtttcatttgattctttaattcattctggaaggtagataaagcacaaaatcttgtcccaacaagcacaaggattcaacaaaggttactcagtaacagttgagggtggcaatgatgaggcaaatgaactcagtcttactgcaatacctgcccccatactccccttccaacgcagcattgtaggtctttaaatctagaagggacctgataattgatccatcttcctatagaagcttttccttcctayagaagcatctttctgtagaagcttttctcattgttcccctctcttcagcacactcccattcatgaccatatttcagctcactatcaagaatccatgggtaccaatgggtagttatgttggtgtcctcactatcaagaatccacactgttccttcatccctatgagaatctggagaagtggggaagcaagcggcctttgtccctaacctcaagaggaccataagcccagcaatctagccaacactaaaggtaccattgtctccattttaaagatgagcaagcca

SEQ ID NO: 772134 - DNA, 556 bp, Homo sapiens
cagagtttccataaatcttctgaaatctaggtgaaggtccccaaacctcaattcttgacttctgtgcaccctcaagttcaacaccacgtggaagctgtcaagggttggggcgtgaaccctttgaaaccatgggccgagctgtaccttggccccttttaacaatggctagagcagytgggatgcagggcaccaggtccctaggctgcacacagcatggggaccctggacccagaccatgaaaccattttttcttcctaggcttctgggtctgtgatgggaggggtggctgtgaagacctatgacacgccctggagacattttccccattgtctttggcattaacattcggctctttgttacttatgtgaatttctgcagccagctagaatttcttcttaaaaaatgggtttttcttttctactgcattgttcaggctgcgaattttctgaacttttaagctctgtttctcttttaaaatggaatgcttttaatggcacccaagtcaccttttgaatggtttgttgcttagaaatttcttccaccagataccctacat

SEQ ID NO: 772135 - DNA, 598 bp, Homo sapiens
ttttagacataaggtaaagattcagtgaccttttgaaacaatcattactctagaactgaactgaaagcccacctttgcaatgaccactcaaatgttgaaattaaagtgcaagaaattagatattcataggacaaaaagtgcagctagttttcctaaatctggaagaggactctctgggattagaattacaaagtttggaagaatttgctcttcaagactggattttagctaggcatggtggctcatgcctgtaatctcagcactttgggaggcccaggtggaaggatcacttaagcccagaagttcmagaccagcccaggcaacatagtaggaccctgtctcaaaaaaaaaaaaaaaaagaagaagaagaagccgtatatgcatacatggtgacatgtgcctgtagtcccagctactctgggtgacagagcaagactctgtctcaaaaaaaaaaaaaagactgggttttattaaaagcataactaaatttattcaaaattatgtcaactcactaaattatggaaggttaagcagctcctttatgaagttgtaaactgaaaagtgttttttatgcaataatcttagactcaaaattccc

SEQ ID NO: 772136 - DNA, 633 bp, Homo sapiens
aaacaaaatgctgaactaagtagattagcaggagttttattgttttcacttattctttatttattttgtctcattacatgtgaaaaaattatctgctgcagtttagaaaaaaacttttgaagtcaaataacacactatctcaagtgagccaagaaggttaacgatctatactttcaaagcactagctcagttaaagtttaaaataatcctttgaagacagcagaactagttatcattttaccattttgcagatgaggaaactgaggcctaaaaattttagttgcttgcccaaagtcagaaggcgagtgagtgtagccaatgttgctttgagggaggagaacgtctccttgctttgacaatctgtgagtcaggatcastttgactctgctataattaaaatcagtccagtgaaaatttgtgttagatgggttaatagtgataattatttaatatatcacactgatagctagtcaattccctaaacattagttggtgtattgtcaggtgctatatgctaactttcatcttaccatttaaaaaaattctaaaaacacctaacagattcatcaagaaaccaaatgtagatggtttcagtgtaactactctcagttgattcttaagttttaaaacaat

SEQ ID NO: 772137 - DNA, 570 bp, Homo sapiens
tgcctcccattgactgtagtttcctcctttataacatttccttcctagcttccccgaatattggctgtggacattataatatgtagtggatgtagggcctgccaagtaataaaggtgcatttttatcaatgtagcaaaactgccagcccctttgcatggtgcatgctgcagaatgtgctgttcaaccctgggtctgcccacgctgctcctgcatttgcaacccttgctcctytccagcgcctcccaaggctcagtttcaatatcattcctctgaaatgtctcgtgacaaaaacctccctcattcctgaagatgaactccttgagggccaggaggctgtcttgtgaatttctgaaataatatgtgtgaagtgcctagaattgagcctggtacaaggaagaaacttctttcattgatgaaatgccatatctctgtctctatctatatctgtatctctatctctctgtctctgtctttagctctctctttctctctgtctctatctatacttataccaaaccatccacaccattactagaaggatccatctaaaatgtacttctcattacagc

SEQ ID NO: 772138 - DNA, 598 bp, Homo sapiens
ttccacagtggctaaactaatttacattcccaccaatagtgtgtaagcattcccttttctcaacagcctggacagcatctattgtttgattttttttttttttttttgagacggagtcttgctctgtcacttaggctggagtgcagtaatatgatctcggctcactgcaacctctgcctctcaggttcaagtgattcttctgcctcagactcctgagtagctgggattacaggcacctgcgacaacacccagctaatttttgtgtttttagtagagatggggtttcaccatattggccaggctggtctcgaactcctgacattgtgatccacctgcctcggcctcccaaagtgctgggattacaggcgtgagccaccaygcccagcctgaatttttaataatagccattctgactggtgagagatggtatctcattgtggtttgatttgcagttctctgataattagtgatgtggagcattttttcatatgtttgttggctgcttgtatgacttcttttgagaagtgtctgttcatgtcttttgctcatattttaatggggttattggtttattgcttgtcaaattatttgtttatta

SEQ ID NO: 772139 - DNA, 660 bp, Homo sapiens
atataaacatgtaaatggcatgtggatcctagcattcctgtcatataaccattcacactgtcttagttcatttttggctgctataatagaatattagactggtgatttataaggaacagacatttatttatctatttatttatttatttatttttatttatttttgagacagagtctcactctgtcacccaggctggagtgcagtggtgtgatctcggctcactgcagcctctgcctcccaggttcaagcgattctcctgcctcagcctcctgagtaggtgggactacaggtgtgcgccaccacacctggctaatttttgtatttttagtagagatgggatttcaccatgttggccaggatggtctcaatcttctgacctcttgatttgcccgccttagcctctcaaagtgctggcattayagacgtgagccaccgtgcctggccaaggaacagaaatttattgactcacagttatggaagctgggaagcccaagattgaggggccagtgtctggcaaaggccttcttgctgcttcaactcatggtagaaggtggaagggcaaagagagggcaagacagagaaagtgaaccaaactcacccttctatagtgaccccacttctgtgatcattaatccacttccatgataataacactaatt

SEQ ID NO: 772140 - DNA, 505 bp, Homo sapiens
tcttgtgctttagttctaaacatgagcattcaccaagttctggacttttgtcatgcaatcgtcctacaaatacaagccactacacggctttgagcgactgaggggcaaaagggagaagagtagaggttgagtattagcgacaacttctcttctcagcaacaggcctaacatgctgaggggtaggagaggaaaggaggaaaatgctgagagaaggcatttaacacacacgcaaaaatgttaacaggaaacaaacaaamaaaaaatgttaagaaacacaaaaacaacatgaaaatggaagtgactgacagattcccaagcttgtttaaaatccataagtaaaaggccaattaagcaataacatattcgagatactctatattttcaacgttttccccagttttgggcagtattgcagttgtaaataaaattccacatactactctcctttaggaactatattttaacatcagcaaacattccaaaagccctaagaatcactactagt

SEQ ID NO: 772141 - DNA, 508 bp, Homo sapiens
aaaaaatacacaaaccgcagactgagaaaaaatatttgcaaatcatatatctgataaatgacttgtatccagataatcacaggggttgacaaaagttgacaaccttgctgtaaagggctatttatgtaaatcgtttttgcaaaccatatggtcattgtcacaactaytcaactctgccactgcagcataaaagcagccagagacaatatgtaaacgaatggacatggctgtattccaaaaaaactttatttactaaatcagatgaagtgctagacttggcccacaggtcagagttttctaacctcggtccctagtatatccgtacaggttatctgatactgagtctctgacagcaattttacaattctgtaaactacagataactgataacaatgtaaacaattcttgtttataaacacatacataaattacatccagtgggggggacaatgctctgtctttgttgagaaaactagctttgcctccatttgaatattcatttatattc

SEQ ID NO: 772142 - DNA, 636 bp, Homo sapiens
ggaaatgaaagaaagttctggcaggttttaaaagaagcctagttttataccttggctctggcaccagcttggctgagtgaccttggtgcctattgtctgtcctgcactgtgagtgtcatgagtgttctgtgtcacgctaacacttcaggttggtctgcagcagtttctttgctgagtgtttgagcacgggctgctttcctatccactgacatgtttccttcttgctggtgcgtcttgtctggcacatctttggtccttttcgggtccattgcctctgagtttggagaagagccttcagccctgaggattagcctgctgcttttctccttcaagccattaygtgtttcttcagcgtctgccattcattgtcagaatggggccagctgttcactctggtgatctttgtttaattgccattagactgtatgtaaacactgggggcaggtaattctgaagcatgttttcattgagagagagagtttatctcatcttttactagacttttggcagatagaaatgaagaattctaatacttgggacactgtgggttgggtagggagaacgatacagggtgcagggtccacatcatgcttaaggcagcactggctacagtgcagaacaaagtggatttaatat

SEQ ID NO: 772143 - DNA, 640 bp, Homo sapiens
gtcactactctaatttctaatccttcttatgtgtttttcccaacctggtctctgtggttatgcatttccagaagtatttacccacttacaaatttctctgttgattacacccatttttgctttatctggatgatttcaccattgttgctttatgaaatctcgaactaagataatttctaaagtcttttttccatctctggcactaagaaaatgagtactatcaaaaagtgatagcatctatagatcctggmagggctgaaaggttgaattgggttttaaagggaatgaataagaagacaggaagtgatggttggaggaaaaagattttggaggcatcgtaataattccaatgtaattaaaattttggtaattacaaacatgagagtatggctatagaagttatgattcagggagggtagaagacatgatgattggaagaaaattggcaccgaatggccaggtgttggaaaaatcatctttgtggttattaaaatcccaaaatcttgtgccccaagaaatgttggggaggatgacagcaaaccaaaaacagaaatctttaaggaatgacggggtgtagttcagagatcaggagtacctatactaaggaatggtagaggagcaaagatgacatgaaattaaa

SEQ ID NO: 772144 - DNA, 609 bp, Homo sapiens
tagagctggaattatgatctttgatttcctgaaacttgccttctccacatttctcattgcttattgttagataagttatactattttacctgtattcctaataagagtgaaatataaattctaagttataaccttttagtcccttgggaattccttaatgattatacttcagagtaggggcaaggaacccacaggaatcttttcttctgagatgtagagcctgttttctcctatttatttatttatgaaggcctgaatttcatgaaaattraaaatactggaacttggaaaataaaattctatttaggttccaaatcagtaattccactggatgaaatctctggtgccaaatctgacagacaggaacttgagatacgtaatttttttgaattatctcttggatttcacctccattgtgaaggataatctatttcactttgcttggttttagtcgttacatttatttcattttcaaaggtgcatagagaaaattgtctctagaatttttaagaacattataggaaaaaaacagattaatctgaaaaagttaaaaaatttttgatccagaataaacttattttttctcctaatcttgagtgctacttccta

SEQ ID NO: 772145 - DNA, 609 bp, Homo sapiens
tagagctggaattatgatctttgatttcctgaaacttgccttctccacatttctcattgcttattgttagataagttatactattttacctgtattcctaataagagtgaaatataaattctaagttataaccttttagtcccttgggaattccttaatgattatacttcagagtaggggcaaggaacccacaggaatcttttcttctgagatgtagagcctgttttctcctatttatttatttatgaaggcctgaatttcatgaaaattgaaaatactggaacttggaaaataaaattctatttaggttccaaatcagtaattccactggatgaaatctctggtgccaaatctgacagacaggaacttgagatacgtaatttttttgaattatctcttggatttcacctccattgtgaaggataatctatttcactttgcttggttttagtcrttacatttatttcattttcaaaggtgcatagagaaaattgtctctagaatttttaagaacattataggaaaaaaacagattaatctgaaaaagttaaaaaatttttgatccagaataaacttattttttctcctaatcttgagtgctacttccta

SEQ ID NO: 772146 - DNA, 447 bp, Homo sapiens
aagatagtgattttatttactttggatatgtatccagaagtggaattgctggttcacaggtgagttctatttttaattttttgaggagcctccatactgttttccataatggctgcatcaagttacattcccaccaacaatgtataagagttccctttacaccacatccttgccaacacttatcttttgactttttgataacagccatcctaacaggcatgaggtaatatcttattgtggttttcattatcacttccctgatgattagtgaygttgagcaccttttcaaagactacatttgacagtaatttagaattctcaggtcaattgggaagttggaacacaaagggagaggaagaatggtggctgttggatagagagggatgtaagagctaaattctcatcacacataacagtgggccaatagataatatctaaactttaaaa

SEQ ID NO: 772147 - DNA, 499 bp, Homo sapiens
tatagtagaatgatttgtattcctttgggtatataacaagtaatgggattgctggatcaaatggtatttctgattctagatccttgaggaatcaccatactgtcttccacaatggttgaactaatttacatgggccctttctttcttaatgtaaatatgcacaaagaccatattacttccattttacttaaactctggcaagtacaggtgccataaaacctatggagtgcttgaaagggaatcattctctttgctttctcctcattcttagattatttgtttcccagttttcttcttaaaaagaggaactgagctgaggcytagaggttttctgtggtggatcaatatgtgccatttgtgggcaggactccacagtgggtcaccactgaaaacaacagttcagttcctcatgcaaatgcacacagacaagctgaattgagcttaatttggggagaaaaagcaacagagaagatcctttagaatgcatttgtgaactaga

SEQ ID NO: 772148 - DNA, 588 bp, Homo sapiens
gttgattacacaaattcatgtgctttcaaactccatgaagctgcctacttttatttttatttttagacacagggtctcactctattgcccaggctggagtttagtagcatgatcatagctcactgaagccttgaattactgggctcaagtkgtcttcccacctcagcttcccaagtagctgggactacaggcacatgccaccatgcctggctaatttaaaaaaatttttttagagatggggcctcattatgttgcccaggctggcataaactcctaacctcaactgatcctcccaccttggcctcccaaagcactgggattacaagcgtgagccactgtgcccagcctgacctgcgcactttcaattgatgcatcttattgtctgaaaattgtatctcaataaagtggagttaacataaaaagttaagatttgatacaactgtgcagctgcatgaatgttcactactttatctatatacttaaattacaaatggatcaaagattcaaatgtgaaaagtgaaaatcataaatgtactaaaataaaatataggagaatacttttacaaattcagatgaggaaggcctttg

SEQ ID NO: 772149 - DNA, 588 bp, Homo sapiens
gttgattacacaaattcatgtgctttcaaactccatgaagctgcctacttttatttttatttttagacacagggtctcactctattgcccaggctggagtttagtagcatgatcatagctcactgaagccttgaattactgggctcaagttgtcttcccacctcagcttcccaagtagctgggactacaggcacatgccaccatgcctggctaatttaaaaaawtttttttagagatggggcctcattatgttgcccaggctggcataaactcctaacctcaactgatcctcccaccttggcctcccaaagcactgggattacaagcgtgagccactgtgcccagcctgacctgcgcactttcaattgatgcatcttattgtctgaaaattgtatctcaataaagtggagttaacataaaaagttaagatttgatacaactgtgcagctgcatgaatgttcactactttatctatatacttaaattacaaatggatcaaagattcaaatgtgaaaagtgaaaatcataaatgtactaaaataaaatataggagaatacttttacaaattcagatgaggaaggcctttg

SEQ ID NO: 772150 - DNA, 651 bp, Homo sapiens; identical to SEQ ID NO: 747553

SEQ ID NO: 772151 - DNA, 651 bp, Homo sapiens; identical to SEQ ID NO: 747554

SEQ ID NO: 772152 - DNA, 546 bp, Homo sapiens
taaaggtttatataccaacttaacagagagggggagtggggtttggactccatgggaaagtagggaagtttctattgggccttgtgatgataagggacagctaaatcctcactcgctgatcctaggatgagtcttctcacaatcgggaaactccctcagagggggtcatagaagctgtaattcaggaggctctgcctaagtttagataatgtttctttctgtggctgctgattgtgaagatgttttgagtttaaagtaattttcacaccattttggtgggctgttaattccttcctttcccccatttaatacttccccagatgtttcacaaacaaggaastgggtttattgaagacactggtcaggccttgtgaggtaaggatctgcaaagggaaggaacatacatcagaacaaatatcaatcagcaccaaagacctaacgtaggcacactacaccgtattttgtcgaaccaatctcctagtcttgggcatgaggggtatttttatggaaacataaagaaaaacaaagattaacggtgagagcaga

SEQ ID NO: 772153 - DNA, 618 bp, Homo sapiens
cttatgactggaatgcacaccatgattatagtattagagcattctgagtttgtccatgtgcttaattttacagtggattttacacctgcgaatgttttctttttttacactagtgttttattgtttcagattaaataactccctttagcatttcttgtaagactgatctggtggtaatgaattctcacagctttttgttttccctctctttccttcatatttgaaggatagctttgctggataccatattattggatggcagttttttcttttagcactttcaaaatgtcatatcactccttcctggcctctrtggtttttattgagaggtcagttgccaaagaaattaaagctttttaatatgttatttgtgtctttccccttgctgcttttgaaattctctctaccccttgcccttgtacaattccaagttgaacaccaatatttcataatttagtattttgagtacatttttatatctagtaggtaatatgttccttttcattcttttttctcctctgactgtgtattgtcaaacagcctgtctttgagatctctaatactttcctctgcttgattcattctgctattgagatcctctcataaatttttcagttc

SEQ ID NO: 772154 - DNA, 619 bp, Homo sapiens
cccaggttgtccatcaggcccttcacaatccaaaatataactactctgatatacttcacgggctttaccaactccatctatgttaaattgagtgggttgaattggccacgcagatggccagtgctgtagagaaatgattgaaatgtccgctcctgtatctaccaaacctttaaatttcttcccctgaatagttatttcacaggtaggatgtttatcagtaatttgattcacccaataagctgctttgccttgtttattygtgcttccaaatcctcctgtttgtttaatttcacttttccccatttccacatgtggcataatgaggagctgtgctatatgctctcctggctcgctttccagggaaccaaagcagacataacaatttgaatttccccattgtaatctgaatcaatgactcctgtttgtacttgcactccttttaaatttaaactagatctacctagaaataatcctatcgtccctgctggcaacatctgactggagacagcaacattctttacagtcccattacaaaagaggaacctggtccatagtgattaatagcttgtttaaattctttgagtaatttaaaaggaaaaggctcaaatgtagctataat

SEQ ID NO: 772155 - DNA, 614 bp, Homo sapiens
tgaaccaagaacaaacatcaaatttatgatgaagcctgagtggaagaatggtgaaatcattgatgctttatggagacaatgcccaaaataaatcagcagttcacaaatggataactcattttaagaagggaagaaacaatgttgaagcccacagtggcagaccattcatatcaattttcaagggagaaaataatcttgtttgtgccctaactggagaggaccagtgattaacagcacaagcaatagccaacaccatagctataaccaatacttcagctaacacaattctgactgaaaaattaaagtttagcaaactttcaactaaaacagtgccaaaatcactgcacccaaattayctgcagacaagtgcagaactttcaattaaaattttaagcaagtggaatcaagatcctgaagcatttctttgatgaattgcaaaagagatgaaacatggctttaccagaatgatcctgaagacaaagcacaatcaaagcaatgactaccaagaggaggatatggtctagtcaaagcaaaagcagacccattaataacaaaggtcatagcatcggttttttgagatgctaaagtcattttccttgtggactttttggagg

SEQ ID NO: 772156 - DNA, 601 bp, Homo sapiens
ccaagtatcagagcaaacaatacgcagcccttttgtatagttcctgcttatgatgcagtgggaatttaacccgcattgtctgtttccatttcgtaatagtttccaaagcaacgggttcatgaattcatactgttgactaattttgctggatatatgtggcctcagtattctaattctggctggagcccctaatatttgatataatctgactgatttttgtgaggyaccttctcataagtgcaatattaaaaataatgttctatccacttatatccaccctatattatacttcctttatatagcactcagtttgaaaagaaatattctattgatttttgatgtgcttttaaaaacataacattaatttctgttacttcattttaatttttctcacaggccttcaggctgagatttagtctaagctcccaaggcccgtcaaaagcataatgggaaattttcttctaagtaccatgccttatccagtatcacgctcttcgaagccaatttttaccaaagttgagattccctaacctatcttcagtgagaaaattacatttcacaggccttttaaaattaaatgttcaagataatgttctttttt

SEQ ID NO: 772157 - DNA, 639 bp, Homo sapiens
agcccatttctgctggcaccacagggatccattgggagggtggccagaggagcagggggtaaaactccacagagagaaggaattttctagctgaactttgtgacaaattgaacagggtgagaaggaaagtacatgcatwtgaaagtattttgaagccgtaattcgtgcctcgggggaggacacgaatcaggtgtgcagactacaaaggcgggggaagaactaaagcccttttctctcgcagctgagaggaggatagcctcgggcaagttttcaagcctgtctcgccctctgcctggaaatactctgggctgttgagaagagggcacggtggaagtaaggcccttcggtgtgtgtgggagcagggtgaggcctgtgactgccagcttaaccccacttccctgacaacctgcatgactcagcagagacagccgtaatcctcctaggtacacacctccagtgacctgggaatcttacccccatcccccacagcagccacagcaagacccacccaaggagagtctgagctcagacatgcctagccccgcccccacctgatggtccttacctatccacctggtagcagaatacaagaggcatttaatcttgggagttctagggccccacccactgctggtccct

SEQ ID NO: 772158 - DNA, 639 bp, Homo sapiens
agcccatttctgctggcaccacagggatccattgggagggtggccagaggagcagggggtaaaactccacagagagaaggaattttctagctgaactttgtgacaaattgaacagggtgagaaggaaagtacatgcatatgaaagtattttgaagccgtaattcgtgcctcgggggaggacacgaatcaggtgtgcagactacaaaggcrggggaagaactaaagcccttttctctcgcagctgagaggaggatagcctcgggcaagttttcaagcctgtctcgccctctgcctggaaatactctgggctgttgagaagagggcacggtggaagtaaggcccttcggtgtgtgtgggagcagggtgaggcctgtgactgccagcttaaccccacttccctgacaacctgcatgactcagcagagacagccgtaatcctcctaggtacacacctccagtgacctgggaatcttacccccatcccccacagcagccacagcaagacccacccaaggagagtctgagctcagacatgcctagccccgcccccacctgatggtccttacctatccacctggtagcagaatacaagaggcatttaatcttgggagttctagggccccacccactgctggtccct

SEQ ID NO: 772159 - DNA, 603 bp, Homo sapiens
tgcatggaacactgaaatcaccttctgattgtgcctcatatattcacacttgccttcctctaaaatgataaatagtgtggcaacagtttggggtttttcacctacttttcagaatagcccacacagctagataaaataacaatttaaggtcagaggacagttaggctttgcagtttggaatactcagcaaggacttaccagtacatccaggggccaggaagaactgctgctcccartagacccataaagttgactcacaaacccaagataatgcagatgatagggaataggagcccggtttaaatctaggctgatttgaccatatagtctgtgctccatcatactgaattcacttcattctctccaaagcacatccctactaactttatttgatatggactgtagccatttatggtccactgtttatactgtgtcttcctaaatctggctcaacatttactattttcttctgattctgatcacacttcacatactgactacattttatattaagtatttcttaatatctgcatagtcaatgcctgctgtgctagtgacatgaaactagaatcaccatctcaggcatctgctttgaaaccactt

SEQ ID NO: 772160 - DNA, 607 bp, Homo sapiens
gtgtgacaatttatagaattccatgcagaaacatctctctaattactccatcttgggacttagaaatgtgttttatggggaaatgccataagcttattttttagatacaggaacatttctgaacataaggcttcaactttagtacaactttagtrtttagtacaaaaacttgaaacttgaaaatctagaaagttaaatttacaaggcattttaccttttctctgcgggtaaccttattattgtgtcttgtctgtgatactcagtgatattacagtttcagaagctggctataaaagcataataccataattcaggtgtcatcaccctttcaatagatatcatacttgatttcctagaatgctgatttgattactgggattaaaaattctaaatttttacaacctactttatcatgtccaggcttaccttagtaacccaatcatattcatattgtataggtttaaaagcaattttagaaatggcttataataaatgaacatttcctaattcaagatgaagatttggatatgattaatacattttgaactcaaattataccacagttcaggggaattttccattaagcttaaaggcaaatttaaaaata

SEQ ID NO: 772161 - DNA, 524 bp, Homo sapiens
aaaaagctcctgaaggaagcactgaatatggaaagacaaaactgggaccagccactgcaaaacacacgaaaatgtgaacaccaatgacactatgaagaaacggcatcaactactatgcaaagtaaccagctagcatcattatgacaggatcaaattcacacataacaatattaaccttaaatgtaaatgggctaaattccccagttaaaagacacagactggcaaattgaataaagagtcaagacacatcrgtgtgctgtattcaagtgacctatcttccgtgcaaagacacacataggttcaaaataaagggatggaggaaaatttgccaagcaaatggaaagcagaagaaagcaggggttgcaatcctagtctctgataaaacagaccttaaactaacaaagatcaaaaaagacaaagaaggatattacataatggcaggtaaagggatcagtgcaacaagaagagcaaactaccctaaatatatatgcacctaatacaagagcacccagattcacaaaaca

SEQ ID NO: 772162 - DNA, 548 bp, Homo sapiens
atgctgagggaattcatcaccaccaagcctgccttgaaaaagctcctgaaggaagcactgaatatggaaagacaaaactgggaccagccactgcaaaacacacgaaaatgtgaacaccaatgacactatgaagaaacggcatcaactactatgcaaagtaaccagctagcatcattatgacaggatcaaattcacacataacaatattaaccttaaatgtaaatgggctaaattccccagttaaaagacacagactggcaaattgaataaagagtcaagacacatcagtgtgctgtattcaagtgacctatcttccgtgcaaagacacacataggttcaaaataaagggatggaggaaaatttgccaagcaaatggaaagcrgaagaaagcaggggttgcaatcctagtctctgataaaacagaccttaaactaacaaagatcaaaaaagacaaagaaggatattacataatggcaggtaaagggatcagtgcaacaagaagagcaaactaccctaaatatatatgcacctaatacaagagcacccag

SEQ ID NO: 772163 - DNA, 564 bp, Homo sapiens
aatagcctcccaagaaaaaaaacccaggacctgatagacttacagccgaattctactagaggtacaaagaggagctagtaccattccttctgaaattattctgaacaatagaaaaggagagactccttcctaactsattttatgagcccagcatcatcctgataccaaaacctggcagagacgcaacaaaaaaaggaaacttcaggccagtatccctaatgaacatcgatgcacaaatcctcaataaaatactggcaaatcaaatccagcagcacgttgaaaagctcacccaacatgatggagttggtttcatccctgggatgcaaggctggttcaacatatgcaaatcaataaacgtaatccatcacataaacagaaccagtgacaaaaaccacatgatgatctcaatagatgcagaaaaggccttcactaaaattcaacatcccttcatgctaaaaactctcagtaaactgggtactgatgaaacatatcctaaaaggtatttatgacaaaccaacagccaatattgtactgaatgggcaaaagctggaagcattccctttg

SEQ ID NO: 772164 - DNA, 564 bp, Homo sapiens
aatagcctcccaagaaaaaaaacccaggacctgatagacttacagccgaattctactagaggtacaaagaggagctagtaccattccttctgaaattattctgaacaatagaaaaggagagactccttcctaactcattttatgagcccagcatcatcctgataccaaaacctggcagagacgcaacaaaaaaaggaaacttcaggccagtatccctwatgaacatcgatgcacaaatcctcaataaaatactggcaaatcaaatccagcagcacgttgaaaagctcacccaacatgatggagttggtttcatccctgggatgcaaggctggttcaacatatgcaaatcaataaacgtaatccatcacataaacagaaccagtgacaaaaaccacatgatgatctcaatagatgcagaaaaggccttcactaaaattcaacatcccttcatgctaaaaactctcagtaaactgggtactgatgaaacatatcctaaaaggtatttatgacaaaccaacagccaatattgtactgaatgggcaaaagctggaagcattccctttg

SEQ ID NO: 772165 - DNA, 688 bp, Homo sapiens
tgttggctgcatgtatgtcttctttagaaaagtacctcttcatgtcctttgaccactttttaatgaggttgttttattttttcttgtaaatttgcttaaattccttataaactctggatactagacctttgttgggtgcatagtttgcaaatattttttgcccattctgtaggttgtttatttactctgttgatagtttctgttgcagtgcaaaagctgtttagtttaattggatctcgtttgtcaatttttgcttttgttgcaattgcttttggcttcttcatcatgacatcttcgtcaggtcctatgtacagaatggtattccctaggttatcttccaaagttttggtagttttaggttttacatttaaatcattaattcatcttgagtttatttttgtgtatggtataaggaaggggtccagtttcagtcttctgcatatggctagtcagttatcccagcatgatttattgaataggtagtcctttcaccattgcttgcttttgtcagctttgtcaaagatcagtttgttgtaggtatgkgggattacttcttggctgtctattctggtctattggtctatgcatctgtttttgtaccagtaccatacagttttggttactgtagccctgtagcatagtttcacgttgagtaacatgatcctgccagctttgttctttttgctta

SEQ ID NO: 772166 - DNA, 577 bp, Homo sapiens
tactcacattttagtgtgtaaaagaaagaagtgaggggcttatttaagagagacattcggaggcctgatgcctagagagtttaattttaaactttctggaatggtccagaaatctatattttattagttatccaagtgattctgaaggaagcagtaagatctactttgaaaggtccactttgaaagcataactgattcctctgaactccttaaaagaatggagaggaatatcttagagtcataacctacttaagactaaaacttttaagaaggcaaatcctcaagacccacttgcccgattttccaaataacaatttccaaaaggtagaggatacaggtcaatgtgactyggctatctgtatttactgatcgataattaccaaagttaggcccctgtcctcacacagactgggaaagaggggctctgtctgtcttgatgatggcctgttaaggggatggctcccagacttttttctttttcttttctttttttttttttttttttttttgagatggagtctcgctctgtaacccaggctggagtgcagtggcataatcttggctcatgggacctctg

SEQ ID NO: 772167 - DNA, 559 bp, Homo sapiens
tattggaatacactatacacccggttatggattcaggtagaaaaatggtacagtaaaatattcttagctcttgtccattgaactaccatgttttaaaaatcttttctaatctttcagaccaacctgtctataccgtcttgtgttttgtcttggaagcaatgagaacatggaaagaggaattgagaaaatttactcagagtaatagataactcccaacaaaactctttgtagagatgaaccgagcaattcccacaaaaattctgtcagttacatgtgcttgaattattttttcggttaattcagatacctgaaattgtatcaatgtgctttgaaacacaggatatttcagttatttttctcacacaaataaagtagagtatctttatttgatggtatatatgttmaaggtcctcacatttgtatataattttaagtattacaaagtacttttacctatattctcttgtattgatttttaaaacaatccaaggaggtcagcatgtcataaaatactcttctttagcaaatgaggacatttaggcacagggtggtaggaaag

SEQ ID NO: 772168 - DNA, 559 bp, Homo sapiens
aaaggaaacaaaggccttagagtacaagcgctgaactttgaaaacaatcacagaaatcagaagacttatttagacacttgtatggaactctgatcagaaaacagaaggcatggaagttaaaataaggcataaataaccataaggaaagaagatattaagaagaaaacgtttacaatagaatgaaacgaaaagtaataggcaaaatagaaaagaaagtagaataatgaatagcattaattattttacttccttgttctacttgccaaactttcagaggtaaactaaaaccaggtaaccattgggtacaaartagaggagttggaagagttggaactttctgtttggtaaaagcctatagtacatgccctgattctctgtcctgagcaatggtaatgcattagcgttagcattttctatggtaaggtggtgagtttatgggttttagaatgtaccttgaataatttcccaaaacctagtgtgatttgatagcccagtatggaatcttctcgtattcactaataatgagaaatattctgaatatcaccttttaatgagcact

SEQ ID NO: 772169 - DNA, 618 bp, Homo sapiens
acctatgaattttcattttaaagaacatttttagattcttagaagacactgctaatgctgagctctctccatggagtctgagctggaacaatgtcctgcttaattctgaagcattgagatgagctgagtagaattgaggcttctgagtccttgcctgcctggattaataactttctgtatatcaagaagctgaagaattaatcagaggtgttccctgtagatgtgctcctaacccagaaaacatctggaagatgagaaatgagaaatcaaaatggtaaagtccaagtcaggatccttttcttaaatccaaacttcaaatttcacagaaaacgctctgataaaatttctaatagtctatagtcttcytcttgatggaccagctgaagctgatatagtgataggatcatcatgactatggaaataaatgagtaataaataagaaagattgtgctcatggtctcattttaaacctaatgaagagaacacagaagacctgccatagattggctactgcatgccaccactctccttgactctgccattgccaaatacgccatccacctgagcagtccctgcataggttatgattcggtcccatgggataaacaccagttatgg

SEQ ID NO: 772170 - DNA, 596 bp, Homo sapiens
agtgtaaaagtgttcccttttcaccacatccatgccaacatctgtagtttttttttttttatttttttggttatagccattcttgcaggagtaaagtggtatcacattatggttttgatttgcgtttccctgataattagtgatgttgagcatttttttcatgtttttgttagccatttgtatatcttcttttgagaaygtctattcatgtccttagcccactttttgatgggattgtttgttttttcttgctgatttgagttgcttgtagattctggatattagtcctctgttggatgtatagattgtgaagattttctcccacactgtgggttgtctgtttactctgctgattatttcttttgctgtgcagaagcttttttagtttaagttccatctatttatctttgtttttgttgcatttgcttttgggttcttggtcatgagaagtctttgcctaagccagtgttatcttctagaatttttatggtttcaggtcttagattgaagtctttgatccatcttgagatgatttttgtataaggtgagaggtgaggatccagtttcattcttctacatgtggcttgccaattata

SEQ ID NO: 772171 - DNA, 580 bp, Homo sapiens
cactctgtttcagttatgtattgctgcataacaaatcatcccaaaatttagtggcttaaaacaacgatttattatatctcacaattctgtgggttggttaggctcggctgggcagttaacctattccacttggtgctggctggggacccttgtttgcctatactcggcgggtggctacgtggagttggaaggtccaggaaggcttcactcatgtgtctggccctttaagtgcttctccaagggtctctgtctctctccatgtggtatcttaatagtccagcctaagctcttttgcagcagggkagctggcttccctagagagagggaacagaagctgccaggccctccaagggctaggtccagaaatggcacagcatcacctctgctgcattctgtgtgcctcaggagatcacaaggccagcttggactgaaggtagggacagaggaggacgacttcacctcttgataaaaggagtggcaaagtatcattgcaaaagccatgtaggctgggagaaattgttgcagtcatcaatggaaacaatctgctatgctctttttttaacacaggctccattaaaaa

SEQ ID NO: 772172 - DNA, 580 bp, Homo sapiens
cactctgtttcagttatgtattgctgcataacaaatcatcccaaaatttagtggcttaaaacaacgatttattatatctcacaattctgtgggttggttaggctcggctgggcagttaacctattccacttggtgctggctggggacccttgtttgcctatactcggcgggtggctacgtggagttggaaggtccaggaaggcttcactcatgtgtctggccctttaagtgcttctccaagggtctctgtctctctccatgtggtatcttaatagtccagcctaagctcttttgcagcaggggagctggcttccctagagagagggaacagaagctgccaggccctccaagggctaggtccagaaatggcacagcatcacctctgctgcattctgtgtgcctcaggagatcacaaggccagcttggactsaaggtagggacagaggaggacgacttcacctcttgataaaaggagtggcaaagtatcattgcaaaagccatgtaggctgggagaaattgttgcagtcatcaatggaaacaatctgctatgctctttttttaacacaggctccattaaaaa

SEQ ID NO: 772173 - DNA, 590 bp, Homo sapiens
tcattaacctgagtgtggtgattttatctcactctttgggtcattggttctgtaatagaaaaacgatgacttactccttcataggggattgttatgagccagctcactgggtctctacatttgcttcacccttggaatatggcttagttcttactacacaatgctagaaaggaattacaktaaggaaattttcattatctgggccttggggacggaaaagaatccaaaactcatgttgaactaacttatacatccatttctctcctagaacacctaagatatagaaatctctccattttccagaagatttcccaagtacaaaaaatatttaccccagccttttttttttgccaaaatatatgtttttctatgtctaaaacactgtctctaaagcatgatgcctcataggtagatgcctgtattttctgcaaaatgtgaaaatttcttctcattcaaggtttgtatttacagggcttcattgaaaaataccgttttggacatgacaatgactagagtactaatacataattataatacctattatggattgtttgcaactgtgttcattaattattcttttacatcaatat

SEQ ID NO: 772174 - DNA, 508 bp, Homo sapiens
attacaggtaaaagaactgaaatattggaccctctttaaggaggttcaaggaaaatccaaagacaacagagaaaacagaaacaaacacagcagaggaaatattagcttctaatactacagctacagcacacattgaacgcagcctaactcttagccaaataaacagaaaacctcacactaaagaaatatttacctttcttttacacaatacatcatgtttacctttccacaaaawattacaagtaatgataaaagacaaaaaaatcccacagtctaaagcgataaagtaagcatcaggaccagactcgtatggcagaaatgttggtattattaaacagagaatttagaataactatgattaatatgctaagggctctaatggaaaaagtaaataacatacaagagaagaagtggataaaaagagacatggaaatgctgaaaagtctaacaaaggctcaaaaggaatggctataaatcaaaaacactgtgatagaaataaagaatgctt

SEQ ID NO: 772175 - DNA, 508 bp, Homo sapiens
ctctaaatcatacctcagtaaaaagccctgtgattcccagcacattcttgtccagcaattttgctgccttttcaaactgtgctaaagttttaactcacttaatggccattttgctcaaagaaacacacatttcatcacttacaaagttactgttgacaagtagagaacaacaaagccacaatgagataaaagcggctttggacccagacccagacttgttcagtccaaattcttacctcagcaaaattttaagttccttatgtcatggctattaagatccaattgtgaagagctgaaacaaaaatatactacacccactaaataactccataaaatgattaygaagcaaaaagccaagatgatatatagtttttctaagaaaataaatattttaagaaataaagaaaaaatcaaaaatttaggaaataggattttgaattagacgttcctgtggtctgggaatttgggataaatgttcaaagaaactttgctttaaagagaataccaa

SEQ ID NO: 772176 - DNA, 634 bp, Homo sapiens
tcactctatgggcatatttattattttaattactgtatgctagacttctatatctctttgtcattattgatttttttttcatttggcttttatttggtaccaactaaatggaatattttctgagaagcgaaatacttctagatcattgcagtctttaacaatacaagcaatattcaaccagggatttataatcagagattcctttgaatttcttaattctgtggtataaatgggtccttgcctatattttaaaaaatctctttctacttcttttgctcagacttagtcttactcaaatgtttttattattttttatttatttattttttgagatggagtctcactctgttgcccaggctggagtgcagtggcgggttcacgccattctcctgcctcagcctcccaaacagctgggactacaggcgcctgccaccacatgcggctaattttttgtattttcagtagagatggggtttcacgtgttagccaggatggtstcatcttacattgtaggcctgaaaactcatcttttgctttattcctgaggacagccttttgattgtatcccatgttaaataggtgattcctaggtgtctgtcttgagaacgtttttttgtaagtttgtttaattttg

SEQ ID NO: 772177 - DNA, 658 bp, Homo sapiens
ttttgttcaatttctgataagatagctcctgaaactttgcccacatgtcttctatgtggagatcctgggcaattcttctggcatagcggttctcgctgctattttatattcatttggccctgcttctctttggtgtgatttcatgttcataaattatttttttcctctctgtaataagaaacaggacaagatagtggggaggaggagagaataattaccattaccattcataaggaaacataattctgaaaaaactatcttgtttccttggagcactggggataaactgtcatgacttggaagcattttgtgaatttgcaaagatcttcaagaccaactatagtttaccatgttaatttcttrttgatttttagcaattttaaattcttaaagcttagcttagcgtgcgcctctaggctttttaattagatctgtatataaaagtccaaagtgttgatggaacttttatgaattgttttaagatctgggaaaaaggggaaaaaaaagaagcagtttatcttttgtttggtaatcactttcattatggagattgtggtgaaaacaaaggagaattttacttttgttagaaaatattgaatattctaaaccttcttataataattggctttaatgtcattcccattgtaagtgttaaatc

SEQ ID NO: 772178 - DNA, 658 bp, Homo sapiens
ttttgttcaatttctgataagatagctcctgaaactttgcccacatgtcttctatgtggagatcctgggcaattcttctggcatagcggttctcgctgctattttatattcatttggccctgcttctctttggtgtgatttcatgttcataaattatttttttcctctctgtaataagaaacaggacaagatagtggggaggaggagagaataattaccattaccattcataaggaaacataattctgaaaaaactatcttgtttccttggagcactggggataaactgtcatgacttggaagcattttgtgaatttgcaaagatcttcaagaccaactatagtttaccatgttaatttcttattgatttttagcaattttaaattcttaaagcttagcttagcgtgcgcctctaggctttttaattagatctgyatataaaagtccaaagtgttgatggaacttttatgaattgttttaagatctgggaaaaaggggaaaaaaaagaagcagtttatcttttgtttggtaatcactttcattatggagattgtggtgaaaacaaaggagaattttacttttgttagaaaatattgaatattctaaaccttcttataataattggctttaatgtcattcccattgtaagtgttaaatc

SEQ ID NO: 772179 - DNA, 574 bp, Homo sapiens
acaaactaatacagaaaattggtaatgggaagtcaggcattgctatacagatacctgaaaatgtggaagcaagtttagaagtgggtaatggacagaggttgaaacagtttggagagatcagaagaagaaaggaggatgatggaaagatagaatttcctagagacttgttgaatggttgtgaccaaaatgctgatagtgatatgaacaggaaagtccaggctgaggtggtctcgaagacaaggaatcttttgggaactgaaataaaggtccctcttgctatgcttctacaaagagactggcagcattgtgcccctgctctagaaatctgtggaactttgaamttgaaagagatgatttacggtatctggcagaagaaatttctaagcagcaaagtgttcaagaagtggcctggctgcttctaaccatatgcttatatgcattcacagaaatgatctgaaactggaacttatatttaaaaggaaagcagagcataaaagttgggaatatgtgcagcctgatcatgtggtagaaaagaaagccccattttgtggggaggaattcaagccagctgctg

SEQ ID NO: 772180 - DNA, 614 bp, Homo sapiens
agtcctcacctcccttctcctgaaagcccctttcaaaacaaaaacaaaaaccacatccacccaagtccctgtctccacctctgcctccaggaaagccggcggaaggccgccagtctcagctgtgacagatacagatatttctgcatttccaggactgaggtcaatccctggggacccagtgaggcggtatctgaggggccatggagctggcttgatggggtctacaggtaggcagggacctggtggggatgtgactcaaggatttttatcaaatatctttatctcctgacagatgcaaaaaaaaaaaaaaatgagatcagactccagggtttcctccatgccacactgtggccccattgtttgttgtgctatcagcagaagttgaytttgcaaggaatgtacacgtgtatgtgatgtttgaatgcacctgtgcgtgcgtgcatttgtgtgtgcatgcgtgcattcgtgtgtgtgtgtgtgtgtgtgtgtgtgtgagtgtgtgtgcgcgctgaggatgtgagccccacttccggcccagtgcccctgcccaggctggctctgccctcctgctgctctgggcccctcaggcagtgactacctggtacatagggaag

SEQ ID NO: 772181 - DNA, 457 bp, Homo sapiens
caggttaaataccttaaacaaaacaggagagtagtgttgaaggcacaggttgtgttggtaataatgaaattaacttgttcttctctctctgtgtctctcttctttttattccattcactgtaaaattttgggactattagttactgcataaaagttgcagtaggcatccttctcattttaagaaacaggccttgatgcttgggataaattttttttaaatgattgaatcagaagcaaaatctaaatctgtttgattctttttcatatcattttccttaagacataccagtwttgaacataagccttgataactactctagctgtggattaactctcccctttttgtattggagtaaggtagtaactggatagaggcaaagcattagaggtaatcagagggatcaatgtgtcattgtgcaaaggaaaagagatgtaattgatagtgagattgggttag

SEQ ID NO: 772182 - DNA, 669 bp, Homo sapiens
ttattctacactattctctgtcacaaacctttcctctatgttcacactttcctctttacatattgtttctatggtacagttctcatattactcttttgtatacatcctacatttccttgtctaagctcccatcttcgtttggcaaaacttcaagcacacttgatgttaactccatgctttcttcatgtctacatctacacagcaaaacttggacagataagacactcttattctctctttaatttaattaaagagagaattaaagaggttaatttaacctcatgtagaaccttggcaatcctatggttttcccttagtccacttacctctataagttttttagaacttttttaatcactcaaacttctaaaatattccccttctctcctcactttcaattaatgatttgagaataaaaaagcatttggaaaagaattctcacaggctcttaccaccacatcttaccatactacctcgatctacatacatatattctcatctrttgccttaaatgtactggccattatcttaaataaggagaaacctttcatttttgaaatagatcccttaaactctcacattcacaatcattcaaaggagttgaagcaaattccctttatttttcctccttgtcttaatttgggtttacctaaaagcagatccaaagtc

SEQ ID NO: 772183 - DNA, 663 bp, Homo sapiens
gacatcacaaaagactctgaatagccaaagcaatcttaagcaaaaagaacaaagccgaaggcgtcatgctagcttcaaaatttactgcaaaactctatagtaaacaaaacaaaatagtactggcatgagaactgacacatagaccaatggaacagaatagaaagcccagaaataaatctttgcatttacaaataacttattttcaacaaagacagcaagaacatacactgaggaagggacaatctcttcaataaatggtccagagaaaatagaataactacatacagaagaataaaactatactcctatctctcaccaaatacaaaagtcaaatcagaatagattaaagacttaaatctaggaactgaacctatgaaactactagaaaaaaaaacattggagagatgcgctaggatattggtataaaccaagattttttgtgtgagactgcattaccacagtcaaccaaacaaaagtagacaaataacattacatcaagctmaaatgcttctgcaaagcaaacaatcaacaaaatgagacaacccacagagtgggataaaatatttgaaaactattcatctgataagggattagtaaccaacctataaataaaaaagctttacaaactcaataggaataaaacaagcaattaaataagtcatg

SEQ ID NO: 772184 - DNA, 600 bp, Homo sapiens
agctgtcattttgtctaatcagatctaagaatgacagagatgaggcccagagatgagatgaaaagtaacttgcccaaggttacatttctaaatactcagggaaaaaaaaaatacaaacacgaaaacaaaggggaaaaaaagctggattcaggtcccctgacatgaccttattttgttgttgttgttgtgatttgataatcccttgaaacaaaatagaaaactgcaaatggtcaaaaatgttaaaagtccacatttcttttttctcaaaatatgttcccaaaaccaagttcatcaaaattgcctagggagcaggtaaaaaatgaaaagaattggctcccatataaaagttacatagacttagaatacccatggctgactccttgaaaactatatgatttttaagtatcaaaggtgatttttatgcaaggttggaaaccyacaactctaaataaactttcccacgttttatattattattcaggttgtattctctcctctcagctccatgaaaacagagatttactctgttttgttaaccgctataacctaggtacccaggacaagacttaataccaggcacctaagaagtgtttgtaaaat

SEQ ID NO: 772185 - DNA, 517 bp, Homo sapiens
cagccaatttatagaattccaagcaaataattaatgtttattgtgttaattcactaagtttagggtggtttgttatatattaaaaaactgatacaaatggaagttgcttttattagatgaatcacataaaaatatatgcttcctttttacctttccagcactcccatactcaagtatagtgttgccagggatagtctgtttcctttgcactattcattcctggaaatcactttcatgctgtaattacaggcatgatggcagtgcctgattcycaagtgagccaagctgctgaacttaaattcacttgaccagctgggtcagtgaaaataaatggctttctttgaccagacttggcttggctcccttaatagtatcattttatatccctggttcaaggacacaattttgctggtcaggggcatattactgataaacatgccacaaagaaatagttagcttgaacagcagatgcaatttttttttttccacacaagagattccaaaaagttttcttctt

SEQ ID NO: 772186 - DNA, 578 bp, Homo sapiens
atgatttgttaagtcagggcctcaaagggttatcgtcttcactgagagtttcctgtggcaagcacaagtttctcaacccactcatttctcatatccttycttatggaatatggctgcagtgatgcttttaatgcagggagtcagttcagccatctggtctccacaataatttgtagaaagatacactttggggaatcacaatctaaaaagtagctgaaactcttagtaattatacctggatatacttcaagcagagggagacagaagacttacctttgaagggtgccttccttacagcccccatctgacatccacacgtatctggtgcctgaagaaatgtgttaggccactggatactttgggcccagagtccagcttgacaggacttttggtgggttctataggtcacccaaggcttgcctaagcctttatttccccctcagtgtatacttgctgagaatagagattcttgggttagttgaactcagtatttagttatttcagatttgggttctctgaagcttctgcatataaaaaatggattgttacacatgagagaactttgacaactgtaaagc

SEQ ID NO: 772187 - DNA, 605 bp, Homo sapiens
acggatgaacgattttcagagactgggtttttttttttaccaatctaaaacatcatacgattataatatgagtaatggggagatccatgtttttgacatcatattgtcatgagagaagtatgagactatgaaatcagtcagacctgtatttgaatttcagctccactacctactggctaagcttctgctttcttccctaccaaacggaggtaaaattattatctctaactattctttgatttgatttgatttatttcattttgttattattgttttttgagacagagtcaaactctgtcacccaggctggagtgctgtggtgtgttcttggctcactgcaacctctgcctcgcaggttcaagtgattctcctgcctcagcctcccatgtagctgggattacagacacccgccaccatgcccagctaattttttttgtatttttggtasagatgggagtttaccatgtcggccaggctggtctcgaactcctgacctcaagtgatccatccaccttggcttcccaaagtgctaggattgcaggtgtgagccacgggcctggcctctaaggattattttaaagactgagtgaagactccaaattgta

SEQ ID NO: 772188 - DNA, 600 bp, Homo sapiens
gtcatatactccggtaatacaaaggtcacaccctcaggtaattatatcttcctgccccacttcccccacaccctccatcctgaccccatgcctgctgtacctcatctgagggttcaatgctatgctcacttgcatggagacatgcttacttagtacagctggcccttgacaatgtgagtttgaactttatgagtccactggtacatagwttttcttctgcctctgccacttctgcgacagcaagacaagcccctcctcctcctcctcctcttcagctactcaaggtgaagacaatgaggataaagttatttctgataatccacttccacttcatgcacagtaaatatattttctcttccttatagttttcttaatagcaatttcttttctctagcttattttaattctaagaatagagcatataatgtctataatatacaaaatatgtgataatcaactatttacattatcagtacacagaaggctattagttaagttttttgggggagtcaaagttgtaagtaaattttccactgtgtggagaatggggcttcggacccctaatccttgtattgttcaagggtcaactgtacttgtatt

SEQ ID NO: 772189 - DNA, 611 bp, Homo sapiens
tttgtaccactcttaggagatcgttgcgtaggagtcaggcaggtggtgaagatttataccagtaactgggatctgtgggcctaggggtgaaggggccactgtagaccactagatgcttactgcagagtggtcagccttgtggagaactcagtcctggcccactgtcattctcagattttatgtggacaggtgggttctgcagaaaatctggctgtcacatgcttatagcactgagcagtaaatgggaccatactggtactgaatgagagcctgggaagccagagaatagtccctwatactcagttaaaagtcaggagtgcccaacagtgaattaactgttacactcgggaccattccagtctaattagatttgactcaaggctcagataaagctttgggtttggttcccagcatcatcatggcaagtgtgagcttttggtgtctatggaaggcactgggaagagtgagaggagcaggcacaggtggtgatagagggaacaatttaaagacaagcccctttatcctgatgatgatcccctcagtaacgttggggcaatgccttgatgtttacttggttctcagatatggattggccatcaggttggcacaat

SEQ ID NO: 772190 - DNA, 486 bp, Homo sapiens
aataagcgtgtttgttcttcagggttagttgtgtgtaggaagctgctttgtattgtgtgatttcctcaaggtcatttctggtcatcggggaaaactgacaatagtgtgcttcttttttttttttttttttttttttgagacggagttttgctcttgttgcccaggctggagtgcaatggctcaatcttggctcaccgcaacctctgcctcccrggttcaagcgattctcctgcctcagcctcccgcaatatggtgcctctaaatcagggtcgattcagttggccatacccctagaagagatttggaatgctgattcactagagggtgggtttgctgaataagcatattgtctaggtctaattgtagttttgtgcttgttaagttgcataaatgagctagaaaaagtgcagccttcaggaaacctgtttgcatctgacactgagctccagttgcacttcacctcaggcatctggttggcatctagaa

SEQ ID NO: 772191 - DNA, 616 bp, Homo sapiens
cttttctgagtttagacgcactagttcccaaattacatcttaatctcccctgtctgctaaaacaaggtttttcaaccttggcactctggtattttggatcagataattcccttgaggggtaggaggtgggctgtcctgtgcattgcagaatgtttagcagcatctctggcttctacctacaagataccagttgcactcccccaccccaaatcatgacaattgaaaatgtctctagatattggccatgttccctgaaaaacaaaattgcctccagttgagaaccactggcttaaggaatctaaccagcagttaaaacttcaaaagagtttgtattctcttctctctaagcaaagccatcttacacattttaaaaagatctcttctctctcttgtaagtcatkaaaagactcagattcttcagtgcgacaaagtgtgcttcaaaatactattcatctttctgggaaatttactaaacttcacattgcccatttgtagttgcatgttaggtataatttattagtcaatttcacaagattttttctccccacgtgcgggccctgagacatagatggcagatgtctgttacttagatgtccattttctgttgcttagaaca

SEQ ID NO: 772192 - DNA, 639 bp, Homo sapiens
actctgggtctactaccaaacccctatcctgtttctgtattgcaaaacaacaactttgtatatccattcttcattctgcagaagttatggatttagcgggatgtaaaaacttcctccagaagattttaactgactcactgacatttggtagaataaaaaggtcataaccaaatattcatgcaacatttccccactaattatatttagcctaactccctaataacacagatacagaaattcagttaaaggggttaagcaactcaaccaagtctaaataactacgtaacytaatgctaaattcgagatgctgaaaatatcctaaaacaaatattcatttaaaaagatctgtacctagagattctgaactagaatttgggaagacagattctgattagggtataataagaatggagacaataattgaaaccagagggaagagggcatttttaagagataatataaagatcatagcattgaagcatgaatttgcaggaatgctcacagctgaagcagaagaggaagagaggacaattttccttttgattttccatttcttctgactctaagtgtaatgtactataagcttcacagataagaaaggtatagacaatactatagatggcatagagcttatctccc

SEQ ID NO: 772193 - DNA, 639 bp, Homo sapiens
actctgggtctactaccaaacccctatcctgtttctgtattgcaaaacaacaactttgtatatccattcttcattctgcagaagttatggatttagcgggatgtaaaaacttcctccagaagattttaactgactcactgacatttggtagaataaaaaggtcataaccaaatattcatgcaacatttccccactaattatatttagcctaactccctaataacacagatacagaaattcagttaaaggggttaagcaactcaaccaagtctaaataactacgtaacctaatgctaaattcgagatgctgaaaatatcytaaaacaaatattcatttaaaaagatctgtacctagagattctgaactagaatttgggaagacagattctgattagggtataataagaatggagacaataattgaaaccagagggaagagggcatttttaagagataatataaagatcatagcattgaagcatgaatttgcaggaatgctcacagctgaagcagaagaggaagagaggacaattttccttttgattttccatttcttctgactctaagtgtaatgtactataagcttcacagataagaaaggtatagacaatactatagatggcatagagcttatctccc

SEQ ID NO: 772194 - DNA, 644 bp, Homo sapiens
cagaaggcctggacagtcgttagacagataacaaagggccacctaaacagcctgtaaaggtctcaacgaaaagtcatctactcaaaagggaacgttgagaattcattgaggacagaactccatcctttttatagcacgtgccatcttcacattatctgtaggatttggatgaagtttaccaaggactatcacattttcatttaatcctctccataatcctataaagcagatatgatgatctccattgaacagaagcaacggaagcttagcaaggttaagttacttgcctcaagtcagaatgtcagtgtctggctgagaattcaagcctgggcttctccagctttctgtttgcttattcaatatccttctctcctaaccactgccccccrcccccgcccccaccacagcatcaattaaaacaaaaaatgcaaaatgtgcaataagaactagaatccttaaccctgagagtatcttacaagaatccctgggattcttgaggcttgttgaaattgctttgccttcagacattcacatcaagacatgaactgagttttcaacctaggcaaagccgtggaaatgattcccagatgttgggagccaattgccaacaccccaaccggccgccagtcagacaaaggacttgt

SEQ ID NO: 772195 - DNA, 630 bp, Homo sapiens
aacactaatttatttaccagatcacaattcctcctcgctgaaatggatttaagtgttttcacagagcttctggcgtcctagtccctctttgtcacggtccggcatatgagacggttttgtttacaactatgaaacgctgccaatctcttcaaagacaactgtacgccagaaaaagtgcattacctcatctgacaaactaatgtagatgataaagaatcttaagagtgcagccaaaagttaattgacactaatttgaatagttaccaggattacagataataataatagcctgcacagagttttgagagtttcaaaaatctctttataagtttgatcctgcattgttcttgaaagacccttgkgaaagagattagtaaaaacagtatcctatctgggatcacatctaataatttcacaacccattcatttatccagtgataaaaatgtatcacgtacaatcagataagtttaggggtcaggtgtcctgaaggatgccaatatgagcaagccgacatcccggcttaaagagctctcgatcagatagagatcatatgacagatacagaaataaatataacgcaaggcagacagtgctaaggcttataagagggatgaaggaatatctttctgg

SEQ ID NO: 772196 - DNA, 659 bp, Homo sapiens
atttttgatgtcatcttagtacttcctaaattactctttttaaaatctctctggatcgattcctatttatctgtgatgcttacaggttcctggtctttctggaggtactttagaaatgtgaaggatatagcaaacgagaatcaagaatcttcctactgcaacctttggagattattacacagtggtgcgggccacggggattgagggattcgagggaccttctrtcgcccatgtgacgcagatttccccaggctcactgctggaaagcctgtccgcatcgttttcatccttgcgacgtctaaattgcagaaaggcagagtcgtcttctccctcatttctagaggctcgggtcccgcgggtgtggagccgcacccttggtagtgacaaggtctagatgcttctctgcccggggaatggctctggcactgatccagaggccatctgctctgtggggagggaagtgggagtatgggtaagcaggaaaaatgaggtcagctttcagagcagtcaaccgtctctgacgagctggctagactgcgaactgtacaatatgtactgcagggagatgtccgcaacaggagacactcagtctggccagacccagagcccccaccccagggcatcaggacgacacagtcacaacacaggggacgcagatt

SEQ ID NO: 772197 - DNA, 601 bp, Homo sapiens; identical to SEQ ID NO: 737715

SEQ ID NO: 772198 - DNA, 623 bp, Homo sapiens
tggaaaacccaactcaagctcccttgggtaacaaagggcacttttccactcccatgtgtgggaggcccagcggcagatcttaacacctgagctgagaacagaggtgccaagagcatcatgagagtttgatttctgttgccatccctcctctggatgataaccatcccaagctcctcattgtggccttggaagcctgcagctttcatcactggaactgccagcagtttctctggaaagagaaatcctccctgagagtttaaagacttggaattaagaattgtgggcctggtttagctctcttctctcttgccagaactaattgagatgcaacccaacaaaggccatactgttcctggaccaaaccgagggtcaggctgcttactctcaccgcccaataaccagatacagatgaactggggaggaagacagtttttatttctgtaaccaggtacagggagaaggcctggaaaatamcaccagaccaactcaaaattacaaagttttccagagctcatataccttctaagctatatgtctacgtgtaagcgtgcattcatctgaagacataagtgattaacttctcatctgtaactaagatctaagtcctgaagaacttcctctgg

SEQ ID NO: 772199 - DNA, 452 bp, Homo sapiens
catatgcatttggccactgactcatcaatccctgtcttagtccttttgtgttgctacaaaggaatgcctggggctgattaatttataaagaaaagaggtttatttggctcacagttccgcaggttgtacaagaagcatggcgccagcatctgctcctggtgagagcctcaggctgcttccacatatggcagaacgtgaagggagttggtgtgtgcagagattacatggcaagagaagaggcaagacagagatgggrgtgccagggtcttctaaccaaccagctctcacaggaactaataaaaactcactcaccattcttcaccaagagtgggcattaatctatttgtgaggaatccactcccatgacacaaacacctcccattagactccatctccaactttgaggatcaaatctcgacataaggttgtgtggacaaacctgcaaaatatag

SEQ ID NO: 772200 - DNA, 539 bp, Homo sapiens
catgcccttgggaactagggggtgtctcggtaagaaggagttagaaaagacgtactggactgggtcttgtgttaggtgatttggtggagggtttgaggaggcagggctttgctatgggttcgatgctgccaaaaagcaggaatggttgagcatctccacccatcttttttttttttttttttttttttttgagacagggtctccctctgtcacrcaagctggaatgcagtggtgcaatcacagctcactgcagcctcgaccttccaggctcaagcggtcctcccacctcagcctctctagtagctgggactacaggtttgtgccaccacacttggctaatttttgtatttttggtagagacggggtttcattcaccatgttgcccaggctgggttcaagtaagcctcccaccttggccatcgtgccaggcctcagtaaatcttatctagacaaaaagaagactaaagcaagactaaagctgacactggtaaagaaacagcagtcactcgtatcagttggaacagagacagaggtttgac

SEQ ID NO: 772201 - DNA, 442 bp, Homo sapiens
tttaatgttggctttggagttcacttcaaatgaacaatcttctgtgcccaccaacaggcacacacactgcattttgggagacactgaattctgtctttctgttttgggcttcttttttttcttttgaataacatgttcaaagatcagtccctaagttacatgacatgtatttagtatttggttggaaaacttggttatcgtgtcatgccagatgcgctgtcctctggtaaaaccctcaccaagaactgaggttgaattacgttgaaattgccatttttgtaggytgaaaatggtctaatgtcagcaatttcatgccatgtagtttaagagcaaccatcatcaatatcaatggtatttctcatttccaaaggactcccacaaacatcaccttgcttggtcccaacaataaactttggtgcagggttttgtttgtttttttaat

SEQ ID NO: 772202 - DNA, 593 bp, Homo sapiens
gccctgccctcctgaagcttctaatccggaaggggagatgggtattaattggatatcatgccaaagggtgagatgttgcaaagggagatgagcattgtgcagagacaacatgaatggaaaacctacctagattagagggtagggagggctttcatgaagaggtgatgtttagatggagattgaaaggacaagctkgagttgactcagtagggataggagagctgcagcagagggggtaggccagggagtaggacagatgctacccacataccaagagccaccattcatgggcatcggctccatgagaaggaatgcagacagcttctaggagcaaagaccagcccccagctggaaacaggcacctcagtcctacaatcacaaggaactgaaatcagccaacaacctgaacaagtctggaagtgaattcattcctggagccaacaaatggaacgtggccctgctgaccccctgattttggcctcatgaggctgtaagcagaggacacagctgagccaggctgtacctggtcttctgaccttcagaactctgacataacaaatgcacattttttaagttgctccattcgtgaaaac

SEQ ID NO: 772203 - DNA, 572 bp, Homo sapiens
ctattttctcagtatctccagtgactagtgtgttttagtcactcaaccaaatggtagcacagtgatcctcactgtcctcgtttaggtgacaacagacgttagaggaatgagttcatggtctcgattttcaaagtgtggtcctgggctggcagcatcggcaccactgggctcttgttggaattgcaaggtctgggcctctagttcagcctgctgcagcagaatcttacttaacagcctctctagggggtttgcgacacattgaggtttgaggagtgctgctctgaagctccttctggctcccgaatgcagggattcaccccagcctggggtgagctctgtctctcagattcatatctttgggaacaacagcagccagtccagccctgcattttaaccttttactcttgcttttcccaaatgttgtctccagmtgcctctgcgcttgggtgtgttggggtgggagggtggggcgatggggagtcgatggggggcctcatgctgccgcagattcggattttgctgggctcaacatgctttccctgagcttccagatccagatcctcactccccaa

SEQ ID NO: 772204 - DNA, 488 bp, Homo sapiens
tttttaaataaacttttaattttagaatcattttagatttacagaaaaaaatataaagatcgtacagagttaccacacaccctgcacccagtttcccctataactaatatcttacgtcgagccagtgcagtggcgcacatttgtaatcctagctgctcaggaggctgaggtgggagtattgtttgagcccaggagctcgaggctgcagtgagccatgattgcaccattgcactccagcctgagtgacggagtaagatgccatcttttaaaaaaaartcttatgccagtatgatacatttgtcacaattaatgaactaagattgatatattatcattaactaaagtctatacttcattagatttccttagtttttccccagtgtccttttctattccaggatcctgtccaggacaccatatcatatttagttgtcaagtcttcctagttcctcttggctgtgacagttttttagacttcccttgttttt

SEQ ID NO: 772205 - DNA, 613 bp, Homo sapiens
ctcataaacagattaatccatttgtggtgaagggttgaaggatgcaccatctgccagtatgccaaattggtacattaattatttcgggttaaaaatattggaggctgggtgcggtggctcatgcttgtaatcccagcattatggtaggctgaggcaggtggattacgaggtcaggagatcgagagcatcctggctaacacagtgaaaccccgtttctactaaaaacagaaaaatatagccgagcatgstgacatgtgcctgtaatccaggctactcaggaggctgaggcaagataatcgcttgaacctggaaggcacaggttgcagtgagtcgagattgtgccactgcaatccagcctgggtgacagactccatctcaaaaaaaaaaaaaattttttttggagaaattgtagtttcagtaagagctagctgacttgactctttctgcaggcatcaagccataaaaattcctctgggagaggccacctccccataccagggtgagaaaatagtcctcatcactggaagcgggacttctggctgcaatggacctgaataaatccacttattgaactagccttagcttctgctagttttatacccaccccatatat

SEQ ID NO: 772206 - DNA, 613 bp, Homo sapiens
ctcataaacagattaatccatttgtggtgaagggttgaaggatgcaccatctgccagtatgccaaattggtacattaattatttcgggttaaaaatattggaggctgggtgcggtggctcatgcttgtaatcccagcattatggtaggctgaggcaggtggattacgaggtcaggagatcgagagcatcctggctaacacagtgaaaccccgtttctactaaaaacagaaaaatatagccgagcatggtgacatgtgcctgtaatccaggctactcaggaggctgaggcaagataatcgcttgaacctggaaggcacaggttgcagtgagtcgagattgtgccactgcaatccagcctgggtgacagactccatctcaaaaaaaaaaaaaattttttttggagaaattgtagtttcagwaagagctagctgacttgactctttctgcaggcatcaagccataaaaattcctctgggagaggccacctccccataccagggtgagaaaatagtcctcatcactggaagcgggacttctggctgcaatggacctgaataaatccacttattgaactagccttagcttctgctagttttatacccaccccatatat

SEQ ID NO: 772207 - DNA, 550 bp, Homo sapiens
aagtacaaaaaaattagccgggcatagttgggggcgcttgtaatcccagctactcgggaggttgaggcaggagaatcgtttgaacctgagaagtggaggttgcagcaagccaagattgtgccactgccctccagcctgggtgacagagcagtattccatctcaacaacaataacaaaaaaaaaaaaaaaaaaaaaaagaaggagggtaggatgtggagaggcagacacggacccagctgctcctttgcgtcctccctggcattgaccctgcaraggccccggttgctagattcagttcaggccacgcttctctgccttgggacatcctcctagaagccagcagtgccagagtcaggggagggtgggactgacatttgaggatgccttcttcagggcaggcagtaggccaggcctttcctgctgtcacatggtacaatgcacgtgaccgtgcaaggctggcggtgacaggtccatatttatttcagcttgtccacatgcatgaattttcaaaattgagataaaaggtgtataccgtaatgattcacttctt

SEQ ID NO: 772208 - DNA, 505 bp, Homo sapiens
tggaaaaataaactttctaaattaactgagacctgtctcagattttctgggttcacaggcccaaccttccgtgtcccccaaggcgttccggggcggcctcaccttcgcttcttctgcatccagtccttgacctccaggtccgggagccccatccactggccttggctcaggatcaccatggagccttcgatggactgcagggaaaggaacmctttggtccaggcctctgctcgcctgaacccatttggggctagagggcatgggaggcctttgctggggctgggtagagggaggagggagaggcagggttgcggggtggagaatgaggaaagggagatgccagagtcccagccccaagtggggagaacgagggagagagccccccacaagccatgccctcgctgccccactcacgtgccaggctcccccggggaggttccggcccagaaccacgtgggggatggcgtgctccttccggtgcttccaggtgaggaccgacttcatg

SEQ ID NO: 772209 - DNA, 471 bp, Homo sapiens
aagtcacccagacatcttttaggcggcaagcttttcagacagtttaacacatttattcttgttttttcaaaaagagcaaacacgtggcgttacaaaggtcctccgtttcgcacgcaccggtgtcccggcagcgcgctgcgcgtcgggaggcccagtctgtcgtcccgtggggccgggggtcaggaggtcgggcaggcgggatttggggtttcgcgtgttccggaccggacacttcgccatcttaacgagctaccgcccgggttaaggggcacccagggcaggtgcccggccgggggtggggtgtccgagccgccggtgcctgkacgtggacccctgcaggaagggtccgcgcgggaagcgagctctccacgagtccatgacagcaggcccgcgggggcagggagcctgcgccaggcagtctttctagatcctggcccagcctggccgctttcgcgcccgtgctccttttcg

SEQ ID NO: 772210 - DNA, 574 bp, Homo sapiens
tatgttggccaggctggtcttgaactcctggcctcaagtgatccgcctgccttggcttcccaaagtgctgggattacaggaatgagccaccgcacccagctgcatttttttttttttttgctcatagacacattttaaaattgaaatgtaaaaatttggattatgtggtgcatgaactgttttacttaacatttcattagcatttccccatatttctattgtaacaaatgaccacaaayagtggcctagaacaacatgaatttactgtctcacagttctggatatcagaagtccagaatccgcctcactgagctcaagtcaaagtttcagcagggttgtctccgtctggaggctctgtggagagaatcagtttccttttgtttttcagtttctacaggccacctgcgttccttggctcctgacttcttcctcaaattatctcaacctcttgattgctttcttttttcttttttttttttgagatggagtctctctctgttgcccaggctggagtgcagtggcacagtcttggctcactgcaacctctgcctcccgggttcaagtgattctcctg

SEQ ID NO: 772211 - DNA, 508 bp, Homo sapiens
ctgcttgggcatctggtgggactgcttccagggctggtctgaggacagtaacatgcatacgtcagcccctctgggaatgaggcacacatcctccggtcccctttgctgtggtctctttgtctgggtcctgtgcccttggtgctcctagactctgtggtgccagcaagcctgcagcctcacgtccctccttttcaataccagcaatgatttcttgwtgcgttcccttattttttaagggtttaaagtacactaagcattatagggcttagcaggtagaggagggtgggaaggtggtatttttttggtcaacttcagtgggagtttctgtcagtgacttctgtaccagcctctgctccttgagttcctgggaatgtgtaaacatctagcatcagtcatcagaaaatcattattcgttcctctgaatgaccagctggtaggatattggtggccagtgggctgaggaggcagtaccactttttctcggtgtgttgggaattgtcagttaaaa

SEQ ID NO: 772212 - DNA, 619 bp, Homo sapiens
agcaaacttctgaaaagtaaagacaagtaaaaaatcttgaaagaagctaaagagaaataacattttacctgttggagaacatcaattcaattgcctgtggattttttatctgaaaccagagaggacagaaaagagtagcacaatatttttcaagtgattgagagaaaagaagtgtcaaccacaaattttatatccagtaaaaatatccttccaaattgaaggggaaatagattctcaggtgaagaaaaactgagagaatccatctctcaacaggctcactcttaaaaaatgactttgggaagttgtctaaggaacttaagaagggaaagaagaatggataaacgtaggagtaaatataacagatattacttctcttcttgastttcttaaatcttatttgatagttaaagcaaaaatcatagcactatctgaggtggtattcaatgtatatacaggaagtagctaagacaattttatcttaaaagtggggagcataaggggacccaaatggaagtaagttttctaaacttcactcaaagcggtaaaacctcaatactaatagactttaataagttagttgatatagtatctgaagcagccactaataaaaataaaaaag

SEQ ID NO: 772213 - DNA, 657 bp, Homo sapiens
ataattttaaaaagaggtttggcttttgatatattaagataacaggagaacgaacttctaccaaccaagaggtagcaaatgagttcccaggcaccattaagaaaatcattgaggagaaaggatatcttcctgaacaagtatttaatatagatgaaagtgtcctattctgggggaaaaatggcaaaaaggacattwattagcatgggaaaaaaagcaagcaccaagatttaaggcataaaggacaggttaactctactgttttgtacaaatgtaggcaggtttatgatcaggactgctcttatctataaagctggtaatccctgaatcttgaaaggaaaggataaacaccatctgcctgtctttgggttgtgcaaaaagatggcctagataatgagaaccctttctctagattggttccatcaatattttgtccctgaagtcatcaagtaccgtgccagtaagggactgcccagaaccctatgagctcaatactgaaggtgtcaaagtggtctacatgccccaaaacacagcatctctaaatcagtctccagatcagagtgacgtaagaacctctatgctgcattatacacagtaatgtaaagaattgtcaatcttatggaaggcaactccgacagagagaacatcatgaatatctag

SEQ ID NO: 772214 - DNA, 657 bp, Homo sapiens
ataattttaaaaagaggtttggcttttgatatattaagataacaggagaacgaacttctaccaaccaagaggtagcaaatgagttcccaggcaccattaagaaaatcattgaggagaaaggatatcttcctgaacaagtatttaatatagatgaaagtgtcctattctgggggaaaaatggcaaaaaggacatttattagcatgggaaaaaaagcaagcaccaagatttaaggcataaaggacaggttaactctactgttttgtacaaatgtaggcaggtttatgatcaggactgctcttatctataaagctggtaatccctgaatcttgaaaggaaaggataaacaccatctkcctgtctttgggttgtgcaaaaagatggcctagataatgagaaccctttctctagattggttccatcaatattttgtccctgaagtcatcaagtaccgtgccagtaagggactgcccagaaccctatgagctcaatactgaaggtgtcaaagtggtctacatgccccaaaacacagcatctctaaatcagtctccagatcagagtgacgtaagaacctctatgctgcattatacacagtaatgtaaagaattgtcaatcttatggaaggcaactccgacagagagaacatcatgaatatctag

SEQ ID NO: 772215 - DNA, 644 bp, Homo sapiens
aggcaactctgggtctactaccaaacccctatcctgtttctgtattgcaaaacaacaactttgtatatccattcttcattctgcagaagttatggatttagcgggatgtaaaaacttcctccagaagattttaactgactcactgacatttggtagaataaaaaggtcataaccaaatattcatgcaacatttccccactaattatatttagcctaactccctaataacacagatacagaaattcagttaaaggggttaagcaactcaaccaagtctaaataactacgtaacytaatgctaaattcgagatgctgaaaatatcctaaaacaaatattcatttaaaaagatctgtacctagagattctgaactagaatttgggaagacagattctgattagggtataataagaatggagacaataattgaaaccagagggaagagggcatttttaagagataatataaagatcatagcattgaagcatgaatttgcaggaatgctcacagctgaagcagaagaggaagagaggacaattttccttttgattttccatttcttctgactctaagtgtaatgtactataagcttcacagataagaaaggtatagacaatactatagatggcatagagcttatctccc

SEQ ID NO: 772216 - DNA, 644 bp, Homo sapiens
aggcaactctgggtctactaccaaacccctatcctgtttctgtattgcaaaacaacaactttgtatatccattcttcattctgcagaagttatggatttagcgggatgtaaaaacttcctccagaagattttaactgactcactgacatttggtagaataaaaaggtcataaccaaatattcatgcaacatttccccactaattatatttagcctaactccctaataacacagatacagaaattcagttaaaggggttaagcaactcaaccaagtctaaataactacgtaacctaatgctaaattcgagatgctgaaaatatcytaaaacaaatattcatttaaaaagatctgtacctagagattctgaactagaatttgggaagacagattctgattagggtataataagaatggagacaataattgaaaccagagggaagagggcatttttaagagataatataaagatcatagcattgaagcatgaatttgcaggaatgctcacagctgaagcagaagaggaagagaggacaattttccttttgattttccatttcttctgactctaagtgtaatgtactataagcttcacagataagaaaggtatagacaatactatagatggcatagagcttatctccc

SEQ ID NO: 772217 - DNA, 633 bp, Homo sapiens
aacatattcattaactaaagaacaaataactaaattatgacattttattacatgtgccatacatcaattaaaataaattacctaatgctacatacagaaacatggatgaatctcacaaacaaaataatgagacaaaaaaagcagacacaaaggagaatataacacttgattttattcatatcaaatcaaattcaaaaatagacaaagctaatctgtggttttagagattaggacagaagttatcattggggaagaagggttagtgacagggaggaatcatgaagggtattttaaagtattgttaacattctctttcttgatatggctgaarttaattttttccaagctataaaactgggaattttgtactttttaattcatattaaaatttaattacttaattcacatagaaaaacagtaaagtaaaaactcttactttaaactgtgctcctatatcagtgccttaacaaataaaatgtgcagggtcatgatcattttgaacaaagtagagtaaactaattcccctacagtacatcccactgccccaaaggtagcactttcagggaaacccaagatgccaccaatgccacattctaatataaatcatgcacctatagaaagttttaaagttta

SEQ ID NO: 772218 - DNA, 618 bp, Homo sapiens
cttttctgagtttagacgcactagttcccaaattacatcttaatctcccctgtctgctaaaacaaggtttttcaaccttggcactctggtattttggatcagataattcccttgaggggtaggaggtgggctgtcctgtgcattgcagaatgtttagcagcatctctggcttctacctacaagataccagttgcactcccccaccccaaatcatgacaattgaaaatgtctctagatattggccatgttccctgaaaaacaaaattgcctccagttgagaaccactggcttaaggaatctaaccagcagttaaaacttcaaaagagtttgtattctcttctctctaagcaaagccatcttacacattttaaaaagatctcttctctctcttgtaagtcatkaaaagactcagattcttcagtgcgacaaagtgtgcttcaaaatactattcatctttctgggaaatttactaaacttcacattgcccatttgtagttgcatgttaggtataatttattagtcaatttcacaagattttttctccccacgtgcgggccctgagacatagatggcagatgtctgttacttagatgtccattttctgttgcttagaacaga

SEQ ID NO: 772219 - DNA, 641 bp, Homo sapiens
cacgtgtgtgaagcttttctggttcatcaagctacaagcttgggactgtgtattttttatttgagtctgcttcttttttgtggctctgatttttgttgtttatttaatttttctgtagagccgggttctcaactatgttgctcagactggtctcaaactcctgggctcaaatgatctgcctgcctctgcctcccaaagttctgggattacaggtgggagccactatatccagcctgatgttttttttttttttttttttrgacggggtctcactctgtcacccaggctggagtgcagtggcatgatctcagctcactgcaacctctgcctcctgggttccagcgattctcttgcctcagcctcctgagtagctgggactacagacacccgccactacacccagctgatttttaatagagacggggtttcaccatattggccaggctggtctcaaactcctgaccttgtgatctgcacacctcggcctcccaaagtgctgggattacaggcgtgagccactgcgcctggccctgattttgttttttaaggcttagctgggcaagtgtatttctagtcaaattacagtatctgtacagctggaggagtggggaacaggatcccttcctccattcgcttgcttt

SEQ ID NO: 772220 - DNA, 623 bp, Homo sapiens
acttaggttaatcagatgttgagaatttttttgatgtgatttttgaaaaatacattataatattcacttatggatcttgtaacctccaattgctcactattggaagttgaagtctctgtttccaaagaatattactcttaaaagtagctgaaaatcacactaaaggatattattcttaaaagtagctgaaaagcaccgatggctcrtcattaatgtgaactatttgcaaagttttctcatgtttgcagcatctggaaaagctaatggaagctacaaaagacacatcaagaataaatgaaaagaccctggaaaagagcaatgattttgctctttgaaagaaatgaagatatatcatttaataattttatagaaagaaaggcacagaggggattgccatgggtttgaaatgcccgtctttatacagaatgttctgaattagatcccaataatgtggcatgaagggggagtaaagagacttcaaaaagctaggagaaaaaaaataagaacttaagttgcttgtgtgaccttggaaaagtccatttccttgtgagacagttttttcttcaatagaaaaaaaaaagcttgtgatcaacaggttttgatcaggaaggttaatttatcag

SEQ ID NO: 772221 - DNA, 575 bp, Homo sapiens
actttctgcacaacactgttaaagatccatctggacaggacttttttttttaaatatagctgtttcacatacactctcatgtagactgcatttataatgctgaggacttctgaaagaattcttaaaatgacaatcctaatgtgttgaagcagtatacaaatgcagtgtgacagtaaaagrcattggttttctcttctatgcagccacactaagatagaatcttcaagacagcacattccacattaaagctggctttggattgataaccatgtgtgaaccaaaaagtcacaccttgaatttaatttcacagagcacttgttctgctacttgttagctctgcaactgtgaaaaatgatttcacctctctgaacgtcatttataaaatacaaatagcagcccctaactttaaacattctcataagtagatcaagctttttagtactttgcacagtaactggcatactaaactgagtgaactgataagtaaaattaggttagtaaaattagacaattattgctataattttttggaaaagtatccttgtaaaaagagaaatattcttattttaattgtg

SEQ ID NO: 772222 - DNA, 601 bp, Homo sapiens
gttggatgaattgacaatgtaggcatacataatataaaactaataattttaacatttatatatgtaaaatttatttatgtaataaattataaaatttatatatgtaatattctaatatagtagctcacatttattatctactagctgaagtgctaaacactttgtgacttaattcatttaattcttacacacctggttttttagttaacacaataagcattatcatgttacagataygaaaactgaggaagagagaaattaagtcatttatctcagtagatttgctggaggtttgaatctatcatagatccaacatcagcattcatattactacctttgaacatactaacccccagtggtgaaaagacaactagtattaaatttacatgatagtgtttgaagtactggctttatatgtcttttagttcttatgggagattatttatattgatagtcctgattaatggcctccctgtttacttatgatttgcagttcttcctgctgttgagtgagtctttggccatctgttgaatctgggctattctgatagaaataagtgattacatgaagatggtcccaagtatagaccttaagtccatc

SEQ ID NO: 772223 - DNA, 601 bp, Homo sapiens
gttggatgaattgacaatgtaggcatacataatataaaactaataattttaacatttatatatgtaaaatttatttatgtaataaattataaaatttatatatgtaatattctaatatagtagctcacatttattatctactagctgaagtgctaaacactttgtgacttaattcatttaattcttacacacctggttttttagttaacacaataagcattatcatgttacagatatgaaaactgaggaagagagaaattaagtcatttatctcagtagatttgctggaggtttgaatctatcatagatccaacatcagcattcatattactacctttgaacatactaacccccagtggtgaaaagacaactagtattaaatttacatgatagtgtttgaagtactggctttrtatgtcttttagttcttatgggagattatttatattgatagtcctgattaatggcctccctgtttacttatgatttgcagttcttcctgctgttgagtgagtctttggccatctgttgaatctgggctattctgatagaaataagtgattacatgaagatggtcccaagtatagaccttaagtccatc

SEQ ID NO: 772224 - DNA, 612 bp, Homo sapiens
tacatatttatggggtacatatgaaattttgatacaagcatacaatgtgtgatgatgaaatgaaggtaactgggatatccactacctcaggcatttatcatatatttgtgttaggaatatttcaaattcactcttcaagttattttgaaatatacgataaattattgatgagtatagtcaccttattatgctaccaaacactgtatcttattttttctatataactgtatttttataaccattaactaaccactcttaatcacccactctyacttacctttctcagattctggtaaccatcattctactccttacctctatgagatcagtttttttttagctctcacatataagtgagaacacgcaatatttgtctttgtgtgcctggtatttcacttaaactaatgacctccagttccattcatgtttttgcaaatgatatgattctattcttcgtatggctaaataacattccattgtatgtaggtaccacattttcttattcattcatctgttgatgtacactggggttaattccacatattggctattgtaaatagtgctgctgtaaacatgggagtgaagacacctctctgatatgctgatttatgt

SEQ ID NO: 772225 - DNA, 440 bp, Homo sapiens
atgagaagactataccaataaaaaaggttattaaatctgaattgtaggatgtgtgtggatgtataaggcatgacaagataaagcatgtgaaacaatgatgacaattacagctatagaaatgaatatagagtggtaacaaatttaagccacaaattagatgactcaaaacaacagtaattttcttcactcagagtccttgtggctagaaatttaaaatgaaggtgtcatgaagattgtgctcccttgtaagctccaaagaagaacctttccctgcctcttccragcttcaagtattccctggggattgttggcattctctggcttgtagctgcatcagacactatgaattttgccttcatcctcacatagctgttttccctctgtatgtgcctgtgtcattgtttcccacatttttaaaaaattttttttattttttgaga

SEQ ID NO: 772226 - DNA, 612 bp, Homo sapiens
ttgtccccacattttggggggatgtagagcacactagagtctccctgaatggacataatcttaattctcatctaaatactgttgtaaactgaccaccatctctcactgtaattttctcttctctcccacattagttaggaggaatggaaaggtgtggagagagagggaaagggagagaatgaagctgatcattatgaatkcatacccatgggtccggcccagtgctgagcactttgaatatgcctccattctttgcaaactttgagcaaatcattttacaggtggggaagctggggggcgggggtgggtgcagaattcactcacactctttctatttcatcctttctatcttctgtcacggtagaaaaacatccacaaggcaagatccatcttccagggagcacccagctgaaaaggggtctggctcagctctgcccttttcaaggttacttcttctatccacaagtcttcaaaaatttctaaatggagattttatttaaagaagatgtgagtttcgttaaaaaaaaaattaaaaaaaagaacattctacgcctgagctgactttcatggaaggggccacgttctgatttcattttgccaaaataacttttt

SEQ ID NO: 772227 - DNA, 531 bp, Homo sapiens; identical to SEQ ID NO: 769333

SEQ ID NO: 772228 - DNA, 576 bp, Homo sapiens
  misc_feature 17: n = A,T,C or G
gagggatccacggagcntgcagagggggcagaggtgtccgcaggcctcctgcccttccaggcttaatggatatcatcttccctgctaaaaaggcccattcactaggtgagtgatgtggaactgtttaatgaaagcaggaagatgatgtgaatgccagttcacttgagtgttacaaacggtttggggcactatagccttaaagtttctcctgctctttgcagataatgaaggggcgctttctggaatctttgtggctggggctgctgctctgcactgctgtggctcttttycacaaatgcttatggagctctaactgggggcaaggaactgtgctacggttgggaagagaggagtgggcaaaaggagacactggggcttctgtgactttagaggcccatcatcaaattttcttttttttttttagatggactttcgctgtgtcacctaggctggagtgtagtggtgcgatctcggctcacagtaacctctgcctcctgggttcaagcgattctcctgcctcagcccataggcacatgccaccacacctgactaatgtttgtatttttggtaaagaca

SEQ ID NO: 772229 - DNA, 609 bp, Homo sapiens
agcttaagaaacttttgtactgagatgatggagttttctagatataggatcatgtaatctgcaaacagtttgactccctcttttgctatttgaaaaccgtttcttcctttctcttgcctgattgccccagacagaacttccaatactatgttaagtaggagtggtgagagagggcacccttgtcytgtcagtttccacagggaatgcttccagcttttgcccatttagtacgttattgggtgtgggtttttcataaatggctcttatcattttgaagtatgtttcttcaaaaccttgagaagtttttaacttgagaagggatgctgaattctatcaaaggccttttctgcatctattgagaaaatcatgtgaattttgtctttagctctgtttatctgatgaattgtatttattgatttgcatatgttgaaccagacttgcatcgcagggatgaagctgacttgattgtggtggattagctttttgatgtgctgctgaattcagtttgccagtattttattgaggattttcacattggtgttcatcagtgatactgacttgaagtttccttttattattgtacctctgccaggttttggtatcagtata

SEQ ID NO: 772230 - DNA, 587 bp, Homo sapiens
cctatatcctgtttcttttcctattggaactcatatcacatgtatattggcaccatttagtactgctctataaacctttccctaccatctagtggatgctctattttgtttttattttttactctatttactctttatgttccatttggataaktactagtgctttatcttcaagttggctgattttcccctcatctatcaaatctagtgattctattaaataccttcttaatttatattttccatttttttccaaattattctttccataaggtccagctttactgaaattcctcattgattcatgcttgttatctactttttctactaaatcatttgacactttaatcaaagctactttgtagttactacatgaattaattcattgattttttttttttaattttgagacagagtctcactctgtcacccaggctggagtgcagtggcgtgatcttggctcactgcaacttccaccctcctgggttcaagcgattttcctgcctcaatctcccgagtagctggagttacaagcacacactaccacacccagcttttttttttttttttttttagtagagatgggg

SEQ ID NO: 772231 - DNA, 587 bp, Homo sapiens
atataacttgaaccctatatcctgtttcttttcctattggaactcatatcacatgtatattggcaccatttagtactgctctataaacctttccctaccatctagtggatgctctattttgtttttattttttactctatttactctttatgttccatttggataattactagtgctttatcttcaagttggctgattttcccctcatctatcaaatytagtgattctattaaataccttcttaatttatattttccatttttttccaaattattctttccataaggtccagctttactgaaattcctcattgattcatgcttgttatctactttttctactaaatcatttgacactttaatcaaagctactttgtagttactacatgaattaattcattgattttttttttttaattttgagacagagtctcactctgtcacccaggctggagtgcagtggcgtgatcttggctcactgcaacttccaccctcctgggttcaagcgattttcctgcctcaatctcccgagtagctggagttacaagcacacactaccacacccagctttttttttttttttttttt

SEQ ID NO: 772232 - DNA, 613 bp, Homo sapiens
tctacatggatttcctacattagcatagacatacttttatagtatatgctattcagagttaaactaaagcaaacaagacaagggtttattcttatttcatgtcaaataactaataatattttataacagcacaggtctgaatcattttggaaatctagcccagttttctccagtagaagtacaaggtagtttgtgaattcactacatgcatagcatagtttttgaaattttacttcatatttytcttgctcttttaaaatttgcatttgtaagatttatgtcactgagaaaaaaatatttaaaatgtctttttgcaaatgccaggtttctcaaaggacagaggaaatagcatctctatggcaataatttcagtcttctaaagaatgtaatttatactctttaattgtaatattaatactgatatttttctatgaaattgttgcatggcaaatatgcctgtatagtcctggccaagctcagaaatattgaagatgttagaggaaacaaaaatcaatagtagagcagaagttccatgacaacagtgtgacttcactagcaaaattacacataaagttcattctctatagtttcttatacattaagtagcataaac

SEQ ID NO: 772233 - DNA, 575 bp, Homo sapiens
agattccaggctcatcttgtctattttctgcctcagtcctataattaactattttttcctaaacgtcctagttcctttggttggagaatgagaaatcaagatttgaacactaggtaagatttttgctatcaggatatagttgtttctagtccctctaagctgacagaacaaaggaatacatgcttgtatactaaattgtgtatacaaaaatatatatgaatacatgtgtgtgtaactatctatatttatatgaagccattagataagttaactagaactgtgattgctgaatggaaaatttatgtttagctttctaagaawctgccaaggagatcgagaccatcctggccaacatggtgaaaccccatctctactaaaaaaatacaaaaattagcagggcatggtggcacgtgtctgtaatcccagctactcgtgaggctgaggcaggagaatagctcgaaccaggaagttcgaggtttcagtgagccaagatcacgccgctgcactccagcctggcgaaagagtaagactccatttcaaaaaaaaaaaaaaaaggtagttataccattttgcag

SEQ ID NO: 772234 - DNA, 627 bp, Homo sapiens
acttatgctgctgttctcctctctccttcccctttttgatggcttccgcagtgtaagactgccacctccttgggtttttgcaatgtgtgcaataactccataatttccttgtggtatttaatggggttcccccagaggttaggaactccctttctttccatattgcagcatgggcatgtaggattagataagcatacttgctgtctgtatacacatttatactttttccctttcccagttctaaggctcaggtargtgccactagttctgctaactgggcgctggcccctgggggaagaggcttactttcaagtacagttacatcactaactatggcataacctgcccttcgtatcccattctccacaaatgaacttccatcaatatataggttaaggtcaggattagctaaggggacttctaagagatcatctcgggcggcataaatctggactataatttgttggcagtcatgcttgattggttccccatcctctgggagaaaagtagcagggttgagggccacacacatacgtatttgaagcaccagtccctcaaggagtagcgcctggtatctaagtaggcggttgtctgatagccataaacttcctttggcacctagtatgt

SEQ ID NO: 772235 - DNA, 629 bp, Homo sapiens
tcccaaacttagagaaagatatcaatattcaagcacaagaaggtaacagaacaccaaacagatttcagccaaagaagatgacctcaaggcatttaataatgaaactcccaaaggtcaaggataaagaaaggatcctaaaagcagcaagagaaaagaatcaataacatacaaaggagccccaatatatctggcacaggcttttcagtgtaaaccttacaggccaggaaaaagtggcatgacrtatattttttaaaacttttatcccagaatggtatatctggcaaaaatatcctttaaacatgaaaaagaaatattttctgagataaaaaaagaaacctgagagatttcatcaacaccagacctgccatataagaaatgctaaagggaatacttcaagcataaataaaaagatattaatgagcaataagaaatcatctgaaggtacaaaactcactggtcatagtaagtacacagaaacacacagaatattataacatgttaattatggtatgtaaactactcatatgttgagtagaaaaactaaaagataaactgatcaaatataataactacaacaacttttcaagacatgtcagtttaaaataatgggttataagatattatggtaa

SEQ ID NO: 772236 - DNA, 629 bp, Homo sapiens
tcccaaacttagagaaagatatcaatattcaagcacaagaaggtaacagaacaccaaacagatttcagccaaagaagatgacctcaaggcatttaataatgaaactcccaaaggtcaaggataaagaaaggatcctaaaagcagcaagagaaaagaatcaataacatacaaaggagccccaatatatctggcacaggcttttcagtgtaaaccttacaggccaggaaaaagtggcatgacatatattttttaaaacttttatcccagaatggtatatctggcaaaaatatcctttaaacatgaaaaagaaatattttctgagataaaaaaagaaacctgagrgatttcatcaacaccagacctgccatataagaaatgctaaagggaatacttcaagcataaataaaaagatattaatgagcaataagaaatcatctgaaggtacaaaactcactggtcatagtaagtacacagaaacacacagaatattataacatgttaattatggtatgtaaactactcatatgttgagtagaaaaactaaaagataaactgatcaaatataataactacaacaacttttcaagacatgtcagtttaaaataatgggttataagatattatggtaa

SEQ ID NO: 772237 - DNA, 624 bp, Homo sapiens
tgttaatctgtttccacaagagttgttccaattccttggtctttctaaatttttgttcaactgttcgttctgtttcttagcttcatttcagaggacaccatataaaccctttatctttaattctgactatttattgtccacaatcaaaacacacataaattgatttttgtgtgtgtgtgagatsaggtcttactctgtcacccaggttggagtgcaatggcacaatcttggctaactgcaacctctacctcccaggctcaaggaaacctcccacctcagcttcctgagtagctgggaccacaggaacgtgccaccacacctggataatttttttttattttttggtggagacagggttttggcatgttgcccaagctcgtcgcgaactcctgagctcaggcaatccactcaccttgacatcccaaagtgctgggattacaggtgtgagccactgcacccagcctgaatttttgagatgtataaaatactggcaaaatttttgatctacacacttttaaaccattaagttcaagtataataactccttacatcactgttagtttccaatccatgcgccctaggaattctagaacaaaagacaatgaagcaaccactttttcaaaa

SEQ ID NO: 772238 - DNA, 428 bp, Homo sapiens
ggatgcaaggctggttcaacatatgcaaatcaataaacataattcatcacataaatagaactaaagacaaaaaccacatgaccatctcattagatgaaaaaaggcctttgataaaattcaacatcccttcatattaaaaagtctcaataaactaggtagtgagtggaacacacataaaaataatgagagccatttatgaaaacccattgccaatatcatactgaatgggcaaaagctggtagtattccccttgaaaactggcacaagacaaggatgccccrtcttaccactcctattcaagattgtattggaagctctggccagggcaatcaggcaagagaaagaaagtaaaggatattagaataggaagaaaggaagtcaaactgtctctgtttgcagattttatatctagaaaaccccattgtctc

SEQ ID NO: 772239 - DNA, 659 bp, Homo sapiens
atatttaatattagaagaatttggggtctttatttagaagtttggtgatgcttttgtgaccagatatatgccatagaaacttaactcttgtttatatcaatttgcctgttgtgaaattggtttctattcattatttatacaattatattcaytatttatacattgttttgcctaaagtcctagtttccaagaacatattgatgattataagtgagaacttactgtaattgatttgagatttcttttttctactgcaagtattttactgctatatatttctctctaagcattgctttatctgcatccaataaattgtgatgttgtgttttcctcttctttcaattaaaaatattttctaattccccacagcactttctctttgatacatggttttttagaagtgtgttgtaaaatgttcaaatattggggaatttttcagatgtctttctgttattgatttttctagcttattccattatgtttagagggcatatttcatgtgatagcaatttaatttattaaaatgtgttttatggcttatttagtagatgccccatgtactcttgacataacttttgatttacatattttgaagctgtgttgttaagcatgtctacacttagggttatcatgcctttgtcatatgtattgtccctctt

SEQ ID NO: 772240 - DNA, 667 bp, Homo sapiens
taaaaaccaagtctaaaaggatccaaataatctccaagtaaattaactgcctgacagaaggaaactcaaccatcactggaggtaaataactggatcatggtactccgtaatgtgacattcacaatgagtgacataaattttaaaatttaataggcaaaaaaagcaaccataactgggagaaaaatcagtcaatacaaatagaccaacaaataataaagacaatggaattggtaaagaaattcaaactgtgtatatatgataatkgtgttcaaagatttaaagaaaacatggacataagagaaacaagtgcagaataccaagaaaaaagcaacatataaaacaaccaaatggaaagtaaagaactacaaaaaagtacgtccttaataaaaaattcactgggtggtcttactctgagtttatacattgcagaagaaaaagtgaactagaaaataatgcaatgaaagtcatacaaacagtcacagaagaacaggaaagagatattgggacagaaaaaaataatgaaagcaatgacggctgaagactttacaaatatgaagaaaattatatactcacagttaagaagctcaactaatcagaaatagaattcttaaaagcaaaaatttatgatttacttgggtatatcatggttaaattgtccaacatcaaa

SEQ ID NO: 772241 - DNA, 622 bp, Homo sapiens
cgcctataaacactactcccatgaggcctccaaaaacatgagtggagaccatcatacattagtataatgtctcggatagcccttctgaatgcagacattccaatacattgacattttaaggttctgacaaatcctgtagcaaagaaatctttttgcctaagctgagattgggtctacatgtatttccttgggagcccctcttgctgtgcagtattggaaatactgctcatgagtgtggcagtgataactgtaaagccagaagcaggctctgggagaaaagccaggggtcagactcctgctcacttacagrcagtgagaagagtttgtctttggcctccttccctctgtccaatgctcctcccccaccactctttcttcacttatttgctttcctctgccaacctgaaacctacagaaagcaaagttgggctgggcctgtttatgcatcttcccaggttttcctggctctgcatgcccctggcctcggcaacttgctatgtgggtgctcgggcagttgccaccaaagtctatgtcctgacctgtcagctgtctatcttccccagaggtaagagctgggcctgggcatggctgccttgatgccatgcgcatgagtcacagcagc

SEQ ID NO: 772242 - DNA, 568 bp, Homo sapiens
tgccacattgtcattggttctcacagtcaggtgccccatcttcagggctcagtagcacaatagaaattgttttccaaaaggcatagagttctccactgcagatggcatgactaagccccagaaacataggagtcctcattatgattctcccacaaggcatgtgttttaaactgtacctggcacattttcccaccactaacacctccygtatcataggatctgtcaggctatatggcccaagtggcagggctgcttacatcctatactttcctactctgggccccactccaagctggaagtctctcatgccttccactataggaactaacattgtgatcccttttttcaccatgggagacgtaagatgcaatactttgccctattctttggatgggatatttcaacatatccttggccactgaatccctaaacattttactaagatggcgggcccctgaatgttcatggaggttatctcatactctctggaatgcgtgtgacttaccaaggcttccaattcttggatttcttgtcatccagccccattctcatgataccactgataaaa

SEQ ID NO: 772243 - DNA, 580 bp, Homo sapiens
caggttggattataggaagtacaattcaagaaccgtttgttgagcatgagcagccactacattggaacattgttccaggcaatgacctcctagagagccaaagcacactggctttttgtccaggtggtagtttccagtcatgcctttgagccaccacgttcccacagctggtgcccagctgtcctttctgtgcataccttgcggtggtgacacaaggaatagccgttcccagcacacctggggagytcctcacgtgagctgaccttggtttctagagtggagcaagctttgaggaccaggatctttggaaggggacatctattctgtgtgttaccactaaggcaaatgtcactcattgtcttcttcatcccccattgtactacttccttcaataaaccatccagaaggagccacattcatcaatgctaattggttcgtccattttaaaatgaactgttttaggactgctgtggttgtatgaagaaattttcctttcctccctactaactagtgggaaatgccaaacattctatattaaatattttctttcttttatgttttaagggcagaggagttaacc

SEQ ID NO: 772244 - DNA, 598 bp, Homo sapiens
aaatggtcagacattatattttttttattgttctctcatttaatgtgggctgcccaaggaaggagtgggcaagacgcctttctgaagctaacataattactgaagggtctgacagtagaagacatcagccaacaacagtccctgctgctaggtcaacaagtctttccttagagggatgtagaaggcacaactcagygttcatcagttccttcactggattttcagctgcatgtctgtcattattcttctagttgttcctgtagggattgcaatataaatccttatcactgtctacttagaattaaagttgtgccacttctcataaaatataaggactttgaagtattatagttccacttattaccatccttagttatattattgtcatatttatcatatctaaatacattataaatccccaatacagtattgtctttttaaaaattaagagaaataaaaaactgtgtaatcttcatatgtgccatatacttactatttctgatgctccttgctttttcctgtacttctacaattacatttggagtcgatttttttcagcctgaataactttttttgctattccttataatgtgaatct

SEQ ID NO: 772245 - DNA, 627 bp, Homo sapiens
ttttttcagcctgaataactttttttgctattccttataatgtgaatctgctggtgactgattctattttcattcacctgaaaaagtctttatttcatcatcatttttgaatgaaatttttgctaggtacagaattctgggttgaaggttgtttttattcccctgaactttaaagaagtttttttcaaagtattctccctccattaattctgatgtgaatcattctgatgtgagtcattattcatgttgttgcttccctgtagttaatgtgktttctcactgttattagttgtttttttctcccatttcaaatattttctctttatcttcttcaattttcaacagcttgcctatgacatgccaaggtgtgaatgtctttgtctttatttttcttgggtttactgagttacgtaggtctgtaagtttaaatttgggaaagtttaagtcatgtattccaaataatattttctgccctatattctcctttttctctgtctggaactccagctacatgtgtatagactttttcatcttgtcccacaagtcaatctcttttcaatctattttctctttctttttcagaattgacagtgttcatgtattaacctgcaagttccctgataattt

SEQ ID NO: 772246 - DNA, 627 bp, Homo sapiens
ttttttcagcctgaataactttttttgctattccttataatgtgaatctgctggtgactgattctattttcattcacctgaaaaagtctttatttcatcatcatttttgaatgaaatttttgctaggtacagaattctgggttgaaggttgtttttattcccctgaactttaaagaagtttttttcaaagtattctccctccattaattctgatgtgaatcattctgatgtgagtcattattcatgttgttgcttccctgtagttaatgtgttttctcactgttattagttgtttttttctcccatttcaaatattttctctttatcttcttcaattttcaacagcttgcctatgacatgccaaggtgtgaatgtctttgtctttatttttcttgggtttactgagttacrtaggtctgtaagtttaaatttgggaaagtttaagtcatgtattccaaataatattttctgccctatattctcctttttctctgtctggaactccagctacatgtgtatagactttttcatcttgtcccacaagtcaatctcttttcaatctattttctctttctttttcagaattgacagtgttcatgtattaacctgcaagttccctgataattt

SEQ ID NO: 772247 - DNA, 482 bp, Homo sapiens
ataatctatgtaactttatgccatttattactttataattgtatcaaactataatttgtaagcaaattttgtttaaaagctattaactatgtttttctaattgttttggtatacttttataaaacaaggctattaaatcctggttgcaggttcctaaccatcaattttttggtagatttaatatatagtatatagttacagagttttaagtacatgtggaaattttcagaaatttctcatttatttctttgatctcaaggttcttaaaaagctgrcataggccaggcatggtagctcatgcttgtaatcctagcacttggggaggccaaggccagaggatccaacaaggccaggagttcaagaacagcctggacaattctctcaaaaaaaaaaaaaaaaaaaaaaaaagagagagagagaactttaagccatgcaattagagaatgtgaagataatctacccaagtagatatttataaataa

SEQ ID NO: 772248 - DNA, 575 bp, Homo sapiens
aaaaaaaaaaaaaaaaaagtgcttaattagccaatgatgcaagttcaaaaaaaagggaaagactgatatggctgcttatatctctaaagttttcatgttagttccttccgcaccccaraataatcttaggtttagaactacttaattaactaattaatgaattaaaatgtttgttcattcaaaaaaatattcattgactacctataaggtagagtgttgggtcaaagtatgaaaattgactcttacgctgatattgtgaggtttgcataagaagtttgttgtaaaaatggaaaagtatggagaccaaagacagcaattctttgtattgattattgttttattttatttctaagacaaggcaagagaatgtgcctttattagatatgactatgggttccaaaactgatgtttcccagttgttgaaggaggtgaccaggaagtcttaacatgaatagctacataatattaagaattcattatgggccaggtgcagtggctcacgcctgtaatcccagcactttaagaggctgagatgggtggatcctgaggtcaggagttcgagaacagcctgggca

SEQ ID NO: 772249 - DNA, 581 bp, Homo sapiens
catttcctgaggcctgcccaacacactcagcattataacaaaaactataacaaggaatatgggagttatgaaccagggactgtgggataaaaaccaatatctattatacatcattataccacaggcactgtcataggcactcttttataatgtttccttttattcccttaacaatcctgcaaaataagaatcctacttttttattttttgagacagagtttcactcttattgcccaggctggagtgcaatggcacgatctcagctcaccgcaacctccacctcctgggttcaagcgattctcctaccttagcctcccaagtagctgggattacaggcatctgccaccatgcctagctaattttgtatttttagtagagayggggtttctccactatagaaagtaaaaagttcctcttcaaagtttcccttcttgttaaataataaatcttaagtgttataaatgatagtttcttttaaagactaacttccttcaagcctccttgctttgtgctaataattctttgttaagccctaacctatgtagctgttagatataagggaataagtacattcaatgtcc

SEQ ID NO: 772250 - DNA, 543 bp, Homo sapiens
gggttgactcataagatcaatataacagcagttttcctaatacttgccctgcttttccagacatcataatagttgtggagtctattgcacagcatgaagaacctggaatcctgtggtaaacatattaatgtgaagctttcttcagataccactgcaaccatatgatcaaagcatatttgactcataaagctcatatgacaatatatgtccactgtgccgctccacattgacctagactggcaagcaatttttcaccagtgggtattccatgaccaaaataagactgaaacctcaccagaggggtcctggtaaccttacaygatgacattattcagattggcaggctatgggcagcataccatatacctgagaaagatggtctgaaaaccaagagaccagggctggaagattaacccagactcatattagcagccagccactaatggaaagaatgtggctgatgcccaaagaacaatcctggaactttttaaagaaaaacttatggcctcaaatctatagcaacccacatgaaacataaaatat

SEQ ID NO: 772251 - DNA, 609 bp, Homo sapiens
tcgtcattttaatttgcaattctttataacgaatttaggtaaaacatctttttatgattaatgaatttttaaacattttttaaaattcatttttaaaaagtattgtttcttcaaaattgtaaaagctgagtttgactatataactgtgtaacagagaaatggcatattttaaagatttttttcctccagattatggtaacccaatttatcataagcatataattcagtggttttcgctatagaaatcacatctattgcatttaacttttccccttattttgaaatgtcctataaaatccttaagcatttttattatagcagctgattatattactcttctctctttttttaacctggaaaatgtgtagttacatgtattactcttagataaagctattcctgaattgtctgataaatgactatattcttatatcatatcaagagttatctstccatgctttaagagtaaatccattcttttttttctacgaatataagtgtaagatactgaccaggccaaatgggtaaactgtgaatcaacagagcatgctaccacttcagtatttatagatctgaattcttcaagtctgtcgccaaaagcgataattt

SEQ ID NO: 772252 - DNA, 508 bp, Homo sapiens
ctttttaataatcgctattctgactggtatgagacgatacctcattgtggttttgattttttatttctctaataatcagtgatgttgagcttttttttaataagtttgtcggccacataaatgttctcttttaagaaacgtctatgtcctttgcctactttttgatttttttttcttgtaaatttaagttccttgtagattctggatcttagacctttgtcagatggatagattgcaaacattttctcccattctgtaggttgtctgttygctctgataatagtttattttgctgtgcagaagctgtttagtttaattagatcccatttgtcaacttttgcttttgttgatttcatcatgaaatctttgcccgtgcctacgtcttgaatggtattgcctagattttcttctagggtttttatagcttcaggtttacattgaagtctttaatccatctcttgagttaatttttctataaggtataaggaaggtttccggtttcaatttt

SEQ ID NO: 772253 - DNA, 634 bp, Homo sapiens
aaaaatcaagaacaaggccagaaattcaatagacagatgggctaaagatatgaaccgttcacagaaagataagcattgaaatatgaaaggatactcaacctcacaaaaaaaaagaaaagaaaatagcaattaaaactacactgcagggccatttctcaactatcagagtggcaaaaatatctcagtttgataacatgcttctatggtgaggcagtggagaaacaggctctgtcacatattgctggtacaaagacagatggtacaaaactctacgggaagaaatttggcagtgttcatcaaaattrcatattcatttaccctttgatctagtaatcctacttctggaaaaatattttaattatacatttgcaattattcaaaatgatacacatataaagacactcatctcaaaattaatagtactagtagaaaatcaaaaatcatccaaatgtccgtcagtagggattgaataaacttggtgcatccaacatatccttgaagaaatgatgatttcttagttctgtcaaaaaaccctagaaacaaagacatgttatgagcaataaataacatcagattctagaactgaattatctaaatattattttgaataataaaaataagtgcttcttgagaa

SEQ ID NO: 772254 - DNA, 634 bp, Homo sapiens
aaaaatcaagaacaaggccagaaattcaatagacagatgggctaaagatatgaaccgttcacagaaagataagcattgaaatatgaaaggatactcaacctcacaaaaaaaaagaaaagaaaatagcaattaaaactacactgcagggccatttctcaactatcagagtggcaaaaatatctcagtttgataacatgcttctatggtgaggcagtggagaaacaggctctgtcacatattgctggtacaaagacagatggtacaaaactctacgggaagaaatttggcagtgttcatcaaaattgcatattcatttaccctttgatctagtaatcctacttctggaaaaatattttaattatacatttgcaattattcaaaatgatacacatataaagacactcatctcaaaattaatagtactagtagaaaatcaaaaatcatccaaatgtccrtcagtagggattgaataaacttggtgcatccaacatatccttgaagaaatgatgatttcttagttctgtcaaaaaaccctagaaacaaagacatgttatgagcaataaataacatcagattctagaactgaattatctaaatattattttgaataataaaaataagtgcttcttgagaa

SEQ ID NO: 772255 - DNA, 490 bp, Homo sapiens
ccaaatacacctcttttctcctgctttgcacaaattaaggaaagatggggaaatttattattttacattaatttgatagacataaaataaaaattcatttctcctctgtgccaagatctgtgttagatgtaatggtgaatttaaccaacctgttccttaccctcatagaacttattattattttttatatttttgagatggagtttcattctgcccccatgctggagtacaatggcatgatctcggctcactgcaacctcygcctcctttcaatacagtatgttttaaaatttttttcttttgagattcaggggatacatgtgtgggtttgttacatggatattttgcatgatggtgaagtttgggcttctagtgtacccatcacccaaagagtgaacattgtacccaataggtaatttttcaactcttaccccattcccacctttcctccatttggagtccccagtgtctattatctgtaggtccacat

SEQ ID NO: 772256 - DNA, 630 bp, Homo sapiens
  misc_feature 340, 360: n = A,T,C or G
ttcactaccgcccaccacagcccacttcgtttaaatttaggcacccaccaggcaaactgtacccagccacattctctgaaatgaagtcataaaattctcatctgtaacaccggcacttgttcccaggaaaacaagacaggtggggtagacagggccggcacccttctggggagtccaggctgtgcctcagaagagccctttgcaaagagttggttccgtgaccaggctcagcccacatgggggctgtgtgaccttgtgacagccaacttcccctctacaaagtcakggtggactaactaaaaggagcgctaaggcccatctaaatgtacagctctatggntaaagcccagatgccccacnccacctcccaacacccagaaaatgaacagcaacccaagatgggggtagagcagggctaaattcattggtgtgacctggggctgctgtcattcttaagatctggctcttgcagtattcagttctcaggaaatgtctgacaacaggagggggacagaggattgagcccgcaggaaggctttggcaatgaaggctctgtggccaccctttggtcccattcaggcaagatcggagagattttgcccactcggactcaacaaactctgagtccct

SEQ ID NO: 772257 - DNA, 630 bp, Homo sapiens
  misc_feature 340, 360: n = A,T,C or G
ttcactaccgcccaccacagcccacttcgtttaaatttaggcacccaccaggcaaactgtacccagccacattctctgaaatgaagtcataaaattctcatctgtaacaccggcacttgttcccaggaaaacaagacaggtggggtagacagggccggcacccttctggggagtccaggctgtgcctcagaagagccctttgcaaagagttggttccgtgaccaggctcagcccacatgggggctgtgtgaccttgtgacagccaacttcccctctacaaagtcatggtggactaactaamaggagcgctaaggcccatctaaatgtacagctctatggntaaagcccagatgccccacnccacctcccaacacccagaaaatgaacagcaacccaagatgggggtagagcagggctaaattcattggtgtgacctggggctgctgtcattcttaagatctggctcttgcagtattcagttctcaggaaatgtctgacaacaggagggggacagaggattgagcccgcaggaaggctttggcaatgaaggctctgtggccaccctttggtcccattcaggcaagatcggagagattttgcccactcggactcaacaaactctgagtccct

SEQ ID NO: 772258 - DNA, 584 bp, Homo sapiens
gaaagaaaaagaaaattagggatagtaattggggcatgaaaaccataataaggtggattgtgataattacaaaactaccacttcctctggccctcaaacacaccgagttcacacctgtccatctccaagccctcacccccaccatgccttctgcctgccctgctgttccccagctccaggagggctgactcctttccttcacttaratcttgctccaatggtgcatcctcagaagagtcttctaaaacaactgttctctctcctcttatcttacttggttttcttagcagttacaacctcagcaataacagtaccaactatgttccagacagtgttgttaaagcttttcgtgtgtgaatgcatttgatcctcacgttaaccttataaaagaagaagactgttactctgcagacaaagaaaccaagtcctaagggaggttaatgggatagctcggcactgggagttatctattcagtaaacgtttatggggtcctcattatggactaggctctgtgctaggatctggggatacagaagtcatcatctttgcattccagtcatcagcaaaccaacgttccaagacc

SEQ ID NO: 772259 - DNA, 638 bp, Homo sapiens
caaaggattcttgccccttggaaatgacggtgcttctgtgtcatgggctttgttgcatggtgggtcagtaacactttccctgtactccacaggggcaggtagttgcttccccctgcctgcttctctctgtcttgatcttctgccccttccctatttttttttwattttttttaatttttttaatttttttttttttgagacaaggtctggctctatcgcccaggatagaatgcaatggtgtgatcgcaactcactgcaactgccacctcccaggctcaagcagtcctcccacctcagcctcccaagtagctgggactacagatgtgcatcaccatgcctggctaatttttgtatttgtttgagagacaaggtttcatcatgttggccaggctagtcttgaactcctgacctcgggtgatctgcctacctcggcctcccaaaatgctgggattacaggtgtgagccaccgcaccagacccgtctattttcagtttgaagcagcaccttctgtgtgccaggcattttgctttgtaattgaacgtacatcatctaatttaaatcctcccaataactcttctgggtggggctaatcattcttgtttttcagataaggaaatggaggcctagagagtcccaca

SEQ ID NO: 772260 - DNA, 610 bp, Homo sapiens
aaaaatttaagcactgcagtcagactgcctggatttgaatccaggatccttcattcactttaaataacaataggcctgggtgaaatgaaatgagacaatacatgtaaaacatctggggctgtgcctagcagatagtaagttcttaataaatattagctatgatattatgctttcaaaatcatattagggttcttttgaatgtgatttaatacttactaattaaatattttttggaaacttaaaaaaatagttgcttattatcctttttttttttgagacggagtctcactctgtcacccaggctggagtgcagtggtgcgatcttggctcactacaaactccgcctcctgggttcacaccrttctcctgcctcagcctcccaagtagctgggattacaggcacctgccaccacgcccagctaatttttttgtatttttagtagagacgaggtttcactgtgttagccaggatggtctcgaactcctgacctcgtgatccacctgcctcaacctcccaaagtgctggaattacaggcgtgagccactgagcccagacgcttattatcctttcatatggactctatgttcaacagatatttatggagtgcct

SEQ ID NO: 772261 - DNA, 583 bp, Homo sapiens
cttccatttaaaaacaccctaactgacatatattttgactcattagcattgaacttgtggccaatagcactataactcatgcttgaatgaagcttatctagcatgtatgttctctacattacacttaaggaacactaggcagaatttcagcagtacacttagggttattaaaagaaaaacttcagccaaattaaatttaaaggagtttaattgagcaatgaacgattcgwgaatcgggcagcccccagaatcatagcagattcagagagactccaggggtgcctcatggtcagaacaaatttataggcaaaaaaagtaaagtgacatacagaaattggaagtgaggtacagaaacagctggattggttagagctcagcatttgccttatttgaacagtttgaacactcagcagtatgtgagtggttgaagtatggctgctgggattggccaagactcagcaattgttacaggcacatactcttacgtcaggttttcaatcttgtctacctattaagttaggttgcagttcatccacaaaaacactgcgaatattgattttgaggttacaaataaattttagca

SEQ ID NO: 772262 - DNA, 649 bp, Homo sapiens
attttggttctcagtatgtttcttgagatttggggaagaagcaaattgatgagattaaaaacagtaatatggctaaattagccacaactttgctagataattaactgtggtcaatatgcccagctaattgtgtatgtattatagtcacaagtcatatttaaaatatttgctaaatataatatccaagtactaaacaatcagaatggacagtaatactggggttccctgcagggatacatattaactctttaattgctgcactgtggggtaatttgggggtggtgcttgagttaacagctgtttactaacagatttgaaaatagtgaaagcatttccatttggaaaccaatataaccatactgttgcatgttggatgaattttgcactctgatgaaagttaargaaaatggtcttttttgtttaaccattacagctttgctctgggaattggtgctgtctttctggccctgcgtgtagctatactcagtctcagtggtgtgcatggtcctttaccatctgcattttcccttttgggcctgtttatttcttaagtcttacattatcttcactgattgtgggggtgctcataatctatatgcatttcttcagggcacatttattaagaaagaagtacttttatttctctttg

SEQ ID NO: 772263 - DNA, 639 bp, Homo sapiens
taattaggtcactatacgcaagttatttaatgtctctgagccttccttcattcctcatttgtgtaatgggtatgattttgctttcctcatcccattatgaggatgatgtggcatagcattcctcagtgcctacctgggagcctgctagattgcaagtactcaaaagtgttttaatttgattagggggatgagaacagtccatattgaaagataatgactagccagaggtagggtgtatttgaataaaaaatgagtgatctttaactgctataggattcagaggagggagatcactagggtttcagtgataagtggtgaccacccagaggatctgtatagctagctagaaagaagacagaacggcagtgcttacttatctagaayattcaattaacaattaacaaggatgccccatggcacttattatgttggctaagagacaatgagttatgaagcattgatagaaatgaaccctagaatgtgagaatttaaaattcttattgaaaagataggctatgtattgccacatagaattttaattatttttcacaaaatgaagcaaagagaaacccttggaaccaaggtaaacctactgtcctgaaaaaaatctgtcttttaaccaaccccaaatctgtgaat

SEQ ID NO: 772264 - DNA, 530 bp, Homo sapiens
atttcaacatgaaattttgtggagataaagagattatatccaaacaatagcctggatgaaatttcctagagtgggaacacagaataagaaaagaggagcgctaggagaagttttgaggaatgccaatatctaatggccatccgaagtgggatgagcctgtaaaggaggcaggtaaatgtgaggaaggctaagagaatatgcttatcaaaaaagtcaaggaaagataatgcaataagaataaaggagtgatgagccatgttaaatgrtgctgtgaagtcaaataaaatgaacagtgaaaaagccccatagatttagcaaaatgaaggtcactggttacttagcaggagttgattcaatgacaatatgggagactagagttggttcgattaggtaaattttaaaggagataccaagtgtagataaaaattcgaataagtttggctgtgagtgggagaagagagaggaatagctgtagggagatatggggtaatgtatcttttattttttaagatagaagatgtttagcatta

SEQ ID NO: 772265 - DNA, 530 bp, Homo sapiens
atttcaacatgaaattttgtggagataaagagattatatccaaacaatagcctggatgaaatttcctagagtgggaacacagaataagaaaagaggagcgctaggagaagttttgaggaatgccaatatctaatggccatccgaagtgggatgagcctgtaaaggaggcaggtaaatgtgaggaaggctaagagaatatgcttatcaaaaaagtcaaggaaagataatgcaataagaataaaggagtgatgagccatgttaaatggtgctgtgaagtcaaataaaatgaacagtgaaaaagccccatagatttagcaaaatgaaggtcactggttacttagcagragttgattcaatgacaatatgggagactagagttggttcgattaggtaaattttaaaggagataccaagtgtagataaaaattcgaataagtttggctgtgagtgggagaagagagaggaatagctgtagggagatatggggtaatgtatcttttattttttaagatagaagatgtttagcatta

SEQ ID NO: 772266 - DNA, 613 bp, Homo sapiens
tctatagtacagtttaaatctaatatttcttagttgattttctgcctagatgatgtgttcattgctgaaaatggggtgctgaagtctcctgttgttattgtattgcagtgtatctctctctttagatcttttaatatttgctttatatatttaagwgctctgttgtcgggtgcatatattttttgatggtcatatcattttgctgaattaacccctttatcattacatgatgaacttcttcgtctctttttactgttttactattttatctgatacaagtatcaatactcctgctttctttgggtttccattttcacggaataactttttccatgccttcactttcagtttgtttccttacaggtaaagtaagtctcttgtaagcagctcatagttgtaggcagcatatagttgggtctcttttttaaaatccattcagccactctgtggtcttttaactggagaatttaatccatttacagtcaaggtaattattgataggtaaggacttactagtgctattttccaaatagctactaagttttcttgatatcatttgttctgtcatttccccataattagcaattccattattttattattcatttcactt

SEQ ID NO: 772267 - DNA, 583 bp, Homo sapiens
tcagctcagattgcttattgcttcagtaatataaaaggggaatatgaagctcttttctgactcctaccaacactgtcctcattaatggtcaagtctgttgtcagctagacatgcactttacaagcacttcacctgaattccaaattccactcaaccctgatctatcctgcgccccacaatgtggtgttgttttgagggaaacaggaagtgcaagacattgctatcttaatctatttgcctctcttcagccaygtacctcctcccagcaaacaaagttatttacctacttgaactgagggaaagccaattaagaaacatctccataaaaattatcacctgttggtggcttctcttcttaaaaaatccttcagagtaacttatacagattgcagcattctctaaagaaatactgagaaaaaaggttggacaggagtaggctcacaggataacttaacatttaacatctatcagcaactctgaacttttagcttattggtaatgctctattattattattttttactatttcttcttcattcaagataacctggtagtagaaggctgcataatctgtccaaatgtt

SEQ ID NO: 772268 - DNA, 544 bp, Homo sapiens
atttcccactggagttattctctctttcaatccccatatgctctccctctcctcttccaatgatgctatcatgccaccttaatgggaaagtttgaagtcatccagcatttttcagttcatcacatcgcacattcccacatcatcctctcagaactctctccaatctcaaatgatgaactttctctttttctctaagcaaagtcctgtgtttttttttttttttccttaatcttgtctgtctcccctactaractatgagttccttgcccaggaagctaggggttctttataaatatatattgaaataatgaataagtgaataaataaatgaatgaatggttttaagctaccgatcttttccagttttctggatttggggccccacaatcctctccctagaatcgtcaatctctctaggctaaatagatcaagaccagactgattttaattagtggcttgcggaataaatctttttactatttagacctacctgtatcattaagcacctacttttcaggcaagagctagctgggacaggagtgag

SEQ ID NO: 772269 - DNA, 544 bp, Homo sapiens
atttcccactggagttattctctctttcaatccccatatgctctccctctcctcttccaatgatgctatcatgccaccttaatgggaaagtttgaagtcatccagcatttttcagttcatcacatcgcacattcccacatcatcctctcagaactctctccaatctcaaatgatgaactttctctttttctctaagcaaagtcctgtgtttttttttttttttccttaatcttgtctgtctcccctactaaactatgagttccttgcccaggaagctagkggttctttataaatatatattgaaataatgaataagtgaataaataaatgaatgaatggttttaagctaccgatcttttccagttttctggatttggggccccacaatcctctccctagaatcgtcaatctctctaggctaaatagatcaagaccagactgattttaattagtggcttgcggaataaatctttttactatttagacctacctgtatcattaagcacctacttttcaggcaagagctagctgggacaggagtgag

SEQ ID NO: 772270 - DNA, 562 bp, Homo sapiens
tagtatagtttcctttgaatattggccctataaacctttaagttagttttattaactctttactttgaaatagttacagactcacaggactttgcaaaaatgttacagagaggtccctaccatttacccagtttcccccagtggtaactttttacataactgtagtatatacagtatcaaaaccagtaaattgaaataggtataatccacatgatttattcctatttcaccagttttacgcatacttacttgtgtgtgtttttcaaattagttttaaatagctgttagtatctgattgatatgagatattataaattgcattttacattgaagagatgggaatgaaaaattataaaatggattctagcctggaagttaaattttcatctaagttctagtrttgactttcttatttttattttttttaaataatagccccccccccaccattttacatagaatactaaatttggaaactatagaaagtcatcatgaggaaaataaaaattataaacccacattctagtgttagcactttggtatatttccttccactattttt

SEQ ID NO: 772271 - DNA, 571 bp, Homo sapiens
acaataaatctaaataactgaaagaaaacttttgcctacaatcttgtcacctcagcaaatccaactttttgtttggccctgatcttttctagccattgtggataatcacagtgggtgccttctgccattttcaattaatacaatttcagaagcatgttccatgttgctgtgtagtccttgtaatctacattttaatagctacatcatcttttacattattttcctgttgtccaacatacatttcataatcttttctataagaaataatgcagcgaatctttgtctatttggctttttttcccttacgaattacttgttcagaatctattctaagaggtaggatcaaaggtcraaaccctggatatgaggaggtttttatttcttctagtgactaaggaactctgaaggttccacccacagcctcccaccttttacatttgagatagacatttctccatcagaaatgtatccagccactgcagcagccccactggaatgctgggacaagctcatggttcattttcgggaaagtagaggcttaaacagtatgatttaacccatacaagcttgt

SEQ ID NO: 772272 - DNA, 607 bp, Homo sapiens
tagcctcaaagtcatttcttagtcagcttcccagaatggggtcatgaggtcacaattgggtaatgggaactttaaattcgctcatgtttatagggattacagcttccttctgctagagaaatgtgatatgagtggacacactactgggcaacacttcactcccagactttgtgaaaataaatctccctcctctgcaaatgcagaatatggcccactgctcctcttttaaaaaacacacttttaagacctcctaattaacctacatgtaaaatggatgaatgaacatgtttgctatgtaagtttgacagtggggactttcttaggtatggtagcaagtggctccagcgtctcccctaaactttagatttaattatgcaatatcctactaactttctcacttaaatatctaatatgtgtcaatcttaacaagtccaaaactacattatygtttctccctgttccccaaaacatgttcttcctacaatcttcaccatctaagtgaaggacagatccattcttctagttgctcaagccaaaaactgaggacttatttctggctcttcagtttccctcatacaccaaatccactcagctttaccctcagcat

SEQ ID NO: 772273 - DNA, 607 bp, Homo sapiens
tagcctcaaagtcatttcttagtcagcttcccagaatggggtcatgaggtcacaattgggtaatgggaactttaaattcgctcatgtttatagggattacagcttccttctgctagagaaatgtgatatgagtggacacactactgggcaacacttcactcccagactttgtgaaaataaatctccctcctctgcaaatgcagaatatggcccactgctcctcttttaaaaaacacacttttaagacctcctaattaacctacatgtaaaatggatgaatgaacatgtttgctatgtaagtttgacagtggggactttcttaggtatggtagcaagtggctccagcgtctcccctaaactttagatttaattatgcaatatcctactaactttctcacttaaatatctaatatgtgtcaatcttaacaagtccaaaactacattatcgtttctccctsttccccaaaacatgttcttcctacaatcttcaccatctaagtgaaggacagatccattcttctagttgctcaagccaaaaactgaggacttatttctggctcttcagtttccctcatacaccaaatccactcagctttaccctcagcat

SEQ ID NO: 772274 - DNA, 301 bp, Homo sapiens
acttgactgttagggatcttgagaaaacaaaacagtcaagcagatgattaggcaatttacaaatgcaaatcttagataatcagaatagtttgtgatcttgcttaagcattttagaacttgtcctattcacacttttatytgtttcattttctactaggccttttaaccctcacctttcctaaacagaagcactctggtgccttgtcagaggcagagaaaaaagtgagtttcaagagggaggaaactataactgagagatatttttaaaacttggaaatggtctgcaagctgcatgttccat

SEQ ID NO: 772275 - DNA, 638 bp, Homo sapiens
agaacatgactctctctggcatcctccccttctctccaagtggtttatgtgatgacagggaatagggatagaggaactggaaactcttaagaatcaggtgggctccaaaacatcaagcagtcctcaacatcagtcccatgtgcaagatagccacttcaagttgtccttgttctaaagtcttgatggtagcatgagctctgcaccatacgcctaaagggtgacctaatgctgagttctgctggggcagctggaactggacaggattgtttgccacggtgatctgagtcacttytcagcaacatctcagggttaacaagatcacatgttcagctgctacttaaagtcttggaggcacttcaacctcttaacttgggtaagcattaggaacctagtaggtagtgtccaactcctcaaaataactttaaagagactatactccctttcttgaaccttctaagcatggcaaggacacaaccaagaaccacaggttcttgggccatgactgctgctttctgttactaaaaaattactgtcaaccagacaagttttctcaaattattttctttttctactcaattgtttcttctcttctacttctaaaacaacattcttttcattcccatgaggctcttaaagtt

SEQ ID NO: 772276 - DNA, 633 bp, Homo sapiens; identical to SEQ ID NO: 767608

SEQ ID NO: 772277 - DNA, 614 bp, Homo sapiens
ttcagaatgctcttaccaagcgtttttagctcttctgtggagattgagtagaaattgagtttctgtaagaatgatttgggatttattatggagtatttactgcagaatgaatgcttctatacctttttgtttaagacgtatatgaggcatattttaaacatttatgttaggctttaacaagataatgtttggggctgattttaagttaagaagtatcaaatctacagtgagagatgaagtracaaataattataaatcctgctaaagatgacaaagcattctaattatttcattacttgatgaatctgagagtttttgatttatgggtcttcaaacgttattctctttgatcctttatagcaaaatcgtgtggtgggagctatgcagctatattctgtagataggaaagtgtctcagcccattgaaggacatgcagctagctttgcacagtttaagatggaaggaaatgcagaagaatcaacgttattttgttttgcagttcggggccaagctggagggaaggtaagttttggctttggtaattattttaatgagaacttgtatttggctttctgctatgaattagtcatctaatttcaaaatagccttctccc

SEQ ID NO: 772278 - DNA, 520 bp, Homo sapiens
ttcatatttgtttaaaactaacctcaccatcttgatagtgtgtgtaccttattgaaatggaatctaaacatattccttgtcagtaaatgattcagtcagtaaccagctacctacttccaaggcaaaagaaaccttttagagcatctcctattcatgaatggcattgagaagaaaggcatgaaccatatgtatcacaaagcaactgaggccaagtagactccagcagggcaagggagtacagatgatggaacyacagttgagccttgaaccatgtgtgggttaggggtgccaaccccctgtgcagtaggaaatccacatataacttttgactccccaaaaacttaactgctaatagcctactgttgaacggaagccttaatgataaatagtagattaacacatattttgtatgtgttaatacagtattgtataccatattacaaagaaaattataagggaaaggaaatatatttattattaattaagtggaaacggatcatcatttccactccattttcat

SEQ ID NO: 772279 - DNA, 621 bp, Homo sapiens
tccagcccaagggagcctggggaagctaccccacaaaacgaatcacttggctattaacaacacagacgaggaagcaagcttgaggaaatatttaaggaccacctcagactccagactgtattctccttcgtgcaagttgcctgaggagtctgttggttatatagagcagggaacattgccagtgtgttctttggaattgaccaaaacaaaacaaaaaamcccaaacaaaaagcaaccttccgacaaaccgcaacattttttttttactgtttaaccagccagctgtttccagtgccatctgcttagctacctatttcctgaatcatcgctccatgtctgccgccacctgctttctaggcttgcgtttattgggaaattcttgttggcttggtctgatgttcaagcacatcccagtgttcagcccacttcgggggctcactcacagcaacttagaacaattccctgtggttgtcacaggagtgctttgggttggtccaggccttcatggggcaagccaaaggggcaggagaaaagtgaactgtctgccctgggaacggtttgcagcttcagcaagatgcatgccccccactttatcctgagcctgcaatggatggatccccc

SEQ ID NO: 772280 - DNA, 633 bp, Homo sapiens
ttccatgacaaaactaatagtaatttatgagataaatattgtctccattttagagaggcttgtatctttcctaagatcacttaacaaatatcatttcaagggcaaaataaaagagaggacagttcttaattagaaattccagtaggagggaaaaaatagaagaaatctttgaaaaatgaatgagaattctcattcattcattcattcattcattctattcatttaaatagtaataaaagtaaagaaagattaaaatcccaagarcaaaatggcctataaggtttcatatttgatagagaagaaaaaactcactattagacacatcacagtgaaatttaagatcatgaagacaggccatttttcaactttccacgaaaaagttcagcagtgaaggaggatcagattgacattagacatctcagtaagaaacctacacataaagtgctagcaacttaatatgttttatatcactgaaggaaaataactttaaacctacaattctatatttagctcaactatcatttaaattaatctaaaattaaaaagaccgcaaaaggtttaccactcaaagaccatctttgatgagaacacttaaaatctgctctcatagcaattttcaaatatgcaaaatac

SEQ ID NO: 772281 - DNA, 627 bp, Homo sapiens
caatttgagatctcagtcaactctactgctccctatattcttcagttcaaatctactcctagaagtaattgttttacagctctaacctttcttagccattagactaactccagagatattctccattggtctctcacctgaaatatcctgacacttctgggagrtaagaaccttaagcgaagcaggaggagatgggtaacttctgtggggtccaccatcacccagtggcgaatcagaacctctgttttctacatctacccttaatttcctcctgtgtccacagggcaggcttaggccccttctcataccataggcttgcagtgtgtaagacatgactgttctatctgcacaggaagttgagaagcagtaggcatcagtcctaagcaagaagcccctacacttcccactcccaaaacacacaaaaaggcgtgatttagaagacacagtccctaacaaatgtgggctaggaacactccagctttctacatttcctttagccaccaagctgtgctgtgcttaggaggctgtgccaggaagcttaactctcaggtgaaaagggagaagtaaaggctcctacatccgaaactgttattcccctaggccttgagattttttggttcctattcc

SEQ ID NO: 772282 - DNA, 627 bp, Homo sapiens
caatttgagatctcagtcaactctactgctccctatattcttcagttcaaatctactcctagaagtaattgttttacagctctaacctttcttagccattagactaactccagagatattctccattggtctctcacctgaaatatcctgacacttctgggagataagaaccttaagcgaagcaggaggagatgggtaacttctgtggggtccaccatcacccagtggcgaatcagaacctctgttttctacatctacccttaatttcctcctgtgtccacagggcaggcttaggccccttctcataccataggcttgcrgtgtgtaagacatgactgttctatctgcacaggaagttgagaagcagtaggcatcagtcctaagcaagaagcccctacacttcccactcccaaaacacacaaaaaggcgtgatttagaagacacagtccctaacaaatgtgggctaggaacactccagctttctacatttcctttagccaccaagctgtgctgtgcttaggaggctgtgccaggaagcttaactctcaggtgaaaagggagaagtaaaggctcctacatccgaaactgttattcccctaggccttgagattttttggttcctattcc

SEQ ID NO: 772283 - DNA, 609 bp, Homo sapiens
gaaaagcacctaacatgtggattcctgtagatctttatttctcaatctccctaggaacaaatgcaaagacacaatttctgaggagtaagaaacaactgagaaatagttactaggtcatattttacattaaatattaacttcaaaatatttcagaattaragtaagaaatatgggaggtttcaaggagatataagataaggctctgatactcaaataatcattttttctatatgaggaaatgaatcataagttcatgcaacaactagagaacaaatctctaattctccagtagagtgttataggtcacagtgcattaggagagataaaaagtattgtaaatattcacaagaggagaagatatctgtatcttaaagctgcattgttaatgggtgttacatggcagacttgcattatttttgttttgttttgtttacagcggactgagatcatctatagctctgttcagacgccacagtgaagtgtgagaaagacaaaaatccagttgcatatatcaaatgccttgcctgccagttaaaatcaggcccttaaaagcacataaacattgatttctgtattttggttccttccttttagacaagaaaaatctga

SEQ ID NO: 772284 - DNA, 609 bp, Homo sapiens
gaaaagcacctaacatgtggattcctgtagatctttatttctcaatctccctaggaacaaatgcaaagacacaatttctgaggagtaagaaacaactgagaaatagttactaggtcatattttacattaaatattaacttcaaaatatttcagaattagagtaaraaatatgggaggtttcaaggagatataagataaggctctgatactcaaataatcattttttctatatgaggaaatgaatcataagttcatgcaacaactagagaacaaatctctaattctccagtagagtgttataggtcacagtgcattaggagagataaaaagtattgtaaatattcacaagaggagaagatatctgtatcttaaagctgcattgttaatgggtgttacatggcagacttgcattatttttgttttgttttgtttacagcggactgagatcatctatagctctgttcagacgccacagtgaagtgtgagaaagacaaaaatccagttgcatatatcaaatgccttgcctgccagttaaaatcaggcccttaaaagcacataaacattgatttctgtattttggttccttccttttagacaagaaaaatctga

SEQ ID NO: 772285 - DNA, 656 bp, Homo sapiens
ataatataacataattattaataataattatcctattattattatatattctttatccactcattggttgatgggcttttaggttagtttcatattttgcaattacaaattgtgctgctataaacatagacatgcaaatgtctttttcatataatgacttcttttcctctggatagatacccactagtgggattgccggatcgaatggtagttctacttttagttctttaaaaaatttccatactgttttccatagtgtttgtatgagcttacattcccaccagcagtgtagaagtgttccacacttttcaccacatccatgccaacatctcttattttttgatttttaaaattatggcctttcttgaaggagtaaggtggtttctcattgtagttctaattttcatttccctgataattagtgattttcaacattttttcatgtttgttggccatttgtatatcttcttttgagaactgtcyattcacatcctttgccccccttttttgataaggttatttgtttgagttccttttagattctggatgttagtcatttgttggatgcatagtttgcagatattttctcctactctgtgggttgtctatttattctgcagattatttctttgctttttagtttaagtaggttccat

SEQ ID NO: 772286 - DNA, 608 bp, Homo sapiens
aattcagcaaagaacaaagagacaatggcatgggaccgtgtcctgtttagagcctacagctactgtctcttgctggccttgctgacccagtgatgaccgaggaggagtcaggccagggcagagtacatggccagggtaaagaatactaggttttgttgtttgtttaaacctgagctctccgatcgcgctgctttggtcagatacttccagtggtgtcacaaagggaaatgtgatcttttgtcttgcctttcctcctctgcctgccagggaaaaatatatttacatatgttagtttttattttcctagcaacgaaagagtagaactattttacaaaccaaacacaatgtaaacacttttgttcarggggaaccagataatcataggtcatgacttctttagtaaaaacagaactgtatattatgtacaactcattagtcatgagttccataagtatgtgcaagtgctatgcatcttttattccctaaagaactcagtcttacccagagcacccttggtaaaaggaaatggcatgtgtgaagcagttccagagaatcagaactaatgccattgtgaggcctccgagaagaccagccttgaggcagtaagt

SEQ ID NO: 772287 - DNA, 713 bp, Homo sapiens
aatggacaatactactttttaattgataaggccaaatgtcccttgtgccatcctttttaccactctttcccttgaaacaatatccaatcatcataaacctactcaatgtccataaaaaataaatccagaaaatgctaattaagacctcattaaaattttacttcacacatagcactactgctgacattaaaaaggctgacaacacaacacgttagctagaatgcagagcaacttgacatctcatatattgctagtcagactgaaaatcaaayattttgaaaaactggaagataccttacagtgttaaatacatgcctactctgtatgccaacaattgtattcctagtatttacccaagagacataaaaacatatgcctacaaaactaatcatacaagaatgtagcagagtgatgtcagcaagatggcagaacaggaaatcctagactctccttcttcatacaagcatatcgattcagccacaattgatggaagaattccctgtgtgggaaatcagaaactaattgaaaggttcctgcatcctgggagaatgcaaaaccagactcactgaagctgacagagagatatgaaacaccctctcaccagacacccttgtctcagtgtggttccctaagatcagaaagagatgcccaagctcctggtttcacccaggggaggtaagggcttggatcccatgttcagttcccttgcattt

SEQ ID NO: 772288 - DNA, 541 bp, Homo sapiens
acaaaagccttcccttcctgtgggaggaaaagagttgatagaggccaccagaatccctgggtaggttgattggtgggagccttctgtacaagtcaagtcagtaaagactgatagaggtgtctgctttgtctaatgtgcagataccaacagagagagtcaagaaaaatgaagaatccgactaagatgctccaaaaaaaggaacaagataaacttccagaaatcaaccctaatgaaatggttaacctgacaatgaattaaaaataactttcataaggttgagagcccaatgaaagtaagaatttcaacaaagaaagagaaaatattacaaagtactaaaccaaaatcatgaagctgaagaacacaagtgacctgaaaaatgcactamaggggttcagcagcagactagatcaagcagaagaaagtatcagcgaactggaatagaagtcactggaaataactcggaggagtaaaaagagaaaaaaagaatagaaaaaaatttaaagaaagcttaagaaatttatggaataccagcaagcagacc

SEQ ID NO: 772289 - DNA, 572 bp, Homo sapiens
tcacatttattgatgtgcctgtgtcaaattatctttacatccctgggataaactgcactcgataatagtaaaatattgtttcaatgtgctgttggaaaaaaaaaaaaaagaaaatgagggaacatttacaaactcaattcttgaggctggtaattatcctgatatcaaagccaggcaaagaaaccacaagaaaactacacaccaatatctatgatggatatagatgcaaaaattttcaaaaaaatactagcaaatggaatcccacagcccattaaagggatcatagatgatgattatgcggcatttattcctgtgatgcaaggatgttcaacatgcccaaatcagttaacgtgatacagcaaatcaacagaataaaggataaaaatcacaggatcatctcaacatatgcacaaaawgaatttggcaaaattcaacaccttcttatgataaaaaccctcgaaaatgagaagtaaaggaaattacctgaatataacaagagtgatatatgaaaagtccacaactaatatcagacttaacaagaacagaaagcttgtctctacaatcaggaatga

SEQ ID NO: 772290 - DNA, 645 bp, Homo sapiens
tcactttactctaggttgcagtgaacactagcaatggacatgtctcgagttaatgctttgacctcgggattttaggacctaagactcaacatttgccttttataacgtccatgcaacccacccctgcctgttatgtgacacattccccctctcaggcctaagtttatagctctctggctataaatttctaagcatggggtctacsccaaatgctggcaccaataaaaacaagtgagacaagaaaacccaccctttacttccacctcctgaggctcctcagtaaggagatattgaagcttctagagtaaacgcacaggcagcatggaggaagagtcatgcaggtccccatgaaaagatatctgacttgagatcactcccatttgacaggagtagcatttgctattgagaaagcattcaaaagtattcccatcccccaaactaactataactttattgttgaatctctgtttctctgttctgtatcttacacacctataactttccctttcaacatttttatctctttctggtaaaacggcttaaattcacctttgtcattaccagtccatgtctgcattgtgaattctgctctttgctgctttcaaaccagatttaatttggcttttgtgcttggcatcctcttct

SEQ ID NO: 772291 - DNA, 645 bp, Homo sapiens
tcactttactctaggttgcagtgaacactagcaatggacatgtctcgagttaatgctttgacctcgggattttaggacctaagactcaacatttgccttttataacgtccatgcaacccacccctgcctgttatgtgacacattccccctctcaggcctaagtttatagctctctggctataaatttctaagcatggggtctaccccaaatgctggcaccaataaaaacaagtgagacaagaaaacccaccctttacttccacctcctgaggctcctcagtaaggagatattgaagcttctagagtaaacgcacaggcagcatggaggaagagtcatgcaggtccccatgaaaagatatctgacttgagatcactcccatttgayaggagtagcatttgctattgagaaagcattcaaaagtattcccatcccccaaactaactataactttattgttgaatctctgtttctctgttctgtatcttacacacctataactttccctttcaacatttttatctctttctggtaaaacggcttaaattcacctttgtcattaccagtccatgtctgcattgtgaattctgctctttgctgctttcaaaccagatttaatttggcttttgtgcttggcatcctcttct

SEQ ID NO: 772292 - DNA, 615 bp, Homo sapiens
caatacaaataagttagaaaaacataaaattagaaattagaaattcatgatctgaatgagaaattcagtaaagagataaatatcattaagaaagaaccacactgaaatcctggaactgaagaaatcaatgaatgcaatcaagaactttaacaatagactagatgtagcagaagaaataatttctaaacttaaaggcaggtcttttaaataaccscaccctcccccaccaaaaaaaaaagaataaaaaagaatgaacatgtgggatacaatcaagtgaccaaatattcaaattttgggttttccagaaggagaagagatgagcaaagacatagaaaagctatttaatgaagtaatagcggaaaacttcccatgtctccatgtcttacaagagaaatagatatccagatacagaaagctcaaatataccccaaatagaatcaagcaaaaaggtcttctctgaggtacattatagccaaactgtcaaaagtcagtaataaagacagaattctaaaacagtgagagaaaagcatatagtcacttagaagggaaccctaccagactaacattggatttctcagcagaagtcttacaggccagaagaaaatgagatgatat

SEQ ID NO: 772293 - DNA, 605 bp, Homo sapiens
tacgtcaataataaatttgaatgtaagtggattaaattacccaattaaaagatatatactggctaaataaatttaatatagcccaactgaggccagacatgatggctcatgtctggaatcccagcactttgggaggccaagatgggaagaacacttgaggccaggagttcaagatcagcctgaccaacatagtgaaaccctgtctctactaaaaatacaaaaattagccgcacttggtggcacatgcctgtagtcccagctacctgggaggctgaggcaggagaatcacttgaacctgggaggcggaggctgcagtgagccaagatcatgccactgcactccagcctggstggctgagcaagactccatctcaaaaaaataaaaataaaataaaccaactatatgctgctgcctacaagaaagttgcttcacctgtaaagacacatgtaaaccgaaagtgaagggatggaacaagatattccatgcaaatggaaatcaaaatcatgcagaagtatctaacgtatatcagataaaacaggctttttagtcaaaaatagtaagaagagacaaataaggtcattatataatgataaaggggtcgattc

SEQ ID NO: 772294 - DNA, 602 bp, Homo sapiens
caatagaggcacacttgctgtagcatgactgaaatccttccctttaagatccacaaatttccttccaaccaaatgaaagctttccataggacttacacttttttttgaaatcacagaagtaatccatgctcattgtataaaacccccgaaataaatataaacaaagagaagaaagaaaaacataattaatctcagcctcaataaccaatagcattttagggaatgtcctttattaccaatttatttatacatgtgattgacttggtatactcttagtacatactctgttccaggcaccatgccagrttttgagtttgcaaagaagaacaagattttctctacaagacaaatatagccccctctctctgattatataaacacatgcatatataagttttataaaaaggtcatattttacaaacagtgggccctctgtgtctgccattctgcattcatgagttcaaccaaccacagatcaaaaatgtttggaaaaaatttttacagtacaatagaaagtaatacaaataaaaaccaatgtagtataacaactacttacatagcgattgcaatgtattaggtattatgagtaatttagagaagat

SEQ ID NO: 772295 - DNA, 602 bp, Homo sapiens
caatagaggcacacttgctgtagcatgactgaaatccttccctttaagatccacaaatttccttccaaccaaatgaaagctttccataggacttacacttttttttgaaatcacagaagtaatccatgctcattgtataaaacccccgaaataaatataaacaaagagaagaaagaaaaacataattaatctcagcctcaataaccaatagcattttagggaatgtcctttattaccaatttatttatacatgtgattgacttggtatactcttagtacatactctgttccaggcaccatgccagattttgagtttgcaaagaagaayaagattttctctacaagacaaatatagccccctctctctgattatataaacacatgcatatataagttttataaaaaggtcatattttacaaacagtgggccctctgtgtctgccattctgcattcatgagttcaaccaaccacagatcaaaaatgtttggaaaaaatttttacagtacaatagaaagtaatacaaataaaaaccaatgtagtataacaactacttacatagcgattgcaatgtattaggtattatgagtaatttagagaagat

SEQ ID NO: 772296 - DNA, 634 bp, Homo sapiens
atttacttgtctattctaatgccagaactactaggtattatttactatagcttttataataaatcttaatattagggttttttgaaatttaaaaacgctattgctaaaaaatgctaacattcatctgagcctttagcaaatcataatcatttagctggtggagggtcttgcctcaatgtttgatggctgctgactgatcacagtggtggttgctgaagaataggatggccgtggcaatttcttaaaataagacaacaatgaagtttgccacatcgactgatgcttcctttcacaaaaggtttttttatagcatgcaatattgtttgatggtattatactcaccatggaaattccttcaaaattggagttaaatcttttaaactcagggattttttytgacataaggttagatgaagctgagttggacagcatttaagtaaacataggtgaaaaaggcaccaaattatacatagatattttcctcagagtttattcttattttacatatttatcttgattattatcatttgccttttgctttttcatattaacttatgagagggttttaaaattccttcaaacactctgattaagagtctaacaaagcttgtagttagagaagtcaattacttct

SEQ ID NO: 772297 - DNA, 612 bp, Homo sapiens
gcgcccaccaccacgcccagctaatttttttgtattttcagtaaagacagggtttcactgtgttagccaggatggtctccatcttctgacctcatgatccacccgccttggcctcccaaagtgctgggattacaggcgtgagccactgcgcccggtcgacagagctcttaaaactcaacaaaaaaaaaacaaacaacctgtctcacaaatgggcaaagaacttgaagcggcatttttccaaagaatataagcaagtggtcaatagagtgaaaaaatgcccaacctcactaatcattacagaaatgcaaatcgaaaacagatgagataccatctcatatacattaggatggctactataaaaaaatcacaatgaaacaaaagtaacaagtgttgacaagaatgcagaaaaattagaactcccrtgcactgttagtgggaatgtaaaagagcatagctactgtggaaaacagtatagcagttcctcaaaaaattaaaaatagaattagcatatgatccagcaattccactttttaatataaaatcaaaagaattgaaagcaaggtctcaaaaagatacttgtacacccatgttcatagcagcattattcacaac

SEQ ID NO: 772298 - DNA, 612 bp, Homo sapiens
gcgcccaccaccacgcccagctaatttttttgtattttcagtaaagacagggtttcactgtgttagccaggatggtctccatcttctgacctcatgatccacccgccttggcctcccaaagtgctgggattacaggcgtgagccactgcgcccggtcgacagagctcttaaaactcaacaaaaaaaaaacaaacaacctgtctcacaaatgggcaaagaacttgaagcggcatttttccaaagaatataagcaagtggtcaatagagtgaaaaaatgcccaacctcactaatcattacagaaatgcaaatcgaaaacagatgagataccatctcatatacattaggatggctactataaaaaaatcacaatgaaacaaaagtaacaagtgttgacaagaatgcagaaaaattagaactcccatgcactgttagtgggaatgtaaaagagcatagcyactgtggaaaacagtatagcagttcctcaaaaaattaaaaatagaattagcatatgatccagcaattccactttttaatataaaatcaaaagaattgaaagcaaggtctcaaaaagatacttgtacacccatgttcatagcagcattattcacaac

SEQ ID NO: 772299 - DNA, 568 bp, Homo sapiens
cacaacaaaagtttgtgaggtgagagatatgttaattagcctgatttcatgattttgcaaggtatgcatatatcaaaacatcaagttgcataccataaatatatccaatctttatttgtcagttataccttaataaaactgagaaggaaraatctttaccaaatagacatactttaaaatatatatgtggaattttcagataattgaacaataggacaaaaaaaatgaaagaaataattttaaagagataaactttggaaagctattgaaaaaagataagataaaacttgacattgacaaaaaatagctatatatacacaagagttggaaaaatgtttaagatactgctatacaaaattctacaccaatgaatgtatgaaagtataatttttggttattagaaattattattcttcaaaattagagtattaaaatagcccactgaaaatgaaagtatttatagctcattatacactcattaactacacctcctaacccacactgacatctaaaaggcagtagcccagatcatttaatagataattccaactaaaactctaagaatgaa

SEQ ID NO: 772300 - DNA, 568 bp, Homo sapiens
cacaacaaaagtttgtgaggtgagagatatgttaattagcctgatttcatgattttgcaaggtatgcatatatcaaaacatcaagttgcataccataaatatatccaatctttatttgtcagttataccttaataaaactgagaaggaaaaatctttaccaaatagacatactttaaaatatatatgtggaattttcagataattgaacaataggacaaaaaaaatgaaagaaataattttaaagagataaactttggaaagctattgaaaaaagataagrtaaaacttgacattgacaaaaaatagctatatatacacaagagttggaaaaatgtttaagatactgctatacaaaattctacaccaatgaatgtatgaaagtataatttttggttattagaaattattattcttcaaaattagagtattaaaatagcccactgaaaatgaaagtatttatagctcattatacactcattaactacacctcctaacccacactgacatctaaaaggcagtagcccagatcatttaatagataattccaactaaaactctaagaatgaa

SEQ ID NO: 772301 - DNA, 496 bp, Homo sapiens
tttttgtataaggtgagagatgaggatccagtttcatactcctgcatgtggttagccaattatcctagcataatttgttgaaaagggtgtccttttcccaatttgtgtttttatttgctttgtcaaagatcagttggctgtaagaatttgggtttatttctgggttctctattctgttccattggtctatgtgcccatttttataccagtaccatgctgttttggtgactatggctttacaatatagtttgaaatcaggtagtgtgatgcctccagatttgttctttttgcttagtcttgctttggctatgcaggtttttttgttgttgttctacatgaattttagaattgttttttytaattctgtgaagaatgatggtgtttctttctcacagctcttaagattctttccttcatcttaactttggataacctgatgacagtgtgcctgggcaaagatctttttgtgattaattttccaggtgttctttgtact

SEQ ID NO: 772302 - DNA, 672 bp, Homo sapiens
atctgatgtgctggctcagcaggatcctgcagtgcacacagcttccccagtgcccagctcctgcaatacactgcagtctgaagcaccccgcgcccagcagctttcctgccaaccccatttccctccacagctcccctgaacaggttttcctagtgcccttgagggtggatttccagcaagttccactgatgcagtaccatagcaacttctttctccagctcgtctggatctctgtccaggaagaaaaaaggacttccctgcgctctttctcagccctaggggtagggtgctccttctgtttgctattattctatacttyagtgttcccttttactgcttccttgccaatccctcattattccaatcctctgttaaagttattgaatccttaacctttgttcaaattgctgttctttttttcttcctaattgaactcagattgatacaggagataacagagtatacacaaatatctgtttatttgaacaaaggaaatggaaaggacaaaccaaaactatagagactgattgcctgcaggggtgggtgggaaaggggtggaaagaagggagggaatgggaacaggttagtaggaacaaagagggagtgacacttttgactcttaggatcatagtaatgtgtcacatatttttcacacaccccaaatgtaatcag

SEQ ID NO: 772303 - DNA, 302 bp, Homo sapiens
tacggtatcattgctatgaaaaacaggtttctcagaattaaccatacaatccatcaattccattcctaggggcagacgcaaaataaatgaaaaaggacttaaaaagatatctgtacaccaattttcatagcagcattattcgcaatagccaaaagataaaasaacccaaatgtctatcaacggataaatagaacaaaacgtggtgtatacatacaatagatagtattcagccataaaaaggaaggaagttctaatacacgttacaatatggatgaacctataaaacattatgctacgtaaaa

SEQ ID NO: 772304 - DNA, 621 bp, Homo sapiens
tcatctcttcactcattttttatcttttgttatttccttgaacatatttataatagatgttttaaaatcttatgtactagtttcaacatctatgtcccctgattatagttctattgtctttttcatcttggttaaaggtcacacatcctgtcttttctgtgtctagtaattttttattgcmttttggaaactgctgagtctattttgctaaaaatctgaatgattttttgcttcttttaaagagaatttagttttcctttgcaggcagttaatttactagatgctgaggctgatcttagtggtctctttaggctttattgtgataggtgagaagtagcccttcctctaaggctagactagttctactcctaaagcaataactttctgagggtgtcaaattatgtctgggttattcaacacactgtcttccctcttccttgtgagaactccaatgtctcctagccacccgtaacctctgagatctctcactcacagcacctcccacttctttcgccccagcagtggctgttcaggctaagtttcagagccctacctcacacatgcacagttgagtatttggccaaaactgaaggggatccccatgcaaatttctgctgtttc

SEQ ID NO: 772305 - DNA, 643 bp, Homo sapiens
gcatcctgcctgttcgtgtccacacgtaggtaggcaggtttataatcaagcatgcaggcttgtgtgtctgtgtgtttatgtgaatatctgcaggtctgtatttgtaacggtgcatggctgtgtgtccccatgggtgtgcttgcatgtaatgggccatgtctgtgttttcacagaaatgaktgtgaatctgttgatctccatgtgtatatgtctgtattgtatttatgtgtctgttgtcaccaacagacatttggaggccattatcttttcacttttaattcactccatttgcatcagtaatatttgttcattgaaaaaacaagaaatagtagagaagcaacatacatatatatgtatataaaagccagagatcacagtcacaacatatatacatatatggttatatacaatataatataaatgcaataaatttaacatgatataattaacgtaatataatatctaatatatgaacaataatatataatttatacaaactttggtgcatgaacccaccacccagagataaggaatgttaatgtgttgggtattttttttctagtcttttcccattcaaatagttgttctaaaaatgtaagctttataagagcaaaaatggtgttagtactagtgactactgtta

SEQ ID NO: 772306 - DNA, 670 bp, Homo sapiens
gctgcacatatttgcataagtgatgaggaaccaaatgctaatccccaacacaatagggaaaatgtctccagggaatgccagaggtcttcatgtcagcccctcccatcacgggcccagaggcctaggaggaaaaagtggtttcctgagctggcccagggtccccgttcagtgtgcagcctagggacttggtgccctgcatcccagccactccaactgcagataaaagggccaacatagagttctggctatggcagaaggtgcaagccacaagccttggcagcttccacatgttgttgagcctgccagtgtacagaagtcaagaattggggtttaggaacctccacctagatttcaaaggatgtatggaaatgcttggatgttcaggcagaagttwgctgcaggggcagggctctcatggaaaacctatgctagggcagtatggaagggaaatgtggggtcagagccctcattaagtccctactggggcaccacctagtggagctttgagaagtggaccactgtcctccagaccccagaatggtagatccactgatggcttgcacggtgcacctgaaaaagccagccactcaatgccagcccatgaaagcagccaggaaggaagctgtactctgaaaagccacaggggtggagctgcctaagaccctgggaa

SEQ ID NO: 772307 - DNA, 616 bp, Homo sapiens
aactcttatatttgttttaaagttaacaaaggcatttagcttatgaggtgagaagcaagatgaagtcagttaggttagacttctctcactgttacaatttttgcaaaggtggtttcagtctctcataattcatgtctttctcccatgcacaatacattcattccatactaatagccccaaaagtcttaacttgttccagcatcaactttaaggtttaagtccaaaatctcatcaaaatcaaatatgagtgaaactcaagatatgagtcactgtaaggcacacacatctccagttgtgaacctctaaaaccaaagaagttatgtgtttccaaagtataatagtggtacaggcctagagkggacatttccatcccaaatgggagaaacaggaaagaaaaaatgagtgacaagtcccaggtaagttcaaaacctaaggagaccaacattagaccttacagctaaaaaatcatccctttggctccatgctctgccttctagatccagggagatactgcctcctaacactacccagcagaggttacgtccccagagctttggatagcctgcccccacagctttgtgcaaagtccagctgccctattgaatggaaggccatg

SEQ ID NO: 772308 - DNA, 603 bp, Homo sapiens
atagtatccacattaaaagattattatgagattaaaatgaatgaatacacgtgaaacactgaaaatagtacctggtagacaataagcactaagcaagtgtttagtattagaagaaattgtgaaaagacaattagaatctaagggtaaaaaagagacaggaaggaaggaagaaaataagaaaggaaaagagaaagaaggaaataaasaaataaattatcatttttgggggtgttccagtgattaattttacatatcataataataagaatgcactaaaccaacataaaaatacaattaaaataggagtatagaagagagataatagttgtttctcatttttcataatataaacaaatacttaacaaatagttaaattagtaaacaataaatatttggaggtaatactaaaagcaacagctaaaataatttaaaatatgatgagtggaacttaatgctaagaaggtatttattacttgatattttatcaggtgcatgtcacttttataaactttttttatgtatatgcatacacatacacacatatacatgtgtctatacatatatatatagacacatgtatatgtacttgaaaaacacaatgta

SEQ ID NO: 772309 - DNA, 603 bp, Homo sapiens
atagtatccacattaaaagattattatgagattaaaatgaatgaatacacgtgaaacactgaaaatagtacctggtagacaataagcactaagcaagtgtttagtattagaagaaattgtgaaaagacaattagaatctaagggtaaaaaagagacaggaaggaaggaagaaaataagaaaggaaaagagaaagaaggaaataaacaaataaatkatcatttttgggggtgttccagtgattaattttacatatcataataataagaatgcactaaaccaacataaaaatacaattaaaataggagtatagaagagagataatagttgtttctcatttttcataatataaacaaatacttaacaaatagttaaattagtaaacaataaatatttggaggtaatactaaaagcaacagctaaaataatttaaaatatgatgagtggaacttaatgctaagaaggtatttattacttgatattttatcaggtgcatgtcacttttataaactttttttatgtatatgcatacacatacacacatatacatgtgtctatacatatatatatagacacatgtatatgtacttgaaaaacacaatgta

SEQ ID NO: 772310 - DNA, 689 bp, Homo sapiens
ttattaattcaaactttcttgcatgtgggtttttgcagtttatttcccaaattgtgtttttccagctcagttttggcttcttcctgaaaacaaggctatactgcattatgctctgaaatttcttcacctgcagtttcatatcacctgctggttgcatgctaggctatttgtcatgtgattaacaattagtaaaaatgrcattttgaccacatgcccagaggaacaccaaagattggtagtccatcttcaaacccacctggctctcttcatcaaagtgctcattaacacagagtttgggcttccatactgtcagtttctgggactgattattctccatttaagtctggatccacgtccacaacagtcttgtctttacttgcgtgtacattttcggctgtcactaaaccatcatactgccatcaggggccagagaagtccaaataatgcaaggctatgttcttcagagattcctgggggtttggccagaccacaaaaatggtcatcactgtccttattgtatttcaaaacccaaccagtaactactaatgtctatgattctttgttcacttattttcaacctgcggggcatcttaaataacttaaatatttatccaaaagtttggataaaagtgggagaaataaggaggcacttttatcaaatactttctatgtgttagactgcagatctc

SEQ ID NO: 772311 - DNA, 689 bp, Homo sapiens
ttattaattcaaactttcttgcatgtgggtttttgcagtttatttcccaaattgtgtttttccagctcagttttggcttcttcctgaaaacaaggctatactgcattatgctctgaaatttcttcacctgcagtttcatatcacctgctggttgcatgctaggctatttgtcatgtgattaacaattagtaaaaatgacattttgaccacatgcccagaggaacaccaaagattggtagtccatcttcaaacccacctggctctcttcatcaaagtgctcattaacacagagtttgggcttccatactgtcagtttctgggactgattattctccatttaagtctggatccacgtccacaacagtcttgtctttacttgcgtgtacattttcggctgtcactaaaccatcatactgccatcaggggccagagaagtccaaataatgcaaggctatgttcttcagagattcctgggggtttggccagaccacaaaaatrgtcatcactgtccttattgtatttcaaaacccaaccagtaactactaatgtctatgattctttgttcacttattttcaacctgcggggcatcttaaataacttaaatatttatccaaaagtttggataaaagtgggagaaataaggaggcacttttatcaaatactttctatgtgttagactgcagatctc

SEQ ID NO: 772312 - DNA, 482 bp, Homo sapiens
gggcaaattttctttatatgcttcaagcaagacaacatatcataaaagtttggatacagaagaacagagtgaaactaaaactttcttctattaagctagacatttaagagatttaaaaatcataaaataagccactcttcttgctaattttttttgttttggaaaatatagttatttttgtttaaaatatgccatttacattaacatgtgakgtttattgttaaataaattttaaaatatttttaatttttcacttttaatttctaatgcagtaaatatcaacagatatcaatagatgaacaaagttatttagaatcctctacaattttttcttttttttcttttttttttgtgggggggacagggtcttactctgtcaacccaggctggagtgcagtaatgcaattacagatcactacagccggacctcccaggctcaagcaatcctcccacctcaaccccccgagttgctggaactatgg

SEQ ID NO: 772313 - DNA, 341 bp, Homo sapiens
ccaaatctcatgggcttcaaacagcaaaagtttattgcttgatcatacaacaagccccttgtgatttatcagtgtggctgtgtttgcaggagttactcagggactagatcttctggagcaggcaccgtctaaaacrggttggcaaactggcctgtaggccaaatctggtgcactgtccgatttttatgatccacaagctaaaaatgatcttcacctttgaaatggctggaaattgtgacacataaaaatcacacaaattcaagtttcaatttccataaatattattgacatacagctacactaacttgtttatgtatcatttgaggttgcatttgtgatat

SEQ ID NO: 772314 - DNA, 527 bp, Homo sapiens
aataatcaacatgagaataaagaacactcaatactttattgacttttgcctggaatgcagaaaggatagcccttttgtttgaaccaaccacaccaaagggttcagagttcccaaagtcgaacaaagttttcctgagataaaaatattamtgttatgtggcttaacttcttacaaatcttagggctagataccatttccccctctgtcagcataagcaatgcattgcactttgtgttttgtatccaaatcctaaaggcaattctatttctagatcattagagataaaaatgaactggaaacaaaatgaagatttatagttaacggcttcaaggctttctttggcaaagaacatgagaaaccatcatggttttgttttataatgcttattggcttctagggccaagagtttcttctttaagagagagggaaatagctttactcatctaactgcctgccttccctgcattagaggtgctcactgtgttgactgtagtgtagagtaagtaaataatcatagtgctagtttt

SEQ ID NO: 772315 - DNA, 615 bp, Homo sapiens
tttctatctgctgacctcacactgctccttggctgtaaattcccatgctacatttgaagtcgagtccaagacccccttgcagtggtcttcacatctatcatcatggcccaccttgaataaaatcttccttaccacctttgacaagcatcattgaataatttcttctttaacatcatctacccgtaaccattgttgtgggaagtcagggaccccaaatggagggacctgctgaagccatgacagaagaacataaactgtgaagatttcatggacatttatcacttccctaatcaatactcttataatttcctatgcctgtctttactttaatctcttaatyctatcatcttcttaagctgaggatgtatgtcacctcaggaccctgtgttgactgcattaactgcacaaattgttcgtaaagcatgtgtgtttgaacaatatgaaatctgggcaccttaaaaacaggataacagcgattttcagggaacaagggagataaccttaaaagtctagctgcctgtgggccgggcaggacagagccatatttctcttattaccgaaaatgggtaagagaaatatcgctgaattctttccccagtaaggaatattaataat

SEQ ID NO: 772316 - DNA, 603 bp, Homo sapiens
atatgtgcatgtgtgtagggggaaggtgggcaatgagagttgttgccattagtgaagaatgctaggaatttcaaggatgggatctgtatgaaaaccaaccaaccaaccaaccaattccccagattctgaggcatcagtaattttgtatatgagtttggaaggatggtttcctagcttatctccgmcaatgctaaaatcataattctggttttcaaaatttgggtaatgaaactatttctactgggttaatcacatcagttcttctgccaatctcagacccatggcaataccccactgttaagaggtggaaggaattacaatgggaatattctggatttatgatacttcaaaatctgaaatttttatagctaaaccatttttaaaatgctgaaaacttaatgcgtctcaactgtgacacatatatgcttttctgatttgtctccaccatttttgagcacttccttattctacaacacaagatatttcacactcattttgtaattgctcagctttggaatcagccattttcccaaggagaacctcttccttaaatggaagatgatacttagaaaccaaaatctgggcatggaatatgcttattgg

SEQ ID NO: 772317 - DNA, 626 bp, Homo sapiens
tattagtttaaggttggatatctgctaagactacttcctctatcaagtctttttcttcaggaggaatgtgctatttttgttcctttgttcgtcctcataaactttagatcagtttttaagtatctccaagtctctttctcttgcgttctctctcggcattctctctttctcacgcacacgcrtgcgcacacacaaacacatacacatacacacacccacaaacacaccctgttggcgttttgactgggattaaattgaatccatagatcaatttggagagaatcgacatcttcacaatattgagtgttgtgatctcagaacatgatatctctcttcatcttaccttctttcaataaagtttatatttttctccatagggggcttacaaaggctttgtatatttattcttaagtaatttacattgttatgctactgtaagtactgttttgtcaatttcattttttttttaattctttgcaacttatgtacagaaatgaaatttatttggtatttaggaaatgtactatagacaaatttaaatgctaataaatcctacattactttgagacttatatgctaacaatcattatctgtgaatgctggcattcaatcaggctggtgggaaa

SEQ ID NO: 772318 - DNA, 616 bp, Homo sapiens
aggattgcaacagaagtgttcaattattttcaaagaaaaatcataaattgtaagtagggactggatatgtatgattgtggttgaaggagtggtcagaaaaagccaacttttccatattaaatctatgtattaatatttaatatgggaaaagacacatcatggttttggatgctgctaacagaaaaagagactgttaatctacattaatttatttaaagtagagtcaaatagtgaaaagaacaagaagatgattatttaatctttattctgatacaagctgggacatgcttktttatattcaggtttcttttttctgttttagcatcaaagaaaactgtataatttagtaagattttgttaagtatttgaagactatattcaaataaataatcaggtcataaatactttgataaagagtgagaaacaagagtacacatgttactaggctttaagctgaaaagaatcacttactatttgagcttcactagttataaagtaagtatttggattcagatcaatggggacatgaagacaaggggaaaagaaacttaattcaataacctcaaaaacgtctttagacagcggactactgacaaaatatttcacctcatttagt

SEQ ID NO: 772319 - DNA, 631 bp, Homo sapiens
gctatggttggtcatcttacagctacaagaaattaatctgtgatggaatattttgaaattgtttccaaatagaaaaagaaattaaaaaaaaattgggaaatcaactttattaggttctcaacactgcctgccagctcaatcttcttttttctttataactatctcaagtttccactactttyttcaagcctatactccacaacctctctttgcaaaaaatatgtgaaaacattccgccaaatttacagacatcctgttcctttcacctcttttaacttgatgtaagaagactgcatcctcttactcaaggcacagatggctaactaccctgcacattccaagcctagccctaccctcctcctcagttccctcaaagacttctatcagagtccagattggatttatcttcagcttcaacctcttccccatattgatgtctttatgtctttcaaactttaaaaatatacttgctgcacaaccactccactatcttcacagttaacgtatttgaaagaatggtgtctatcactgctcctaacttaccacctaatttttcttgaaacacattacactatgatttctcataccagtaatcaaaaaaaaaatcactgccttgccacccgataaatac

SEQ ID NO: 772320 - DNA, 621 bp, Homo sapiens
aaccaccatgaacatgcttacacaagggggaagtcaaatcatgagtggattatatgaagattgatttagtttggttatcaaatatcctttgccatggagtgattgatggaacgttatgagccagagggtgatatcaacttagcgaccactgggtagggatctgagtttcyatctctcatcgacttatatgtatttcatgaagctcaatctagaagttatgcaaagagcagtgtcctcaattaaagacttcgtgtactgtgcagcattctccttttacttctgtgttctcttgtcctttttttgtgttcattttttcctctcacccccatgtttctaccttctgtgccccacagtgtcatgagattctgctcctgaaaattgcaacatcccaagtgcctcccaacgttgtctctaaggtttctgaatgctgttgctttcttctcacacctctgagctcatcacctgctttgcgctattgaaaatttcccctaggccgagcgcggtggctcatgcctgtaatgccagcactttggaaggccgaggcaggtggaccatgaggtcaggagttcgagaccagcctggccaatatggtgaaaccctgtctctactaataatacaaaa

SEQ ID NO: 772321 - DNA, 612 bp, Homo sapiens
aatcacttttagatctgttatgggaatactgtccttcaaataatggccaaaaatgtgcattttgatggcctgtctagacctgataaaaacaattctctaatctgactgataattcagaagatctgataacaccataccctccataccctcaacacagaaagtaatagttatcctgagctggagaatagttgtttcctcaagatgatacatgctctctctaattcactacagaacctactaggtctcctcatgaatgttactattaggtctctaggttctcaatccccattttaagaggtactgtcatcaactctgatgagtggacgaacaggtctggtgtgctctcaccagaaagtgaattattcattcatgtattcatttaatcagtcagaccgcaatttataaatgttycctctatgtcagacactgctccatgtactgaggatatagcactaaacaaaacagagacgttcatgaagattatgtacagtgcaatggaaaagtaatacttaattccagcaatatattggtgccattttccaacagcatgtactcacttcatgtttgagtcacattttgataattctcacaatatttcaaactttttgatta

SEQ ID NO: 772322 - DNA, 612 bp, Homo sapiens
aatcacttttagatctgttatgggaatactgtccttcaaataatggccaaaaatgtgcattttgatggcctgtctagacctgataaaaacaattctctaatctgactgataattcagaagatctgataacaccataccctccataccctcaacacagaaagtaatagttatcctgagctggagaatagttgtttcctcaagatgatacatgctctctctaattcactacagaacctactaggtctcctcatgaatgttactattaggtctctaggttctcaatccccattttaagaggtactgtcatcaactctgatgagtggacgaacaggtctggtgtgctctcaccagaaagtgaattattcattcatgtattcatttaatcagtcagaccgcaatttataaatgtttcctctatgtcagacactgctccatgtactgaggatrtagcactaaacaaaacagagacgttcatgaagattatgtacagtgcaatggaaaagtaatacttaattccagcaatatattggtgccattttccaacagcatgtactcacttcatgtttgagtcacattttgataattctcacaatatttcaaactttttgatta

SEQ ID NO: 772323 - DNA, 572 bp, Homo sapiens
cctagctcaggagtcttaaacccctgggctgcaaaccagtaaggtctgtggcctgttaggaactgggccacacagcagaaggtgagcggcaggccagcaagcattattgcctgagctctgcctcctgtcaggtcagctggggcatcagattctcatagacctgtgacccctattgtgaactgcacatgggagggatctgggttgcatgctccttatgagaatctaactaatgcctgatgatctgagatggaacagtttcatcccaaaactctatgcccaccccctgctcccaaggaaaaattatcttccatgaaactggtacctggtgccaaaaaggttggggacygttgtcctcgctgattgtgatcaagaccaagctgtagaatgctatgtgtcttcttaaggaacttttagctaggcaagtgtcaggagagataagttcaagttccagtgttcaatgctttgttaatttagaccccacttgaccaagtccattttattttttttatttccacattaattcaagtgtcatcatcctacaagattcagctcaaatcctacctcttcctcac

SEQ ID NO: 772324 - DNA, 673 bp, Homo sapiens
cactgtgggatccagagcagtgcctattaacacattcacatttttgaagataaataaataaataaatatttacactatgttggggaaatacagactatagacagtcttgtgacaaattcttatttgtcaccaaataaattctggaactaccaaaatgacaaaatttaaaaaaaaactttttggattttggaattatagataatagtttgtggatctgtagtagataatatttgtatttatgtatttatttatttactttgaaatggtgttttgctctgtcacccaggctgaagtacagtggcatgatcttggctcattgcaacctccgcttcccgggttcaagagattctcctgcctcagccacctgagtagctgggattataggcatgcaccaccatgcccagctaatttttgtatttttagtagagaaggggtgtcaccatattggccaggctggtctcgaactcctgacctcaagtgatccaccccrctgggcctgccaaagtcctgggattacaggtgtgagccaccgcaccaagctgataatatattatttaagggacttttctgcttgaggcaaggctcattctgatgtccatggtcttcacaaagctttctgaggtaatccaaatttaagaagtgactacttcttttgaactactatagcactttg

SEQ ID NO: 772325 - DNA, 673 bp, Homo sapiens
cactgtgggatccagagcagtgcctattaacacattcacatttttgaagataaataaataaataaatatttacactatgttggggaaatacagactatagacagtcttgtgacaaattcttatttgtcaccaaataaattctggaactaccaaaatgacaaaatttaaaaaaaaactttttggattttggaattatagataatagtttgtggatctgtagtagataatatttgtatttatgtatttatttatttactttgaaatggtgttttgctctgtcacccaggctgaagtacagtggcatgatcttggctcattgcaacctccgcttcccgggttcaagagattctcctgcctcagccacctgagtagctgggattataggcatgcaccaccatgcccagctaatttttgtatttttagtagagaaggggtgtcaccatattggccaggctggtctcgaactcctgacctcaagtgatccaccccgctgggcctgccaaagtcctgggattacaggygtgagccaccgcaccaagctgataatatattatttaagggacttttctgcttgaggcaaggctcattctgatgtccatggtcttcacaaagctttctgaggtaatccaaatttaagaagtgactacttcttttgaactactatagcactttg

SEQ ID NO: 772326 - DNA, 634 bp, Homo sapiens
atacgaaatgaaattttgtcttgaaaaatgggatttagaaaggaatgggagggaatacatttatgaaacaaaaacaacagaaccaaaggcttagaggctgaaaattttggaacaggaagggaaaacaaaataaaaaccctggactacgactggtaagctgagtgatattggacatgtccatttctgtytctgggctttatttttttttcatttaaattaagatatttaaactaggtgatgtctaagactcgtgataactataattgtgattcaaggaaaatctaagtgtgtacatctaattagaataaagcactatttaggtttatgtacttggtaatatgatacatactctaatgctttaggaaggaagctctataaagggtatcagggtcataacaatgtattaaatagtgtggtattatactaaatatattgatcttcctgattctgtcacagagctcctcaaacccttggatttcctgaatgataagagtgtctttaaaaaaaattttttttaaactgatgcataatagatgtacatagtttcagggtacgtgtgataatttaatatattcatataatttgtaaagatcaagccagtgtattctggatatccatcactttcaatatttgt

SEQ ID NO: 772327 - DNA, 635 bp, Homo sapiens
gaacataacacattccaattataattttaaaaattgcattattttggcatcccacagattttgtagtgtagttaaattacacatagtcagcagaactagttatctaacagtatatattcagtctaacacagaatgacatattaatattacattaaatggctctacatttataaaaatctaaagagacatccctaaaataaagaactaaagaatactttttctcttatacaggactcactaaacttacttgaagagcttatggaaattgttttttgttttaaaagagagaagtaatatgagagagttttttccatttagacaaaagcaatcttaattgatgattttttttaaaagactcagaggtccctgaaataaagctatacagcctgaagcaggaaatacatttggcatctggttgctagatgataattaagaaagacaggttcagtcagagcactgacccagaagccacaatttaagtgtcaatgmatagagtcaatattcccttgaccactcacatctagaggagatcatctgaaaaagaaagagagtgggggtaaaacagacttacaggatttcaacaaatgattttgtaatgaatcttggcataattcagagggaataaataaaaagct

SEQ ID NO: 772328 - DNA, 631 bp, Homo sapiens
aagaggtttgagagccctggactggcaggtccctgagagcccggaagagttgtgggataatcagggagctcaaacggctgcatgttcttggaaaaacaactccccctctcccagcctctgttttctccctgtccagagagaatccagatccctctctcccagggtttttgtgggcattcaaagtggcaaagctattcaratgatcagtgagttgagtcaggttttggattctttctgacccaagggtaatcgttttgcctcacttcccctgtggagaactcagatgagggagaggagatgcagaccaggatgtctgtgaagcccatagctctgccacaggcattagtctcacctggccaccctgacctttctccactgcagcattgtcagtctcttacccgggtttggagggcactgccctgctcagtctggggggatgtggtgaccctcaggacagcctccccagcgcccaggccctgtccaggcccaggatgaaggctgcctcatcctcaggcctggtgagtctcacccctcactcccctgcttaggtaaaagatttggccaaagaatggggatggtctgtaagttagcccatgtgatcttcatgtatgaagaaatagaggggcagagg

SEQ ID NO: 772329 - DNA, 495 bp, Homo sapiens
ctgccagcacagcagtctgaagtcaacctgggacactggagcttggtgggaggaggggcatccaccattactgaggcttgacggttttcccctcacagtgtaaacagagcccccagaaatttccaactgggcggagcccaccacagcaccacaaagcagctgtcaccacactacctctctagattcctcctctctgcgaagggcatccctgaaagttaggcagcagccccagtcaggggcttataggtaaaactctcatctccctgagatagagcamctgcaggaaggggtggctgtgggcgcagcttcagcaaacttaaacattcctgcctgctggctctaaagagagcagcggatctcccagcacagtgctcaagctctgctaagggacagactgcctcctcaagtgggtccctgacccccatgcctcctgactgggagacacctcccagcagggatcaacagacaccttatacaggagagctctggctggta

SEQ ID NO: 772330 - DNA, 533 bp, Homo sapiens
agatccagaagtccgctctgaaggactggagtttgctgtgttctatggattctaccatcagatatcacgctccacttcctcaaacatctgcttatcatcacattctactgcacaacagcaggcaatagctctctgaaagtttactgaataacccaacagtgagacaaacataaagtggcttcatttttcttctaattattgccttcaacctactgtgatagtgttgcacagatcaataatttgttctctttcatttgctgtataacattccactgaaggaatatactacaattwaaccattctgttgtaggtgacattggtgttgtttccagttctggactaattatgcatgatgctgctatgaacagtcttgtatgcttcttttggcacatgcgtccttctgttaggtgtatacctagaaaaggaacttccgggtcataggtgatgcacatgtttagttttagtacgtattaaacaaaactaaccatttgttttcaaaagtggttttacctatttactattttatttttgta

SEQ ID NO: 772331 - DNA, 646 bp, Homo sapiens
aaaaaattataccctgttacatgatttagtttcctgagatcgggacccttgtcctgtctttgttttgcactcctcagaaaagcatgcaatagttgactacattgctaagtattcaaaaacaatatgatgaaattatttagttatgcttgacccgctgatcttgttttcaaactaagattccatagcgacatatctcacactgttactatgtgaaaaaaatagcaaactgccctaaaagtaattcaacatccttaacaattcatcccaactaaagctcaacaatcatattttttgttccccgagaaattatctattgtgactgtttatataaaatatactactctcatttgttactctattttaacatgaaaaaacacttatcaaaaatgctactgtaatgtacggatgccacttcctgtataagcaaggtacaaatagacttatagaagaggcttcttcttatagaagaagaagaatgaaaaatcacttscatttcaccaccaacttcaattgatcgtcagtaactgcctggagagttctttctttgagagaaattgtgaggcctagtgtaagctcaccaggaaagtatgccaagatcaattattgatgtctgccatgggcatataggagaatggggtgacaatct

SEQ ID NO: 772332 - DNA, 487 bp, Homo sapiens
agtggcacttccctggtgcgtctggtcggccatcttgaaaaggatcccgtgatcttatttttgacttaatatttgtgcatttcttttgaacctgcctagcaaaatggacataaacaatagaaacaaacaatggaataaaaatgaggagcttgaaattagaatctgcgtgasttgaatttgaattctggccctgcattctattgaattggtaatttagattttttcggagattaaattctagttttttctttgtttactgttgttgaaatggaacgcattttatttccgactttacacacataaatccctgtgtacatacttatataaatatacataaaaacacatgcacatgtatgcatatacatacacaggacattttgcttgcccctccctctgcctagaaggttttccctcatatgtttccttgattctcctcatcatttccttctgatattttcttgaatgttatcatctcagtagtcttccc

SEQ ID NO: 772333 - DNA, 434 bp, Homo sapiens
ggcctttgggggaaaataatctaggttctgactaatccaagctttgtggctataattccataaacctctgtattagtccattctcacagtgctataaagaacttccctgagtctgggtaagttataaagggaagaaacttaattgactcacacttccttatggctgaggaaaccacaggaaacttacaatcacggcagaaggtgaaggggaagcaaacacctttttcataagggagcmggagaatgagaggacagagggaaatgccaaacacttgtaaagcatcagatctcatgagaactcactcactatcatgagaacagcatggaggagactgaccccatgatccaatcacctggcaacagttccctccctcaacacatggggattacaattagagatgagatttgggtggggacacagagccaaaccatat

SEQ ID NO: 772334 - DNA, 610 bp, Homo sapiens
taagggttccttcaacacccctttttagaccttatgcacctcataacaagaacaaaagcaaattctaatgatttagttgaatatttttggtggtcaatatgtaaccttggtggggaacatggactacatggtgtttaagaacaatcagtataggcataaagggtttttgtctatttgttaacaggattatgaagaacaggcactttgaagtttgacagtcatttgtgatttttttctgtatgatacatggactatctatgtgactatgtgactataatcaaattactaaatctttctgaatttccatttcctcatctataaaatgtgtcttgagtagtgataaaaggtaaaatgcctgccatataagaaaaatagagtattactgcattgcaaaccttgtctccgatgactctcaattaatctcatcatagttttgaagcaatttaatagatcraaatgtttctattttcctagagaattattatgcatttgttttccaaatgaatgctgtgttttacagccctaattgcctaagtgtgtatctaagagtcattgatgtcttcagattacttgcactgattacatgaaattctaggaagcagaggttctg

SEQ ID NO: 772335 - DNA, 576 bp, Homo sapiens
cagattataaagtcattataatcaatgtgtccaggtgaacataagcttagaattcaacctacattctgtgaaagaaatacatgaaggaatcaataagttaataagtcctactatatgtatcactttttagcatactataaatgcacttatttattatgtttattgtctgtctctccacttaaacaaattcctacataacaggatgtctttttcttcaatgatgaatgaagtctatctagatgaatcaacaatacttcgataaggcactcactatttggtgaatgaaagaattatcttgatctsaaaaatacagactacgtactcctgttgctctttgaaattttaaataaaatgttggaatatttattttagatagtttaaagaagctaaaaatctctacaaatgcatttaggtggcagagaatctacaaaccaagtcaaccgatacatgaacaaacaaactgtaaatgagggaaagaaagaaagtaccaaaggatgacctagcgtgggtatttggaagggttacttaattatgtcgtctaagtaacctaatttatatgattgtaaaagatcagga

SEQ ID NO: 772336 - DNA, 599 bp, Homo sapiens
tttattttattttattttcccataagttttgaggtgcaggtggtatttggttacatgagtaagttcttcagtggtgatttgtaagatcctggtgcacccatcacctgagcagtacacactacaccatatttgttgttttttattcctcacccccctcccactttcccgctcaagtccccagagtccattgtgtcattcttatgcctttgtgtcctcatagcttagctcccacatatcagtgagaatatacgatgtttggttttccattyctgagttacttcacctagaatcacagtctctaatcacattcaggtcattgcaaatgctattaattagttctttttttatggctgagtaaagaactaaaagtagtacaatctgatccagcaatcccactaccgggtatctacccagaaaagagaagtcattatacaaaaaagatacttgcacatgcatgtttatagcagcacaattcacaattgcaaaattgtggaaccaaaccaaatccacatcaatcaacaagtggataaagaaactctggtatatagatatatatattatataccagacatatagctatatatctatataacagtata

SEQ ID NO: 772337 - DNA, 599 bp, Homo sapiens
tttattttattttattttcccataagttttgaggtgcaggtggtatttggttacatgagtaagttcttcagtggtgatttgtaagatcctggtgcacccatcacctgagcagtacacactacaccatatttgttgttttttattcctcacccccctcccactttcccgctcaagtccccagagtccattgtgtcattcttatgcctttgtgtcctcatagcttagctcccacatatcagtgagaatatacgatgtttggttttccattcctgagttacttcacctagaatcayagtctctaatcacattcaggtcattgcaaatgctattaattagttctttttttatggctgagtaaagaactaaaagtagtacaatctgatccagcaatcccactaccgggtatctacccagaaaagagaagtcattatacaaaaaagatacttgcacatgcatgtttatagcagcacaattcacaattgcaaaattgtggaaccaaaccaaatccacatcaatcaacaagtggataaagaaactctggtatatagatatatatattatataccagacatatagctatatatctatataacagtata

SEQ ID NO: 772338 - DNA, 515 bp, Homo sapiens
tatacttttaagaggcaacccacagctatataaacccaagaggaatcatagaagggtgagcagctgccaaacaaaccctccccagaaggaagtcgacattatttgttttccagtgttttggtcttgaactatctggattgccttaccgtggtcctgatagaacaaatgcccttgcatgtagattaaggacttatttctgtttattgaaaattccaacccctttgggctttgttctartccttgatttccaaactggaagcttctcttgacattttagctttagtcagtttgtcctatttggctttacagatgctatatggtcaatcatttctatctactacaacaacaacctaattctaggagatcattatgggaagactgtggatctgaactattgggtccccttagtctcttattcgatccggatttagggatataattactccaagaaagtcacattgtaccactatctggccaccatttggggatcatggcaatccccaactgtggtggaa

SEQ ID NO: 772339 - DNA, 643 bp, Homo sapiens
cacctctatcttcattttctgctgatgatcgtgttcactctctcactagaaaataaacacaattacgtgaaaatggctgtgtattcccacggtctaattgtttactatatttgcgcctgcattctaattctgtgctgtccttctttttaccatagaggaactatcatttctggcctcttaaagaatatgctttcagcaattctccactctatcctacattatcaacatctcctgataatttcataaagtatatcatttctctagtaatataaatatgctttatatttccaatatggaaaataataaaacaaatacaataaaagccttattgaacttcacatatctctccaactactgcctttcttytttcctcctttttaaagcaaacctcattaaaacagcttgttacatttgctttttctatttttctcgtctcttttacaaccacttcaatcagactgtatctctaccactccaatgaaacatcgcttgtcaagatcgccaatggtctctacttggctaaatgcaatggctcatttttaattgtattacttgcccatcagcagtatttgacacagttgattattctctccttgaacttgtgtgtgtgtgtgtgtgtgtgtgtgtgtgtgtgtgtgtgtgt

SEQ ID NO: 772340 - DNA, 643 bp, Homo sapiens
cacctctatcttcattttctgctgatgatcgtgttcactctctcactagaaaataaacacaattacgtgaaaatggctgtgtattcccacggtctaattgtttactatatttgcgcctgcattctaattctgtgctgtccttctttttaccatagaggaactatcatttctggcctcttaaagaatatgctttcagcaattctccactctatcctacattatcaacatctcctgataatttcataaagtatatcatttctctagtaatataaatatgctttatatttccaatatggaaaataataaaacaaatacaataaaagccttattgaacttcacatatctctccaactactgcctttcttctttcctcctttttaaagcaaacctcattaaaacagcttgttacatttgctttttctatttttctcgtctcttttacaamcacttcaatcagactgtatctctaccactccaatgaaacatcgcttgtcaagatcgccaatggtctctacttggctaaatgcaatggctcatttttaattgtattacttgcccatcagcagtatttgacacagttgattattctctccttgaacttgtgtgtgtgtgtgtgtgtgtgtgtgtgtgtgtgtgtgtgtgt

SEQ ID NO: 772341 - DNA, 643 bp, Homo sapiens
cacctctatcttcattttctgctgatgatcgtgttcactctctcactagaaaataaacacaattacgtgaaaatggctgtgtattcccacggtctaattgtttactatatttgcgcctgcattctaattctgtgctgtccttctttttaccatagaggaactatcatttctggcctcttaaagaatatgctttcagcaattctccactctatcctacattatcaacatctcctgataatttcataaagtatatcatttctctagtaatataaatatgctttatatttccaatatggaaaataataaaacaaatacaataaaagccttattgaacttcacatatctctccaactactgcctttcttctttcctcctttttaaagcaaacctcattaaaacagcttgttacatttgctttttctatttttctcgtctcttttacaaccacttcaatcagactgtatctctaccactccaatgaaacaycgcttgtcaagatcgccaatggtctctacttggctaaatgcaatggctcatttttaattgtattacttgcccatcagcagtatttgacacagttgattattctctccttgaacttgtgtgtgtgtgtgtgtgtgtgtgtgtgtgtgtgtgtgtgtgt

SEQ ID NO: 772342 - DNA, 606 bp, Homo sapiens
aaaaaaaaaaaactgctaaaattctcacctaggtgcatttggtaatcaagcaaactagaccagccaacaaaagacagattgttataaatgtaagtcttcttagagattttgtttttcttatacaattcagccagtcctagctaaacataaattttaaaaatttaacgctaaacttattttaaattgatttacaaaaagggtaaaagaattttttttttacttaaataaatgaaactaccatggaaatacctttacccaaaattttartctacaggctttattagattacctgtaaagacaaataaagtttagctatgtaaacaggtctcaattttgtcagaaatataatttggatctaagtgtctgttataaactagtgagtttttgtttgttttgttttgttttactgtcttatgactaaaattcaaaagtgaaagctataaggtctttatttgtgtgtgtatgtatgtttagatgggtttacatatgtatatgttcatgtattatgttatatggtatgtccacatggtcaaagctggtatagttgttcaaaaatattgtaaggataaaagaatgttcatatacaagataaaatatatagtaatt

SEQ ID NO: 772343 - DNA, 628 bp, Homo sapiens
agctaaaacatgtacatgacacatttaattctttgtattttaatatttattttttagttcctatatttttattgtctcgaactttctgtactccggtgtttggttagtttcataattcccattatttttttaaaaactttattaaaatcacaatgcttatttttatcaattttataattttcctgyttaatagtcctattataatgtagactcacatatccctactgcccctaatattgatcattttgttgcaaaaaagtattgagagggagacacaatctgcattatgtaattttatatttcacttataacatattgtgcgaatctacttagtattgcaaaaagggcacatgggtaaaatggtggagcaacaattacattttgctgtgttgtgtagtcaataaatgtctaggctcaggaaatagacggtctgggttccagttccagctccaatatttactagagaagaaaatatgaacaactgactttacttctctttgcccatgtacatgtgtcacctttaaagtgaggacaattataataataaaacctatccgattagacttgtgaagtttgaactggttaatatatgtaaattgataagaacagtttctggtgcaagaaaaaa

SEQ ID NO: 772344 - DNA, 607 bp, Homo sapiens
atattcagaatatttgtctctttctttagcaactcacacaggcctaaatccaatagtttttccaagtttagtgtagtgtcatattggctaccacacactccatgcttggagcttaccctttctatgtggcactattttaccctgttattacaccactagatcagaatagcaatrtgatgccatggattcacaatggaatcatcataaggccagtattttgagtagactctctaatacaagaaaagaagtcacacagtattcccctgtaacatgatgttggtaacataatacctgacgtgtgaggcagtctaccctggagctacatatggctatgttacaataagaagtagattaaaaagtccattaaacatttgctgcagaaactaagaggacttttgaaaatcactaaatgtgcttcttacactgtgagagaagacattgcatttctaatttgtgtgtttgatttacttttccataagaaccattaggattttaggggttactggatctggtagggttttccctgatgaaacatgctattgcttaggactctctacaactctaagtaacagaaatacaatctaaaccacagcagcagtaagtggaa

SEQ ID NO: 772345 - DNA, 642 bp, Homo sapiens
ataacaaaataccacagtctacataatttataaagaacattttatttcactcacagttatagaggctgggatgtccaagagccaggtgctggcatcttgcgagccatgttatcccatggcagaagggcaaacaagtgcctgaaacagagagcaaatggggaccaaacttatcctttaatcaggagccggctcctgcaataatggcattaatccattcatgagtgcagcgccctcatgacctaatcatctmttaaaggccccacctctcaatactgttacattggcaatcaaatttcaacatgagttttggagggaacattgaaaccatagcagaaggctacttcattgacaaccagtcctggaatcttatgcctttagcaccatgtaccccatcttcctttggcccactgctttgggtccaaccttcgtagtttttgcacagttgcctcactgaacctcagtttctgcttagggctgaggtgtttccttgacaatatgcctatagccttgcttagtctctgtcacatctcttttaggggttttagatcttaatctcgttccttttccatccagacagatttttctgtgttcttctgattccaagtatagttggccttctagatttctcttctaacaggtttg

SEQ ID NO: 772346 - DNA, 598 bp, Homo sapiens
tgtattttgttagggagttagttaagtttgtaatgagtcctgagtactgtggactcaaaagacacaatgtaaatgtaaaatattgtttgtatttattattgcttcattcctctcagataccatttctgtcattaacgtgtgtcagtttcattttgagaaacttatctctttttttccatattcttaaatgtggggaagtagctttccccggtgttgtggctgctatttttacaaaacaaatcatcgtgaaatctaatcttaaatcaattttatattttgttaacaaattctgtaggccaggaatttggacaagtcacaatggggacagcatgtctctgctccatgacgtctgatcatttgtgaaaaaactcraaggccaggagagagactcagttgctgagggcttaagtcgtgttcactcctttgtctggttctggggctggaagaattcggattaggacgccttataggagcgcctctccatgtggcatccttgtagaatggtggctatagagtagttggatttcttactgggtaacccagggctctaagtgcaagtgttcaggcaaacaaagttgaggctgcattgctcttgctg

SEQ ID NO: 772347 - DNA, 567 bp, Homo sapiens
ctacaaaaactttgaaactaatacatgagttcagaaaggccatgggatacaaaatcaacaaacaaaaattaattatatttttatataattacagtggacacctgagcaaaaaaattaaaaatataatattatttgcaattgttaaaaataaaagattttagttaaaaatayaccacaatatgtacaggacttgtatgatgaaaattacaagtgtgatgatgaaaaaaattatatgagatctacataaactgagagacataccatgctcatagtttaaaaaacaattatttccaaattgatacagaggtttaatataatttttatcaaaattttgacaagacctttttgtggatatagacccaattattctaaaatttatatggaaaggcaaaggaataaaatagtattgaaaaaaacaaataaaatgggagaaatccatttatccaatttgaagttctgaaatatagccacagtagtcaattctgggtcatagtggcagaggatagacacttagattaatggaatagaacagagaaccccaggaatagacccatacaagtatgctca

SEQ ID NO: 772348 - DNA, 624 bp, Homo sapiens
ttttctacatcaattaaaattcccatttctccagggtaagtatcttaggaggttattaagaggaaaggaatctgggggacaaaacttgtattaattcaggagatatgaatttataaaagtagacctttcaaagatgacatagtacagttgtctctccatatctgtgggggattggttccaggagccccaacagataccaaaatctaaggatgttcaagtcccttatataaaatgatgcagtatttgcatataacctatacacatcctcttgtatacagtcacactctgcttaacgatagatagagatatagtctgagaaaatgcatcattaggcaattctgtgcaaasatcatggagtgtacttacacaaacctagacagtacaacctactacatacctagactatatggtagagcctatcactcctaggctagaaacctgtacagcatgttactgtattgaatactgtaggtaattttaacataatggttaagtatttgtgtatctaaacatatataaacatagaaaaggtgcagtaaaaaatacagtattataatctcatgggaccaccttcatgtatgtggtctgttgttgaccaaaacattcttctgcagtgtgtgacta

SEQ ID NO: 772349 - DNA, 610 bp, Homo sapiens
acctttcaatgtcccacccatttcttgccccacccattcctatctcctctacttccagaattttctgccccgcaaccccccaccacgccccaacccgggaacttcccaggcttcttcccaaagcatttctgagaggaggtgttactgattttggacaattctaaggcttcaatccccttttcctatgcaactcccccacccaacagaatccatgactccctgctaatcttaggacctatgaagcaggcaaagtctattttgtagattctaagagctggataattttttaaggtgtagagaagcatcttttgctagaggktcttctttgtgtcttttatggtcatcttcattccaaagctgtgctactgagtccacattcctttgagggcagattggctttccaaatagattggtatcatgtgaactgtttttttctcagtgaataatggcaatacacatgtgtctcaagcaggtacttagtttgcaaagaaaaataaattcatttatactttaccatcatcttcagctataaagtgtattgtcaataaatttcattgccacggagttgatgcagttgtcttccattggttcagcagccatctttattcct

SEQ ID NO: 772350 - DNA, 464 bp, Homo sapiens
ttcaaaaaataaatgaataaatatacagacacaagtaatgcaggttcactgtaaaaaaaaaaaaaaaaagaaaatacaaagacataaagaacaagactatacataagtccaccaaagatatgtatttttacattttgttgtttttctactttatttgtatttatttttaaraaactggatcatatattggatacattcttttgcaaactgctttttaaattaaatataataaatatagttctgtatcaataaataccataccataatataatttagaatggcaatattccattttatggacataatttaactaatcccatatttttggacatttgggttgttttcaatttttcataagtgataactagatgaaaaattcttagtcaattcttcacattgatcctaaattactttcttaacataaatttctgttggtcaaataaatggatccaaaacatgtatac

SEQ ID NO: 772351 - DNA, 621 bp, Homo sapiens
ggctggggagtcactgtttaatgggtacagagtttgtctgggatgatggaaaagttctggaaatggataatggtgatggttgtacagcattgtgaatgcactttagtggcactgaactgtacacttaaaagtggttaaatggtaagttttatgttacaaacattttaccacaataaaaaaacaagtataggctgggcacagtggctcatgcctgtaatcccagcactttgggaagccaagatgggcggaccacttggggccaggagtttgagaccagcctgggcaatatggtgaaaccccatctctactaaaaacacaaaaatgagccaggcgccagttaaaaaaaaaagaaaaaaaagcaatacatgcattatattttaaattgwcattaaatgtgaatatctgtaatattgacttacctatcacctgtttccttttctgttaacagtatcttgcattttttctttctttctttccttctttctttctctttttttctttctttcttttcttttcttttttttttttttcagaaaacacattatccatcccaatccacaccataaaattagtcacataactcaggcctggtaaatcactgtgcttcatcccatataagag

SEQ ID NO: 772352 - DNA, 621 bp, Homo sapiens
ggctggggagtcactgtttaatgggtacagagtttgtctgggatgatggaaaagttctggaaatggataatggtgatggttgtacagcattgtgaatgcactttagtggcactgaactgtacacttaaaagtggttaaatggtaagttttatgttacaaacattttaccacaataaaaaaacaagtataggctgggcacagtggctcatgcctgtaatcccagcactttgggaagccaagatgggcggaccacttggggccaggagtttgagaccagcctgggcaatatggtgaaaccccatctctactaaaaacacaaaaatgagccaggcgccagttaaaaaaaaaagaaaaaaaagcaatacatgcattatattttaaattgtcattaaatgtgaatatctgtaatattgacttacctatcacctgtttccttttctgttaacagtatcttgcattttttctttctttcyttccttctttctttctctttttttctttctttcttttcttttcttttttttttttttcagaaaacacattatccatcccaatccacaccataaaattagtcacataactcaggcctggtaaatcactgtgcttcatcccatataagag

SEQ ID NO: 772353 - DNA, 621 bp, Homo sapiens
ggctggggagtcactgtttaatgggtacagagtttgtctgggatgatggaaaagttctggaaatggataatggtgatggttgtacagcattgtgaatgcactttagtggcactgaactgtacacttaaaagtggttaaatggtaagttttatgttacaaacattttaccacaataaaaaaacaagtataggctgggcacagtggctcatgcctgtaatcccagcactttgggaagccaagatgggcggaccacttggggccaggagtttgagaccagcctgggcaatatggtgaaaccccatctctactaaaaacacaaaaatgagccaggcgccagttaaaaaaaaaagaaaaaaaagcaatacatgcattatattttaaattgtcattaaatgtgaatatctgtaatattgacttacctatcacctgtttccttttctgttaacagtatcttgcattttttctttctttctttcyttctttctttctctttttttctttctttcttttcttttcttttttttttttttcagaaaacacattatccatcccaatccacaccataaaattagtcacataactcaggcctggtaaatcactgtgcttcatcccatataagag

SEQ ID NO: 772354 - DNA, 642 bp, Homo sapiens
gtgcctttcttaggaattcccttctccctcccaatttatctggataacacaggaacagacatttttttaaacatgagcttgctccccatgctcaacatttgctttgagagtgaatgcctgatttgaactgggctaaytgcagatcttcttctggatttttagatgtggaacatagcaaatcaagtcattctcatttaggtgatcaaaactctaagatgtaaaacttaggagctgtcattggccgtattttctaccatgaaaagaaagccaacttgcctccaaaaaggaaaatgaggctaatacatagagaaaaacttgagaccaaggctgcagtgaggtgtgatagtgccactgcactccagcatgggcaacaaaataagaccctgtcaaaacacacacacacacacacgaaaaaaaaccctaaaaacttcagactggtgagagcgatcatagctggttctaattaactctgagtcccagcaatatgcctgccttcctcacagctcggatgatacggcaatgtccttccagtaaactccccttttgtttaagttagtttaaattaggtttctgtccatttcatcctaaagtccttaactattcaaaaatgctacaataatttatttctgatgccataaatgt

SEQ ID NO: 772355 - DNA, 642 bp, Homo sapiens
gtgcctttcttaggaattcccttctccctcccaatttatctggataacacaggaacagacatttttttaaacatgagcttgctccccatgctcaacatttgctttgagagtgaatgcctgatttgaactgggctaattgcagatcttcttctggatttttagatgtggaacatagcaaatcaagtcattctcatttaggtgatcaaaactctaagatgtaaaacttaggagctgtcattggccrtattttctaccatgaaaagaaagccaacttgcctccaaaaaggaaaatgaggctaatacatagagaaaaacttgagaccaaggctgcagtgaggtgtgatagtgccactgcactccagcatgggcaacaaaataagaccctgtcaaaacacacacacacacacacgaaaaaaaaccctaaaaacttcagactggtgagagcgatcatagctggttctaattaactctgagtcccagcaatatgcctgccttcctcacagctcggatgatacggcaatgtccttccagtaaactccccttttgtttaagttagtttaaattaggtttctgtccatttcatcctaaagtccttaactattcaaaaatgctacaataatttatttctgatgccataaatgt

SEQ ID NO: 772356 - DNA, 642 bp, Homo sapiens
gtgcctttcttaggaattcccttctccctcccaatttatctggataacacaggaacagacatttttttaaacatgagcttgctccccatgctcaacatttgctttgagagtgaatgcctgatttgaactgggctaattgcagatcttcttctggatttttagatgtggaacatagcaaatcaagtcattctcatttaggtgatcaaaactctaagatgtaaaacttaggagctgtcattggccgtattttctaccatgaaaagaaagccaacttgcctccaaaaaggaaaatgaggctaatacatagagaaaaacttgagaccaaggctgcagtgaggtgtgatagtgccactgcactccagcatgggcaacaaaataagaccctgtcaaaacacacacacacacacacgaaaaaaaaccctaaaaacttcagactggtgagagcratcatagctggttctaattaactctgagtcccagcaatatgcctgccttcctcacagctcggatgatacggcaatgtccttccagtaaactccccttttgtttaagttagtttaaattaggtttctgtccatttcatcctaaagtccttaactattcaaaaatgctacaataatttatttctgatgccataaatgt

SEQ ID NO: 772357 - DNA, 455 bp, Homo sapiens
actgctctgtcaataggaatgctccactccgtgaggtgaatgcaatcatcacaaagtagtttctgagaaggcttctatctagtatttatgtggagatatttccttttccaccacacacctcacagccctcccaatgtccacttgcagattctagaaaaagagtgtttcatagctgctctttcygaaggaaagttcaactctggaagttgaatacaaacatcaccaaggagttcctgagaatgcttctgtgtaatttttatgtgaagatgattccgtttccaacgaaaccttcaaagaggtctgcatgtccccttgcagattccagagaaagagagtttcaaaactgcgctctcaaaaggagtgttcaactctgtgagttgaatgcagtcatcacagaaaagtttctgagaatgcttctgtctagatgttatgtgaagatatacccgtttcgaacg

SEQ ID NO: 772358 - DNA, 577 bp, Homo sapiens
gtttgcaacgaattcctcagacaggtccaaatatccacttgcagattctacagaaagtgtgtttcgaaactactccatcccaaggaaagtactgctctgtgagttcaactcaatcatcccagagaattttctgagaaagcttctgtcttgtttttataggaagttatttcctttactacgataggcctcaaagaagtgcagttatccacttgcagtttctacaaaaagagtgtttcaaacctgaactatcaaagaaaggttcaacactgtgggttgaatgcaaacatcacgaagaaggttctgagaatgcttctgtttagttctgtgcggtttatyccgtttccaacgcaatcctcagagaggcccaagtatccgcttgcagatcctacagatagtgtgtttccaaactgctccatccaaaggaatgttcagccctgtgagttaaactcagtcgtcacaaagagttttctgagaatgctgctgtctagtttttatatgaagctgtttcctttactaccataggcctcaaagcggtccatatctccacttgcagattctacacaacgagagtttccaa

SEQ ID NO: 772359 - DNA, 629 bp, Homo sapiens
gtgaggaaattgaggcactgacttcatcaaggttaccaaacaggtcagaacccaggcagtctgatccaggagtctgtattctcagctactatgctattatggacagggtgctacaggacacagaagggcaattaaccttgggggttaggcggaggcagcgctgcctgcgctgaaaaacatgtagaaggtagcccagcagacaagagaaggaggaggtttccaagcagcgggggctggtgtgtgcaaagtcatgaagatacgaacagcaagggtaggcatggcgcatgctgcagtgccgtattattggaccttagggtgcacacaggagactgctaggtcagatcacagagagctgtgtaaattgtgctaggggttcagcacataggcaatagaaagccagaaaaaggttatcagcaaggaactkgcaccgtaagacttgtgttctaaaaggatcacaagagttacagtttggagactgggttgcaagctgccagggctggactgttgggaattgacaatacatcaacagcgtggtaacagaagagatggagctggcccaggtttgaaggatgttcaggaagttggcagtactaggtcacttttaagatgtgggacttgaaagagaggag

SEQ ID NO: 772360 - DNA, 501 bp, Homo sapiens
gtttgtggtggaaaaggaaatatctccacataaatactagatagaagccttctcagaaactactttgtgatgattgcattcacctcacggagtggagcattcctattgacagagcagtttggatacactcttcttgtagaatcggctagcggagatttggagcrctttgaggccaatggtagtaaagggaagagcttcacataaaatctagacagaagcattctcagaaaatactttgtgatgattgagtttaacacacagagctgaacattcctttggatggagaaggtttgaaacacactttctgtagaatctgcgagtggatatttggacctctctgaggatttcgttggaaacgggataactgcacctaactaaacggaagcattctcacaaaattctttgtgatgtttgcattcaaatcccagagttgaaccttcctttgatagttcagctttgaaacactctttttgtaggatctgcaagtggatatttggacca

SEQ ID NO: 772361 - DNA, 622 bp, Homo sapiens
cttttcaaacagcagtttccaaacactctttctgtggcatctgcaagtggatgtttgggcctctttgaagatttcgttggaaacgggataatcttcacagaaaagctaaacagaagcattctcagaaacttctttgtgatgtttgctttcaactcacagagttgaactttccttttgagagagaagctttgaaacactctttttctagaatctgcaagtggatatttggagggctttgaggcctgwggtggaaaaggaattatcttcccgtaagaactagatagatgcattctcagaaactactttgtgacgattgcattcaagtcacagaggtgaacattccctttcagagagcactttggaaactctcgttgtgtagaatctgcaagtggagatatggaccgctttgaggcctatggtagtaaaggaaacagcttcatataaaaactagacagcagcattctcagaaaactctttgtgacgactgagtttaactcacagggctgaacattcctttgcatggagcagtttggaaacacactatctgtaggatctgcaagcggatacttgggcctctctgaggattgcgttggaaacgggataaaccgcacagaacgaaaca

SEQ ID NO: 772362 - DNA, 506 bp, Homo sapiens
aacagaagcattctcagaaacttctttgtgatgtttgctttcaactcacagagttgaactttccttttgagagagaagctttgaaacactctttttctagaatctgcaagtggatatttggagggctttgaggcctgaggtggaaaaggaattatcttcccgtaagaactagatagatgcattctcagaaactactttgtgacgattgcattcaagtcacagaggtgaacattccctttcagagagcrctttggaaactctcgttgtgtagaatctgcaagtggagatatggaccgctttgaggcctatggtagtaaaggaaacagcttcatataaaaactagacagcagcattctcagaaaactctttgtgacgactgagtttaactcacagggctgaacattcctttgcatggagcagtttggaaacacactatctgtaggatctgcaagcggatacttgggcctctctgaggattgcgttggaaacgggataaaccgcacaga

SEQ ID NO: 772363 - DNA, 624 bp, Homo sapiens
ttctcagaaactactttgtgacgattgcattcaagtcacagaggtgaacattccctttcagagagcactttggaaactctcgttgtgtagaatctgcaagtggagatatggaccgctttgaggcctatggtagtaaaggaaacagcttcatataaaaactagacagcagcattctcagaaaactctttgtgacgactgagtttaactcacagggctgaacattcctttgcatggagcagtttggaaacacactatctgtaggatctgcaagcggatacttgggcctctctgaggattgcgttggaaacgggataaaccgcacagaacgaaacagaagcattctcagaaccttcttcgtgatgtttacattcaacccacagtgttgaacctttctttgatagttcaggtttgaaacactcttttwgtagaaactgcaagtggataactgcacttctttgaggcctatcgtagtaaaggaaataacttcctataaaaacaagacagaagctttctcagaaaattctctgggatgattgagttgaactcacagagcagtactttccttgggatggagtagtttcgaaacacactttctgtagaatctgcaagtggatatttggacct

SEQ ID NO: 772364 - DNA, 453 bp, Homo sapiens
ttcgaaacgggtatatcttcacataacatctagacagaagcattctcagaaacttttctgtgatgactgtattcaactcacagagttgaacactcctttcgagagcgcagttttgaaactctctttctctggaatctgcaaggggacatgcagacctctttgaaggtttcgttggaaacggaatcatcttcacataaaaattacacagaagcatcctcaggaactccttggtgatgtttgtattcaacttccagagttgaactttccttcrgaaagagcagctatgaaacactctttttctagaatctgcaagtggacattgggagggctgtgaggtttgtggtggaaaaggaaatatctccacataaatactagatagaagccttctcagaaactactttgtgatgattgcattcacctcacggagtggagcattcctattgacagagcagt

SEQ ID NO: 772365 - DNA, 636 bp, Homo sapiens
caggaaaatgacatggtgaaaatagtattttaagagaattagtctagcagttaatgtgcaggaaaactagagatcagagatagaatgtttgaatattggggcagtataatccaggttttgtaatgccttttatgacaaaattcactcctcatttttctcagcccacactagtgggagatttgtaaaatataaattaattcatatataaaataccacccctcccaaccccaaaatcagttacaaaagtattatcttctatacttttgaagaagtcttttttacctggattctgagagaccaaataagaaacatcaggccgggcacggtggctcayacctgtaatcccagcactttgggaggccgaggcgggtggatcatgaggtcaagagatcgagaccatcctggctaacaaggtgaaaccccgtctctactaaaaatacaaaaaattagccaggcgcggtggcgggcacctgtagtcccagctactcgggaggctgaggcaggagaatggcgtgaacccgggaagcggagcttgcagtgagccgagattgcgccactgcagtccgcagtccagcctgggcgacagagcgagactccgtctcaaaaaaaaaaaaaaaaaaaaaaaaaagaaacatc

SEQ ID NO: 772366 - DNA, 612 bp, Homo sapiens
tttaacacaactatttttaaaatttacttgatccttcatttcatcatcctatttctccttcatatcatgtctcataattctttctagattaagtcagttcatttgaacaattattgagagcatattagtgccaagaaccatgctaggcaccgagaatacaaaaataagaaagacacagtccttgctttctcaatatctattacatgcaaaggactgagttagatactaatttcttaacagatctaggaaaaaagaaagatgtccatatagatagaccatgagagagttaaggagtctatttcataccatcttgaaaacccactcaatatactatccattaagacaccttaacaatactaaccagccctgataaaaccaaggatycccatctctatctccctagtatccatgtggtccaatgttttacctatttttagatataaaccctcagagtgatcatgtcaatcctgataagcagcaaaaagggctcaataattttagtgccacccactctttatataatttttaattgaatcttctttcagatttgccttagctaaaaaattgtgcccagattctgaggattcacttctaatgttattctccaatcag

SEQ ID NO: 772367 - DNA, 612 bp, Homo sapiens
tttaacacaactatttttaaaatttacttgatccttcatttcatcatcctatttctccttcatatcatgtctcataattctttctagattaagtcagttcatttgaacaattattgagagcatattagtgccaagaaccatgctaggcaccgagaatacaaaaataagaaagacacagtccttgctttctcaatatctattacatgcaaaggactgagttagatactaatttcttaacagatctaggaaaaaagaaagatgtccatatagatagaccatgagagagttaaggagtctatttcataccatcttgaaaacccactcaatatactatccattaagacaccttaacaatactaaccagccctgataaaaccaaggattcccatcyctatctccctagtatccatgtggtccaatgttttacctatttttagatataaaccctcagagtgatcatgtcaatcctgataagcagcaaaaagggctcaataattttagtgccacccactctttatataatttttaattgaatcttctttcagatttgccttagctaaaaaattgtgcccagattctgaggattcacttctaatgttattctccaatcag

SEQ ID NO: 772368 - DNA, 570 bp, Homo sapiens
aagctatttaaagttacagtaaaactaaaatgatagcctaatgaagtatatggttctcattccccactccttcccaattgacaaagataatagattaataagctaatacagatagaaattccttacttataaaaggcagaactatgaggaaaggggagattttatttataaaattagaacttaagtaattactctcctaaatattcttggtatttgtggaggaaaaaataacttcatatataaaacaacatctttagaaaattattaacacaatgccccaaactgagacttcatttacaaaatttatctgatgtttcagaatcttatcttacattttaataacacattttaaagtatttcaaatgttataatatttgatcctcaaaacaactctatgagactgtcaygcagcagcaatataatctcaactatgaataaattttgcctagaggaaataaaaaagtttcttatcttagactctatgagaattaacaattgaaaataattaaatgaaaatattttaatattaaagtctgaaaatacttaaagatggtgctatatatgtatctc

SEQ ID NO: 772369 - DNA, 626 bp, Homo sapiens
tacgttgtattccctgttgcttggatcctatgtctttatgttttcatagtctatttcattactttggtggagcacattttctagcagctgcctgagaaaggctgcatggtggataaataagctcttgcaagtctaaaaagaaatctttcttttattttcccacttcatttataatttgcccaggtatttaattctgtgatagaaataattttttcctcaattaaaagtactgctcaaagtctgggcrtggtgggtcatgcctgtaatctcaacactttgggaggctgaggcaggaggatcacttgagcaggagttgaataccagctgggaaacacagtgagaccttgtctctacaaaaactaaaaaaaagtgaaaattagccaagcgtggtagtgcacacctgcagttccagttacttgggagtctgaagtgggaggattgcatgagtcccagaggtcaaggctgcagtgagccctgatggcgtcactgtactctagcctgggtgacagagtgagaccctgtctccgtgaatgaatgaatgaatgagtgaatgaataataaaagcactgctctgttgtctttgtaattactttttattttatttttttttttttgagacggagtct

SEQ ID NO: 772370 - DNA, 626 bp, Homo sapiens
tacgttgtattccctgttgcttggatcctatgtctttatgttttcatagtctatttcattactttggtggagcacattttctagcagctgcctgagaaaggctgcatggtggataaataagctcttgcaagtctaaaaagaaatctttcttttattttcccacttcatttataatttgcccaggtatttaattctgtgatagaaataattttttcctcaattaaaagtactgctcaaagtctgggcgtggtgggtcatgcctgtaatctcaacactttgggaggctgaggcaggaggatcacttgagcaggagttgaataccagctgggmaacacagtgagaccttgtctctacaaaaactaaaaaaaagtgaaaattagccaagcgtggtagtgcacacctgcagttccagttacttgggagtctgaagtgggaggattgcatgagtcccagaggtcaaggctgcagtgagccctgatggcgtcactgtactctagcctgggtgacagagtgagaccctgtctccgtgaatgaatgaatgaatgagtgaatgaataataaaagcactgctctgttgtctttgtaattactttttattttatttttttttttttgagacggagtct

SEQ ID NO: 772371 - DNA, 626 bp, Homo sapiens
aagccaaatactttagtaatctcataagtgtaagttaaccacatggtttaattaaaagacatattactaattaattaatgggagtgaaggaataaatcgtccctgccgaagaatttcaaataattttaaaatgtagaaggaatgagggaagtagaaaatcaacattagaacaacacagtaataattgctacaggctagcaattcatctgccaatgaatgctaaaattagtgggagaaacttagaggagaaacagaatacttgcacagtctcaaagtatctcctccaaaatatttattaattactgtggttattttaacacacgtccccaaattctttgatactcctccctcyagaagaatagcttaattttcttcttgagcatggggctaaactttatgacttgcatctaacaaaaactttgaaagaaggaaaaacagtaactttacgacgaaaaaatatggcagacaccacttcaagtgatcaaggttaatatcatcagtaacaaatcatgttaatataatgcattatatgttgcaataaaaagggcactttaccttcggggtattcatcccaaaagcgcataaccccaggctaatcatgagataaacccaaactaagggtttat

SEQ ID NO: 772372 - DNA, 636 bp, Homo sapiens
ttgatttatgatacttgcaatgggtttatcaggatgtaaccctattttatgccaagaagcatgcgtgtaagaaagggagtgctgaaacacgtagtttagtctagccaagctgacacattacaaatccacgacaacatccacatggagctgttgagtgaatggttggaaatatgagttcagaattcagagaagaggttcaggctggaggtagcatttggcagttatgataaagccatggttcatgaaatcatggaaccatataagatcatctagggagacaggtggacagagaatgaaaagaacaaaagwcagcaccctggagtgcttcaacatttagagatttgttagagaacaagaaatcagtaaagaatttaaaaagtccagtgaggtgtgagaaaaactaggcaagtatgtgtcacagaggtctagaaacaaaaggaggaagaagcggtcacctcaaatacttctgaaaactcaaggtggatgaagaccgtgtcaggactctgcaaaagtaacatccaagtaccacttaggatgtcatccaagtataaatacagcactgatcaaagggatcatgggtgatcaggagtggaaagaatcattctgaattgattcctgagttactggggggaaacc

SEQ ID NO: 772373 - DNA, 586 bp, Homo sapiens
aagcaaagactgaaaacattccattttggaaggagaattaagataaaagcaagcaagcaaacgcccccttcccaccatccacccaaatgtatgcaatcttttgcttcacatttttgtgtaatgcatggtgttttcagaatcctcctcagaatcttgcctctcctattgctttgtgttattgaacgcggacttgtgcaagcagaagctctgcacctcttcctctgcagaagaggaaaggagctgggtcctttcctcttacacaccggggcacctccttattgcctcaccaaccagtttgttttacaacttgcaggagagtattattacatctgagcactcakaaattagatgctgacactgagtattgatttacataaaaatctacatatttgtggtttttcgagagctactcacttggaactttacaaggtcaggcatcccctgagcctaggaccatgcctgatacaaagggcgtgctcaacaaaaagttgctgaattaaaaatcatcttggaatgtaaaggtgactagcattatggaaatagtttatattgacatgattattattatttactttattttttttta

SEQ ID NO: 772374 - DNA, 579 bp, Homo sapiens
tagcttcccgctgctcaatttttcactcatcatcttgcgacacgggaaagcgttgggtcttgttttgatgcaactcactacggaatagatgcagaggcagaggcaaaagtatcagtgttttatcaattgcttgaaaggctacaaatagattcacagaatgtgtagtgctggaggagacaaacatacaacacaagaaagataytcagcctgcaaatatacttaatgcctggccagtctcagggagaatggcaggaccagctcctctcaatatgggaaggagtactgaggaacaagaccctggtgtgtccgaattggtgggttcttagtctcactgacttcaagaatgaagccacagatcctcgtggtgagtgttacagtttacttaaagatggtgtgttgggagtttgttccttctgctgttcggacatgttcaaagtttcttccttctggtgggttcgtggtctcactgcttcaggactgaagctatataccttcacagtgagtgttacaactcttaagaccgtgcgcctgtagttattcattcctcccatccgcagtcgttcattcctcccagtgggt

SEQ ID NO: 772375 - DNA, 579 bp, Homo sapiens
tagcttcccgctgctcaatttttcactcatcatcttgcgacacgggaaagcgttgggtcttgttttgatgcaactcactacggaatagatgcagaggcagaggcaaaagtatcagtgttttatcaattgcttgaaaggctacaaatagattcacagaatgtgtagtgctggaggagacaaacatacaacacaagaaagatattcagcctgcaaatatacttaatgcctggccagtctcagggagaatggcaggaccagctcctctcaatatggraaggagtactgaggaacaagaccctggtgtgtccgaattggtgggttcttagtctcactgacttcaagaatgaagccacagatcctcgtggtgagtgttacagtttacttaaagatggtgtgttgggagtttgttccttctgctgttcggacatgttcaaagtttcttccttctggtgggttcgtggtctcactgcttcaggactgaagctatataccttcacagtgagtgttacaactcttaagaccgtgcgcctgtagttattcattcctcccatccgcagtcgttcattcctcccagtgggt

SEQ ID NO: 772376 - DNA, 588 bp, Homo sapiens
tttaagtgggattgtattaatgtatagatctgtatggggaaacatgtaatcaagtcttcgatctaaaaaaatgatacagcccttcatttatttacatgtttttaaatttccttcagagatgttctgtagttttcaggtacaggccttgcatgtcctttgtcagatttttcccctaagtatttcatatttttagatgctgtttaatggtattttaaaaactcaattacagatagttgattgctagtacataaaaatacaatttgttttgaatattgttttcttatcgtgcaactttgctaaatttacttattcagtttagtggtttttttgtagcttccttaagattttcaacagagataattgtgtcatctatgcataaagacaatttwatttcttccattctaatctgtatgccttttatttccttttcttgccttattgcatcagttaggacctctagtacaatgttgcataaacatggtgagtgcggtcatgctttccttttcctaaacttagatgaaagacattcagttgttcatcattaagtaaatgtgagctgtaggtgattcaaaaatgtccacttcaaat

SEQ ID NO: 772377 - DNA, 491 bp, Homo sapiens
aactggcctggtaccttgaataaacagttcacatagttgtctcacacataagaaaggaatctcacttcctggcaggcccaagatcatcagaatattttggggaccttgaggaaaaagaacttcacctatatatctgcaggtatttcaggcaaagtttgatggtgacttctcagcttggcttcttagccttgagagccttttaaaagtcccatctgagattccttattaaaagttccagcaaagccgacttaaaagcacctatttaattatcactattcttgttgcacttatataaataaacaggccaagtttaatgaaactatttttcttacaaataaactgatcttactgtgattattttttgtagaaatgggggtgaccaaagagagaaatttatgtttcagaagaaaactrtagttcacccattattaaattctagctcattgtttttgagcatctgtaaactggatcctgaagtcttctaggtttct

SEQ ID NO: 772378 - DNA, 624 bp, Homo sapiens
gctaattgcccagatgtactctactacttgaatacctatatatgtgcttggtgtaacttctgtcatttgaggcaaaaggtaaaaatccaatggagatataataatgcaaatgtgaagtattgggagcccactgtgcgtcatatttgggaagacagggctttacaaatataaatacaaaagccatgtaaatatttatgatcgttttgttagctatatataacagatatcttcttctagtaatttcattgacactaatcaatgtccatattttttaacagaaaggtttcyacattcgcacaattcctagtatatttttaattccttaagtatatttaagaatattccagaccacaagactctaaggtgttgcacattttatcagactaaaatgtcaacatatattaatatagaaccatacgattttattcagcaagcatgtcataaaccaaattttctcaccaatgatgccaggtagataaagtcaattaaagtaagtataactattaaaaaaattcagaaatttcactgtatgactcagttacccgggaactttttctaaagtttacattatcttactggatctcaagattctaactcatatactttgtattccctccctagaac

SEQ ID NO: 772379 - DNA, 608 bp, Homo sapiens
ttctgaaatcactctttcttcaaaatataccaatgattttaaaagggggtacactaattggtaaataccctgttcttcatacattatttcattttcctttctgcccaatttaccatgaattgtcatatcaagatcttccaaagtatttaatgtaactgataatatggttgaggttcaaaaacatttttgaaaaggtcaaaggtatttataaaacaaggtatatgtcaaatcagagaaagttggaaaactcagtacttacaytgtaagaaaagagactgatgttattttttaaaaattgtacaatttctacaactttgtggaaagaatctttaagttcattacgtattttatatagagtacagagctaccaattaaacagtcaatgtaacagcatagaattttactctgtaaatactagataacatcattaaaaaaattttttcaccctgtcagctcatgcctagataaaaattttacctgtaataaatcttgggaacatgattaagagatagaccttaaattcacattattttaaaaataacaatattcctctcagtactgtacagggaacagaaactaattttataccaaagatatattattacaaa

SEQ ID NO: 772380 - DNA, 582 bp, Homo sapiens
gtaactggaagatacaattaaaactatccataagcatataatagatatacacattatatataatcacataaaaaaattagtatttaaatcccccaataaaaactccccaaatgacattccagagtacatttatgcagtttcagtataggaaacttgctcttatgagagacttaatcatctttctatagctcttgacagtttgtcatgttagctcaactcattagttgttwcttccttggaacgacgagaataaatctcattccaattctacccaagagttcctcaaatatttgaagactgctattataaggcccaaatcttctctttttcaaaatactaatcaccatttgtttcttcaattatttttctttttcttttttttggagacagggtctcactctgtcacccaggctggagtgcagtggtgccatcatagcccactgcagcctcaacttcctgggctcaaactatcttcccacctcagcctcccgagtagctgggactataagcacatgccacagtaatgtttttgtttatttgtttgttttgtagaggcagggtcttgctacgttgtccaagctg

SEQ ID NO: 772381 - DNA, 582 bp, Homo sapiens
gtaactggaagatacaattaaaactatccataagcatataatagatatacacattatatataatcacataaaaaaattagtatttaaatcccccaataaaaactccccaaatgacattccagagtacatttatgcagtttcagtataggaaacttgctcttatgagagacttaatcatctttctatagctcttgacagtttgtcatgttagctcaactcattagttgttacttccttggaacgacgagaataaatctcattccaattctacccaagagttcctcaaatatttgaagactgctattataaggcccaaatcttctctttttcaaaatactaatcaccatttgtttcttcaattatttttctttttcttttttttggagacagggtctcactctgtcacccaggctggagtgcagtggtkccatcatagcccactgcagcctcaacttcctgggctcaaactatcttcccacctcagcctcccgagtagctgggactataagcacatgccacagtaatgtttttgtttatttgtttgttttgtagaggcagggtcttgctacgttgtccaagctg

SEQ ID NO: 772382 - DNA, 556 bp, Homo sapiens
gattacgtttattgatttgcgtatgttaaacaagccttgcatcccagggatgaagcccacttgcatcatggtggataagctttttgatgtgctgctggattccgtttgccagtattttattgaggatttttgcatygatgttcatcagggatattggtctaaaattctctttttttgttgtgtatttgccaggctttggtatcacgatgatactggcctcataaaatgagttgggaggattgcttcttttcctgttgattggaatagtgtcagaaggaatggtaccagctcctccttgtacctctggttagaattcagtataatattggctgtgggtttgtcataaatagctcttattattttgagatacgtcccatcaatacctagtttattgagagtttttagcatgaagggctgttgaattttgtcgaagatcttttctgcatctattgaagatcacatgaatgaaatgaagcgagaagagaagtttagagaaaaaagagtaaaaagaaacagacaaagcctccaagaaatatgggactatgtgaaaagacca

SEQ ID NO: 772383 - DNA, 556 bp, Homo sapiens
gattacgtttattgatttgcgtatgttaaacaagccttgcatcccagggatgaagcccacttgcatcatggtggataagctttttgatgtgctgctggattccgtttgccagtattttattgaggatttttgcattgatgttcatcagggatattggtctaaaattctctttttttgttgtgtatttgccaggctttggtatcacgatgataytggcctcataaaatgagttgggaggattgcttcttttcctgttgattggaatagtgtcagaaggaatggtaccagctcctccttgtacctctggttagaattcagtataatattggctgtgggtttgtcataaatagctcttattattttgagatacgtcccatcaatacctagtttattgagagtttttagcatgaagggctgttgaattttgtcgaagatcttttctgcatctattgaagatcacatgaatgaaatgaagcgagaagagaagtttagagaaaaaagagtaaaaagaaacagacaaagcctccaagaaatatgggactatgtgaaaagacca

SEQ ID NO: 772384 - DNA, 617 bp, Homo sapiens
atggctgaagctgaagtagctgggatgcaaggcaccatgtcccaaggctgcatagagcagggggaaaccagttttcccttttacacctcctggcctgtgataggaggggctactatgaaggtctgtaacatgccctggagacattttccccattttcttggtgattatcatttggctyctcattacttatgcaaatttcttcagggagcttgaatttctcctcagaaaaatggtttttttctaacacatcatcaggctgcaaattttccaaactttcatgctctgcttcctcttgaatgctttgccgcttagaaatttctttcaccagataccctaaatcatctctctcaagttcaaagttccacagacctctagggtaggggcaaaatgccaccagtctctttacataacaagagtgacctttactccagttcccaaaaagttcctcatctccatctgagaccacctcagccaggacttcattgtccatatcactctcggcattttgatcaaagccattcaacaaatctctatgaagttccaaactttcccatgtcttcctgtcttctgagccctctaagtctctaggaattccaaactttcccacattttccagt

SEQ ID NO: 772385 - DNA, 617 bp, Homo sapiens
atggctgaagctgaagtagctgggatgcaaggcaccatgtcccaaggctgcatagagcagggggaaaccagttttcccttttacacctcctggcctgtgataggaggggctactatgaaggtctgtaacatgccctggagacattttccccattttcttggtgattatcatttggcttctcattacttatgcaaatttcttcagggagcttgaatttctcctcagaaaaatggtttttttctaacayatcatcaggctgcaaattttccaaactttcatgctctgcttcctcttgaatgctttgccgcttagaaatttctttcaccagataccctaaatcatctctctcaagttcaaagttccacagacctctagggtaggggcaaaatgccaccagtctctttacataacaagagtgacctttactccagttcccaaaaagttcctcatctccatctgagaccacctcagccaggacttcattgtccatatcactctcggcattttgatcaaagccattcaacaaatctctatgaagttccaaactttcccatgtcttcctgtcttctgagccctctaagtctctaggaattccaaactttcccacattttccagt

SEQ ID NO: 772386 - DNA, 617 bp, Homo sapiens
atggctgaagctgaagtagctgggatgcaaggcaccatgtcccaaggctgcatagagcagggggaaaccagttttcccttttacacctcctggcctgtgataggaggggctactatgaaggtctgtaacatgccctggagacattttccccattttcttggtgattatcatttggcttctcattacttatgcaaatttcttcagggagcttgaatttctcctcagaaaaatggtttttttctaacacrtcatcaggctgcaaattttccaaactttcatgctctgcttcctcttgaatgctttgccgcttagaaatttctttcaccagataccctaaatcatctctctcaagttcaaagttccacagacctctagggtaggggcaaaatgccaccagtctctttacataacaagagtgacctttactccagttcccaaaaagttcctcatctccatctgagaccacctcagccaggacttcattgtccatatcactctcggcattttgatcaaagccattcaacaaatctctatgaagttccaaactttcccatgtcttcctgtcttctgagccctctaagtctctaggaattccaaactttcccacattttccagt

SEQ ID NO: 772387 - DNA, 578 bp, Homo sapiens
aggcatagaagtacaactgacttttttatatagatcttgtattatataactttgctgaacttacatactggttctaatagcttatatttttatggatttcctaggatcttttattatttataagatcatattttctgtgaataatgatgtcttttttccttcctttttaatctagatttttgttttttttctgcatgttggccyggctagaacctgcagtatgttattgagtggaagtgataagattggatattcttgtcttcttcctgatattaagtaggagctttttagtctctcaccattaattataatgttaatcttgggcttttctatagattacttttatcaggttgaggaatttattgcttcatcacagattgttgagtattttttaaataaaagtgtgttgaattttatcaaatgctttttccccatgtattaatataatcacttgtttttgttttatactttattaatacaatatggtaccttaattaattttcttttgtttaatcaaccttgcattcctagaataatccatttggttgtgccatataatcatcttcatatattgctgg

SEQ ID NO: 772388 - DNA, 578 bp, Homo sapiens
aggcatagaagtacaactgacttttttatatagatcttgtattatataactttgctgaacttacatactggttctaatagcttatatttttatggatttcctaggatcttttattatttataagatcatattttctgtgaataatgatgtcttttttccttcctttttaatctagatttttgttttttttctgcatgttggcctggctagaacctgcagtatgttattgagtggaartgataagattggatattcttgtcttcttcctgatattaagtaggagctttttagtctctcaccattaattataatgttaatcttgggcttttctatagattacttttatcaggttgaggaatttattgcttcatcacagattgttgagtattttttaaataaaagtgtgttgaattttatcaaatgctttttccccatgtattaatataatcacttgtttttgttttatactttattaatacaatatggtaccttaattaattttcttttgtttaatcaaccttgcattcctagaataatccatttggttgtgccatataatcatcttcatatattgctgg

SEQ ID NO: 772389 - DNA, 578 bp, Homo sapiens
aggcatagaagtacaactgacttttttatatagatcttgtattatataactttgctgaacttacatactggttctaatagcttatatttttatggatttcctaggatcttttattatttataagatcatattttctgtgaataatgatgtcttttttccttcctttttaatctagatttttgttttttttctgcatgttggcctggctagaacctgcagtatgttattgagtggaagtgataagattggatattcttgtcttcttcctgatattaagtaggagctttttagtctctcaccattaattataatgttaatcttgggcttttctatagattacttttatcaggttgaggaatttattgyttcatcacagattgttgagtattttttaaataaaagtgtgttgaattttatcaaatgctttttccccatgtattaatataatcacttgtttttgttttatactttattaatacaatatggtaccttaattaattttcttttgtttaatcaaccttgcattcctagaataatccatttggttgtgccatataatcatcttcatatattgctgg

SEQ ID NO: 772390 - DNA, 552 bp, Homo sapiens
ccccattctattttaatttttttgagtaacccccatgctggtttccataatgactgtactaatttacattcccaccaacagaggacaagggtttccttttctccacaccatcgccaacacttgttattgcttcttttcttgataacagccattctaacaagtgtgagccaagatatgaaaagaaaccaaagtgtcaacagaccaatggtgaacacatctattgtgtgtgcgtttgtgtatgtatacatcagtaaatatayatatatatatatatgcacacatatatgcacactggaacattattcagtttaaagaagtgatcctgtcatttgcattgacatgaatgagtcagaaagacattatgctaaatgaaataagccagactcagaaagaaaaatactgcatgatctcaggtatatgtggaattttaaaattaaaaagttgcatacataaaaatagagattagagtggtgattactggggcagggtattggggggcgcatggggacatatgggtcagaatgaataaactagagatctaatatacagcat

SEQ ID NO: 772391 - DNA, 577 bp, Homo sapiens
ttcatttactacatcaggctattatttggccacatgcaagaacttggacattattctgttgtccagtttcagctgccaaaatacttttgatcaatacagctcccagaaaaattaggccataaaaagcaatgtgtttaataggactttttttttgtcattactgaaactttcattttgagcaccgaaaactatggaaggtctcagctctttcttaccctttaagtagcttcagtgtgcttctgcttgactattaagtacaagctgcatatgaacatttagttcatccttgaagaaacacattgagcttgaagttatttaatgcaaccatataaatttctatgtasgtgtttccagttgcaacctgaagtgtataaaataatggggcagagctaacagcttgatttaatgccttgctccagaaacatctctgcctctagcaagaaaactaagttaaaaaaaaagaaagaaagaaaagaggaaagaaaattctacagctgtatgaacacctaggaaaagtatcaatttcctttataaaactaagtttggataaataaaatctgcatacaataatattgta

SEQ ID NO: 772392 - DNA, 595 bp, Homo sapiens
tgttccctgggggtgttctcagtgccccatgtgcacctggaccaggcatctaggtgaagtcgatgtttgttttatgacttcctgcaaacatggaagactctggagcgctgggcctgaggggctcctgttcatggcagcataaggggtccaagtagctaagcccagagttagcgccaaggtcctatgaggggcaaacagccatcctccgggaaaccayggcctctccctgacccaggtcttgtaccatactgtggtcacacagcttcatttctgctgatgtggcctggccgaaattgttgcccctgacaccagacgaagcacgagaagtatttccttcagatgaggagggccaagctgacagcagaagaactttgttttgccacgagctcccaaagaaggccaaagtccagggccacaagcccagtagtggtcagaggggaagggaaggaggctgtcactgcctgggacccaggactccagagtcttctccccaaaaccagttctcaacagtcatcacctcccaggtcagtctacaaagggctgctcaggtggtagcttaaccaatcaaaaagtaacctcttggaatataattctc

SEQ ID NO: 772393 - DNA, 566 bp, Homo sapiens
aagagtgtatcaagtgcccgcattgagtatctataaggcatgctcttgactttcactgacagagagaaggatgctcctgggtgacattcatgtatgactgggcttatcagaattgtgacttgaatttgatcagtagtttcttctcaagaagttagggagctacatattagaggccctgcctttttggctttatatgattccagatcaggggttggcaaatatttttaaaaacagccagattaggccgggtgcggtggctcacgcctgtagtcccatagtcccagcactttgggaggccgaggctggtggatcacaaggtcaggagatcgagaccatcctggctaacatggtgaaaccccatckctactaaaaatacaaaaaattagctgggtatggtggcgggcgcctgtagtcccagctacttgggaggctgaggcaggagaatggcgtgaacccgggaggcggagcttacagtgagccgagattgtgccactgcactccagcctgggggacagagcgtgagactccgtctccaaaaaaaaaaagagccagattgtattttacac

SEQ ID NO: 772394 - DNA, 421 bp, Homo sapiens
taaccagtctgggaggtcagatggggggcggatcttcaactgagcccaggacagcggttttcagccagaaaggagaatgggaaactgccttgggagaagccccaagtgagcccaagggcgcagagcagaaggaccctggagtgtaagagcctagattgcaagmctggcaggaggaggtcagagtcgggggcagggagaggggctggagaggcggcctgctgatgaatgcggattcgccttacgattgagcactgtttcctgccagtgaaaaatcagtttgttgtcctcactggggaggtttatcacacgcacgatatttgttactagtaacgaagtgtgggagttttctgaatggctactcttttaaataagtaagagcagattcagggtatccctgcaataaaaagccaccttcaaccat

SEQ ID NO: 772395 - DNA, 421 bp, Homo sapiens
taaccagtctgggaggtcagatggggggcggatcttcaactgagcccaggacagcggttttcagccagaaaggagaatgggaaactgccttgggagaagccccaagtgagcccaagggcgcagagcagaaggaccctggagtgtaagagcctagattgcaagactggcaggaggaggtcagagtcgggggcagggagaggggctggagaggcggcctgctgatgaatgcggattcgccttasgattgagcactgtttcctgccagtgaaaaatcagtttgttgtcctcactggggaggtttatcacacgcacgatatttgttactagtaacgaagtgtgggagttttctgaatggctactcttttaaataagtaagagcagattcagggtatccctgcaataaaaagccaccttcaaccat

SEQ ID NO: 772396 - DNA, 421 bp, Homo sapiens
taaccagtctgggaggtcagatggggggcggatcttcaactgagcccaggacagcggttttcagccagaaaggagaatgggaaactgccttgggagaagccccaagtgagcccaagggcgcagagcagaaggaccctggagtgtaagagcctagattgcaagactggcaggaggaggtcagagtcgggggcagggagaggggctggagaggcggcctgctgatgaatgcggattcgccttacgattgagcactgtttcytgccagtgaaaaatcagtttgttgtcctcactggggaggtttatcacacgcacgatatttgttactagtaacgaagtgtgggagttttctgaatggctactcttttaaataagtaagagcagattcagggtatccctgcaataaaaagccaccttcaaccat

SEQ ID NO: 772397 - DNA, 579 bp, Homo sapiens
cctgctccccgatcaaagcaggcccacagacaccaccatcagaggcatcaacacccccgatcacacctgggatcccactcaggcaggtgcagctcacctggactccttaggcaagaaatgaacagaaaacaaattctatgtatatttcggagaccaacaatacagatgttttcctgaaatcataccaatgcaaagcctagcgccaattccaaaaccacagagatcatcgtctcagcctcccaagacaggggcaggatctaggggcgtgctcttcagttctacaccaaggtgcyggcgagctcagccctgggtccacctcctcattgcttttcccgggaaagccccttggccactccacttctttgtctcctgccttttgaagtgagaatagtaacagacagggccagtctcatggagctgtccagggattcactgaggtaattctgtcaatggcttggaatccagcctggcaccgcatggccactgcccgtgctgggcagacctggtcaagtgaagtcccgtggtctccagaccccgcccacccctgacatctgagctgcaccccctgctcatccccta

SEQ ID NO: 772398 - DNA, 579 bp, Homo sapiens
gcatctgcacatctgatttatgccctcccctgagttctggccaggagacttcacatttggttggaattgttacaaagttcagctggaggtttccttctccctgtggtctgttcctctggcagcctccccaaggacacctgtgagaaaagtamgaaatggcttccctggggaccccagagagcccacagggcttttcccactgcttcctctacccctgtatttcacttggctctctaagttgactcagctccaagtaaggttaaatccttctcccctgatctagaccttcagcttccccagtgagggtgtgtgttcagggacagataatcccacttttccactgtcacagcttagacactcacaatacgtgggctgtctcccagatcccgcaggagcaatccgattccttcagagggtctgtgggctctcttggctttcctggtatattcctgcagtagtcgttttggagcaaaagttgatgatccaagtctccacaccctgctctgtccatcggagctggaactgcaagctagttctgcctcctatcctgtgttcttttaatttctattagattaatag

SEQ ID NO: 772399 - DNA, 594 bp, Homo sapiens
aaaagtttggacccatcttcaaagtgatgagttatgctgaaagtatgttcctgcaaacggggggaatggattgttcctggcgctttggcattcaagagagtttataaataaccactcagctctgctcgggttatgcctgctgggagtgcccagtgccagcaagcagagggagacctggggagcggggcagcactccctggtagggctggcacaaagtgcccagagaagcgcaagtcacgtcttggcgtgggagtagggggcttccccaagcctctgttcttcagggctgggcaaccggggaccccctggaccagctcttccatttgcattttggagggaaaraaggaaggaatggattctacatgtggtttccatcggcccacaaaagtaaaaacatgtgtcagcgtttctagcagaaatggtccttgttattttaatgagaaagaccataattagggacaacagtgaaaaagaagccatgggtcccctttgtgccctcccctcaaccgatggggagcagtcgccccaatgaacagtcctcctgcccttaacctgctccaccagcacgggaggaagggagaaagctggggacag

SEQ ID NO: 772400 - DNA, 537 bp, Homo sapiens
cttctctccccatgccttacaccacatcactgaaggcctgtcttccagagttccttttacccaggatgtcatgttaggctaccaagaaaataattacaaggcataccgaaaggcaaaaaacatagtttggagagatagacaaagcrtcagaactagactcagatagggcaggaatgttggaattctcagaccaggaatttaaaataactgtgattaatatgctaaggaaaaaaaagaaaggagacatgaattactaatagcagacataaaggaggatacatcactacagagcccatggatattaaaagggtaataaaggaatactatgaacaactctatgcccacaaatttgataacccagatgaaatgggcccgttttttgaaagacacaatctgccaaaactcacacaagaagaaacagacaatataaattggcttttatctgttaaagaaattgaagcaataattaataaccttccaaaacagaaagcactagacttaaatggatttcctggtgaattctaccaaacatttaag

SEQ ID NO: 772401 - DNA, 659 bp, Homo sapiens
tcccgagcatgtgcagttcagaatctaatgatctcacaggaggcaggggtcaggcagctcaggcggtaatgctcgctcacctgctgctcacttcttgctgtgtggcctggttcctaacaggccacagtcgggtaccygtccatggctggggggtcggggacccctatcttagtccgttctggctgttctaacaaaacgctgcaggttgagtggcttagaaacaacagaaatgtatttctcacagttctggaggctggcaagtctaagatcaaggaactggcagaggcggtgtctggagaggaccccaattctggttctcaggctagttacacaccttctcactgtgtcctcacacagcggaagggccagtgcagtgctctggggcccccttcatgaggctctaatcccatccacgggtctgcatgcttgtgactttgtcacctcccagagtcctgcctcctaacagcatcacactgggagtttatgtttcaacacacgaattctgggaggacgcagacagtcagatcacagcaagggtctttgcagatgtgatggagtcaaggatttcgggatggggagattctcctgcaggggccctcccggctgggaaagcagggaaatgcattctccttcggagccttcacgaggatccagccctg

SEQ ID NO: 772402 - DNA, 665 bp, Homo sapiens
ggatcccgtcatgaattgggaagtttcactcctattttttggaaaagtttgttaaggattggtgttttaaacatttgataaaattcttctttaaacatttgataaaattcaacaatgaagacatctggcctggcattttctttatggacgatttttcattactaatttaatcttttttcttgttataggtatattcagatgtgtttcttcttgggtcagtttcggtagattttgtgtttagaggaatttttccatttcatattggttgtttaatttacyggcatactcttgctcatagtattcccttatagcctttttttttttttttttttgagacagagtctcgctccctctcccaggctggagtgcagtggcgtgatctcggctcactgcaagctccacctcccgggttcacaccattctcctgcctcagcctctcaagtagctgggactacaaacacccgccaccatgcccggctaattttttgtatttttagtagagacgaggtttcaccttgttagccaggatggtctcgatctcctgacctcgtgatccgcccgcctcggcctcccaaagtgctgggattacaggcgcgagccactgcgcctggcctatagccgttttttatttctgtaaggttggcagtaacattccctctttcact

SEQ ID NO: 772403 - DNA, 701 bp, Homo sapiens
cctccttaagctgataagcaacttcagcaaagtctcagggtacaaaatcaatgtgcaaaaatcacaagcattcctatacaccaataacagacagagagccaaatcatgagtgaacttccattcacaattgctacaaagagaataaaattcgtaggaatccaacttacaatggatgtgaaggacctcttcaaggagaactacaaaccactgctcaacaaaataaaagagaacacaaacaaatggaagaacattccatgctcatggataggaagaatcartattgtgaaaatggccatactgcccaaggtaatttatagattcaatgtcatccccatcaagctaccaatgactttcttcacagaattggaaaaaactactctaaatttcatatggaaccaaaaaagagcccacatagccaaaacaatcctgagcaaaaagaacaaagctggaggcatcatgctacctgacttcaaactatactacaaggctgcagaaaccaaaacagcatggtactggaaccaaaacaaatatatagaccaatggaacagaacagaggtctcagaaataacaccacatatctacaaccatctaatgtttgacaaacctgacaaaaacaagaaatgaggaaaggattccctatttaataaacggtgctgggaaaactggctaaccatatgtagaaagctgaaactggatccctt

SEQ ID NO: 772404 - DNA, 628 bp, Homo sapiens
aaactacttacttggcatcgccacttggatatctgttggacaattcaaatttacacacatcctaaacccgtctttccccttcaaaagacaagcaacagcaaacaaaacaaaacaaagcaaaaataaaccttgttgcacttgaacsccttttcatctcatttgatggcaatgtcatcaaagcccccgttgctcaatccaaacatctctttctcaatccatcaggaagtgcgagtgactctaaaaactctctccaggactcacttcccactgccaaggtgcagctctgagacggtgtcacttctcacctggatcactggcttctgtccccccatttctatcattggccctcaagattgtttttcttacagcatccagggtgatccttttaaaatgttaagtcagaccataacagttctctgctaaaaatattctgagatgccttcccatttcacccagagtaaaagctggagtctttacaatggtccttaaggaccaccccaggcgccccacccacccctcacgtctcctgccctgtcctccttctgcccttgcacttgtcaccactctgacttcatctcctgtgctctccactggcctcctgaccattcctgctgctttagagcattgt

SEQ ID NO: 772405 - DNA, 512 bp, Homo sapiens
ggggagcagttccagaaaagcacacgcaggaaagcattcacagtgattccggagtggtgtgaccgtgggggctgctccagacaggaatccagggcagttgtgccctggaggccctggcggagagtgcagaatgggctgccgtggcctggagctgtgcagagacccccacaaggctccagaggagaaggcgcctagaagcccggcaggcaaagagaggctcaggcccgtggtggcaggggttttgggggtgggggtgtctcagaagaggcagggactcccccagcccctagccycggctcagcaagccgagctgtgtgggttctcagatggccacgtggcctgcagccccagcaaccgagaggccatgtcagggacagcacctggggggcagcaccctccaaggaccccctgaggtaggggtcccccatccacacctcagaacggcgttcttgaacccagttagctcaactttgctctagccaagtccccaaaatgcccatagacaccccaat

SEQ ID NO: 772406 - DNA, 505 bp, Homo sapiens
atgaggaattttcctcccaatgatatctctgcccaattctatttgccgaacctaaggtctggtctccattgacaggaaggcctaaccacttgctttgaaagataaagtagattgggtagtaaagagctgcatattaatgaattaaagcttgcttacaaaaacctcgtcatcaaaaatgggatttgaggcaggttcataaaatacaattatccttaaatattcccttggaaatgattgtgcaggacgtgaaggttaatctttgagaccttggactttaaattcttaatctaattgttgcctatttacttaggcttcctgacctttcattgccaagcastttattgttataggctttctgctttatagggtagtttttaaagttttaactacgctggggtagcacatagagagtatctcataatggctgcaagcacagtctttggcaaaataaagccactgcaggttaattaagaaatttagaagattctttcacagacaactctgt

SEQ ID NO: 772407 - DNA, 630 bp, Homo sapiens
taaaagaatagcttattttgctagactactggtaagaacaaaatattattgtgtccggaattggtgggttcttgatctcactgacttcaagaatgaagctgcggaccctcgcggtgagtgttacagctcttaaggtggcgcgtctggagtttgttccttctgatgttcggagtttcttccttctggtgggtttgtggtctcgctggctcargagtgaagctgcagaccttggtagtgagtgttacagctcttaaggcggcgcatctggagttgttcgttcttcccggtgggctctgggctcgtggtctcgctggcttcaggagtgaagctgcagacctttgtggtgagtgttacagctcataaaggcagtgtggacccaaagagtgagcagtagcaagatttattgcaaagagtgaaagaacaaagcttccacagtgtggaagaggacccgagtgggttgccactgttggctcgggcagcctgcttttattctcttatctggccccacccacatcctgctgattggtagagcccagtggtctgttttgacagggtgctgattggtgcatttacaatccctgagctagatacaaaggttctccacctccccatcagattagttagatacag

SEQ ID NO: 772408 - DNA, 462 bp, Homo sapiens; identical to SEQ ID NO: 756473

SEQ ID NO: 772409 - DNA, 630 bp, Homo sapiens
tagataattttatgattcagttccatttttatactttttatagatcttggaaatgtataaataaatctctattcagaaatgtttgaattatgggatgaataaatacttacacttatggaaaataaaaattatagagaagaaaagattagaaaagcaagaattatatacatgttaaacaaagaaaatttctgccagactcttagactyttctggttcttgggctcaaaatacttaggaaaaaaactaaacaatactagttatggttcagagaaaaacataaataccaaaacttctaaaagtgggggaaatttaaccatatagaaattaaaagaaagtattagttcacatgtttggggttaattcaaaactaacaactaaacggaatcaataaatacattggggtgtcaactttaacaaatggttatacagagatattttgaaaatattaatttgatttgtttttcattctttttctctaaaagccacattcgctgccaccagcgaagggaatgagagagtctacctcagttgggaagatggaaaggcaaaaggtcaattaaatgagatgtgaaaatggaactcagtagatactggagggggagggggaaaggcaatggaggcaaagaaaac

SEQ ID NO: 772410 - DNA, 617 bp, Homo sapiens
cctggatccttggatgaaacactcttgattatggtgtattatctttttgatgtctttttggatttggttagccagtactttgttgaggatttttgtttcatttttatcagggatattggtctgtgttttctttttttgttatgtcatttcctggttttggtatcagagtgatgctgacttcataggatatttatggaggattccctgtttctcaatttttgaaattgttttattaggattggtaccaattcttctgtgaatagaygtgtggtagaattcaactgtgaatctatctggccctgggcttgtcgttgtttgcaattgttaaaattactgattcagttttactgcatgttattggtctgtgtagggtttctatttcttcctgatttactctacgatggttgtatggttccaggaatttatctgttttctctgggctttctagtttgtgtgcatacaggtattcatagtaatattgaatgatctttgtatttctgtggcatcagttgtaatgtccttagtttcatttctaattgagcttatttgattcttctctcttcttttcttggataatctcactaatggtctattaattttgtttatcttttcaaaga

SEQ ID NO: 772411 - DNA, 624 bp, Homo sapiens
cattcaggagcagattgtttaatttccatgtatttgtgtagtttaggggttccttttggagttgatttcttgttttacttcactgtggtctgagaagatatttgatatgattcctattttttttttgagacggagtattgctctgtcactcaggctggagtgcagtggcacgatctcggctcaccacaagctccgccttccgggttcacaccattctcctgcctcagcctcccgagtagctgggattacaggtgcccgccaccacgcctggctaatttctttttgtatttttagtacagacggggtttcactgtgttagccaggatggtctccatctcctgacctcgtgatccrcccacctcggcctcccgtagtgctggattacaggcgtgagccactgcgcgcctggccgatatcattcctatttttaaaaatgtattgagatttgttttgtggcctaccatatggtctatcttagaaaatgttccatgtgctgatgagaagaatgtgtattctgcagttttggggtagaatattctgtacatatatcttacgttcctttgttctagagtgtacgttaagcctagtgtttctatgttgccttgctgtcttgatgatttgtct

SEQ ID NO: 772412 - DNA, 624 bp, Homo sapiens
cattcaggagcagattgtttaatttccatgtatttgtgtagtttaggggttccttttggagttgatttcttgttttacttcactgtggtctgagaagatatttgatatgattcctattttttttttgagacggagtattgctctgtcactcaggctggagtgcagtggcacgatctcggctcaccacaagctccgccttccgggttcacaccattctcctgcctcagcctcccgagtagctgggattacaggtgcccgccaccacgcctggctaatttctttttgtatttttagtacagacggggtttcactgtgttagccaggatggtctccatctcctgacctcgtgatccacccacctcrgcctcccgtagtgctggattacaggcgtgagccactgcgcgcctggccgatatcattcctatttttaaaaatgtattgagatttgttttgtggcctaccatatggtctatcttagaaaatgttccatgtgctgatgagaagaatgtgtattctgcagttttggggtagaatattctgtacatatatcttacgttcctttgttctagagtgtacgttaagcctagtgtttctatgttgccttgctgtcttgatgatttgtct

SEQ ID NO: 772413 - DNA, 455 bp, Homo sapiens; identical to SEQ ID NO: 764411

SEQ ID NO: 772414 - DNA, 636 bp, Homo sapiens
taaaacccacagttttatggaaagatgtaaacagtaatgtatggtgtggtccaaatgagttgccaacatggggaagaggatatggttgtgttcacatcacctcaggtcctctttggattccagcacaacgcatcaaaccttaacatggtgtggctaggacccaacctggtaccagaaatgaaggaaatgtccctgcaggacccacagccctggatgatgcagcttcctcagacgacacaagccccagacattacctgggggatgctgaagaagacaactcaggaggctgaacgaatcctgctctggacacaaacaccattcactccagataatttattccttactatgctttattaaccttgtttaattccctcactctgcctgcaaccagtacctgctacactctattgggcccatcttctaaatctgcttttcttccaccctattacctgggyggacacccccttcccagcctctaataacgtaactgcttggctggaaggggttaacatacccccagtggggttccttagtaagggcacacactgaactgaggtggcaagtaacactacatgtcactccttgattggaaaagaatgttactgattatattcacgtttatcttatgttatttac

SEQ ID NO: 772415 - DNA, 667 bp, Homo sapiens
ttcacttttgatttcccatgtggcattggttaaattgctttgcttttttgtgcttcatctgaaaaatggagatgatggtagtgcctagctcaaaatttgttgtgaggcttaaatgagttaatatgtacaaagcagttagaagagttcctggcacatagtaagcactcaatgaacgttaactattatttactatgattactttttctcaaagaacacaaggaatttgagtctcttattttttcattatatgaattaaacaatgaaggaagcctgttatattatggccctttggcacataataaaatgaatttaacccagctcttttcacacgcaaagttgaaatcactaaacttcttgaaagaaattttttgcttaggttttctagtgatcttttttctttcctgacaatttttctcatctactgctgttctcccaattacaaacrcatagacataaaacaattagcacatagtgtcagaatttttggtgtcagaattttttgatgtcagaatttagctaggcagactgatgtttatgccatttatgtaaggagaagttcttttatctatattacccatgcagccaatgtatagtgagatttaggtctatagaatggaactataacatttaatatcagcaaatggggtggggggacactaagcctaag

SEQ ID NO: 772416 - DNA, 613 bp, Homo sapiens
tggtatgatttataaacaagtttcaaaaatccatctattacattttcaggccttagaataattttctttactttctttgttttctttctttttttttttttttttttttttttttttttttgacagcgttttgctttgtcacccaggctggagtgcaggggggcaatcaggctcaccgcaacctcaacgtcccaggctcaagkgatcctccaacttcagccccccgagtagctggaactacaggcacatgccaccatgccaggctaattttttatttttatattttgtagacatgaggtctcactacattgcccaggctggcctccaactcttgatctcaagcaatcctccctcattggcttcccaaagtgatggattacaggcatgagccactgtgcccagcctcagcataattttcaattgctcaaaatcatggtaatgttacttgattttatttatgtctcatttacttttctgtaagtagatctatctttccaaaaatgtagtcaattccccaacttttatgttgttcttcaaaagcatcagcatttccaagacaataaatactgcatattgtaccaaataacctttcaatttaagcatgtggaacata

SEQ ID NO: 772417 - DNA, 505 bp, Homo sapiens
tctatcatgtgacatgggcatggtcctgaaagagtcttttcctaaagtccttagatagttaaatataatggataccattatcccccatgatgctcatatattttttaattacattattttgctttatcaaaataaatctctctcaaagttggcaggaaattgtttcatccatgacctggagaccaagagtctctctgtgattcacaggagaatacattaatgcttatgcaatgcagaacatttgggaggaaagggcctttggatagctatccattctggtgacctaraaaaatgctggtgttaaagtttgtgtgatctgcgtgaggactgatgttccacttctacactgtccatagaaaccactttctccatgccacttagcctcgtccttaaaactcccaaggcataaaatttttaactcttcagtttccaggaatcattgtatcacttgatccaagttaatgtctcctgtgtagtcacatgtctttggggatgtgctgctcct

SEQ ID NO: 772418 - DNA, 599 bp, Homo sapiens
gtctatcgcaatgctgttggagtccatgaaatcctgcttgccaatagcaacatatgcaagttagtttgcatggaggtaatgcttgtaagactagttataaattataaaaacatgcaactgttgtaagtgtctccattagtaggacactgtttcaataatgaggatttcactgaaataatgaaaaacgccaaggatttaaattttatgttagcattkaccacatttactgataggaatgagttttgctcattgtagttaagctgatggaataaaaacagtaccttccacatggttgacctcacaggtttatttatttgcttatagatccaacaaatatgcattgagcacttacttcgttctatgccttattctagttactaagctataatagtgaaaaacttctgcccttatgtcattggcattctttcaggaggcagaaaataagccaaatgaaaaatgataataattaataattacatataatatttagagatgacaaattttgtagaggaaaactagagcacaggtgaaaagggatagcaggcattggaaagggttgcaattttaaacaggaaggtcgagaaaattcttgttataaa

SEQ ID NO: 772419 - DNA, 516 bp, Homo sapiens
tgtagagatgagatttccctatgttattcaaggtggtctcaaactcctgggctcaagtgatcctcccatcctcacctcccaaagtgctgggattacagatgtgagtcactgtgcccagccctatatttttcttaagaagagcagggccagttgtttactaagaaactgcaatttacacccatgatttccagccctaatgatcagtmtgtggtcagctcctaggatgctgaggcttagaagctagcaggcaacaaggactgacccacggacccatcccatcagttctgcttctctcctgaccctcacacctgtgcatggcctgcatgcgtagcccctcctcaatgctggagctcaatgcctgctggttgtgcaggcggctcaggcggataagcactcggtcttgatgggcctcgtattcctcccggctaggatagatcttagagatcagggcatcaaagttggggtctggccgtagggatcgcttggacaccagcttctttcggcaggtaggacact

SEQ ID NO: 772420 - DNA, 615 bp, Homo sapiens
caatactggcaaacttaaacacattagcagttattattgcttaggaagacacttaccctgtatttcactccatccttggctaccttccccttgcttgtcagactctcctcccaggccctcttcttgtttgcttatactcagccccgtaaataacagtgaaaggttgctcgtagacactcaaagttttctcatacaccatgaaaatcaaacctccccctctacgtagttaccccatcagtccccattacaacctctgacggctgccgccytagctggatccctaggagtctgggtacaagacacctctttcagcactccttctcatctttttactttgcatttccggttttgctccgcacaaggtctcttcttcctctgtggatcctctacctacatgtgtctacctgctaattggacaggcacatgcacactagttttccttactcccaaaatcaatttgcaaatgggactgaacatcttcctgttcccctcatgacaccgacacaacaaaaaagagttattccgctaattcccttgcttgtcggtttaggactttctgcctccactattgctctcggtactggaatagtaggcatttcaacctctgtcacgacc

SEQ ID NO: 772421 - DNA, 605 bp, Homo sapiens
gggctgaatgttcaaataccttgaaagctgggctttgttctgtaggtgagagcgaaccatcagaagttcttttggagggcgtgttattctaaaaagcctgtttttattatgtacatatttattttttgagacggagtttcactcttgtcacccatgctggagtgcaatggggtgatcttggctcactgcaacctctgcctcctgggttcaarcaattctcctgcctcagcctcccaagttgatgggatcacaggcacccacaaccacgccccgctaattttttttttttttttttttgtatttttagtagagatggggtttcaccatgttggccaggctgctctcgaactcctgacctcaggtaatccactcgcctcagcctcccaaagtgctgggattacatgtgttagccaccatgcccggaaaaagcctgttattttacttgattcttttaaaagataggcaaaggtcagatctttggactagtgaggaaaatacaggttaaatgatttttccaagttaaccagcaagtccatgatagtgatgaaggtaatgaaaatagtaacagctaacatttatcaagtattttctatatgccaggccct

SEQ ID NO: 772422 - DNA, 638 bp, Homo sapiens
ctgtgagtgggtggcatatgagaataaatgaatgaattggtgacaacatcccaagcctcctgaccaggagactatcatgcccttcccatatcatggcatggtgaagtgattgaggaggaggctcactcatgtccagcccagcggttttcaaccctggccacatattagagtcacttgggagcttctaaatctactgatgctttcatccccacccacctccgaacaattgaatcagaatctctgggcatggggcccaggmagcggacttttgtaagcattcccagggtgcttacaaattctaatttgcagaataaattcttatgtgcagccacagttgaagaaccatacgtctagtcctcaaacaccttcccttcctccagtggtccctgcatgggcagctaggggctgagagtgcgtctagcttcagtggggaatggtgataattttaacggtgataaatttaaagcaggggttctcaatctgcctttgggaaactcaggagagttttaaaatttctagtccctgagtccatgtgcagagatgatgattccctgggcttgggtataacctggatgcctcccgtgaatggcactgtttaggcaaagcttctcagccttgagggggtatcagggtcacct

SEQ ID NO: 772423 - DNA, 515 bp, Homo sapiens
aaggatggacagcatggcgcgagatttcatcacactatgtagaacagtgtgaaatttaaaacttacaagttgtttatttctgtaattttccagttaatatgcccagatcgaggttgaccacaggtaactgaaatcacagaaagcaaaaccatagttaaggaggtctattgtakactaatgggactgagcccttaataagtgttagccactctaaagtcaatctccagacatcttacggtgcgattttattatttaagcattcttaagtaaaatttcagttacttgcaacaaaaatcgtcctattttactatgcttattttagtaaccctgcttctcataagttatgttcccaagaaaagtatcattgacgcctattctatcaatattacatgaaacattttttcttacatgaaaataatatttaagctatccgtaagaattcaagagacagtaaaatataatataaatgtatctttttattttcaataaattcttaaaattattactatagtaga

SEQ ID NO: 772424 - DNA, 536 bp, Homo sapiens
ccaggttgaaaaagactctgattttcaatccatattttaggtgtgatcagatatggaaaatctaaatacattgttacaagttctgaatgttattggcactggccatctcctgaataagtgaaaatcagttggagttaacagtatcttgttgtgkcctttggctattaaagtgacctctaaatagaatcccattttatccatttcagactataatatacgggcagcattttggggggtaatgtgttttgtaatagatagaaaattgttttaaaatgtcttcaggatctatttgtgcatacttgccctttataactcaaagtatttttattatagtggctgaattttgaaatacaatagactattttgatagattttcgtaagtgccttcaaagtattattatcaccaaacccagaaatgagaataaatccgaatttgacatttcttcttgtctaaagagtgttagaaacataagctgcaatggtttgttcagtacatttggtcagcctgattattttggtcacctgcaggtgaaact

SEQ ID NO: 772425 - DNA, 374 bp, Homo sapiens
catttaaaaaaataacaaactacaatacaaaagacaagcatcagactatcagatataactcttatgaatatattcttcaaaaggactcctgtccagaatatatgagacattgaactcaacaaggagaatataaacaactcaatttaaaaraaaaatctgcaaaaacttagaaaagaatgtaagattaagaaataagcagatttcaaaaaggatgcttactattcattagagaaatgcaaagtaaaaccacaatgagataccactaaatataaatcaaaatagctaacacccacaaatattgaagataaaattcaagaagtctcacatgtggctggtatgaaagcaaaatgatatagacactttgcaaaacactt

SEQ ID NO: 772426 - DNA, 374 bp, Homo sapiens
catttaaaaaaataacaaactacaatacaaaagacaagcatcagactatcagatataactcttatgaatatattcttcaaaaggactcctgtccagaatatatgagacattgaactcaacaaggagaatataaacaactcaatttaaaagaaaaatctgcaaaaacttagaaaagaatgtaagattaaraaataagcagatttcaaaaaggatgcttactattcattagagaaatgcaaagtaaaaccacaatgagataccactaaatataaatcaaaatagctaacacccacaaatattgaagataaaattcaagaagtctcacatgtggctggtatgaaagcaaaatgatatagacactttgcaaaacactt

SEQ ID NO: 772427 - DNA, 610 bp, Homo sapiens
tagagtaattatcacaatcattttagggattttcccccctcattgtcaaatgtggggagggtatgggctatagaattagatgatgggccgggcgcggtggctcatgcctgtaatcccagcacttttggaggccaaggcaagtggtttacctgaggtcaggggtcgagggaggtgtattacctgaggtcaggagttcaagaccagcctgaccaacatggcaaaaccctgtctctactaaaaatacaaaaattagccaggcatggtggcgcgtgcctgtaatctcagctactctggaggctgaggcaggagaagcgcttgaacccrggaggcggaggttgcagtgagctgacattgcgccattgcactccagcctgggcaacaagaataaaactctgtctaaaaaaaaaaaaaaaaaaaaaaaagaagaattagatgatgatctcattaacacgactctcttccacaggatccctcaattcattaatctccaaaaaagtaatctgtttaaaagattgttgaaacagccttgagtcacttaagatgatggcataatgatcccctgagactcgcccccatatgaaatccttccacaagaagtatgttttcccta

SEQ ID NO: 772428 - DNA, 650 bp, Homo sapiens
gaagcagaagcttatctcagcaatcacgataggcattataaaagtacacagtcatgaattcatgaaataggaacatccagcatctcactcattcatacttactattttaattgcgaattacacaatctccgatatttgaatagagtcgctttgttgcctcagtcttaacctttagtaatatccgtagattaccggggaggcygacaatcccctcctgatggacatgactgtcccccaccccctggttgtacagctgatgggtcggtggggaccagcagatgccatctcagaattgcacactgcagtctggacgcttacggcccgaactagaaataaggcacgacggaaaaatcatagctgtttctatctgtaattgcaaacctcagatgtgagggtgatatacttccatttcataattcttttttcccttgagattagagaaagctattgtgtatgagtgaacatttaatacattcctgctgaatactgacatgtagaacaggtggatgaaataggaagtttgactcatctttcccaaattaccacattaagttttgtttactcttttgtcataacagccgtaggactgacaaggatattgctggcgctgaagatgagatttgtggtattcacactccagctctgccatt

SEQ ID NO: 772429 - DNA, 579 bp, Homo sapiens
gtttcttccatgtttctagaagcagtattataccccctttctgaaggttcagtatgaaataatgaagcaataacaaatcattgtaatgcttctgaatggcaataaagattcattttatgataatttcacattttatttagctaagttttctattttcaagttgtragtccttttgggagtattagatataattatcattcattcaaaaaatgagtttttctgatattaacctcgaataagttaatatttaatttcgtgtgatcaaaattacgaattgcaacagtgtatttttctcaaccaaatgtttcattgctgagcataggtaaaattggtaattggttatttttctcacagtagtttgcgtttaacgggaaacttcagtgattctagagcttcagcatttccagagtccagcctgtaccatggtgtagaagaacactgaaagtatctttagtcccgagtgatcaatccatgagaaaaagtgcagtgatatgtttttggtagacaaagggcgagattgcaccattgaataaaaaggtgggacttgccaaagagaaatggatatttctacttcttatc

SEQ ID NO: 772430 - DNA, 546 bp, Homo sapiens
ctccactgtttcctcttcctttcctctgatccctgtaaccaactctcagtcagagtgatctctgttgcctcactggccccagctttttgccttggaggacgggcttatttacgtctccttacagcaccttctcctgtcttcccttggaatccagatctcattctcccctccacattggacactctcctcatttcaacatctttatgcttataataattgcactagtgcctatgagtctccctctgccctgacctcgtgcctgctctctgccagyctctctgctgggtgcagatgataaatccatgactaagaggacagggttcctgcctctgggcagcacaggcagattaaaaaaaaaaaaatcgcctgtggatttaccatgcagattcctaggcattctccaaccatttaaatcagaatgagagcaagtggggtctgggtttctgaatcttaaggtatttctctaagtcattcttacacatactgatactgaaaaatctctcctatgtctgtagtactccctactttcaagttcactttttcata

SEQ ID NO: 772431 - DNA, 609 bp, Homo sapiens
acttctatcaagaagtagagtcagctttctcccctttttaagctgaattggtcttgtgatttgccattgaccaagagtatgcagtggatgtgacatcgcaccagttctgggcctactccttaaaggtcttgtagcttccacccttactgtctttcagtactgagccacggtgtaaagagtttcaaccatcagctatagggaggagccctgaaggatacaagactgagaagagaaaacaagagactcaatcagccatcggctattctagctagcccaacttaggcacctgtcttgtcagtaaagctctctaggatactgcagcttcactaaattgtagcatccaacaccaagtggaacagagacagagcttttctgccgagcattgcccacttgcagaatctgaaaaagttgttgttttaaactaaaarcatttggattgggtttggtatgaagcaatagatacctcgaacagtcattgatactagaaattgggtgttgctgcaacaaaaacctaaaatatgttttgggtattagtattggaaccaggcagagtctgcgcagccagtgaggaaactattagtaagagcttgacgaacaggggaaaaaaat

SEQ ID NO: 772432 - DNA, 533 bp, Homo sapiens
caaaggtctgttatccagaatctataaggaacttaaacaagtcaacaagcaaaaaaccaaataaacaattaaaaaaggggcaaaggacatgaacagatacttctcaaaagaagacatacaagatgccaacaaacatatgaaaaaatgctcatcatcaccaatcatcagagaaatgcatatcaaaaccacagtgaaataccatctcacactagtcrgaatagcttttgttaaaaagtcaaaaaataacagatgttggtgaggccaaggagaaaagggaacacttaatcactgttaatgggaatgtaaattagttcagccactgtggagagcaatttggagatttctcaaggaagtgagagttgaaccactattcaacccagcagtcccactaataggtatatatccaaaggaaaagaaattattctagcaaaaagacacatacacctatatgttcatttcagtgctattcacaatagtaaagacatgaaatcaacccaagtggccatcgatggtggactgggtaaagcaaaagt

SEQ ID NO: 772433 - DNA, 559 bp, Homo sapiens
ttttatttattcaaaagatttgtcaacatatggaaacctatttgatatagtttttttgagcccttcctctgttcccatttagttgtattaaaatgtaatgcaccaatactagttgttcaactggttggcttatagttattgcgcttctctgacttatcacctgttccaaaaatttatatcaatgctagaatagttgtccttctcaacctagagcattcatatagaattcagaggtcactaaactttaatgcctgtaactttcagaactatgtgtgraccagattgagtgtgaaataatagtgggtgtggtgcctgttgtaaactggagcctgtaaactccttataaaagtatttagatccacttacaaacaaacaaacaacatcttaaccaaacacaacactcagatatgaattaattcaacccaagggatcaagtatacaacactgcatgaaaattaaatgttgatagatatttgagtaccttagaagttagtataatattaacatattatcaggatccagttaaatactattctatttctttaattattccttctgt

SEQ ID NO: 772434 - DNA, 573 bp, Homo sapiens
tgtcagtcagcccccactgggaggtgtctccctgttaggctacacgggggtcagggacccacttgaggaggcagtctgtccgttctcagagctcaaacaccgtgctgggagaaccactgctctcttcagagcagtgcagacaaggacatttaagtctgcagaagtttctgctgccttttgttcagctaygccctgccaccagaggtggagtctatagaggcagcaagccttgtggtgctgtggtgggctctgccaagttcgagcttcctggctgctttgtttacctacttaagcctcagcaatggtggacgccccttccccagccaggctgccgcctggcagttcaatctcagactgctgcgctagcaatgagcaaggttctgtgggcatgggtcccactgagccaggcacaggatataatcttctggtgtgccatttgctaagactgttggaaaagcacagtatttgggtggcaatatcctgattttccgggtacagtctgtcacggcttcccttggctaagaaagggaaatcttctgaccccttgtgcttcccaggtgaggtgatgccccg

SEQ ID NO: 772435 - DNA, 435 bp, Homo sapiens
tggacgctctatgtctagttctctcttccctgttttctactcccccaaattctagctcccttgggcttctcattgtctgaccttactctcttcagctcagcaatacctggattttgcttgcatttttattccctgtgatactatgtgaaaactgcctcccagtagtaatctgaggcaawaactgggttcccctcatttgttttctttctcttatgaatcataggcatgtattgcctgttgtccaatgtctaaaaactgctgcttcatatagttttctggttttctagttgttaaatgtgaacaatctctattccttcatcatgatgggaagcagaatgcaatattatttgttagtattttaaaataatgctgaaaaaacattctaaaggtttccttgaaagcacatatctattatatagatatggatatgcttat

SEQ ID NO: 772436 - DNA, 634 bp, Homo sapiens
ccacggacgataacgtggacattcctgatgtccccctcctggcagcccagacgtttattcagaggtaacgggaaacattaatggtatgaatttcagaccgtctttgttcagattctgtatttgccacttcgagtatcttttccaattttatataactgatagatgttttatatattatagtttggaaattatttgtgaattttgttttytgagattgagtctcactcttgttgttcaggctggagtgcagtggcgcaatctcggctcactgcaacctctgcctcccacgttcaagcgattctcctgcctcagcctcccaagtagctgggattacaggcgcccaccaccatgcctggctaatttttgtattttcagttttcaccatgttggccaggctggtcttaaactcctgacctcaagtgatctgcccaccttggcttcccaaagtgctgggattacaggtgtgagccaccgcacctggccatgaatattttgaaatgaaagtgatttgtctttattccaatcttgtctgaatgttacttcaagtcaagagacagtcacatcctgtctcttgagaggaaacctactcaacctctgtgctgtgccccaggatcctgtgcctgtgatccttgaa

SEQ ID NO: 772437 - DNA, 634 bp, Homo sapiens
ccacggacgataacgtggacattcctgatgtccccctcctggcagcccagacgtttattcagaggtaacgggaaacattaatggtatgaatttcagaccgtctttgttcagattctgtatttgccacttcgagtatcttttccaattttatataactgatagatgttttatatattatagtttggaaattatttgtgaattttgttttctgagattgagtctcactcttgttgttcaggctggagtgcagtggcgcaatctcggctcactgcaacctctgcctcccrcgttcaagcgattctcctgcctcagcctcccaagtagctgggattacaggcgcccaccaccatgcctggctaatttttgtattttcagttttcaccatgttggccaggctggtcttaaactcctgacctcaagtgatctgcccaccttggcttcccaaagtgctgggattacaggtgtgagccaccgcacctggccatgaatattttgaaatgaaagtgatttgtctttattccaatcttgtctgaatgttacttcaagtcaagagacagtcacatcctgtctcttgagaggaaacctactcaacctctgtgctgtgccccaggatcctgtgcctgtgatccttgaa

SEQ ID NO: 772438 - DNA, 634 bp, Homo sapiens
ccacggacgataacgtggacattcctgatgtccccctcctggcagcccagacgtttattcagaggtaacgggaaacattaatggtatgaatttcagaccgtctttgttcagattctgtatttgccacttcgagtatcttttccaattttatataactgatagatgttttatatattatagtttggaaattatttgtgaattttgttttctgagattgagtctcactcttgttgttcaggctggagtgcagtggcgcaatctcggctcactgcaacctctgcctcccasgttcaagcgattctcctgcctcagcctcccaagtagctgggattacaggcgcccaccaccatgcctggctaatttttgtattttcagttttcaccatgttggccaggctggtcttaaactcctgacctcaagtgatctgcccaccttggcttcccaaagtgctgggattacaggtgtgagccaccgcacctggccatgaatattttgaaatgaaagtgatttgtctttattccaatcttgtctgaatgttacttcaagtcaagagacagtcacatcctgtctcttgagaggaaacctactcaacctctgtgctgtgccccaggatcctgtgcctgtgatccttgaa

SEQ ID NO: 772439 - DNA, 635 bp, Homo sapiens
gcacaaatctgggtcatacatggtgttaatgataaattctctgggtgctgggattataggtgattgctgtttgttttgccaattgtttatatgtattttccattttttctacaatgaatgtgtattacttgggtaataaaaataagttttggctgggtgcggtggctcatgactgtaatcacaacactgggaggctgaagcaggaggactgtttgagcccaggagttcaagaccagcctgggcaacatagkgagaccctgtctctgcaaagaatagaaaaaattagctgggtgtggtgacgctcacctgtagtcccagctaattgggaggctgaggcaggaggatcacttgagccagggaagtcgaggctgcagtgggctgcaatggcactgctgcattctagccatcctgggcaacagatactgtctcaaaaaaaaaaagttttaaacaatgaagtggggatgtgcttggggtctctcctcacgggaacccattagagggcagagctgatcctgccagcccatctgcccaccttgggtgggttttgggggcacaaacccatccttgcccttggctgtgaggctgtcctggcagcgcccgccagcaagaaggtggcagtgctgggaacatgggct

SEQ ID NO: 772440 - DNA, 428 bp, Homo sapiens
agcgcatccgggttttaccgagagtgccgcagttggcaccggccrtttgactgtcctctttactgataaaaggaggcacgaaaatggacaggacctctggatcaagaagagcagaaagatgtttgactccctttttataagcaacctaaaaaagggaaaaataagagttactgccacagcctcagctcttgttcgagggtatcctttctgtctgagcttcactgcttgtttttctcctcccctcggtgcccataaacactggcgcctcaggctcctaacagtaaagggctcctgggaagcttcttttaggaacctgccaggccctatgttcagggaagccacgtagactcgcagagcctggctcttcagctgtggacatggacagcaggacctcacctccttcctataaagcactgccgtccaggctg

SEQ ID NO: 772441 - DNA, 600 bp, Homo sapiens
cccccctgggaggcatgagagaaccctcactttgcttccatggtaccccaaggagaatagcagctagcattcactgaacaatttggtttgctacaactagtaatactactgaggtatcgggtactgaggctttatttgaggatgaagctaatagcctaagccaagatgtacctgctaggcaggatgaagccctttagaaccattgtttcatttaccttaaagacaactcaggacaggggtattattactatagtcccgttctacagatgcggaaaccgaggcttccacagcctgggttacttgtcccaggtacacagcgactaagtgcctgagccacacttcaaccaggtgtgtgtctcacaccaactccttctatagatgttacctaagggccctccaggagctaggcaccaactgggtgctgggtttcctcttctccmaggagctccagaggaccaagagagcaggaggagggtcatgggggctccaggggaaggttccgagggcagggaaagcggagcatgctcccagggtgagtgggcacagggcacctgccagcggcagactgacagatgttcagaagaggaactgcagaaccag

SEQ ID NO: 772442 - DNA, 624 bp, Homo sapiens
tgccatgtgatgctatactagagtcggattggaatttggtatcttattgctacaaagcgtctgttttgtcagtctccagatatctgttttaatgttcatgttggtcaattgggcccgaacttcaaaggaaggagggtgtaatgaggtctgtccaacccccacttcccataatggcctgaactagttttttgggtttgctttggaacgcacttggccaagaagaggggtccattcggccaggtggagggcttagaattttatttttggcttataccaccaacaactaatttgtccctaactccaatggctgtgtcttcatctccaattctatttcaatgctgagatagaattcagatgtggcacagtgtgtcagaagaaggaaytgataaaaaagatggtttagtaggacttggcaccattgatctctttttccttcttcaaacaccctcttcctttgccttttatgagtccacactcacctaatttttctacttctcaagcttcttcctctaaccattgttaaatattagtactaattagtttttttgtccctgttctcttttcctcttaattttctgtttctgtcttcaaatgacttcaatcgctgtgtttattgatgggatc

SEQ ID NO: 772443 - DNA, 606 bp, Homo sapiens
aaaggatttggatatttttggacacatttgtttctcttacattttgttgatgtctaaacacagacctttgaagtgaaaattccctcgtctaacttaatttattcacatctttacattgactatctggatggtttttatgacgacttatgctcaagctttgtttccaacctccaaaagcaaagatcaagacccctgtcgaagattttcactgaagagaaaagatgtgggtgatttaaatcaacttggtgatttattttgttttaccaggaaattgcttcctgacatgaatttgcaaagaatagaaatcactgtgattgcaamgttggcgacatctaacacgagtccacgatttgagtcaacatggaagccaatgtgcagtgaggaaggccagtgtcaaaactaagcctcgtgaaccaatttgacacagctgatgtgttcgtatagtgaccttgaaagcaatcgtgctctgaaatataaggaaatgctttgtcagagactcttcatcttctatctggagaagttttcaaagaccttgaatagcaagaaaatggcatcaagataactgtgaacacaggagcctccgcggatacacagctctccttgtgt

SEQ ID NO: 772444 - DNA, 606 bp, Homo sapiens
aaaggatttggatatttttggacacatttgtttctcttacattttgttgatgtctaaacacagacctttgaagtgaaaattccctcgtctaacttaatttattcacatctttacattgactatctggatggtttttatgacgacttatgctcaagctttgtttccaacctccaaaagcaaagatcaagacccctgtcgaagattttcactgaagagaaaagatgtgggtgatttaaatcaacttggtgatttattttgttttaccaggaaattgcttcctgacatgaatttgcaaagaatagaaatcactgtgattgcaacgttggcgacatctaacacgagtccaygatttgagtcaacatggaagccaatgtgcagtgaggaaggccagtgtcaaaactaagcctcgtgaaccaatttgacacagctgatgtgttcgtatagtgaccttgaaagcaatcgtgctctgaaatataaggaaatgctttgtcagagactcttcatcttctatctggagaagttttcaaagaccttgaatagcaagaaaatggcatcaagataactgtgaacacaggagcctccgcggatacacagctctccttgtgt

SEQ ID NO: 772445 - DNA, 606 bp, Homo sapiens
aaaggatttggatatttttggacacatttgtttctcttacattttgttgatgtctaaacacagacctttgaagtgaaaattccctcgtctaacttaatttattcacatctttacattgactatctggatggtttttatgacgacttatgctcaagctttgtttccaacctccaaaagcaaagatcaagacccctgtcgaagattttcactgaagagaaaagatgtgggtgatttaaatcaacttggtgatttattttgttttaccaggaaattgcttcctgacatgaatttgcaaagaatagaaatcactgtgattgcaacgttggcgacatctaacacgagtccacgatttgagtcaacatggaagccaatgtgcagtgaggaaggccagtgtcaaaactaagcctygtgaaccaatttgacacagctgatgtgttcgtatagtgaccttgaaagcaatcgtgctctgaaatataaggaaatgctttgtcagagactcttcatcttctatctggagaagttttcaaagaccttgaatagcaagaaaatggcatcaagataactgtgaacacaggagcctccgcggatacacagctctccttgtgt

SEQ ID NO: 772446 - DNA, 590 bp, Homo sapiens
cgttctactctctacttctacaagttcatattttttagattccacatgtaattgagatcatgcagtatttatccttctgtgcctggcttatttcacttaacataatactcctaagttcatccacaacattgtagaaattttatctgttcttccgggtgcccacactttcaaaggaaaaaatatacatattgcattagtctgttttcaggctgctgataaagacataccctagactgggtaatttataaagaaaaaggtttaatggactcacagttccacgtggctggggaagcctcacaatcatggcagaaggtgaaaggcacgtcttacgtggcagcagacagagagagaatgagaaccaagtgaaaggggtttccccttgtaaaaccatcrgcttttgtgagacttactcactaccatgagaacagtctgggggaaaccgcccccaagattgtattatctcccaccaggtccctcccacaacacacgggaattatggaaggtacaatttaagacgagatttgggtggggacacagccaaaccatatcaaatacattaaggaaaacagttatcggaaccaaaggaatgc

SEQ ID NO: 772447 - DNA, 669 bp, Homo sapiens
agaacttaatcataagatgtcaggaaaaattgttatggaacttctagaaagacttaaaagcagggatagttggagaaaaccccttttgtactccctcctgacatggtttggacctgtcaaaccatggtgtccccaccaaatctcatgtcaaagtggaatccccagtgttggaagtggggcctggtgggaggtgattggatcatgggtcgggtttctcatgaatggtatagcaccaaccaccttggtactgccctcacgattagtgagcgagttctcatgagatctgtccatttcaaagtgtgtggcacctcccccctcactctctcttgctcctgctttctccatatgaatttccwgctcccactttgccttccatcatgagtaaaagttccctgaggcacccccagaagcaggtgccaccatgcttcctatacagcctgcagaaccatgagccaacctcttttcttttacattacccagtctcaggtatttctttataccaatgtgagaatggcttaatacatctccttcctgatgcttggaatgcagatgtgatggctggagctccagcagtcattttgggatcttgaaatgaagtcatactctgaaaatatcggtaaagaaaagctggtgcctgggacccttgtgatagcatggaactgtcacatc

SEQ ID NO: 772448 - DNA, 605 bp, Homo sapiens
agctctaaacaaaccccagatattgacacgcttgtcatcacctggcaaattcctttagagtgggacccattttatgtattcccggtacaatgcctggcacatagcacatcttaattcttttatctattcaaccaatgtgtctggaagggccaccatttgccagaaaccatgcaacgtgctggagaattcagaagccagaagaacatggttcttgacttcatgccctactacgcagttgaaataggaaataaatatttactgagaaacattaaatcagcttgtgttcctgacatgttatctttttagaaatgcaataataatgacaatattatatatttccaacaattttttagaaagctttgggaaaaaaattaaggaagtattagcaaaatgaaaacctgttcagcatttacrgagtgcctgctccacatgaaacactgacctagaatctctgaggaatgaagagaagagtgaaacctggctcccaccctatgaaagtgcaaaggctcttggaaaggacaggtagacagatatctacaaagataactctaatccaaagcaagttatgggaaatgctatagtgaaggtttaaacaaaatgtagag

SEQ ID NO: 772449 - DNA, 547 bp, Homo sapiens
aaagaaaatagaaagaagttctactgtgggtaaaatgttatcaaaaagcactgcatgcttcagagaaaactttcctgaaaggaagcgttcaccgatgcggtaaagttcatagttgtcttattttaagaaattgccacagccacccccatccttcagcaacaactgccctgatcactcagcagccatcaacatcaaggcaagactgtccaccagcaaaaagattatgactggctgaaagctcagttgatcaytaacatttttttagcaacaaagtattttaaattaaggtgtatacattgttttttagacataatgctattgcacacttaatagactacagtatagtgtaaacataatttttccatgaattgggaaagcaaaaaattcttgtgactcacttcattgtggtggtctgggaattgaacctgcactatcttcatggtaagcctatattcacttcacaaatatgtcttgttagattagtttataagtttaataaatttttcaaatttcattttaatttaagcctactttccctgacatctaa

SEQ ID NO: 772450 - DNA, 610 bp, Homo sapiens
cccacttggtcccaggtgtagatggaaaacctgtcttcttcatgtggggtcctggcatggtgaaacttccatttaagcagagaagcagaccagaatggtcactttttgcaggcatttgcaagccccaaagagaaaatatgaatgtgagctaaacccaacagaccaatttatttccccaaactcaccagtgaggtattttcacacctcttctcttggtaagaagggagtgggagatgtggggtgcagacagaggtcaagaatgttactaataaacaatccctctttaggtgagcacgaaacaggggaaagaaggttttcctaccatcaagatgctttcaaactacatcttatttgayctttcaacctatataaggctaagtattattactctggttttatagatgaagggaaagcccatagatactaaataacttgctctaagtctcacagctagtaaatgttagagtcaatatttgaaccgaaaatttgtgctctttgtttgacatggagcacagtgtaagggtctgatacgtgcttggtgaataataagaaaaaaaactctgaatacaattatgaatcaagtagataaatcccccacattttaagtggt

SEQ ID NO: 772451 - DNA, 506 bp, Homo sapiens
aggttcttttttgcccaataaaatggtttacatttgctgtgctggttctcaraaaataaattttaaatgataaaaatttacatgattttgtgtgatatatgatatttattttaacagaactgcttatacaaattttatccttggatttctatatatacttcacacactctgataattaagttcgtagttatcatagattattaagcttatcagaacagagatgtagcaattatagttttaagggattggtgctttttaaaatgttgttcttcataggtcttttctaatgtgtatgtgatactggcctaagtgagagagccagtaggccaagctcaagaatttggagaaagaaagaaaattagatgtcttttaaaattcaacacaaaatcaagtggagaaaaatcaggagaattaattctgttctcagagaggcttaaagagcctgactataatctgatggtattcatagagcttaagaaggatcctggcaatcaagtgtggtcaga

SEQ ID NO: 772452 - DNA, 519 bp, Homo sapiens
caaaagtgcattaacctttaaggttcacattaggcagcataaagtttcttttgatttgtcagtcactaccacccctcgatctccttccacctccctgtttccgatggttcccccacctgaaaggcctggacaatgccatgccgtgctataaagaaaaataaaggccaggcayggtggttcatgcctgtcatcccagcactttgggaggcctaggcagatgaatcatgaggtcaggagctcaagaccagcctggccaaaatggtgaaaccctgtctctactgaatatacaaaaattaggtgggcgtggtggcacgcacctgtaataccagctactcgggagcctgagagaggagaattgcttgaacttgggaggtggagattgcaatgagccgagatcatgccactgcactccaaactgggtgacaagagcaaaaactccttctcaaaaaaaaagaaaaagaaaaaaaaaagtattttctagcttcccaaattgtctcttctgggagcctatttatcaga

SEQ ID NO: 772453 - DNA, 519 bp, Homo sapiens
caaaagtgcattaacctttaaggttcacattaggcagcataaagtttcttttgatttgtcagtcactaccacccctcgatctccttccacctccctgtttccgatggttcccccacctgaaaggcctggacaatgccatgccgtgctataaagaaaaataaaggccaggcacggtggttcatgcctgtcatcccagcactttgggaggcctaggcagatgaatcatgaggtcaggagytcaagaccagcctggccaaaatggtgaaaccctgtctctactgaatatacaaaaattaggtgggcgtggtggcacgcacctgtaataccagctactcgggagcctgagagaggagaattgcttgaacttgggaggtggagattgcaatgagccgagatcatgccactgcactccaaactgggtgacaagagcaaaaactccttctcaaaaaaaaagaaaaagaaaaaaaaaagtattttctagcttcccaaattgtctcttctgggagcctatttatcaga

SEQ ID NO: 772454 - DNA, 519 bp, Homo sapiens
caaaagtgcattaacctttaaggttcacattaggcagcataaagtttcttttgatttgtcagtcactaccacccctcgatctccttccacctccctgtttccgatggttcccccacctgaaaggcctggacaatgccatgccgtgctataaagaaaaataaaggccaggcacggtggttcatgcctgtcatcccagcactttgggaggcctaggcagatgaatcatgaggtcaggagctcaagaccagcctggccaaaatggtgaaaccctgtctctactgaatatacaaaaattaggtgggcgtggtggcacgcacctgtartaccagctactcgggagcctgagagaggagaattgcttgaacttgggaggtggagattgcaatgagccgagatcatgccactgcactccaaactgggtgacaagagcaaaaactccttctcaaaaaaaaagaaaaagaaaaaaaaaagtattttctagcttcccaaattgtctcttctgggagcctatttatcaga

SEQ ID NO: 772455 - DNA, 624 bp, Homo sapiens
atggaaaaaagcttatagaataagggtgtgaaaaaagaaaatatttttgtacagttgtacaatgcgtttgtatttttttaatttaaaaatacattttatttttttaaatttttaaattatttttttttatttcagtatcttttgaggtagaagtggtttttggttacatggatgaattgtatagtggtgaagtctgagatcttagtgtaccagtcacccaagtagtgtgcactgtrcccaatatgtagctttttatccctcatctcgactttcccgcctctgaattccagagtccattttaccactctgtgtacccatagcttaactcccacttataagtgagaacatatgatattgggttttccattcccacgttacttcacttaagataatggcctccaactctatccaagttgctgcaaaagacattatttcattcttttttgtggctgaatggtattccctggtgtatatattaccacattttctttatccactcattagtcaataggcatttaggttggttctatatttttgcgattgtaaattgtgctgtgataaacatacatgtgcaggtgtctttttgatataatgagttcttttcctgtgggtagatatccagca

SEQ ID NO: 772456 - DNA, 498 bp, Homo sapiens
tatataccaaaagatcttctagaatttttattgggattgtgttggccgttagagcaatttgggcagaatttacatcttagcaatattaagtcttctggtccatgaacactgtatatctctccatttatttagatcatctttgattttttctgttgttttcaacattcagattcttcatctatttattagacttatgcctaaatattttatgattttggtgctattataaatggtatatttttattggattgttagttcattgttaataagtagaaatgtaattgatttttgtatattatccttgtatcttatmgccttgataaattcatacgttagtttgaagagttttttttctagaaaccttaagattttctacatgacaatcacattgcgtatgaatagaaaaggttttactttttcctttccagtctgtgctttttttttcccttactgtattatactgactaaaacttttggtatgatactgaatagtagtgg

SEQ ID NO: 772457 - DNA, 665 bp, Homo sapiens
taatcctgtcactttgggagtgcaaggcaggcagatggcttgagcccaggagattgagaccagactgggcaacatggcaaaaccccgtctataccaaaaaaaatgcaaaaactagccgggcatggtggcgtatgcctgtagtcccagctactcaggagactgaggcttacctgagcccgggagtttgaggctgcagtgtgactttattagagataaacatatatgtatttattcatggcagatatatatatatatatatatatacacacacacacacacacatatattttagatacataaaatacaaatattcatttagaagtagatagactagatgtattaaatatctttgtaatgttcaaattttacctttgagtttgagagaatacttctgccagaaaaaactgaatgcttctaacaacttcatgacttattccacatctagcytaagaggcatagttaactttaatctgtaattgactggagtaaactttataaagtagagctttttaaatttttttcttttttgagatggggtcttactctgtcccccaggcaagggtgcagtattgccctagctggagagcagtggcgcagtcattgttaacctcaaactcctgggctcaagtgaccctcctgcctcagcttcttaagtagctaggact

SEQ ID NO: 772458 - DNA, 626 bp, Homo sapiens
ttttcctgttatcttgacatttttttaagctttccttttgctttgtcatatagtgatttcactttttcttgaatcacatcagagtctacaggtatgcctttcttatagtagacttgcacccacataaagctgcatttctaatacaaggtaaaaatgtatttcacaagaagtacaagttttcatgcctgctggtgtagctacagtgacagcttcatgtattttctcttgcttttcttttcttcttcctttttctttttttttttttaaacaatggtcctttttttacaatggtccttatgctggattcatttgtcttgaaatggcgggcaatatcagctgcaggtttcaatctacatatcaggcacttcaacttttccttgtaatgtcatgacttttctttgcttcttgggagcacttcaagcaccacyagtggcacttcgtatgggtcccatggttattcaaggtttatggtactgcatgaagcacgacgcaagatccatgagaactgcgagagatcactctttactgcaatatgcaatttacagagaggggaactgctcacatggagatgactggcatcacatggtgttttaagcggatacttgagctccccacaacagcaacag

SEQ ID NO: 772459 - DNA, 611 bp, Homo sapiens
actgaatattgtgggacatacctaaaatgaaagacagaaataaagcaaacagaaacgaaagaggaacttagaaaaattacggacaacccaataagtagaagaaaatatgaaagaaattataatagccacagagataagggaagatattgtattgstgagatgtaatccaagtgctttaaaaaacaatcagaaagcaagaaaattatcagaaaataaaatatggtattcaaaatttttaaaaatgtaaaatgtttagaatataaagtcaatgaaatcatccacaaagtacagcaaaaaaggcagagataaaaatggaagaaataggccaggtgcgttggctcacgcctgtaatcccagcactttgggaggccgaggagggcagatcatgaggtgaggagatcaagaccatcctggctgacacggtgaaacccggcctctactaaaaaatacaaaaaattagccaggcatggtggcaggtgcctgtagtcccagctacttgggaggctgaggcaggagaatggcgtgaaccggggaggcggagcttgcattgagctgagatagcacccctgcactccagcttgggtgacagagcgagacaatgtctcaaaaca

SEQ ID NO: 772460 - DNA, 586 bp, Homo sapiens
ccaggctggagtgcagtggcgtgatcgtgatctcagctcactgtaagctctgcctcctgggttcacgccattctcctgcctcagcctcctgagtagctgggattacaggtgcccaccaccacgcctggttaattttttttttgtatttttagtagagatggggtttcaccatgttagccaggatggtctcaatctcctgacctygtgatccgcccgcctcggcttcccaaagtgctggaattacaggcgtgagtcaccgcgcccagccccatcacattgtcttaagattattattttaataaaggtaattatatttctcctggtattaggataacgttttatgtttaattataatcacacatgattacaacagatggatttcctaattctgtcatttccaagcagatttccacactgccgagtgtctatcacaataaaggaaagtgagattactttaatttcacaatgcaaaatatccaaagaaacgtttactgatgtttcttaagtacttagtatttgctaggtcctaagctaggagtttcattgtgatctgttatagatattaggaatttatcatgtcagagtg

SEQ ID NO: 772461 - DNA, 596 bp, Homo sapiens
catatttttattttacaaggctattgtacaatgaaataagatataatatgaaatagcacacagtactttgaaggaacttgataaatatgttttcttctttaaccagccaccagatatatctctatgcctaccaactaatggaaatatttgatctacaaaatgccttgtgggaggtggggaagggaaggagttgggacatagaaggtgagaccaaaaatgtgwgtccaggtgattgagaaaaggtagaaaacttattttagccaaagggctagagaaaaggatattcctatctttttcttgtttaatttctttccttgttaccaaaggaatgctgcttgggagaagagagttgttaactcacagaattatgcctgaggcatacttttctctcatattaagtgttatgttctgaaggaaatatgatttgcatgcaccagatacggtgcagcaagaccacttctaagcaggactaatgtaaataaaaggaacatttcttgagacagaattttgaaaataaaactgcttagtttaccttaccattcagagaatttataacaattaatcaaaaacatttcaatcaaatttaagtagtaaca

SEQ ID NO: 772462 - DNA, 535 bp, Homo sapiens
ttccctgcccctttttcttatccatatcaaaagcaggttctagcttgaatatgccagttgatgtcaaaaaagaaatctccatataatcagactgtggcctgtgtcagctataatcacatagacagatcaagatttgccaagattgcagaaagaagaccaaacacttgccaaaggttwctctttaccctctttcagattctaacatccaaatgcacagatttcaaaaaaactacatggccctgtaggaaaaacaagttaaaatattgcaacaaaaatctttagaatttccgttttctagtggttggcactatcagtaaaatttgttgcttttgtttgtccctttgtttattaaattagaaacaaaacagttgaaaatatttattgaatgttactagagaaactttataactatagtaaagcaagggatcagtgatccgattctagagcagagactgatgaccacaggagtgagagagatatctgtaatacagggcactgttgccttaatcttataaaagttaatagtacaactagg

SEQ ID NO: 772463 - DNA, 535 bp, Homo sapiens
ttccctgcccctttttcttatccatatcaaaagcaggttctagcttgaatatgccagttgatgtcaaaaaagaaatctccatataatcagactgtggcctgtgtcagctataatcacatagacagatcaagatttgccaagattgcagaaagaagaccaaacacttgccaaaggtttctctttaccctctttcagattctaacatccaaatgcacagatttcaaaaaaactacatggccctgtaggaaaaacaagttaaaatattgcaacaaaaatctttagaatttccgttttctagtggttggcactatcagtaaaatttgttgcttttgwttgtccctttgtttattaaattagaaacaaaacagttgaaaatatttattgaatgttactagagaaactttataactatagtaaagcaagggatcagtgatccgattctagagcagagactgatgaccacaggagtgagagagatatctgtaatacagggcactgttgccttaatcttataaaagttaatagtacaactagg

SEQ ID NO: 772464 - DNA, 425 bp, Homo sapiens
tcccaaattcattcaacaaacataccaaaaatcattattgagcatattctatgtgtcaagcacccttcaaggtacaggtaggtattggaggcacagtgatgagcaaggtaaagaaggcctccatccctaaggagcttgctctgcttaaattggaagacaggatgtgctatacagaatggcaaagagctggacaacatgaagatcgagatgccctgtaaaactcagattgtataatcaatgtctccataggtttgtgctgccgtttawagtgctgtctttgttattaagatcatccagattgtgtattgggtacagtaactttcatgagtaaaagaagactgacaatggttaacttagttaatcaaaatagcaaatacttaagaagggcttactatgtggcagacactatacacatgttaacttat

SEQ ID NO: 772465 - DNA, 641 bp, Homo sapiens
actcttgagggctacaccaaatggaagtgggaacaaggctgtgaggagttgtaattcaagagcttactactcacagtgtgttctgaggaacagaagaggggatttttgttagaacgttgattctcaagccctaccccagatctactgaatcaaatctgtgktttttttttctgtcttttacaagatatactggaaatgcctatgcaccttgacacttgaaaaccactagtttaggaggcaattgtatcagcaggtaaccacattgcagatggtcattaaagtcaaagaaatcaagaagtactatcaggtatattgtaagattgaacttgcccaagtaaagtgagggtgctccttctagcatgtggcatattaaaatcacctagagaccttcgtaaaatgccaaggcattagtaattttaaagtgattccaatatataaccaaggttgagaacttatcaggagcatcacattagtcatgccgttcctctcagatgtgaacagtagcccctacttatcaaaacaaacaacgaagcaaatgtccgtggatctgacttgagaggctgaagcatctcctccccaggatataattactcttcagcctcacagtggtttttctagccttgctctttacacaatagccc

SEQ ID NO: 772466 - DNA, 612 bp, Homo sapiens
catcacagcctatggttattaaactaaattctgtgtaagactcatctagggcatttgtcaaagatataagatgtgaccccaggagagtctgattgtctggattggcttccaaggatctatgcttttgacaagcattctgttcttctgctcccaaagtaaatctgaagyactttgtttctcagattctttcacaatctgagaaactctggcagaaagccatccttttcttctaaatccccatcactccccttgggcccccttgctggagggctggcttgcctttgaggggctggggcgtgtacctcatttggaatccaccagccttgaggctgcctgactggccctgcaggatccactctgtctgagaaacccactcccttggtaacagactgccatttctgcatcccctttaatgacatgctttttgcctctttccacactgcttcccatttctttatctgttcctttctacttcatggtctttctttctccgctctttcctgtgaaatttctttccatgtaatctacccaatatattgtagtctcatgtccttcagaatcctggaatatgagcttcttccaccccactctgcccttcctggaaaggatgaa

SEQ ID NO: 772467 - DNA, 545 bp, Homo sapiens
gtcaattagaatgatgattattaaaaagtcaggaaacaacagatgctggcaaggatgtggagaaataggaacgcttttatactggtgatgggagtgtaaattagtttaaccattgtggaagacattgtgatgattcctcaaagatctagataccatttgacccagcaatcccattactgggtatataaccaaaggatyataaatcattctattataaagacacatgcacaggtatgtttattgcagtactatttacaataggaaagacttggaaccaacccaaatgcccatcaataatagattggataaaaaaaattggcacatatacaccatagaatactatgcagccataaaaaagaatgagttcatgtcctttgcagggacatagaggaagctggaagccatcattctcagcaaactaacacaggaacagaaaatcaaactccacatgttctcactcataaatgcgagttgaacaatgagaacacatgggcacagggaggggagcatcacacactggggcctgttggagggtgagggacaag

SEQ ID NO: 772468 - DNA, 618 bp, Homo sapiens
tggccctgtggtcatcactcacatttttcttgcgctcctgacctgtgctttgtcaatcagaaatggttgtatcttcgtcttattctttagaatctgacttttgtgcttgtctttctttttctttcattctatttgttgctgttgttgttgttgtttgagacagagtttcatgatctcggctcagctaagttttgtattttttgtagaggcagggtttcaccatgtggccaaggctgaacttgaatttctgggctcaagtaatccgcctgctttggcctcccaaagtgctgggatgggtcacccgaccaactttggtccttttttgttatagccatacaaagaataagaaagcatttccactggcttctttcatactgactggatagaactagctaggatgttctcctaattttgttgctaagttgtctcgggttattagagtgggtacttgtcttcccaaaacaagatcttttkttctctgtatacatttagattgtttcattcctctttgaagagtaagatgaattattagggctaatgatgggatttaagctcttcagaaaatatgatagagagtaccacacatatagggaagtaaagggctaaagtcattatctt

SEQ ID NO: 772469 - DNA, 608 bp, Homo sapiens
tcagggcaatgtggatggtaatcaccaaggaagtgacacctactgtaatctgcgccaatagctgggcggtttatcaaagcttgtatatgtaatgggcctgcatgcccagaagcttatgtatgtatcaggcctgtgtgcccaaagcttatgtgtyaggcttatgtgtcaagcctatacgtatgtactgggcctgtgtgtgcaaagcttatatgcataacctgtgtgtccaaaaccaatgtctctctcggcctagggggtggagtgtaaggtacatagatgtgctttggtcaaggataggccaaggcagatatccaggccttcatgactcagatagtttggcgcacaggtgcacacctctctttgttatataacctgtttgtataagttcatacttggctctgaaccactattgtctgtaaaaggtataattgcactgctaacactgtacaggggctcttggggctcagattggctcagcatggctcttgtgcaagctctggtgtccagagaaagagagagagccaaagctgtccatcttgcagacaaaggagagccacagcatggcccgcactggtgcccagggagggaaagagttaagcggctgaccc

SEQ ID NO: 772470 - DNA, 486 bp, Homo sapiens
tgcaggggtgaaagaagaaaaaataactgagaggttcaagaaccctcaggaatgaaccaagatatataagaatacctatgagaatatctatatctatgagaatatctatgagactattggagcttcaattcagacttaattctgagcaggaagggaagaagaatgaaaccacatagagtagaagggtatgcaggyggagccattgtgacattagaagtctggtgcagtcacaaaagttcatttataaactctcgtgcagaatgagggtcaagccatctcagatgttaagtaggaattcagaaactggaaggccaggcaaggcacaattgaatgggctggaccaaactgaccagaggaggaagcctgcctttaagcaaactctcacatgcccctgtttaccacacagtcactaaacaagccaagtggtccattacttgtcttgtctaggaggtagcctcacaccatagatgtgtgcaaagcttcctc

SEQ ID NO: 772471 - DNA, 563 bp, Homo sapiens
ttcgcatgtcttccaccctgcccgtctccattcctgcttcccctgcttgctgcaggcctttattatctctccccagcacaccaaagacgtctcctcatgggtctcctgttttctgtgcaaccacatcactcatctcttcctgacccaaaattcatgaatttccctgaaatttcatcagctccctgcaactcttgctgtctgtttgcccagaatgcctaccctctccccaactgtccttcattcccatcaacccggtagatatctacacagatttaaagactcagctcaagttgcctccctgagaagccttttctatctcctcraggtgaacctatccctccctgctttgtgcccccataataccccacacgggattctttctccattgtaacacactgttgcatttactttttatgtctttgtttccccccactagactaggaactccttgagggaaaacaaaatctctatgttctcaatgcctggtgcatagtatatgctcaataaatacttttctgaatgaatccagtaaacaaaatacttccctgtctttggcctttgtg

SEQ ID NO: 772472 - DNA, 557 bp, Homo sapiens
gccagaaaagaacacataatctgtgtcctctgtattatttcactaaattctcttggcaatcctagtgaaacagattctgtgtccatcctcattttatggatgaagaaactgaagctcaggcaggttaattattgtcttagtccatttagcattgctataaaggaatacctgaggctgggtaatttctaaagaaaagaggccaatttggcttatgggtctttggctttacaagaagcatggcactggcatctgcatcaggtgagggcctcaggctgcttctactaatggtggaaagtgaaggggagccagcgtgtgtggagatcacatggcgagagaggaagyaaggtgtggaggcggtgccaggctctttttaacaatcagttctcccggtaatgaacagaggaagaacttacccttgagcgaaggcactaatttattgatgagggacccacccccatgacccacatacctcccactgggcccgaccttcaacattagggatcaaatttcaatatgggatttgaaggagacaaacatccaaactaaagcaagtttat

SEQ ID NO: 772473 - DNA, 560 bp, Homo sapiens
acatttggaaaattctcagcctggccatgtggtagagaatgaaagagcattttcaggagatgaatccaagggcgtggccaagccacttcttgctaaaaagattaacatggctaaaaaggagccaggtgctcttcctcaagaaaatggaagaaagtccctgaactcatttcagaggtctttgaggctgcccctcccatcacaggcccagaggccttggaggacagagggtttcagggkacaggccctgggtgctctccatgggctcaccgcccagggcaacctcaggactctgcaccccacaccccagtgtagcactctgtggccaccccagcctggtggtggcttaagtggccccaggtgttccttgtgtgtgtgtgtgtgtgtgtgtgtgtgtgtgtgtgtgtgttgcttgtattgaagctccagaaggtgcaaatcatagacctttgctgcatccttgtggtgctaattctgcagtcttgcagaaagtaagagctgtgaaggcttggcagtctccacatggatttcaaaggatgttgttgaaagcctaggggcccagg

SEQ ID NO: 772474 - DNA, 560 bp, Homo sapiens
acatttggaaaattctcagcctggccatgtggtagagaatgaaagagcattttcaggagatgaatccaagggcgtggccaagccacttcttgctaaaaagattaacatggctaaaaaggagccaggtgctcttcctcaagaaaatggaagaaagtccctgaactcatttcagaggtctttgaggctgcccctcccatcacaggcccagaggccttggaggacagagggtttcagggtacaggccctgggtgctctccatgggctcaccgcccagggcaacctcaggactctgcaccccacaccccagtgtagcactctgtggccaccccagcctggtggtggcttaagtggccccaggtgttscttgtgtgtgtgtgtgtgtgtgtgtgtgtgtgtgtgtgtgtgttgcttgtattgaagctccagaaggtgcaaatcatagacctttgctgcatccttgtggtgctaattctgcagtcttgcagaaagtaagagctgtgaaggcttggcagtctccacatggatttcaaaggatgttgttgaaagcctaggggcccagg

SEQ ID NO: 772475 - DNA, 595 bp, Homo sapiens
tcgttcccaccattatatcttggaagtagataacttgctccataacttggaagtagataactagctcacagatgagactttgatgctgcaatgagtgaagactttgggattatgggagtggaatgaatgtatttgtatgtgagaagcacatgagttttgggggcccagggacagaatgctatggtttgcatgtctcctctaaaaattcatatggaaacttttagttctcaacatgacggtattgagagctggggcttttaagagatgattgggggctgggcatggtggctcatrcctgtaatcccagcactttgggaggccaaagtgggcggatcacgaggtcaagagattgagaccatcctggctaacacggtgaaaccccgtgtctctactaaaaatacaaaattagccaggtgtggtggcgggtgcctgtagtcccagctacttgggaggctgaggtaggagaatggtgtgaacccgggaggcggagcttgcagtgagctgagattgcaccactgcgctccagcctgggagacagagcgagattctgtctcagaaaaaaaaaaagatgattggattggatcccgagggttct

SEQ ID NO: 772476 - DNA, 595 bp, Homo sapiens
tcgttcccaccattatatcttggaagtagataacttgctccataacttggaagtagataactagctcacagatgagactttgatgctgcaatgagtgaagactttgggattatgggagtggaatgaatgtatttgtatgtgagaagcacatgagttttgggggcccagggacagaatgctatggtttgcatgtctcctctaaaaattcatatggaaacttttagttctcaacatgacggtattgagagctggggcttttaagagatgattgggggctgggcatggtggctcatacctgtaatcccagcactttgggaggccaargtgggcggatcacgaggtcaagagattgagaccatcctggctaacacggtgaaaccccgtgtctctactaaaaatacaaaattagccaggtgtggtggcgggtgcctgtagtcccagctacttgggaggctgaggtaggagaatggtgtgaacccgggaggcggagcttgcagtgagctgagattgcaccactgcgctccagcctgggagacagagcgagattctgtctcagaaaaaaaaaaagatgattggattggatcccgagggttct

SEQ ID NO: 772477 - DNA, 590 bp, Homo sapiens
agatacccttgctgggggagggtgggctggcccgttagttctaactcagtcttctcagtgccacctccagcccctgtggtctttacgggacccaactcttatccatcttccttggtgatggaggcatgtcgccagcattaagatctccagcacagatgcacgccccggcctcttgatattattagtggcttcctggtttctccctgcmgcctccacacctcaggcaggaagtgacttcagagcagcaggatgcaggtggctccggagaaacttcatgaagtcactggttcctacacaatgagcaggaaggcaagggcagggaaggggacaacgaggaccatttaaaatgtctggtgggaagggacagtggaatggtacagaatccaagatgttatccaggaggaagagctctcttcctcgctccccgagtcccccaaggcaagaacccaggacacagcaggcagcacagagaggcttctttattccaaggatctgatgttgcaagatctaacatttctacccccaggcattctccacctgcccatccaatctgctaaatagaaatcatgattccttcttatagactcctc

SEQ ID NO: 772478 - DNA, 610 bp, Homo sapiens
ctcgaactcccgacctcaggtgatccgcccacctcggcctcccaaagtgctgggattacaggcctgagccaccacgcccggctggaattcactttcgaaactgatcatttaggttttccttttaagtttctttagccatgagctatacccaaataaaaatacccatcctcctttaactaggagtttccttcctatttgctcatttcagctcatccacttttcttgctcaaaagccttaaaaaaaatttattttttttttgagatggagtctcatactgttgccgggcctagagtgcaatggtgcgattttggctcactgcaacctccgcctcccaggttcaagcgattctcccrcctcagcctcccaagtagctgggattacaagcacccgccaccatgcccagctaatttttcatatttttagcaaagatggggtttcactatgttggccaggctagtcttgaactcctgacctcatgatccacctgccttggcctcccaaagagctgggagtacaggcgtgagccaccgtgcccagccaaaaaaaatttttttttaaggagacggagtcttactatattggccaggctggtcttgaactcctgtcctc

SEQ ID NO: 772479 - DNA, 644 bp, Homo sapiens
agcaagttggctttggctatgggccatcagtttctccccttagcttcccgtagtgtcagggaaatactaccaggcacagaggagccacctcatctttttggattgttgggtcactgtacttctccatgagttgcaaaccctctctgcaattaatctgtaggaccagcttgaccaatggagttgtaatgtttggaatcaactcagtgtgggtgaggtgttcactctgcaaagtttcgtcattttcctaaaccagctccacccagtgttaataacatcttccccaactgaatcatcaaatccttgttacacaggccgtctttcccccagcggtgtctgttgggatgggtgaagtaggctgagttcgtggtcttgctgacattttatccaataaacrcaccttctttattgcagcatagtaataataataatgacagctaacatttattgaatacttaactatgtttaaaactcaacacttctactttctagctgtgtggccttgagcaagtcacttcctgtgtcagtttcctgtggctgcttgatgatttaaaacaatcaaaatgtattctctcacagttctaaaagccagaagtccaaaattagtatcactagggcaaaatcaaggtgttggctagaacacactc

SEQ ID NO: 772480 - DNA, 612 bp, Homo sapiens
ccttactcctcttccaagaagccttcccagctgctcaagtctacaatgatttccctcttatctgactaccaggcaggattaacgtgacttacagcacctggcaccaatgtgcatccatgtgtatgtgggcgtgggtgtgtgtaaccatgacactctctcataaaaaamaaaacaaaacaaaacaaaaaaaaacagcaactagcagtgagctggcatgcagtaggtccctaactgaaatatatgagtagaaggcagttgaagatggtgatttgtatgtgttgtgttcagacaatgtaggaaatcagtcctttgacagcaaaagaagaaaagaaaaaaaataagacgaatcttcatggtttgcataaaagtgtaactattacaggtggcccaattcccagttactttgttcctgacaccagagacctgtttttcaatcaaaattgcagcagctgtggagctgtaaggctgggctggcacctgggtcagaggttccccattagtgctggcagatttttcataatcaagacacttctgaaatgctgaaccctacgcagtgccaaaggttaacgattcagtgtgcagggactgaagcgcaaagcagggcatcagaca

SEQ ID NO: 772481 - DNA, 638 bp, Homo sapiens
gaaatcatcaagtgaccacaaggtaatacataaataatgctagacataaaagaagtatgaaaagctataggagctcataggatgagcacatcactcctgtagggactcaatgaaggtgcactttgatagggcattgaaggataagcaggatataaacagagacaatgaagggcattccaggaagaggttatggttgagagaaaatatgcttgagccatggttgggaaagatacaatcagaatctcagatttattgagcaacaaccctgttgtttctgattttctattaaaagtccctgaaaaccctacaggcttctcttttcttattaccattgacaaggagccattgtaaacctacctatcttccagaccccagtgatgtacacatctcaggttctatatacctccatcttcgtgttcttctgccccaaaatggctttacagaacaatcatatgttttcaggtatattttggtgacacatgagtctcaagtaccccaaygatgtaggcctcccatcccatcccagaggccacctgatccctataggaaagggatacctagggcatttctccacattttttctattactcccgttcattagaatcctacacgtcctatgtgttacctgctcctttaag

SEQ ID NO: 772482 - DNA, 656 bp, Homo sapiens
gtaaagaggctgggaagttgtgaaatggtatatgaataagaaaattagtagtagtgctacccagatgcacagtggctgctattttctgttgttatcacactactgcagagcatgctactggaaaacccagcagatcccactggcactcaaaacaaaagggttgtcttctttgagcacttatagaaggcaagggttgctgaattttcctttggcacgtctaaactagaatgcttttcaccttttactttaccttattaccttttaatgtattattttgaaataattatagactcacgagaaattacaaaaattatacagagatgtcctctatacccaccgctcaatttcccccaatagtgacacgttacataactatagcgcattatgaaaaccagtaaataaagatttaaagatttagaaaatgatactgtaaaatgataaaaacaaaacattttggagtagattaaccaaaaccctgaaaatcataaaagaaaataaatcaagaaatstaactatatacaaatattttaaaattctaaatgaaaaaatataaacagaattacaggacaaattgaaaaatgaaaaactgcaatatatgtaacaaagttctaatttctacaaaatgaaagtaaataaaggcaatttggcaacacatg

SEQ ID NO: 772483 - DNA, 620 bp, Homo sapiens
atctagcacagggtggaacacgtgggaattactcaccatctactgaacacatgtagaaatccatttatccaaagacaatcgctccctttggatttaactatacgtttttctaacggtagtctattctcctttcccagctaacctgcaatttcttagaccaatctctttaagctcttcagcctttttctctaaaccaatacactgagcacaccatataaaaagcaacagagaattaacttgagattatcagactaatgatacagctatcatagtgtggaatgctttgtgaaaagaatattactgccagagaataaatgtgaatacattttctaagatttcaccaggcatctacatctgtgtgcatgtgacaggtttttgtttggtgtttgcctgagctgcttaaggcttttgtccagtggagggacagtactgcctaattgctgcactccatttgtcctacaaygaagaatccgcagcttccttctttattagcttctcccagcaaaacagaaccatgacacagaacttgaactcaatccaattagggaacttttaagttgaaataatagaaagaggctccttgcatacctcctaatacctgttttccagaaatagatctg

SEQ ID NO: 772484 - DNA, 639 bp, Homo sapiens
caatgaatatttattgaaagaacaaattaaaagcctattatgcacaaaaacacagtgcacatagtagtactaccactgtatacactacatgattgtaataacaaagtaataacgggcagtctttgggaacaacaatgtacccatgaacaaacatgagatgagagggcttctctgaaaatagagattaatattccttatttatcatcaccttcacataaaactcaaactactgtggttttgctcatccatcctgtttgctctccctacaacaggctacagccatctcaatttttttggtagttgtcagattttgctgttgttgttcactaaaaaagaccatttgaaactgactcttctatatcttggtttcacagtacctccgtgatcttcaattaattcctgagcaaaattacttcacctggatacagtggctttccarctgttgaagaacatatgtagccattggacccaaaaagaaaattaagtctgtttctcattctgataccatttgacaaaaccctgagtttcctagtttaagatacatttaacagcaaaaccagttgttctcaattgtcatactatatttgtacaaagctattgatttttctttctaggttttttctttggattttttcatca

SEQ ID NO: 772485 - DNA, 603 bp, Homo sapiens
aagtatgtgtgtggatagacatataagcatttaacccaaggtctctttttactacttgactgattccctgatgatgactttaatgttaaacgtgctaattttaaagtcaaacataattagaaacaaagacaaaaataaaagttatcaagtattatcataccaaagggttgaacaatttcagagttggtcattatcctgaatttttcatgtacccatccaggctttaatkggggggaggggggaaagagtttggtttgaatcctgggactcacagctccacttcaaatatagcaagtagacagtatctacaataaagtgcaatataattgtcatatatgcaaacataatctgttaggagaaaggcaacatggtttacatgtagagaaggcatgtctcgccaatcattctgagttatctgagacagtaaataagcagaggatataatttataaactttcagaaagcccttgacaaggttcttcatcaaagacagtttagaaaaatagagttaacatggggctggggagaatgttttctccgggaaagaaaactttgattaaagaggggaaataatgagtcaaaccaacattttccatcagagaag

SEQ ID NO: 772486 - DNA, 633 bp, Homo sapiens
attcagttttaatgaaggttctggagcttctcagtaacagtgaaattgtatttaaatggggcctttagggtgttcaagttacagattaattaacttgatctggtaagggttttgggggcactgtagttcttgaacctctaattttatccttagaggtagccaaagcttctctagacattagcaactaaatarctgcacaggcttagattatgactgaaacatctaaaataatgcaggcttgtcagaagatagaataaaaagaccagttgataagtgcaacaacatgacctctttctagcttacaaatttagctctaccacttcatagctgtaagacattgaggacatgaaggaacggctcaggtctcagtctcctctgcaaaacggggataagaacacctaccttagtgggttgttatgaggattaaatgaaattactcatgtaaagtgctcaacatgatgtctagcatgcagtaagcactcattaagtgagatgttctcactattactattattattattttagagacagggtctcactctgtaacacagtagcatgatcttgactcactgcattcctgggatcaagtgatcctcccacctcagcctcccaagtagctgggactacaggtga

SEQ ID NO: 772487 - DNA, 633 bp, Homo sapiens
attcagttttaatgaaggttctggagcttctcagtaacagtgaaattgtatttaaatggggcctttagggtgttcaagttacagattaattaacttgatctggtaagggttttgggggcactgtagttcttgaacctctaattttatccttagaggtagccaaagcttctctagacattagcaactaaataactgcacaggcttagattatgactgaaacatctaaaataatgcaggcttgtcagaagatagaataaaaagaccagttgataagtgcaacaacatgacctctttctagcttacaaatttagctctaccacttcatagctgtaagacattgaggacatgaaggaacrgctcaggtctcagtctcctctgcaaaacggggataagaacacctaccttagtgggttgttatgaggattaaatgaaattactcatgtaaagtgctcaacatgatgtctagcatgcagtaagcactcattaagtgagatgttctcactattactattattattattttagagacagggtctcactctgtaacacagtagcatgatcttgactcactgcattcctgggatcaagtgatcctcccacctcagcctcccaagtagctgggactacaggtga

SEQ ID NO: 772488 - DNA, 523 bp, Homo sapiens
atgcactgaattgacatgtacagactgaagacatgtaattcattttaactgcaaatgctcttggtatttgtacagacagctcttctctgaatcttttaaaacacattcctgggtgggttttgttttgtttttataaaagtctacatatttatacagccttttaaaattacattttaaatatttgggggaggatttatgkctgggaggatctcagatttcttccagagtgtgaaacagaattcttgtgagattttgtaaaaactattgccgtcagaatatttttgttcaatggtgatatgttctttccaaagaacaattagagatatttcttctatactcttttctgattgccttaaaaatgaacatactgcatatatacattaatatttataatgtgtttattaatccttggtatacatcacttacagtagacatatgattatttcttcattatcttggattttagacttctttcatccatcataatattggattctccttgatggcaataaccctttatttt

SEQ ID NO: 772489 - DNA, 523 bp, Homo sapiens
atgcactgaattgacatgtacagactgaagacatgtaattcattttaactgcaaatgctcttggtatttgtacagacagctcttctctgaatcttttaaaacacattcctgggtgggttttgttttgtttttataaaagtctacatatttatacagccttttaaaattacattttaaatatttgggggaggatttatgtctgggaggatctcagatttcttccagagtgtgaaacagaattcttgtgarattttgtaaaaactattgccgtcagaatatttttgttcaatggtgatatgttctttccaaagaacaattagagatatttcttctatactcttttctgattgccttaaaaatgaacatactgcatatatacattaatatttataatgtgtttattaatccttggtatacatcacttacagtagacatatgattatttcttcattatcttggattttagacttctttcatccatcataatattggattctccttgatggcaataaccctttatttt

SEQ ID NO: 772490 - DNA, 620 bp, Homo sapiens
caagaagtggctgctcccactccagccttcatgtctgcattccagccagcaggaggagaaagaggggcactgctaagaacacttcctggaagttgcacacatgacttccattttcatcccaggggccagagcatggttgaatggccacacccagcagactccaagggaagctaggaaatgtctttattcttggcatttatttctgtaaaagaagaggagtgattatcataggttgagtttcctaggaagcagctctgagacgaagttcagcttgcaaaatgtttattggatcrgtagtgatggaagggagggcagagagagaagtcaggatactatgcaggctccacaggatggtcaggcctttatgttcctacattgatcagtcattaggtacaggccattatgggaagaagggtgactgtgggtgagggagccgttggaagttgaggtgatccctgaagagcctgacagacagaggccttctggccaacagcactaccagcaacatatccttcatggaagggggttctggatggtttttagcctacatcacggggagaatggaagagctagcatctctgctacactacatcatagggtggttgtaaggatcaaataaa

SEQ ID NO: 772491 - DNA, 620 bp, Homo sapiens
caagaagtggctgctcccactccagccttcatgtctgcattccagccagcaggaggagaaagaggggcactgctaagaacacttcctggaagttgcacacatgacttccattttcatcccaggggccagagcatggttgaatggccacacccagcagactccaagggaagctaggaaatgtctttattcttggcatttatttctgtaaaagaagaggagtgattatcataggttgagtttcctaggaagcagctctgagacgaagttcagcttgcaaaatgtttattggatcagtagtgatggaagggagggcagagagagaagtcaggatactatgcaggctccacaggatggtcaggcctttatgttcytacattgatcagtcattaggtacaggccattatgggaagaagggtgactgtgggtgagggagccgttggaagttgaggtgatccctgaagagcctgacagacagaggccttctggccaacagcactaccagcaacatatccttcatggaagggggttctggatggtttttagcctacatcacggggagaatggaagagctagcatctctgctacactacatcatagggtggttgtaaggatcaaataaa

SEQ ID NO: 772492 - DNA, 630 bp, Homo sapiens
gccattcctttatgtacttactttttagttaaaaggattcagcaactgtcagagaatcaaactgactttgcaatgttttggcatcttattgctagaactactgatagatatggtatctcaaggatgacatgcaaggacttttcctagttggtccccactactacttttcttcccaatatgatatgaggaattctgaattggctcttttgtaaagttttcagggtggcaggcaacacagtgacaagaacacttgtaaacagtttatttacattcaatggattatatttaatcattttatagttaatttgcgtaaatctctctctgtggaatgtccacgaaaatgtttttggttggtgacaagcaacrtggtagagatgcagagagtcgtgaggcccggattgtagcccaagatctgttatcctctttctgtgtgatcttgggcaagccattatctcctctgagttggttttctcatctgtgaagaagacagattacaacatctctgaagctttacatcttaaagttctaaaacttttctgtttaatagttaaatatatataaattttctactcaaagttttttttttagaaaataaatgggattttggcttctatataagtaacaattata

SEQ ID NO: 772493 - DNA, 585 bp, Homo sapiens
gctcgtcctgatgccccctaaaggatcctgtctgcctaatgttttttctaggaaaacttatcttaccaatggcccttgcataatgcccctttttcctttcagtggagtaaaggctgggccacctgtaaatggttagtgcactcagggattaactttaatagtaaaaaggtcctaagcattcttaaacaagtgttcarcttacaaaaattgtacgacattacgcttacgtgacaagtgtaatacagttgtttggtttagtaaatgcctaaaggagggtcattggagatgaatttgtagcttcagtaggttctggtaccaagaccagccctcatctgtatgatggcaactgaagactttcaggatattgattaccttaagaaggaatcatttgttaattcactgaccacactaggtcccaccgacccagccttcttgaaactcctttacctcagaattttaccacgccattcttacatagtactatttattcgtgtttttttgtttgtttgtttttctagattggttttgctttaacttggtcttaagcttctggaggatataaaatgagtatagtgagtttgtttt

SEQ ID NO: 772494 - DNA, 585 bp, Homo sapiens
gctcgtcctgatgccccctaaaggatcctgtctgcctaatgttttttctaggaaaacttatcttaccaatggcccttgcataatgcccctttttcctttcagtggagtaaaggctgggccacctgtaaatggttagtgcactcagggattaactttaatagtaaaaaggtcctaagcattcttaaacaagtgttcagcttacaaaaattgtacgacattacgcttaygtgacaagtgtaatacagttgtttggtttagtaaatgcctaaaggagggtcattggagatgaatttgtagcttcagtaggttctggtaccaagaccagccctcatctgtatgatggcaactgaagactttcaggatattgattaccttaagaaggaatcatttgttaattcactgaccacactaggtcccaccgacccagccttcttgaaactcctttacctcagaattttaccacgccattcttacatagtactatttattcgtgtttttttgtttgtttgtttttctagattggttttgctttaacttggtcttaagcttctggaggatataaaatgagtatagtgagtttgtttt

SEQ ID NO: 772495 - DNA, 601 bp, Homo sapiens
gttgaattcagtttactgttattttgtcgaagatgtttgcatctattttcagcaagtaattttcttttcttgcagtgtccttctctggatttgatatcagaataacctttgcctcatgaaattagcttgtgggttcctcatcttcattttttttggaaattttgaaaagaactggctttaattcttcccaaatatttggcaaaaatcacacatgaagccattggttctgcgtttttccttgttgagaagtttttgcatgatgattcactayctttactcattatttgtctatttgtattttctgtttttttcatgattcagtcttagtaggttgtattcttctaggaattaattcctttctttggagttattcaattttttgcatataattgttcatagtaatttcttacaatcctttgtatttctgtgatttcagttctattgtctcatctttcacttatatttatttgagtcttctctcttttttcttggttagtctagctaaagagagatatttgaaatattttctttttcatgctggcatttattacacttcttgtaaggcgtgtttagtggtagttaacaccatcagccttagttt

SEQ ID NO: 772496 - DNA, 651 bp, Homo sapiens
atttcgttcatgccattttaaaatttcatacaatcaataaaaggtgcacatgttctcatgttaataagcgcaggtacagttgatcttagaacaacatgagtttgaactgtgtgtcgccacatatatgtggtatgtagattttttttctgcctctaccacccctggtataccaagaccaaccaacctctttttcctcctcttcagcttactcaacgtgaagataaaatgaagacatttgtgatgactaacttccacttaatgaatagtaaatgtattttctcttccttatakttttcttagtatcctttttatttctcaagcttactttattgtaagaatatagcatataataaatataatatagaacctatatttaatcaattgtttatgttattagtaagacttccagtaaacagcaggctgttagttaaatatttggggagtcaaaagttttatgtgaattttttacactgtagggagtcagcacccctgatcatcttgttgtttaagggtcaactgtatatgttcatattgagaaaaaaatattttcagcgatatgtttgaatagaactatttttatattaaaaatacaataaataataaatccagcactctgatcactacaaaagtcaaaacgtatatccgtataga

SEQ ID NO: 772497 - DNA, 651 bp, Homo sapiens
atttcgttcatgccattttaaaatttcatacaatcaataaaaggtgcacatgttctcatgttaataagcgcaggtacagttgatcttagaacaacatgagtttgaactgtgtgtcgccacatatatgtggtatgtagattttttttctgcctctaccacccctggtataccaagaccaaccaacctctttttcctcctcttcagcttactcaacgtgaagataaaatgaagacatttgtgatgactaacttccacttaatgaatagtaaatgtattttctcttccttatagttttcttagtatcctttttatttctcaagcttactttattgtaagaatatagcatataataaatataatatagaacctatatttaatcaattgtttatgttattagtaagacttccagtaaacagcaggctgttagttaaayatttggggagtcaaaagttttatgtgaattttttacactgtagggagtcagcacccctgatcatcttgttgtttaagggtcaactgtatatgttcatattgagaaaaaaatattttcagcgatatgtttgaatagaactatttttatattaaaaatacaataaataataaatccagcactctgatcactacaaaagtcaaaacgtatatccgtataga

SEQ ID NO: 772498 - DNA, 651 bp, Homo sapiens
atttcgttcatgccattttaaaatttcatacaatcaataaaaggtgcacatgttctcatgttaataagcgcaggtacagttgatcttagaacaacatgagtttgaactgtgtgtcgccacatatatgtggtatgtagattttttttctgcctctaccacccctggtataccaagaccaaccaacctctttttcctcctcttcagcttactcaacgtgaagataaaatgaagacatttgtgatgactaacttccacttaatgaatagtaaatgtattttctcttccttatagttttcttagtatcctttttatttctcaagcttactttattgtaagaatatagcatataataaatataatatagaacctatatttaatcaattgtttatgttattagtaagacttccagtaaacagcaggctgttagttaaatatttggggagtcaaaagttttatrtgaattttttacactgtagggagtcagcacccctgatcatcttgttgtttaagggtcaactgtatatgttcatattgagaaaaaaatattttcagcgatatgtttgaatagaactatttttatattaaaaatacaataaataataaatccagcactctgatcactacaaaagtcaaaacgtatatccgtataga

SEQ ID NO: 772499 - DNA, 559 bp, Homo sapiens
ccattgtgaaaagcagtgtggcaatttctcaaagaacataaaacacaagtaccattcgacccagcaatcccattattgggtatataaccaaaggaatacaaattgttctaccaataaagacatattcatgtgtatgttcatggcagcactagtcacaatagcaaagacatggaatcaacctaaacgctcatccacagtagactggattaaaaaaatgtggtacatctacaacatasagtactacatagccatgaaaaagaatgagatcatgtcctttgcagcaacatggatggagctggaggccattatcttagagtgaactaacacagtaagagaaaagcaaataccacatgttctcacttacaagtgggagctagcactgagtacacatagacacaaaaagggaagaacaaacacccaaacagaggggcccacttgaaggtggagggcaggaagagggagaggattgaaaaaccacctattgggtactatgtttattatctgggtgataaaataatctgtacgccaaatccccatgacatgcaatttacctctgtaa

SEQ ID NO: 772500 - DNA, 585 bp, Homo sapiens
ccaaagcaattcctggtcaaaggtgaaatataattccagggccctcaaatcttgagtcacagtgtatgtcctgcacagttagataaaaatcatgaaaagccacaatttttaaatgaacactcattgtgagtttctaaaatataagaaaaggtaaagtcaaaatacgaatcaaagggagtttggaagtaatttcaaaacaatgtattcagacgtctagaagaatctttgtaagagaataaataaaaaatgcataattattcagtacayagataatcactggcatagattaggagatccacccctgttctcaggcagcttataatccaatgaaaggggagatgtgtccaaaatgataatcagcaggttgtctctttagtagattagaagcattcaaggaggtaagcccccccaccatactgaagtgataaaaaaaaaaactgcaaagaaaaatgtctataaaataatcccttacgatttaggagccatgtttctaaagtagcaaaaaatgcattcagagctacaatccttccataatatcaggaaagaacagtatgagggaagtcatagaaaggtgaaactgcaaaa

SEQ ID NO: 772501 - DNA, 627 bp, Homo sapiens
accgcatgttctcacttataagtaggatgaaatcataagaacttaatgaacacaaagaagcaaacaacaaacactggggtctacttgaggggagagggtgggagaagggagagcagcagaaaaaataattattgggtactgggcttaacacctgggtgatgaaataatatgtatgacaagcccccatgacacgtttacctatgtaacaaaccttcacrtgtacctccaaacctaaaatgaaagttaaaaaaaacagacaaaaagaataggtggcttatattttttcaacatgtggcatatgaaaataaaacatttgcaatcctatttcacatgcacattaattatgtaaaattagaagcactaagggtaggtcattaagtgctgattagacaataatattatgtgttctcgcagcattggtagtaaggaactacgtttacttccaaagggcggaaagatcattaaaattttaatttgtttctcaacagttcaattataaaatgcttaatgtgatggactttaaccttatgggacttaacacaattatgggactgttccagtataccttgctctcttgtgtttattttctcaaaagattaggcacttgtaactgttttaagatcattc

SEQ ID NO: 772502 - DNA, 516 bp, Homo sapiens
tcatttagaaaagtgttctatttcccttcttgttctcccactctctccacccctgcctttccagaaacaaggacaggaacctacttttctttaataactattgtgtgctagatacttcataagaataactcatgtattccttgcagcaaaccatacaagatgtttttggttttataaaacaaatgtttggttgtttgctcaggaccatatattagtagtttaaacccagggatgtctgaggccaatgcttatactcagttycgtatttgttttcctccctagagcaggacttacccttttgaggaacagttatatagtcccattaattggactggtttgtttcccaaccttgtctagctaaattcccaataatgcttctcatggagcattgaaattcactggtaacgattaagttgccattctttattactgaggaggtattttcctgtttcccttataagaaataagttagctcactccaaaatctagttcttatttgttctgaaaatagttttc

SEQ ID NO: 772503 - DNA, 608 bp, Homo sapiens
aatgtctctccctagaagaatctactaaaaagggtgaggaattagttgagtgatgatgtggtttcaacatttttaccatgcctaaatgacacttgaaataacagagtagaaaggaagagaccatgagcatggaaagaaaagagagaattatggatacagggtgtttgggcacgtgagattttacattacaggaaagaaagtagcgtatatggatttagatcaagataggttagtatatttkctgatgggagcaagtggaatttaaggaaactatgacagatcatagcaggaaatgacctcatatgaaggagagttaacatacattagagaataataacctacccagagatttaatataatacaattattttaaggcaataattggtggacaacaccaattctgataacaggtaattataggaaaaacatatatatgacagaatccacactgaatcatcaaagacagagactcttaatgagtgaaagagacagcagttacatcaaaaacattaaataaataagttagaacatatttctcatcaagaacagtaggaactcaacctgttgaataaaattaagtagcaactggctgagcacggtggctcacg

SEQ ID NO: 772504 - DNA, 608 bp, Homo sapiens
aatgtctctccctagaagaatctactaaaaagggtgaggaattagttgagtgatgatgtggtttcaacatttttaccatgcctaaatgacacttgaaataacagagtagaaaggaagagaccatgagcatggaaagaaaagagagaattatggatacagggtgtttgggcacgtgagattttacattacaggaaagaaagtagcgtatatggatttagatcaagataggttagtatatttgctgatgggagcaagtggaatttaaggaaactatgacagatcatagcaggaaatgacctcatatgaaggagagttaacatacattagagaataataacctacccagagatttaatataatacaattattttaaggcaataattggtggacaacaccaattctgataacaggtaattataggaaaaacatatataygacagaatccacactgaatcatcaaagacagagactcttaatgagtgaaagagacagcagttacatcaaaaacattaaataaataagttagaacatatttctcatcaagaacagtaggaactcaacctgttgaataaaattaagtagcaactggctgagcacggtggctcacg

SEQ ID NO: 772505 - DNA, 579 bp, Homo sapiens
cattaattggatcatttcatatttgtagttatgtagtctggtcaaaaataagagaacctataaaataaatgtctaaagtactcttattttctagcccataaaatttttataagtattgaattagagtttgatttatattcagattgtaaaagcaaaatmatctctttcattatggttggttctccatttgtttgaattgaagcttgcccttttaaggaatctgtaatatttttaaaaaatcaatttcttaagtcgtgattttttcttatagttatgacttagagcagcctcaactttattaatacctcttatggggcatactttgtgatagacttctgataattttggtattcagtctcatttatttttgtcttggaaaatgtctcctaagtcaatcacaacgactacctactccagagttattgctccatttcattacctctgctacaccttaaaattgggatctaaaagggaaataacgaaaataaatcaaatatgatttctctgtcattgtgttagcagataaactagaatcatctcagaaatactcaactgttcttcaaagaaaaatgggaataa

SEQ ID NO: 772506 - DNA, 581 bp, Homo sapiens
tgctttctccaaagaatataggaaatatctttgcttgcctcttccaatttctggtagcttcaaacaatttttggcttgagatgacatagcttcaatctctgcctccattttacatgaactttcttcttccttctctctctgtcgtctctgtttcatttgtttttctcatccttcttatcaatggatgtcttctytgtttttaaggaaacttgtgttttgattaaaggcccacctggataatttagtataatttcaagttactttacttaattgcatctacaaagactcttcccaaataaagtcatattcacaggttctaggtggaatctagaatatatttcgggggccacaattcaaccctttacaagtatcaagctaaatacattttactttgacatggttccatcatgtttagatattttattcaaattgatacagctatagtgctaattttagttttatgtaactctctctctttttttccttctttagagagaaggactccttctgtcacccaggctgaggtgcaatggcctgatcacagttcactgcagccttgaattcttagactcaagctactc

SEQ ID NO: 772507 - DNA, 606 bp, Homo sapiens
ctactctctcctactaagtttgtcatgggacttaaggagaaactataacctgttcctatatcttataacacccagtgacaccttttccctccctctttataacctatttctcaccactcctaccttcacactctataattcagttcttcatatactatctcatctcataccttttgtattggccctttgatctacctttgactgtcttctttcttcttttcacctaacacctacacgtcattcttgttgtgcaggacccaggaagcctttccctgggtccacccttatgtatatacatatacatacacacaaagacacatctacagtataagatgaggagaattgtatccgatattgttccaggtcaatcttccatcatcgcgwgtatcacaattcctaaaattgtttgtaagttttctattgtctttgttaaaccaaaagctctgtgagatttgaactatgcctgctttgtttgccatgtaactttgagctcctagtacattgaaaaaactgagccttaatacattaaaagggtttatttcaacggaataataatgtgtgatatccaaccattaacagtatatgatacatcagcaaaatgccgct

SEQ ID NO: 772508 - DNA, 596 bp, Homo sapiens
atgcaaataaatgtacagtgacacctggtgataagtactgtgagggccaagggcagagggctcaagagcacagagcaggagggtcagggaggcctgggagaaagtcacccttccacacacgggagccagcagcacgcagacacggccgcttccctctaggactgcacagcctggcaggaaagccagacgcattccaggatcttagagcatgggttgttgagggccagtctagggaccctggggctgggagccaccaccctggccaggcaacaggaagtgctttcaaagctgatactggagctaagtggggtggggtgtgggggaatattcaaagcgggagaagcacaggacaactgtggaagtgacggaggttcagtgccggagacctcggggtgacggctcacagcgcccagcccagtgtgtgyctggggctgggggtccatagggctaggcagctctggggggcacagaaccccagtggctgcactggagcccccatcctactgcggccacagtcctgtcctctcccagccctgccctgaaagtcacgccccatgcagagctgtttagggcccccctgctccttgcaccccagc

SEQ ID NO: 772509 - DNA, 597 bp, Homo sapiens; identical to SEQ ID NO: 760731

SEQ ID NO: 772510 - DNA, 646 bp, Homo sapiens
cagaaggaaaaaaatataggcaaaagggaagaaagtggggacagagccaagtataagagataaaccctgctttaatgctaaccccagttaacttggccaacagctcaaatcaaaatgtacaaagtagttttgtaagctaagctcaaactggcccttcactggccaatggacactgttgcatgagggtaacccaggcttttacactgactacagttgtttaggggaaactggaagggagggctgtatctcaggaaatgtaggggaaaaggccaaatctacaatggtctctgcaaacaaaaagcagggttaatgggtcaaatccataatgtgtctgtgtgtatactcaacatgaaaactggacatcaaagacctaattttagatgaagagtctaaaattttggttaagcccacagagtgaaaaaggtccagcatttagagagtccctaaggccattgtaggcccagagtgctttgtggaagatgtcagtmgggagcggaagagcaaattcagttgatttcttagacggaaataacagaaaagtgacaaagatccagaagtaggtttattagggtttaccttgaatcttatgacattcagggacccctcacctgcacagaccccttctaaagatacgggaggaagccta

SEQ ID NO: 772511 - DNA, 589 bp, Homo sapiens
ggagtccaaacacatatggacaaaatggtaaagaatgaaatctgatccattttaccggaattctttttgtaaaacatgaatttcattatattgaaatgggcagcaaggaaaaatacgtaacagactgtgagaaaacgtttgcttatctgttttcaaagtgtttaatgtgttatggttgagaaaaaagagtcttaaaaagttgttgtcagcagyaactcatttgactgacagattccttagcaaaagctaaaggagtgagtaaccctggaagcaattcatgcatgcatgcagcatcagttttaagggagccctgggtaaatttcacccgatgaacttcttctagtggtaaacaacttcaccattgtatagtaaaagaaacactaagggaaccttgaaactactgaggcatcaaaggaagctgagcggacaagagtggaagcttgaaatttatcctgtgtaagccaccctttgcttcagaatccagctcaacttcccctgagatagactctagacaatatgtaaaacaaaggccattcttacctttagaggcagtgaaaaagcaacgagaggaaataaaaaacaaagagag

SEQ ID NO: 772512 - DNA, 635 bp, Homo sapiens
tgccaaaattagtaaaataaataaataataaagatcagagcataaataaataaaattgtgactataaaaaatatgaaaggctgggtggggtggctaatgcctgtaatcccagcactttgggaggccaaggcaggcagatcacttaagatcagaagttcaagaccagcctggacaacatgatgaaaccctgtctctactaaaaatacaaaactagccaggcatggtggcgtgtgcctgtaatcccagctacttgggtggctgaggtaggagaactgcttgaacctgggcrgcagaggctgcagtgagctgagatcgtgccactgcactccagcctgggcaacagagtgaggctctgttgcaaaaaaaaaaagaagaatacaaaagatcaacaaacagaaagttggcttttgaaaggataaacaaaatcaataaacatttagctagtataaatacaaataaaagatagaagacccaaataaataaaatcagaaatggaaaaagaaacattataactgatactacagaaatacaaaggatcattaaaaccattatgaacaatgatatgttaacaaattagaaaacctagaagaaatcggtaaattcctagacacacacaacctaccaagatagaatca

SEQ ID NO: 772513 - DNA, 635 bp, Homo sapiens
tgccaaaattagtaaaataaataaataataaagatcagagcataaataaataaaattgtgactataaaaaatatgaaaggctgggtggggtggctaatgcctgtaatcccagcactttgggaggccaaggcaggcagatcacttaagatcagaagttcaagaccagcctggacaacatgatgaaaccctgtctctactaaaaatacaaaactagccaggcatggtggcgtgtgcctgtaatcccagctacttgggtggctgaggtaggagaactgcttgaacctgggcagcagaggctgcagtgagctgagatcrtgccactgcactccagcctgggcaacagagtgaggctctgttgcaaaaaaaaaaagaagaatacaaaagatcaacaaacagaaagttggcttttgaaaggataaacaaaatcaataaacatttagctagtataaatacaaataaaagatagaagacccaaataaataaaatcagaaatggaaaaagaaacattataactgatactacagaaatacaaaggatcattaaaaccattatgaacaatgatatgttaacaaattagaaaacctagaagaaatcggtaaattcctagacacacacaacctaccaagatagaatca

SEQ ID NO: 772514 - DNA, 492 bp, Homo sapiens
attattcaatgatatattttaaataaatcaccagactgaccaacaagaagaaaccccatctctacaaaaaatacaaaattagctgggtgtggtgacgcatgtctgtaatctcagctactcaggaggctgaggcaggagaatcgcttgaagccgggaggcgtaggttgcagtgagccgagttcgcaccattgcactccagcctgggcaacaagagcaaaattctgtctcaaaaaataaaaaataaataaaatacataaataaaaaataaaataataaacttttgtagctttgtatttttctaaacagatgtggaggcttttaaacaaacatattcaaattctatttcaactgcagrttcaaaatttgtacacatacatgtatatataattcaaaagattttcagactatttattaactaatgattttaaaaatacaatttgagtaaacaagccctaatgttaaattttgttttgttgatctcaactattagtt

SEQ ID NO: 772515 - DNA, 628 bp, Homo sapiens
cctatgatggctcaagtttgcaaattcctcatcacaatttcagactaaggaaagtcagttgtaatggaattcctttcctgatgaaaatggcaataatttgcaagactgagcctcccgtcgttcaggttgttgctgctgttttcaatgcctaatgaatcactgtgcaacatctcattrcatctgaatttatgcaaattgacaattaaacaagggggttattttagtcaaatcagtcagatattgtatccatttcaaataataatgtaagcataattgacagtgcataattaatgattagctaaggctgctaataattaaatgataagaagctatgagaggagggaggctccagtatcttgggctgtaagccagaaacagaaaaatatatttgcctcgtttcctcacatcactggaacccttttctagttgcactcatagcgatgtccgcatctcaggaggttgggcatttgcttatagttttctagaaactttcctgaggaagttaagtaaataaatactttggtttcatagaatccttactgggtttaatcctggatttttctgtttttgaatcctggctctaacactaaccaactatatgaccttgggaatgctatgtaacctcact

SEQ ID NO: 772516 - DNA, 613 bp, Homo sapiens
ttcagttaggtttccttgaatcttcaactttctgattgattttaaaacatattgttttatagcttatgtggtttttctttattgtttttaggttgagaactatggtgtttaacaactttttaagtcttaaataaggagtagatttattgttatttgctgttattttggattcagtctccacaaatttgtgctttgtagattttatccgaaattctattatcaaacagaagttggagattttttttcakccttctgtatccaaagacaaagtataagaattttaggccaaaatatctgtactgaagacagttcaaggtggattaatcactaaaacattttgaattgcagtacttttttcattgaaagagaatactaattagtactatttaataagaccagcttcggcaaacaaactgtcctatgaatcatagagtagaagtgaaaatgaagtagagttcatgaaagctctttataaattgtaagttagtatgcacctgttgatttttataaccattaataaatggtaacatttcgaaccagtaatttttctaagattgcattcaagatcattccaatttgtagcaaaatcatgcactcacaactgccatcagct

SEQ ID NO: 772517 - DNA, 575 bp, Homo sapiens
taaaaaaggctggctactcttcactcagagctgtaacacttaggtgaaaatgaataataagcctagaacaaaaaataagctattccacactcttctgacgcattgataactacctctttttttgtttttttgaactttgttttcctttttttgtctggttgttagtgtatgtatctggcagaatcaagaattaaggcttatatccattggataagctttaaaaaaatgtttggcaatgaattttctaatgataaaatgtccttgaactctcatttcaggtgcccaggaagtcctggaactgagtcctggggcaaggttctggaagktgggacaagaaggtaagagtgtgttgagactgctgtgttaataatgaggagtgtggttgagatatttgtgaagtatcaatgtccaaaaccaaagaggggaacagcaaagagagtcattgcaaatttgcacaaatgtccaagttgctgagcaaaaggtagaagccaatttaaagctaagatactctggctggagcctgcaggaagacatacatgccttatgtataaattgccatctaaactgagagagcc

SEQ ID NO: 772518 - DNA, 601 bp, Homo sapiens
tttcccttcagtgtttccacaaactttttactgatttttattacataagtggtatttgtatcatagtattttcaatgtttacattatacacaggatttagagttccttaaagatgggcagttttaaaaatctcctgtatgggtttcattacctggagctyggaagatgctccgtaattatttactaaatgaatatattttgtcaagcaaagaacactggccataaaaatattaccccagagtttttaatgagtggcatatcttcctgcaatatttggagtgagattagatttctcaccccaatatgatatatgtgatctagatatagaatatcatatataaattagccaaacaacaaacaaactttcaagtttttctctcctttttggacagagaactgcctaaaacaatcaaattgtctccatcattttaacaatgaaagaataactgatttgtaagtttaaaagggcagttttctttaaaaggtgaatttaatgctcatctattgaatgtaaggctctcaacttttgaaattagatctagccctatactatattttgaactagttattttatgtttattattctttctgacccattgac

SEQ ID NO: 772519 - DNA, 601 bp, Homo sapiens
tttcccttcagtgtttccacaaactttttactgatttttattacataagtggtatttgtatcatagtattttcaatgtttacattatacacaggatttagagttccttaaagatgggcagttttaaaaatctcctgtatgggtttcattacctggagcttggaagatgctccgtaattatttactaaatgaatatattttgtcaagcaaagaacactggccataaaaatattaccccagagtttttaatgagtggcatatcttcctgcaatatttggagtgagrttagatttctcaccccaatatgatatatgtgatctagatatagaatatcatatataaattagccaaacaacaaacaaactttcaagtttttctctcctttttggacagagaactgcctaaaacaatcaaattgtctccatcattttaacaatgaaagaataactgatttgtaagtttaaaagggcagttttctttaaaaggtgaatttaatgctcatctattgaatgtaaggctctcaacttttgaaattagatctagccctatactatattttgaactagttattttatgtttattattctttctgacccattgac

SEQ ID NO: 772520 - DNA, 642 bp, Homo sapiens
acatttgttctcatttgttcaactaatgttcattgtgggtactggtctatagaccacgctgtataggaaaatacttctacaaggtcccctctccttgaattgcctttagaaacaccgaattttagaagaatatgttacataatattattagaaattattttttaaggacctgaaacccattatatatgactttatagaaagacatgctgataattgcagtrccagtgtagtgaggaataccaggaggtgttataccattgaacagggtgtgtgttttctttctgccaagtaaccagtaattattataatggaaatgcctttcatcataatatgcttccaatttgttttaaacatctttctcacaacaatcctgtgaggctgacatgatttttcttactttataagaaaacagatacagaagtcaagtgaatttccaagatcacagatctcataattggcagcagtagtgccagaactcaggttttctgccatctgttctcctccaggttgatgtaatcgttatcactttgttatgaaatttgaattgaggagacagtgaagccaattaacagaagagagaggctgcgaaaagggatttctttatgacgttttggtgtattcttgctgcatataaggggggcc

SEQ ID NO: 772521 - DNA, 616 bp, Homo sapiens
aatgagggaacttacatcctggaggagtggctgtttagtatcttccaagctgctgagttccctgatggctgggaccattcctcttcgtctttgcactgtcagcctgtctttgtactagtgaagcccagcgaacggtcttcatccgcacctttgtgaactctgctcacaaactctgcctggaaacgtattcaggccatgagcacccttagatwttttagcatctgttgtgaacctcttcttcaatgtggttcttttgactctcctgaagaagaaatagttggcctccatcttccacgtggtactttcatatcccaaagaggataattaaataatgtctttatcttcttttctgaaatgaaaattatctataattctgtgggaattgtgtctgttttaggaaccgttgtagcagctttgttctgtgagagcctttggggcaggagagacactttgtctaaaataaggcttgaagtcactcacctgtacaaacggggagatgggaaagcaggtggatgcaggagtactcagtaaggacccattcccctctggggcaaggctgggcattcacaccagacttccttatagctgacgggtctgcagttccaaactccttccc

SEQ ID NO: 772522 - DNA, 625 bp, Homo sapiens
catctttcctttcacactaggaaagaagaacaaaactaatagttgccataacaaattatgggcatcaaaatattagtctatcacaaattaaaaccttacatagcaataaaacataccaacactttattgttgcactctcagatatgcaaagattccagtatacataagctttttccctcacccaaattacacaaatattgcatggaatgtactaaacaattcttcatagtttatttgaaattcaaatgtatctgggtatcctgtattttatctggaatctctcaatagtcccttataaatgaataggctcttgaccagcctgcattctcattcatctgtatattaccctgtgggataaaacacgcacagtgccagcytttcttctctatgctccattgtcttcagaattctaatttggtaattcagcatttggttggttggttggttttcagtaccttcaagcaaattttcaaaatatattttatctattatccacttggtctcagagagagggttgacattgaattgcctatcatatctagaaaacatgggttcccttgtttatttctaaacctgttccatactgtgatctacaaggtgtcaaagtgttgctacccatgtgacc

SEQ ID NO: 772523 - DNA, 567 bp, Homo sapiens
gagacacgatgactaaatgtaggatcctggattgggttctggcacagaaaaatgacattagggaataaactggaggatctgaatgtgttagtcaaggtcttccagagaaacagaaccaatataatatttatgtgtctgaagtgggaattcactcaatgctattatgggggctgagaagtcccacagtctgccgtctgcaagctggggaaccaggaaagctggtggtgtaattcagtctgagtccaaaagcctgagaaccagggagcaaatggcataagtcttggtccaattctgaaggcctgagaactaaggggttgggagtgcagaagtctaagtctcggtttgagygcaaaagcctgagaaccaggagcatctacgtctgagggcaggagaagatgaatgtcccagctcaataagagagagagaatttgccctccttttatcttttggttctattggagccctcagtggattggatggccatccacattggtgaagacaatctcctttactcagttgaatctgctgattcaaatgctaatctcttgcagaaacaccctcacagac

SEQ ID NO: 772524 - DNA, 627 bp, Homo sapiens
tacaaagctcgacccaagatggattaaatacttaaatgtaaaacctaaaactataaaaactctgcaagataacctaggaaatatcattctgtacattggctctggcaaagatttcatgatgaagactccaaaagcaattacaacaaaacaaaaattgacaaatgggatctaattaaacttaagagctcctgcacagcaaaagaaactatcaacagagtaaacagacaacctacagaatgggagaaaatatttgcgcgctatgcaygtgaaaaaggtctaatatccaggaatctataaagaacctaactacaaacaaactaacaagctaaaaacaaataaccccattacaagatgggcaaaggacatgaacagacacttttcaaaagaagacaaacatgcagccaacaagcatatgagaaaatacacaacatcactagccattagagatatgcaaatcaaaatcacaatgagataacacctcacactagtcagaatggctattactgaaaagtcaaaaaataacagatgatagtgaggttgcagagaaaagtgaatgcttatacactgctagtgggaatgtaaattagttcggccaatgtggaaagcagtttggtgatttctcaaaga

SEQ ID NO: 772525 - DNA, 629 bp, Homo sapiens
ttgttaccactataccagcctcacaagaggtccttgagagaattctaaacatggaagtgaaagaacaatgcctgctaacacaaaaacacagatacatagctcatagaccctataaagcaaatcacacaatagaaaccacaaagcaaccagcttacaccttcatgrtagaattaaaaccttacacattaatattaactgtacatgtaaatggtttaaatgtcatatttaaaaggcacagggtggcacattggataaaaaccaagacccatctgtctgctgtcttcaagagacccatcttatatgtaaagacacccataagctcaatgaaaaaggttggagacaaatctacgacacgagcagaaaaaaaaaagcaaggggcactcttgttatatcaaacaaagcatactttataccaataacagtgaaacatgacaaagaaggacattacataatgttaaaagtttcaattcagcaagaagactttagaatcctaaatatatatgcacctagcattagagtacccagcatcataaaacaagtacttctagacctacaaaaagacttatttaatcatagtgtaggatttcaccttcccactgacacttacatcattgaggcagaagacctaa

SEQ ID NO: 772526 - DNA, 629 bp, Homo sapiens
ttgttaccactataccagcctcacaagaggtccttgagagaattctaaacatggaagtgaaagaacaatgcctgctaacacaaaaacacagatacatagctcatagaccctataaagcaaatcacacaatagaaaccacaaagcaaccagcttacaccttcatgatagaattaaaaccttacacattaatattaactgtacatgtaaatggtttaaatgtcatatttaaaaggcacagggtggcacattggataaaaaccaagacccatctgtctgctgtcttcaagagacccatcttatatgtaaagacacccataagctcaatgaaaaaggttggagacaaatctacgacacgagcagaaaaaaaaaagcaaggggcactcttrttatatcaaacaaagcatactttataccaataacagtgaaacatgacaaagaaggacattacataatgttaaaagtttcaattcagcaagaagactttagaatcctaaatatatatgcacctagcattagagtacccagcatcataaaacaagtacttctagacctacaaaaagacttatttaatcatagtgtaggatttcaccttcccactgacacttacatcattgaggcagaagacctaa

SEQ ID NO: 772527 - DNA, 529 bp, Homo sapiens
tattggttagaaagtatttcccttttgttttctttctaaaatcagaatattaatggaacacctaatgtactcacagtagcactttttacagattccttatgagaaaggtagctgtatgccatatactgttttcaaaggttactttaaaacagtttcttggtaaatagtccaatgaacaaatacatcaggcatgtgtctggatgggagggtgtatatatatatgcgcatatatataggtgtatatatatatgcgcatatatataggtgtatatatatatgcgcatayatataggtgtatatatatgtatgtgtatatatatatatatatatacacaatatatatatatatatacaggatctcaaagaagacagaggagagttttatttattttaggttcccatatctcagcaagttgtttccctagcaagctgactttctggtctctactctgtccatttaagttttgccctcatccaactatctgcactcatgtgtaacaaattaagatatattcctctatgctattca

SEQ ID NO: 772528 - DNA, 469 bp, Homo sapiens
cactgtgcgaggaagtggaggttggcaatgagaaagtcagttgtgatccctgccctccttcagcttacagtttggtcagaagaataaacagaaaatcgctgggcaggttactaagggctgagatgagagtagtacaaggggctgggggagcccataagagaagtatctgattctgscttggggtggggatcatggaacacctcccagaaagctgactgagccccagcatgtagggtcactgagttaggctcagggttcggggagcgggagggctggagtatcccaggtagagagaagagcagatgcaaaggccagaggtaaggggccggtggggggtgaggtgtcttgcagcgatcagtggagcaactgaaagaagtcacagtaaagagagagagctgaagctaagaattgggaggtagaggtcatgcccggttggagatgaggcagaagaaatacctaggcaccagag

SEQ ID NO: 772529 - DNA, 640 bp, Homo sapiens
tattgtaaaggtatcagttttttttcccaagctaatccataaatttaattcaatcacagtcaaattcccagcaggagttttcacagaacttgacaaattgattagaaaatcacatgtgagagaaaatgtgcaagaatagctaagacaattttgaaagggaagaacaatgaaaagggagacttgctttaccatacatcaaaatattttatacatttctaggaataaaaactgtgtggtaaagctctattcaaaacagataacaatgggtatagcataaactcagaccaatcagaatggacaagggccctaaatagccaatttggcttgaggcaggattactggcctaataatcagacctagcacagggttagagatataggacaatggaactgaatagagaccagaaacacatccatgtgtatgtggtaatctgctgtttaatgaaggcrgcttttcaaatcggtaaggaaagaatggtctattcaataaatggtattgaggcaattggctatcatttgggaaaaaatttaaatcctttcttcacaccatttagaaatgaaattataaaaaattaatagcatgaagtgtaaaatacaaaatatgatgctattataagaaaatactgaaaaacatggtaata

SEQ ID NO: 772530 - DNA, 485 bp, Homo sapiens
gaaggctatccatgcgggcttgagggctgtgaggcctcagacactgagcccgtgtcatgcgggcagagagtaccatcaatatctgcagctgtcaaaactctcaactcagcaaaaacccgactcagacttcaggtcacccacaagggcatagctgacaattctctgtggcaggtggggargaatcggccaacttcagacactggtcaactcaagttctgacctcaggagaagcagaaggtgggagaaagaaagggagagaggccatcggccttttggggttgccatctggctcaagcggtccacagacagttgactcaaaccccataattgacatatttacatgtgacttatgccaaaagacataaatgaactcccccgtcccaccccacccaagctgtacatggatagcctcatggctgagctccaattctatgcccccagccacccctgaacctctgaatactttggccctggtgtccccaatg

SEQ ID NO: 772531 - DNA, 477 bp, Homo sapiens
gcctgtaatcccagctactggggaggctgaggcaggagaatcactcgagcccaggaggcagagctcgcagtgagctgagatcataccactacactctaacctgggtgacagagcaagactctctctcaaaaaaaaataaaattaaaaaatttctctcatctcatcagttctacttctcctatgagagaraaatgaagaaaaacttttcactcagacaattccttcctctgtcttctctttctagaattgttcctcctttccattacttctccagaatactaaacacagaagtagcaaaaactgagggcttttgcctctacattacatttattatctgttcactgattgtgtgtgtgtgcgtgtgtgtatgtttgcacacatgaacatttgggactctgactgataagatctgagaagcccccaattcaggatccttgagagagagatgattaagcaacagcctgcatttaccagcta

SEQ ID NO: 772532 - DNA, 477 bp, Homo sapiens
gcctgtaatcccagctactggggaggctgaggcaggagaatcactcgagcccaggaggcagagctcgcagtgagctgagatcataccactacactctaacctgggtgacagagcaagactctctctcaaaaaaaaataaaattaaaaaatttctctcatctcatcagttctacttctcctatgagagagaaatgaagaaaaacttttcactcakacaattccttcctctgtcttctctttctagaattgttcctcctttccattacttctccagaatactaaacacagaagtagcaaaaactgagggcttttgcctctacattacatttattatctgttcactgattgtgtgtgtgtgcgtgtgtgtatgtttgcacacatgaacatttgggactctgactgataagatctgagaagcccccaattcaggatccttgagagagagatgattaagcaacagcctgcatttaccagcta

SEQ ID NO: 772533 - DNA, 477 bp, Homo sapiens
gcctgtaatcccagctactggggaggctgaggcaggagaatcactcgagcccaggaggcagagctcgcagtgagctgagatcataccactacactctaacctgggtgacagagcaagactctctctcaaaaaaaaataaaattaaaaaatttctctcatctcatcagttctacttctcctatgagagagaaatgaagaaaaacttttcactcagacaattccttcctctgtcttctctttctakaattgttcctcctttccattacttctccagaatactaaacacagaagtagcaaaaactgagggcttttgcctctacattacatttattatctgttcactgattgtgtgtgtgtgcgtgtgtgtatgtttgcacacatgaacatttgggactctgactgataagatctgagaagcccccaattcaggatccttgagagagagatgattaagcaacagcctgcatttaccagcta

SEQ ID NO: 772534 - DNA, 564 bp, Homo sapiens
ccccatcttccagcttcgggcagaaggggtgggcagataatgtctagcctccctccagccccgtagtaacttaactaggtcgatgggtttcagattttctatctactattcttcccagccttggaaagcagctccagcgagctgatctttggcctcttttcctttctgtcaacacctcttcctgcttccacacggctgaggtggaatcagggcagatccccgtgctagatgggcggatgcccatgcagtgacttaracacggtcggattcgtgtaatgtctaacttttatcttgtcgataacaactcagttatactttttgaatataaacaattctacatctcaagtcaaaggatcatactttttcaactaaaaatctggtcttgaaactgaagaattgcagtgtattcgtggacacagtagggcaagagttttcaaatacaggactgtcctgtaaattctaaggtgtttggatgccataaacatgctgtgcaccatctcaccctaagatttagtttcgtgctattcctcatcttcccatgggagaaagggttcagtgaattgt

SEQ ID NO: 772535 - DNA, 625 bp, Homo sapiens
attatcctgaatccaatcaagcctctagatctaactacagaaaattcagggaatgaagaaacaatttagatgataccataaggcagcaatctgctaattccaggattgttttctatatataaaaatctgttttttcactaacttctaagaaattaagataaaaaayagaaaaacaattatacaataagaatgcaaagagtcataatagacagaagcaacgtgtaggtgcattttagattctattgcacacaaactgatccttagattttttttgagatatttgaataagttttaatatggacgaagtattaggtgatatttaaagaattattcactacttttgtcagatggaatgatgacacagtgattttgtttaagagtttctgttagggatgtacactgaagtatttatatataaatgtcgtgatgttgggaagctgctttgcagtattaaagtaaaattatgaaatgggaaaataaacaagatggcaatgtgttgctcattatggaaactagctgatgggtacatggaggttcattatactaatctatttttgtgtatgtttaaaatattcaatcataaagatgttaaaaaagtttctaaaccatataaagtgttgaaaac

SEQ ID NO: 772536 - DNA, 603 bp, Homo sapiens
tttaaaacatatccaaagcactttttaatcatcaaagtggttagacatcttgtaaatgaagtaggaatgggagaactttaaaacttatccaaagcactttttaatcatccaagtggttagacatcttgtaaatgaagtaggaatgaagtaggaaatgaagtaaaaatgttaactggacacagtcctgtccctaatgagtatgcactaaataaactttttttcccttcataataagcagtggtggagaatactggaactgttgtcatacttaaaatgttgaaatactcttttgactgacasatggtactgggactatcagatctattactttctccaccagtctcttcatgtacatatccttatctctgttccaaagtatccagaggattaacatcattattctaatgtggaaatacaaaacagtgatgaactttaatttattacctccctcttagaggaaatattttcttaggaaaattcaacttgaagtttaaaagtcatggtagtatttctcatttttccgttaaaatctcataaaagtgccattcagttcatatttactgatatttatccatggaaaatggtcttaaaattgcttgctta

SEQ ID NO: 772537 - DNA, 633 bp, Homo sapiens
ttcacttataaaatacttgaattttggtatgaaatataatatttgaagatgtcttttttcataaatgttttacacacattaatgtttaataaatttgtataaaattctaaacgtggctgggtgcagtggctcattcctgtaatcccagcactttgggaggccaaagtgtgtggattccttaaggtcaggagctcaagaccagcctggtgaacatagtgaaaccccatctttacaaaaacatacaaaaattagctgagcatggtgkcgtgcacctgtcaggggggtggggcagggattgctagaacccaggaggaagaggttgcagagttgagatcacaccactgcacttcagcctggaccacagagtgagaccctgtctcaaaaaaaaaaaaaaaaaaaatctaacagctagagcattgaaggctattatcagctgaagaataaagttctaccatatcagaacagtttatacataaacagtttggttcacagagctttaatacttaacgtgttaaagttactcctagaaaaaaatggacttagtaatttctgtcttgccaatttcaggttgcttttatcattttttcttataaatgattgcatatattcaaagcctcattagcttgtctgaag

SEQ ID NO: 772538 - DNA, 547 bp, Homo sapiens
tttattggcgagttgtaagtattttttttatgttttctggataaaagtttctgatcagatctgtggtttgcaaatatttgcttccattttctctttctgttttcttgattatagtagttgatgcacagaagttttgaatttggtgaagtctagtttatctgtttttcctttatcacttatgcttttggtatcatagatgagaaattattacctaacccataaatgagtctacaagttttatagttttagctcttgcatttagcattgatccattttgagctaattattgtgtgtggtttgaggtagggttccaacttaactcttttgcatgtggttacccacttgtcccagcaccatttgttaaaatgactgttctttcccattgaattgtctcagggctsttgtcaaaaatcagttgagcacaaatataagagtttatttctagacttccaattctattccattgatttgtatctctgttcctatgctagtactacactgtcatcattactgtagctttgttgtaaaatttaaaatcaggaaatgt

SEQ ID NO: 772539 - DNA, 646 bp, Homo sapiens
ctctcctttcaagattcattgccaaatattagaatttctttttgatggaagttatttaccatgccacacctgcaggaattgctacattctactatttgcagtaggattatagactgtagcaccctcagggtacaatattggacagagaatctcaattactgtagcactttgcttaattattatcctcctagtatgaataacagttactaacaggaagtaaacatgagcgttttactaccaataagtctgttaagacttcttatcagacttagtaatatgtcacatcctttggctcctgcagtatcagccatggcccatttggacaacaagactaattgttgggtctgtcctaagtggtttgctcagtttaatgacactaaggaacccttcaatgacccacaactcatcatcgtaggattccctttgttagctttacctttaacccttaaagatttatgaggcataaatgggacatagtatgggggcacttttamctgggtaactaactcctctcaggagaacactcttcccccagtgccaaacaacattctccccaaagataaatttcacaccctcaggctggtaaaagttgatcgggtaatagcaaatggctccctctgctttaaaagcagtagggaaggaccat

SEQ ID NO: 772540 - DNA, 604 bp, Homo sapiens
cagacaacccatagactgaccaatggccaattagctcaaattcttctgagagggcatctaggagccacagaaaccatcatctctgtgagtcctaagcaatagaagagtgaggtcttattaatttagggtatgcagtcacattggtcaatgaatgagcagaaggaaatggtgaaacccatctctactaaaatacaaaaaagtagccggacatggtgtgcacctgtagtcccrgctacatgggaggctgaggcacaagaatcacttgagcccgggaggcagaggttgcagtgagctgagatcaagccactgcattccagcttgggctacagagtgagactccatctaaaaacaaacaaacaaacaaaaaaaatacagagaagctggataaagcagaaatgaggtagagtatggcttttgcaactggaaaaatttgaaaatccagtccccagtttcttagagatagagagagatgctttccactgcaataggatgcttaaatccagatcacctaacatctgatcagcttgcatttcccatattctataccatttctccccccacaaaaacacattactttaactagaccatgtggctttcctgatct

SEQ ID NO: 772541 - DNA, 664 bp, Homo sapiens
taaacatacttttaagaggatccagggtactgaaaaattgaatcgctttcattattactattcaataactagctacttaaatctctagaattttactacttttttgtcttaagattgatgggatattcactggtttgtagaatttccaaaatccagttaattcttctatttaaaaattcaagtcatctataaatttccagtccactggcctggctccccttttatgggctatgactataatcactagcagtggtcctgcaatacmtacccaagtctctacagcagtaccatggaaaggggatcagggttccacaggttgtgaaacacagatttcacccatcttgtcaagacatttggggcagctctcccccaagtgacccttggaatacaaaaattgtattctggtatttttcacatcctttggatgtaaaatctacactgtaatatatattgcaaaattaaattttgtgcaatgtatattactattataaagagaaaaacacacttttgtacatatttgtgtgaactgcacaatatcaaaggcacatggtgtatgcctggcattgtgttgagcactcttgggaatttgaggcaactctattacccttccttggcctcaagaagcttagctatccccaaaataagaggaggcaaggaagaatta

SEQ ID NO: 772542 - DNA, 462 bp, Homo sapiens
ttattagcagagcgaacttgagcatattttgatttcttttgatctttatttttatctctagaataaagattatcacaatagttacttcatagaaatttgtgatggtaatcaatataaaatactaagcatattgtctggctgatactaactgyctaatatatacataatattattattacaatcatattttaaagatagctggtgtttaggaaaactgcatacaattacaacatagaattttcaaaaatattttatgaagattattttcagaagataacttagcagtcttctagtctagtcatttaaaggttgagagaattaaggtttccataagttacataacatacttaaggtcgtgcaaaggcagaaggagagccacagttttctttaccaggtaaaggtctatgttattaaaactagaaaggaagcacctgtgttttgtgtgctcgtgagaaggaaact

SEQ ID NO: 772543 - DNA, 588 bp, Homo sapiens
gtgttatacattaaagtaataaatgctgtatttatgacttatttactgtttgatattaatgtccactaaggggactaagctgataatatattaatataaacaaattaaaacaaggttttctcttcatcagtctcagtagatcccctttgatcttttataattctccatgtgatgacctcactcaggttctgatgctgcctttctttactggaatatcaaattattattctgctgctgccttctatccatcacagccattgcacaaaaaatccagagaactatgctatctgaaatgagatataggattggcataataagtttttctttgttaatgattcaagaagttttgtaacattaacattactgtttaaatagtatctccaaattaaaattctgatgtattctcaaattaagttccaggtttttacctgctctggagratgaagaaagattagaatatgttgttctctagctctagttctgatttgcaggtctgcaatttcttagctttctctcatatttttggctgccctttcatcatcaccttcacttaactctctttcccttacctacactctattgggcttg

SEQ ID NO: 772544 - DNA, 618 bp, Homo sapiens
catactacccaacttcaaactatactgtaaggctccagtaaccaaaactgcctggtactagtggaaaaacaaacaaacaaacaaaaaaacaggcacagaggacaatggaacaggctagagaacccagaaataaagttgcatacctacaaccatctgatcttcaatgaagctgacaaaaacaagccatggagaaaggactccctattcaatacatggtgctggaataactggctagccattatcctgcagaagatttagacaggaccccttcccttcaacacatacaaaaattaactcaagatggattaaagacttaaatgtaagacctaaaactgtaaaaactctaggagaaggcttaggaaatgaaattctggacattggccttggcaataaaagtaataaatggaatttatgactaagtctccagaagcaattatgaygaaaacaaaaattgaaaagtggggcctaattaaactatagtgcttctgcacagcaaaagaaactatcaacagattaaacagacaacctacagaattggagaaaatattcacaaactatacattcatcaaagcactgttctttgatactgtgttttcctgttgagaataatctggagaa

SEQ ID NO: 772545 - DNA, 640 bp, Homo sapiens
tctgttaccgtagagattagcccaaaagacttctgagcttcaaagttggagccctgtcaacgtaattaatctgattttccagtacagcatgagtgaaggctggcaatttgaatggaagaaagaacctctttgaccctggaggaagaagaacatccacaaactagaaggagggaggaagacatasattgattatgtgttgatacgtgagtgctaaatgccagagacttagaaacataagcagacgctatggaggggacaaaattactaatgaaattggctcatggtggatgggttaaatccatctaaattacctcactgatcatttccaattgctgctgtaacaaataatcacaaattccatggcttaaaataaaagctaatgatgttacagttctggagttcccaggtatgaaatcgatgtctcactgggcacaaaacagtctgcaggcctgtttcttctggaggttccagcagagaatctgttcccctgcattgtccaacttctcaacgctgcctgcactccttcccctctggctccttcctccatctttaaagacagcagtatagcatcttccgctctctctctgattgtgatactaacttttctgtctccttactgaacattcgaaagctcttactc

SEQ ID NO: 772546 - DNA, 554 bp, Homo sapiens
ttaaagtctaccaactgatgttgactttttaatgaaaatgaattttgttgtgatagtttggactggaagattgtgtagatctgtttattttcagtagactgttatgttatccagtaattcaccttttccgggggcgtgaaatctcataaaattagaataatcttttgtgctgttacgggcaggaagtgggcaatgtattgtgaaatgtcaatctaggaaattgtttactaaacaaaatayagagtaatgagttaacatggaaaagtgagaactgtaggaatagcagatataggttatattctaactaaacagatacatcaaaaaaccttaagaggacttttagtagagacattttatgtcctgacaactgaaattagccactcattttcacttcaaaaaaggaggtaacatatagttcatttgctttgcttcttcaggtttgttgttttatcactgatttctcatatttattacattaggttatcctcctacccatgtaaacttatttgagctttcacaaagcatgtaatactgattagaattagaatgtctta

SEQ ID NO: 772547 - DNA, 554 bp, Homo sapiens
ttaaagtctaccaactgatgttgactttttaatgaaaatgaattttgttgtgatagtttggactggaagattgtgtagatctgtttattttcagtagactgttatgttatccagtaattcaccttttccgggggcgtgaaatctcataaaattagaataatcttttgtgctgttacgggcaggaagtgggcaatgtattgtgaaatgtcaatctaggaaattgtttactaaacaaaatatagagtaatgagttaacatggaaaagtgagaactgtaggaatagcagatataggttatattctaactraacagatacatcaaaaaaccttaagaggacttttagtagagacattttatgtcctgacaactgaaattagccactcattttcacttcaaaaaaggaggtaacatatagttcatttgctttgcttcttcaggtttgttgttttatcactgatttctcatatttattacattaggttatcctcctacccatgtaaacttatttgagctttcacaaagcatgtaatactgattagaattagaatgtctta

SEQ ID NO: 772548 - DNA, 587 bp, Homo sapiens
ggtttatagagttcagtatattagtctttcatctccttagttaagtctattcctaagtattttattatttttgatgctattgtaaacaggattgtttgcctaatttcctttcaaatagctcattgttagtatatagaaacacagctaatttttgtatgttgattttgtatcctgctgtattactgagtcatttattaattataatagttctttggtagagtctttagggttttctatatataagatcatgccatctgcaagcatggataactttmactttttctttctcacctacatgcctttttttcctgcctaattactcaggccaggatttctctactatgctgaataaaagtagcgagagtgggcatccttgccttgttcctggtcttaaagaaaacacttttaaaagctcttcactattgagtgtaatgttagctatgataatctcatgtatggcttttcatgttaaggtaatttccctctatttctagtctgttgagagtttttaacatgaaaggatgttgaattttaacaaatgcttttttgcatctattaagatcatgtggttcttatcttttattctg

SEQ ID NO: 772549 - DNA, 644 bp, Homo sapiens
agaagctggaaagccagtggtataattcagttcaagtcagaaggcctgagaaccaggggagctgatggtgtgagttccagtctaaggccaaaggccctgaaagcaggagcatggatgttagagagcagggaaagatggatgttccagctaaaacagggagcaaatttgtgttttctatggctttttgttctatttaggccctcagtggattggatgatgcccaccagcattggtgagagcaatattgtttgctgggtctgctgactgaaatgctcatctcttctagaaacaccctcacagaccacccacaccccccaaaaaataatgtgttaccagctgtctgaggatcccttagtccagtcaagttgacatataaaatgatatactttccataatcagggacatgaayatctgtctattttcaacataattcatctgttaaaatgtttgataagactgactgcaactagggaatatgagaaaacataattttattcatgataaatttcagtattaggattcattcagcatgttaaaagtttacattctggaacatacagtcctctggtaaaaataatgttttagcttcaatttgacaaaatagcctacaggtattttggacaggaatttatagggagttaata

SEQ ID NO: 772550 - DNA, 587 bp, Homo sapiens
attagtgaaagtagaagagttggatacctaaggagaaaaacaactattaattcctagagtatgtgatatccagaagaaaaatgctgaacttagtaggctagatacatttcaactttcagaaggcaaactggggggaaaaacaggaaaaaaaaacctacatgtgagtgtcaagactgcaattttggctgtataatcataagtgatgcagttaagggataaaggaaaatttcatctttaaaattagtgcagatcagatccggcctgagggagacctatgcaacaaattactcattgcaaaagatgggaagtttgatgttaggaagtctaaataaatrtaataatctgtggcttgcaaaaatactaaagcaacaaagtaggtctttggaaacctatgtttaaatcaaaaggtcaaaataaggaataggcccacttcttgcagctaatgccatcaagtcaagggatggcaaagaagaagctgatatcctcagctccaaacttgtttctgtatcctttgtaaatgaatcttaaagcactaagaaagtatttgtgaatattaagaaagacaaatttaaaataaaaataatgag

SEQ ID NO: 772551 - DNA, 634 bp, Homo sapiens
ggctcatgcctgtaatcccagcactttgggatcacctgaggtcaggagttggagatcagcctgaccaacatggtgaaatcctgtctctactacaaatataaaaattagccgagcgtggtggtgggcgcctgtaatcccagctactttggaggctgaggcaggagaattgcttgatcccaggagacagaggttgcagtgagccgacacggcacggtgccactgcaytgcagcctgggcgacagagtgagactgtctcaaaaaggaaaaaaaaaaaaaaaagcaagagaggaagtaaaaaagcaaaagatctatgaaacaactaaaaaaacctaacaaaatggacaaaatggtggtagtttgtacttacctatcaataattatctagaatgtaaatggattaaattttctaatcaaaagactgagtggctgaatggattaaagtacaagagccatctatatgctgcctaaagagactcactttacttgtagagacacacatgggctttaagtgaatgagtgaaaaaatatattcctgcagtggaaaccaaaagagagtagaaataaccaaacttaaatcagataaaatacacaatgtgtcaaaaagtgtaaaaagagacaagaacatcattatatc

SEQ ID NO: 772552 - DNA, 613 bp, Homo sapiens
agttaggtcaaagggcaaaccaatgccctaaaaagtggagagatagacatacaaaattagggagtaacaacttattgaaggagaaatccaccagcagaaacctctgtaggaactactactgtggcaaaaagcaaaacaaaaaatccctcaactaaaactgacaaattcttaggtaatcagtgtggacaattatgagagttaaaaaatccagggacactcactcataagaggttcttcacatttttatgagttttaccttaggaactctaccaagttctcagagtaaatattggaaaaaaatcrcctcctacttctagcagaagagaagaaaagtaaccccatttttaacctaatgtaaaactgggaaaaagacctaaacagatacgtcaacaaaaagatatacagacaagaaataagcatataaaaagatgctcaacaccatatgtcattaagaaactacaaattaaaatgagataccactaggtacttactaaaatagccaaaatgcagaacattaataacacaacatgctggttaggatatggaacaataggaactcccattcattgctagtgggaatgcaaaatggtacagccattttggaagatagttt

SEQ ID NO: 772553 - DNA, 534 bp, Homo sapiens
ttaacatcctggcgcccactgacatgctaattttttatcttcatcaccccaagctggcacatggttggcactcaataaatattcattaaatgaattaattgggctgccagaattacttgctttctttttttttttttttttttgcaggggaccctaaaatagtttttctcctgccatttctatgaatgtctgaacgtgcaaatatgtcaatgactagggaaaatatagtgacgcactggtcattctacaactttaagtctacacaggttccttcatcaaaacagggcattaaaaacaactaagctatagagccagatcactggaggtactgtagtttataacctgcttataaaccccagttcttaagtccctcaatgcctarcatgctacctaccaatacgcatacaaataaatcagacgatcttgtgccccccagcccaatgtttaccaagacttcaaaatgttctggtgagatcacctccctgctatgtgatgcaaacatcagagtataaatcttttcagaaaactttttaa

SEQ ID NO: 772554 - DNA, 595 bp, Homo sapiens
caacattgccttgatttggtccccacaggagactgctcacttcttgacaaaaggtaattattgagattcctggttttcttctcaccttgtaaattctcttgtttttgttttttggcaaataggaatgaggtgtgtttactactggagcatcgggctgtcagaacccgtagctttggtttgccttggtcgcagcctgccaggttgcatacttttgatttggaagaggtgccggtgggtgtgttcgctagcaggaatcacccacagtaaaaatcatgggtaggagaaatggccsttcaccttttcccatcttccttccttccattgtctacactcctggtcccaccttttccttggggactgggatgcttatgctggaacctaatcagtgtccaaagcttaaaattctcctctcctcctcacttttttcctctttgttttctcttgactttcattgccttggtctatttccagaccctccaaggcctgtgttttctctttaaaagatcctgttccatccagaggagactcaagagtcccactttaatttgggattttaggcagaggccttcctgcatctctcaagtcacacttgcaa

SEQ ID NO: 772555 - DNA, 595 bp, Homo sapiens
caacattgccttgatttggtccccacaggagactgctcacttcttgacaaaaggtaattattgagattcctggttttcttctcaccttgtaaattctcttgtttttgttttttggcaaataggaatgaggtgtgtttactactggagcatcgggctgtcagaacccgtagctttggtttgccttggtcgcagcctgccaggttgcatacttttgatttggaagaggtgccggtgggtgtgttcgctagcaggaatcacccacagtaaaaatcatgggtaggagaaatggccgttcaccttttcccatcttccttccttccattgtctacactcctggtcccaccttttccttggggacygggatgcttatgctggaacctaatcagtgtccaaagcttaaaattctcctctcctcctcacttttttcctctttgttttctcttgactttcattgccttggtctatttccagaccctccaaggcctgtgttttctctttaaaagatcctgttccatccagaggagactcaagagtcccactttaatttgggattttaggcagaggccttcctgcatctctcaagtcacacttgcaa

SEQ ID NO: 772556 - DNA, 586 bp, Homo sapiens
atcaaagtgcacagcagaaggggagaaggggaagaaaagactatagccgtatattggcttgtgtgcacagaacccatctctcaaaggatacatgagaaacttggaacactggaagccttctgggaaaggaatgcggaggctggggagagagttacagagaaagttttcactgtacatttgcttagacttttytgattttgctttatgtgactatattagctattttcacaaaaatgtttaagttaagccaggctcagtaactcacacctttaatcccagctacttgggaggctgaggcgggaggatcgcttgaggccaggagtttgagaccagcctaggcaaacatagtgaaaactcatctcttagcaaaacaaaacaaaaagtaataataataatgacatttaagttaaaagaaggaaataaaaaatataaaggtctttgtcctgtctctggaaatgaatggctgggagttaagtctgcagctgggtcctcggcccctagctctcctgccttcccatccattgcactccattcctgctcctgaaacaggcatagctgggagagtctggctgggaaggagagtggc

SEQ ID NO: 772557 - DNA, 586 bp, Homo sapiens
atcaaagtgcacagcagaaggggagaaggggaagaaaagactatagccgtatattggcttgtgtgcacagaacccatctctcaaaggatacatgagaaacttggaacactggaagccttctgggaaaggaatgcggaggctggggagagagttacagagaaagttttcactgtacatttgcttagacttttctgattttgctttatgtgactatattagctattttcacaaaaatgtttaagttwagccaggctcagtaactcacacctttaatcccagctacttgggaggctgaggcgggaggatcgcttgaggccaggagtttgagaccagcctaggcaaacatagtgaaaactcatctcttagcaaaacaaaacaaaaagtaataataataatgacatttaagttaaaagaaggaaataaaaaatataaaggtctttgtcctgtctctggaaatgaatggctgggagttaagtctgcagctgggtcctcggcccctagctctcctgccttcccatccattgcactccattcctgctcctgaaacaggcatagctgggagagtctggctgggaaggagagtggc

SEQ ID NO: 772558 - DNA, 586 bp, Homo sapiens
atcaaagtgcacagcagaaggggagaaggggaagaaaagactatagccgtatattggcttgtgtgcacagaacccatctctcaaaggatacatgagaaacttggaacactggaagccttctgggaaaggaatgcggaggctggggagagagttacagagaaagttttcactgtacatttgcttagacttttctgattttgctttatgtgactatattagctattttcacaaaaatgtttaagttaagccaggctcagtaactcacacctttaatcccagctacttgggaggctgaggcgggaggatcgcttgaggccaggagtttgagaccagcctaggcaaacatagtgaaaactcatctcttagcaaaacaaaacaaawagtaataataataatgacatttaagttaaaagaaggaaataaaaaatataaaggtctttgtcctgtctctggaaatgaatggctgggagttaagtctgcagctgggtcctcggcccctagctctcctgccttcccatccattgcactccattcctgctcctgaaacaggcatagctgggagagtctggctgggaaggagagtggc

SEQ ID NO: 772559 - DNA, 586 bp, Homo sapiens
atcaaagtgcacagcagaaggggagaaggggaagaaaagactatagccgtatattggcttgtgtgcacagaacccatctctcaaaggatacatgagaaacttggaacactggaagccttctgggaaaggaatgcggaggctggggagagagttacagagaaagttttcactgtacatttgcttagacttttctgattttgctttatgtgactatattagctattttcacaaaaatgtttaagttaagccaggctcagtaactcacacctttaatcccagctacttgggaggctgaggcgggaggatcgcttgaggccaggagtttgagaccagcctaggcaaacatagtgaaaactcatctcttagcaaaacaaaacaaaaartaataataataatgacatttaagttaaaagaaggaaataaaaaatataaaggtctttgtcctgtctctggaaatgaatggctgggagttaagtctgcagctgggtcctcggcccctagctctcctgccttcccatccattgcactccattcctgctcctgaaacaggcatagctgggagagtctggctgggaaggagagtggc

SEQ ID NO: 772560 - DNA, 550 bp, Homo sapiens
tctgttacagatgtttccatttccaacctttctttctttctaatatttaagactaagaatctctctcgaagcatacccttagctgcatcccacagttttttatattcattggcatttttatttggattttctaaattttattaatttgatattctaaagtataattgctgagcttcctaaaatttgtgaactttctagttatcttgctttcagaggcttttgcagccattattgtaatttactcacccagatatgctaraaaaatttcactggctagccagaagattaaattaaccagaatgtttttttctaagcattctgggtaattgtcaatttgttgctccacaaaggagtgctaattatggtatctgtaggtcattcaagctaaacgctaatatttctttcttcccactgcagatcagccatgtggccttgggaaaatctttcaataggttaaggtcccagatgccctcttggtaaaatatggaagcaaatcttattccctagagaagaaatatgaattcatgaatatacatacatattcatattc

SEQ ID NO: 772561 - DNA, 615 bp, Homo sapiens
atttccattttcccaaacagtcttattaagccatttcaatgatgatgtaattgagtctcatggaagttaagtaacttagatatagataaaataagtgcctcagtagtagaaagctaataacatatatagcaaattcaaacttataccaaagcttataccaaaatatagaatgttaaccactgtcttcatatctacaatttgctttggaaataaactattttttttacttaactaacattttaatacaaataaaatagaaaaagcttataatatggaaaacagttgattacctaagtacattcaaaactgttatatacaaaagcatattaaaaagtcacgtttacttcagaatttgtagaataaagaaaaaaacacaatgtatttcaaggaagattgaagtatataaagattttccttaagtaaatgcatgctaaatacattatttaaaatttctatagatttgtatctttatcrctaagtaaagctgcattccaattttacggtaaaatataaaattaattgtcaaaaatatatatgaaaaactagtaaactggactttgaaaacttagatcccaggccaatgtgtaatactagtttttgtcaccggcaaaagag

SEQ ID NO: 772562 - DNA, 529 bp, Homo sapiens
ggatcctattaaaaaaaacaaaactggccgggcgcggtggctcacgcctgtaatcccagcactttgggaggccgaggcgggcggatcacgaggtcaggagatcgagaccatcccggctaaaacggtgaaaccccgtctctactaaaaatacaaaaaattagccgggcgtagtggcatatgcctgtagtcccagctactcyggaggctgaggcaggataatcgcttgaacttgggaggagaaaaaatgctcaaaagaattctaaacttgaaaatgaaaattggtattcactatcataataacacataaaagtaagaaacacacagatctcatgaaacaattacacaaaggaggaagagaaaaaatctcaatggaaatatgacagaatttcaccaaacaacaaagataaacagaggacaaaagataaaaaaaattcacaaaacaactagacaaaaatcaacattataacagaaataaaacctcatatgttaatattaaccttggatataaatgtactaaatggtttacata

SEQ ID NO: 772563 - DNA, 672 bp, Homo sapiens
ctcaggcagtccaaggactaaaatatcattcccctaagtgaaacatgaaagaaatccctttaaaaacaaaaatgtatagtcagggaaccaaaacattgtattcacactctcacctgcgtttcaaccataacatagcatttagaaagtgtaggtacattggttgaagtgttctcttcacatcatcaaatgccccaaaggtaggattttcccatccgccttggactagctgtggagctcagacaatcacagaatttcctaccgagttcagactgggtcctatatttagaagggctttattggcggggggtggatggggtgatgggtacattcaaacaggagtttaaaaaaaacaccatttgaatgaggtcagaagcataagaattcaatcaaaagcagtgagtagggaaatagaagaagaaattctaaagtaggaacccagccatgacatacttgcaaaamcaacaacaacaacaacaaaaaactacaaaggaattcaactacaaatataaattgtacacatttggaaggtgtagaattctagcacactataagccggatttcctggacagattcttataaaattcagaagtgttttcacacattacatcttccatgaggaaaaggcatcctataaaatgctccttatttttttatgagctattgagaagcaca

SEQ ID NO: 772564 - DNA, 672 bp, Homo sapiens
ctcaggcagtccaaggactaaaatatcattcccctaagtgaaacatgaaagaaatccctttaaaaacaaaaatgtatagtcagggaaccaaaacattgtattcacactctcacctgcgtttcaaccataacatagcatttagaaagtgtaggtacattggttgaagtgttctcttcacatcatcaaatgccccaaaggtaggattttcccatccgccttggactagctgtggagctcagacaatcacagaatttcctaccgagttcagactgggtcctatatttagaagggctttattggcggggggtggatggggtgatgggtacattcaaacaggagtttaaaaaaaacaccatttgaatgaggtcagaagcataagaattcaatcaaaagcagtgagtagggaaatagaagaagaaattctaaagtaggaacccagccatgacatacttgcaaaaacaacaacaacaacamcaaaaaactacaaaggaattcaactacaaatataaattgtacacatttggaaggtgtagaattctagcacactataagccggatttcctggacagattcttataaaattcagaagtgttttcacacattacatcttccatgaggaaaaggcatcctataaaatgctccttatttttttatgagctattgagaagcaca

SEQ ID NO: 772565 - DNA, 613 bp, Homo sapiens
agggtaggatctctgggagcctgggtgtagaacttccagttctctcccagtgggtcacgcagagtgggctcattcctcgcagcaaaaacctgcgatcgcatgcacagagtactgctaactggggaaacccctctggagcttggcatgcagaattcctacgaagggttgctcccacggtcagggctgaccacctgcaaggctgacctcaacctctagctcctccagagatgagtcaatgttgggtggatcaagcctccactataaattcatttttagcatagactatctgtcttggcccaaggtctccagataaacaaagacactcttacaggcaggaaattccaagggcttagaggctaccacccaggaggccagacaaagggccaagcctttttctggtgcagttaaccyttgactgcacacactgagtgttcattcaataaatagaatgaccgactacaggatgaatagatgaacagagaccaattccaaaatgaagacgtatttttaaatgcctttttctgtgttttggagtacctgtagatttcataccagctttcccccactaccctctaagatatagaggctgcttgctgagtttctcatggcataa

SEQ ID NO: 772566 - DNA, 566 bp, Homo sapiens
gatccccaaaattaagggtgccattttataccagatcctggatccccaagaggagggaaatactttgggagaagacagcgcagtgcttttaccgactgtgcatttatttcattgcgaggcaacccaaagcccatcggcccatttaggtggtttcagtttaagaaaattaaaatacaatttatttcacataagaagagaaaaaatattaaaggtccctcaaggcttcccaattgtaaactaggtaattctcaattactgaaaaaaagctataaaatgtcagttattcagatttattttcaaaatagctaaaacagatcatgatgtgttcttcactattagacaatraagacatcaaaatatatttaagcgtctactatgtgcctagcactgtatataaaatacatgttttctatagtataaaagttaatataaagtacctatgagataggtagaaaaaggtgacatagcaagtctctacccataaagatgtcttttagccttgttgcaaagtctagaaacccttatgaaatcatttgcagatgactcagcaaataatgaagtcttca

SEQ ID NO: 772567 - DNA, 601 bp, Homo sapiens
agccccagttcttatcttcctccaggcccatggcaggtaagtagagactgggatgcatctgagccttgctctcagtgggggagggacacaggagaatgtgtggctagaagaatatagaagaaaaggttccagtgctgtgggatgctttagctgttcacttgaaggaaaacattttctgggattgaatgagatcgttagatgtctcaggaatgaaagaaagcgttttgcttttcttttcctgcagatgtcaccttcagaagatagaagcagcagggtagaacagaggttgtaagatgacaaaaagccccacctgggttttcttgttcttaaagagtgaaacacacatgcatatatacacgcatacaaatacacacacagaaagaagctaactcctgtgcttcagccgtcgcatgcycctgagtgcccctgagatcacaggcacgccgccggggaggtgtacagtgggtggtcagtcgctatcaacaaagaactcaaaccgtagctgctgcgtcagtccatgatttgcaaatgtgcatgatgcatatttgcacagtcacagtttggagaaaagcgcccaaggatacttggctggatccttgag

SEQ ID NO: 772568 - DNA, 557 bp, Homo sapiens
tgaaaaaaaaaagcctaggagccctctgtttcctagttttaattttccgcaaagatggccttttgtctggtttcgtctttgcccacgcgctcatttcctgctcttctcccacatttattaagtagctattgaaccctgcttgcatcgctctgaaaattgcaaattccattgaagacatgagcagcttccaatgctggtacatctaaacctctttctggttctttgttttctaattagctgaggtttgggccagctttccttggagaatcactgctgttgtatgagttgcaggraattgccacccccaagatgccccccccacctgctccccatcaaccaagctggggacctcactggtaagtttgaggtagggtctggggtaggatctggggcctaaaccatgcccatttttacacacagaggatggcagaattttgcgactggtgaacactaactgtgtgttagtagttaataatgtggtagtagttaagcgtgtaggctctggagacaggatgcctgggtcctctctacacctgatcctcaaccacaaaataggg

SEQ ID NO: 772569 - DNA, 557 bp, Homo sapiens
tgaaaaaaaaaagcctaggagccctctgtttcctagttttaattttccgcaaagatggccttttgtctggtttcgtctttgcccacgcgctcatttcctgctcttctcccacatttattaagtagctattgaaccctgcttgcatcgctctgaaaattgcaaattccattgaagacatgagcagcttccaatgctggtacatctaaacctctttctggttctttgttttctaattagctgaggtttgggccagctttccttggagaatcactgctgttgtatgagttgcagggaattgccacccccaagatgccccccccacctgctccccatcaaccaagctggggacctcactggtaagtttgaggtagggtctggggtaggatctggggcctaaaccatgcccatttttacacacasaggatggcagaattttgcgactggtgaacactaactgtgtgttagtagttaataatgtggtagtagttaagcgtgtaggctctggagacaggatgcctgggtcctctctacacctgatcctcaaccacaaaataggg

SEQ ID NO: 772570 - DNA, 616 bp, Homo sapiens
aaaaaaaaaaaaaaaaaaaaaattcttgtaattgtagaatgtcaagatagaaaaagcatttcaaaagggtttaaatttccctccattagcacattctttttctaccaaatctggttctaagctaaagctggttcccattcatacagcccttaaaggtgggattcttcacttgcccaaaaggtccagaggccagtggcctgagctgtaggcttgggctgcccttycaaggagggctgtgctccgcaatcacaacttgattttttgaagattgctctagtgagtcgttgatacatctaattacagtctccttacctccatttaaactcagttagcaaacttctctctatttttttaaaaatagaaatgaaatagtcgagcaatgataatttccttcaccaaaaacgccatgcaggagatgtgtaaacgttacagttctcctcccttttgaatgtataggccacttttttaaagaacccccaaacagtgattttttttttcctaatttgagaataatggctaaaatctctaaattccatgcaacttctttctttgcaaagagaaaggtaaaatgtgccacatgattacatggagaaggtttttctccaaggatctctca

SEQ ID NO: 772571 - DNA, 616 bp, Homo sapiens
aaaaaaaaaaaaaaaaaaaaaattcttgtaattgtagaatgtcaagatagaaaaagcatttcaaaagggtttaaatttccctccattagcacattctttttctaccaaatctggttctaagctaaagctggttcccattcatacagcccttaaaggtgggattcttcacttgcccaaaaggtccagaggccagtggcctgagctgtaggcttgggctgcccttccaaggagggctgtgctccgcaatcacaacttgattttttgaagattgctctagtgagtcgttgatacatctaattacagyctccttacctccatttaaactcagttagcaaacttctctctatttttttaaaaatagaaatgaaatagtcgagcaatgataatttccttcaccaaaaacgccatgcaggagatgtgtaaacgttacagttctcctcccttttgaatgtataggccacttttttaaagaacccccaaacagtgattttttttttcctaatttgagaataatggctaaaatctctaaattccatgcaacttctttctttgcaaagagaaaggtaaaatgtgccacatgattacatggagaaggtttttctccaaggatctctca

SEQ ID NO: 772572 - DNA, 616 bp, Homo sapiens
aaaaaaaaaaaaaaaaaaaaaattcttgtaattgtagaatgtcaagatagaaaaagcatttcaaaagggtttaaatttccctccattagcacattctttttctaccaaatctggttctaagctaaagctggttcccattcatacagcccttaaaggtgggattcttcacttgcccaaaaggtccagaggccagtggcctgagctgtaggcttgggctgcccttccaaggagggctgtgctccgcaatcacaacttgattttttgaagattgctctagtgagtcgttgatacatctaattacagtctccttacctccatttaaactcagttagcaaacttctctctatttttttaaaaatagaaatgaaatagtcgagcaatgatratttccttcaccaaaaacgccatgcaggagatgtgtaaacgttacagttctcctcccttttgaatgtataggccacttttttaaagaacccccaaacagtgattttttttttcctaatttgagaataatggctaaaatctctaaattccatgcaacttctttctttgcaaagagaaaggtaaaatgtgccacatgattacatggagaaggtttttctccaaggatctctca

SEQ ID NO: 772573 - DNA, 616 bp, Homo sapiens
aaaaaaaaaaaaaaaaaaaaaattcttgtaattgtagaatgtcaagatagaaaaagcatttcaaaagggtttaaatttccctccattagcacattctttttctaccaaatctggttctaagctaaagctggttcccattcatacagcccttaaaggtgggattcttcacttgcccaaaaggtccagaggccagtggcctgagctgtaggcttgggctgcccttccaaggagggctgtgctccgcaatcacaacttgattttttgaagattgctctagtgagtcgttgatacatctaattacagtctccttacctccatttaaactcagttagcaaacttctctctatttttttaaaaatagaaatgaaatagtcgagcaatgataatttccttcaccaaaaacgccatgcaggagatgtgtaaacgttacagttctcctcccttttgaatgtataggccacttttttaaagarcccccaaacagtgattttttttttcctaatttgagaataatggctaaaatctctaaattccatgcaacttctttctttgcaaagagaaaggtaaaatgtgccacatgattacatggagaaggtttttctccaaggatctctca

SEQ ID NO: 772574 - DNA, 473 bp, Homo sapiens
ggttttgtggtcaccctgcggtaagaatgggattaaattcctgttcaacagtgtccatccagggacgggaaagaggacaacttccctttggctacattcaaatggaatagaattacctctaacgtatggctacattcagatggcatagaattatctctaacgtagtctaattacagcaaacatgattgatttmtgacccatcagcccctcccccttccttggtgacttcacagccacccttggcttctgcattcgtcctgtccctggctatgtgctgggggaacatgatctcccagccacagcagacgagtcattgtttactaagcccgtctcagggatctcctcgttcatgtcagtgattggtccagtttcatgtgacctgagcaacttctggggatgttttcttatttcataatatgaatgctacagccaccagtaacaacaataattgaatatttcagaaataaatacga

SEQ ID NO: 772575 - DNA, 599 bp, Homo sapiens
tatttagtaaaaaattatggaacctgaattatttatcattaacttattattgatttaaaaataatgtggtttatagatagcagttttttaatagcatctgatttgcaagatgtataaataggtaaattcttaattatatatagtttatattaaaggtaatggacacgtcaatgaatacttaaatatcttaattttttattatttagttttttttaattataagctccatgttttttttaatttattattattatactttaagttttagggtacatgtgcacgacgtgcaggtttgttacatatgtatacatgtgccatgctggtgtgctgcacacattaactcatcatttagcattaggtgtatctcctaatgctatccctcccgcctctccccaacccacaacagtccccrgtgtgtgatgttccccttcctgtgtccatgtgttctcattgttaaattcccacctatgagtgagaacatgcggtgtttggttttttgtccttgcaatagtttgctgagaatgatggtttccagcttcatccatgtccctacaaaggacatgtactcatcattttttatggctgcatagtattccatg

SEQ ID NO: 772576 - DNA, 513 bp, Homo sapiens
agctgtaatgccttttatgttatgtgactttaatcattcaaaaaaagtcttaagagatcgttggtaaaacacatatatcatcaaaatgtaaataggtggtctaagtcatataagtcagacactaggtttgctaagtgtttcaaggctgtaaactgcatgctttacaacttggtaaggcccagggacatatgaaattaaccacatccctaaataggctggaaatagactttctctatgcctaatatgtaatcaaaataagttactaggtttcacactaaagttaaaaatttataaaagttaccatcataacatgtaatttaarctattaaaagtaaatttacatgtatgatgtgtaaaaacaatagaatgtgttctagtaaaatattataagccaaggaaatgtaaaatgtaaattttgcctagtcatgaaggattgtcttaaattagacaagaaagatgaaggtttaagaaagttatagaaagactgtaaaaattaatcttgcaaaactccca

SEQ ID NO: 772577 - DNA, 513 bp, Homo sapiens
agctgtaatgccttttatgttatgtgactttaatcattcaaaaaaagtcttaagagatcgttggtaaaacacatatatcatcaaaatgtaaataggtggtctaagtcatataagtcagacactaggtttgctaagtgtttcaaggctgtaaactgcatgctttacaacttggtaaggcccagggacatatgaaattaaccacatccctaaataggctggaaatagactttctctatgcctaatatgtaatcaaaataagttactaggtttcacactaaagttaaaaatttataaaagttaccatcataacatgtaatttaaactattaaaagtaaatttacatgtatgatgtgtaaaaacaatagaatgtgttctartaaaatattataagccaaggaaatgtaaaatgtaaattttgcctagtcatgaaggattgtcttaaattagacaagaaagatgaaggtttaagaaagttatagaaagactgtaaaaattaatcttgcaaaactccca

SEQ ID NO: 772578 - DNA, 519 bp, Homo sapiens
aggaaagaggtttaatggactcacagttccacttggctatggaggcgtcacaatcatggtggaaggcaaaagacacatcttaaatgatgaccagcagagatagaatgacagccaagcaaaagggctttcccttatgaaaccatcagatcttgtgagactaattcactaccatgagaacagtgtagggaaaaccacccccatgatttaattatctcccaccaggtccccccgacccacaacacctgggaattaygggagccacaattcaagatgagatttgggtggggacacaaccaaaccatatcatcatataaatccaaaccacaggctccatgagcagatgagcagagtagcagaagagctgtgtggcagaggagagaagagaaggaacatgtgaacgtcgaaagttcatctggggacagtcagggaggagatcagccatgggatggccaaactccaggggaagattatcttcctactccatccccctccagctccccatccatcccactgagagcc

SEQ ID NO: 772579 - DNA, 611 bp, Homo sapiens
aattatggttatctttagcttcagacttgaaaaatatctcacttcctattggcctccattgttttggcttataaatcagctgtgttttgaattattttcttctatatttaagttctcattctctcttgctgttttcaaggttttctttcagtgtttttagtttttagaaatttgattattatgtgtcttagtgtccacttctttcagattttcctgattggggttaattcagctcttcatactataggtttatatatttcaccaaattggaatttttttcagtcattatgacattcaactctttcttcagcccctccyacctattttttttttcagaacttcaataatacaaacgttagatcttttgttatagcttccacttttctctaaggctctgttcattttaatgtttagtttattttctctttccatttcagtttaggtaatttctactgtttcatttcaatttcactgattattttctctgctttattcattttactgagtttctttttttttctttttttattatacttgaagttctggggaacatgtgcacaacctgcaggtttgttacatatgtacacatgtgccatgttggtgtgctgcat

SEQ ID NO: 772580 - DNA, 518 bp, Homo sapiens
  misc_feature 1, 2, 3, 4, 5, 6, 7, 8, 9, 10, 11, 12, 13, 14, 15, 16, 17,18, 19, 20, 21, 22, 23, 24, 25, 26, 27, 28, 29, 30, 31,32, 33, 34, 35, 36, 37, 38, 39, 40, 41: n = A,T,C or G
nnnnnnnnnnnnnnnnnnnnnnnnnnnnnnnnnnnnnnnnnagtatgctaatgactactgtgctacgggtagagtttccattttgtaaagtgaagccattggtatttttgccttaacttagtttggtcgctttgggcaatcttttttgagataatactttcttggctcatttcacttgatctcccattcagttggttggttaatcattagatttgaatcagctaccaactggtgagataacttaaccttcttttgctcatccagttcttccagcacattaaaaccagttcctggtattcaatttcccatttgaaagaagtagcattgtgtgtattttcctaactggayattggctaatacaaatgcaatacaggaaatattatgtgacgtgagagcacaaatttaagaggaaccaactggtacaacctagggaggaatagaaagctttcagaatgaaaatgacactggagctgattcttgacggctgaaagaataatctaggggagaaggtgtaggaa

SEQ ID NO: 772581 - DNA, 515 bp, Homo sapiens
tctgtatatgcctgtacatttgctaagtaattttaaaacaatcattgtcatatttattttggacaatttttttcttggtgttataggcaagttgattacagactcatttaatttttatgactgaaatgaatgatgaaaattaccaggtccaatttcatgctcaaggctgcaaaagcttatattttaatgaaaacacatagataccctgcccgtgtkgaaactttccagtgtccacttttcatctgcccccacacagcagtgtcccttccatttgggggcatttctagttagttaataattttccattatctctctaaagtgcattcatacagacttatataggagaaagaatttcctgattaaaaaattatctgtcccagaaaatgtcccagaggtttatgttagcaatagatccacctaacattaatcgctaaaggcaaattagcatgtactttttgaaagaaattgtaagttactattgagtaaatttgtaacaattatgtgatattttggtg

SEQ ID NO: 772582 - DNA, 525 bp, Homo sapiens
agttcagctctagagaaatccaataaaacagaagtggtacaaggctcttgtggccagtgtctagtgtgactactagaggccattctaaaaggacccagtgtaaagaaaagaatgtaatatgtatatgtgtatctatatctatatcatctataactatcatctcctagaaagagcctggcctacagaattgcaaaaaccacatcggtcctatgtgagtttgcctgacctgcctcatctccaaggagccaaaactgtctaactcctactcctgaggctaggaaagccaagagcattgatacctccatggggatttgcatcctgcttgttgacagagggccagctatctctaggttgtaccacttgcagaaatgccatgactcaargtgtttcaactaaagacttgggctccagtgagcaaataaagataagtgacaccatataggagaattcttgcagccaaatataattaactcaagcataaggaaaaaatcacaaactttaagatggggaaaacattttcttaca

SEQ ID NO: 772583 - DNA, 511 bp, Homo sapiens
gcaaaataaaatttagatctcgaccaaatttggggagataaaggatctctggaggggatgctctcagcccttagcaatttgtactattggtttgagccataaagttagctcatgctggtaacaagcactgatagaagatttgtcaaaggtcaggggcatttccattcagaatccctccatggttaccaaattttgaactcaacaactctgagacaggtctcagtcaatttagaaagtttattttgccaaggttgaggacgtacccgtgacacagccccaggaagtcctgacgacatgtgccaaaggtgktcagggcacagcttggttttatacattttaagggagacatgagacatgtatcaatatgtgtaagaatacattggttctgcctggaaaggcgggacaacttgaagcaaaggcaggaagacttgaagcggaagggagcttccaggtcacggataggtgagacacaaaaggttgcattgcattcttttgggtttctgattagcct

SEQ ID NO: 772584 - DNA, 600 bp, Homo sapiens
agagagagaggtcgacacttagtgaccacttacatgacagatgggattttagcttcagctgttctgttgaagaagagaatgagggcatctttctgctgctgtttctgttgaaagataagttaagaatgttaagtgccccagtctgagaactctgggatgagtggatctaattattgctcctatgcgctttacaaatctcaaccacccgtcaccagagtcaggagaccctggtgctgacartgattcccctttcactttggccaagtcagaagaactgcctgggtcgggttttgtcctcagagacggcattagagctactctgccattgtccaagaaccattgcaagaatccaagaggcaaggaacacaaaagctctttggagacgcatttcaggtagggcttcaccatacacaccagacccatgtgaaccactgaaatgtggccttggctaagcatacctatttactacagcctggtgacaacttacatgtgacatttccccaacttgctttttgcttccctcttttcttctgccaagctgtgactatacctgacttacagagcttacctctgtccaagatttactgaatcaattccaat

SEQ ID NO: 772585 - DNA, 584 bp, Homo sapiens
gataaaagtgttgatggtaacttcagattttgtgagacgtttttcatttaaagaaaaccgcttaaacgttaatgggtaaaataatcatttgacagagtgcccccagcctaagccaaacctgctttgtgggaaatgattccatcagttttgtctactgatgtttctgcaccaactcccaagatgtctgtgcatstaataccattctacttgttctgcgagggatttttgtttgataaaggtttgaacgtttatgtgcaaaatactgcattacagcaatccttgttttgtttttgagggagaaagggaggctttcacatccctgacaataaggtgaatccaaatttagacttctggatgcttgtaagagaaaatacttacttggttcatagtgaaaattggttctcttttatagaccaagatgaagagacgagctgtggggatctggcactgtggttcctgcatgaagacagtggctggcggtgcctggacgtacaagtgagtctagttccttgtggtatttggaagtgtgtggaccacataggcccaaattccaggttgctgctggatgggctagttttaacact

SEQ ID NO: 772586 - DNA, 584 bp, Homo sapiens
gataaaagtgttgatggtaacttcagattttgtgagacgtttttcatttaaagaaaaccgcttaaacgttaatgggtaaaataatcatttgacagagtgcccccagcctaagccaaacctgctttgtgggaaatgattccatcagttttgtctactgatgtttctgcaccaactcccaagatgtctgtgcatgtaataccattctacttgttctgcgagggatttttgtttgataaaggtttgaacgtttatgtgcaaaatactgcattacagcaatccytgttttgtttttgagggagaaagggaggctttcacatccctgacaataaggtgaatccaaatttagacttctggatgcttgtaagagaaaatacttacttggttcatagtgaaaattggttctcttttatagaccaagatgaagagacgagctgtggggatctggcactgtggttcctgcatgaagacagtggctggcggtgcctggacgtacaagtgagtctagttccttgtggtatttggaagtgtgtggaccacataggcccaaattccaggttgctgctggatgggctagttttaacact

SEQ ID NO: 772587 - DNA, 593 bp, Homo sapiens
gtcttgaactcctgggctcaagggatcctcctgccttggcctcccaaaggattacaggcatgggccattgtgccaaccctcaagctttcttaaataccaaattatagaacatgtcttcacagaagataaatcttgaatagtatgaaaacaggagacagatgtattacaggcaattcccaaattcaacagtactaaatatttcattttgtctaatttccctggctaaactcagcatagattttctttaaaaaaaaaaaaaactttacaagacacatcacactacactttttttttttttttttggagatgtagccttacttttgtcacccaggctgaagtgcaatggcacgatcttgactcactgcaacctctgcctcccgggtccaagcgattctcttgtctmaacctcccaagtagctgggattacaggcgcccactaccatgcctggccaatttttgtatttttagtagagacgggattttgccatgttggccaggctggtctcaaaatcctgacctcaggtgatccacccgcctcggcctcccaaagtgctgggattacaggcatgagccactgcacccagcctcacaac

SEQ ID NO: 772588 - DNA, 599 bp, Homo sapiens
ttgggaactgaagtaaaggtcactcttgtgatgctttatcaaagaggctggtggcattgtgcccctgctctagagatctgtggaactcttaacttgagagaaatgatttagggtatctggtgaagaaatttctaagcagcaaagcattcaggaagtggcctggctgcttctaacagcttaggctcatatgtgttcacagagatggtctgaaattagaacttatatttaaaatggaarcagagcataaaagattggaaaatttgcaacctgatcatgtggtagaaaagaaaaacccattttctgggaaggaattcaagccagctatggaaatttgcataagtaaggaggagcccaatgttaatagccaagacaatggggaaaatgtctccaagacatttgagagacctttgtatcagcccttcttatcacaggcctagagtcctagaaggagaaaatggtttcatgggccaggtccaaagccccactgctctttgaagccttgggacctggcaccttgcactgtggctgctccagctccagccaaggctaaatggggtcagggtacagctcaggccattatttcagagactgcaagtccc

SEQ ID NO: 772589 - DNA, 632 bp, Homo sapiens
aatcacaagcattcctgtataccaataataggcaaacagccaaatcggagtaaactctcattcacaattgccacaaagagaataaaatgcctaggaatacaacttacaagggacgtgaaggacctcttcaaggagaactactcaagaaacgactgctcaagaaaataagagaggacacaaacaaatggaaaaacattccacgctcatggatagaaagaatcaatatcgtgaaaatagccacactgcccaaacattccatgctcatggataggaaagattcaatattgtggaaatggccatactgctcaaagtaatttatagattcaaatctattcccattgagctgccattgactttctccacagaattagaaagaaactattttaaatttcatatggaacaaaaaaagagcccatakagccaagacaatcctaagcaaaaagaatgaagctggaggcatcatgctacctgacttcaaactatactacaaggctacggtaacaaaaacagcatggtactggtatgaaaacagatatacagaccaatggaacacagcagaggcctcagaaataatgccacacatctacaaccacctgatctttgacaaacctgacagaaacaatggggaaatg

SEQ ID NO: 772590 - DNA, 613 bp, Homo sapiens; identical to SEQ ID NO: 738667

SEQ ID NO: 772591 - DNA, 573 bp, Homo sapiens
ccttgaagggggatgaaaatgtgctagaactagattatgacgatggttgtgcaaccctgtgaacgtgctaaaaaaacatacaattaattttacactttaaatggatgagctgtatgatgtgaattctctgtcaataaatgcaaagctcyttttgaaaaaatcaaacacaaataaaaacagcattggatattgggtgcttccctagtgacaagaattactgtattctcagaatacgggtccaaaaggggagaagcaacttgtcctaggccccactttgagccaataatgaaacaagatccctaagatttctgcttccaggtgattccctagactccagtaacattggcaaatttcttaaccctttatggttcaaatttattttttattttttttgttggtgtctttttccctcagtgatggtagtcttactgacacatttgcccagaaacatttctttaaggtgatataaacggaagacaggataacctaaaggaagtaggcaatatcaacctacagaagtctatttccctggacaatagtaagttacaaaacctgggcatggtctaaatagtt

SEQ ID NO: 772592 - DNA, 573 bp, Homo sapiens
ccttgaagggggatgaaaatgtgctagaactagattatgacgatggttgtgcaaccctgtgaacgtgctaaaaaaacatacaattaattttacactttaaatggatgagctgtatgatgtgaattctctgtcaataaatgcaaagctccttttgaaaaaatcaaacacaaataaaaacagcattggatattgggtgcttccctagtgacaaraattactgtattctcagaatacgggtccaaaaggggagaagcaacttgtcctaggccccactttgagccaataatgaaacaagatccctaagatttctgcttccaggtgattccctagactccagtaacattggcaaatttcttaaccctttatggttcaaatttattttttattttttttgttggtgtctttttccctcagtgatggtagtcttactgacacatttgcccagaaacatttctttaaggtgatataaacggaagacaggataacctaaaggaagtaggcaatatcaacctacagaagtctatttccctggacaatagtaagttacaaaacctgggcatggtctaaatagtt

SEQ ID NO: 772593 - DNA, 615 bp, Homo sapiens
aaactacctaaaaattggtgtttttaagatcttaagtggcatttattttcaacacaattattagaactctaggccgggcgcagtgactcatgcctataatcccagaactttgggaggtggaggtgggcggatcacctgaggtcgggagttcgagaccagcctggccaacatggtgaagccccatctctaccaaaaatacaaaaattagctgggcgtgktgacgcacgtctgtaatgccagctactcgggaagctgaggcaggagaattccttgaacctgggaggtggaggttgcagtgagccgagatcgctctactgctctccagcctgggcgacagagcgagactctgtctcgcacacacaaaaaaacctctatttgcatttgcacttaaattcctccaggtgttaagttacatttttagtgaaacacactaaattgtaggtagcactgtttgtagacaccatcattgcaacactgatcaacaaaatagccactaggcacctactagatgaaactgatcagtcagatctggacttggcctcagattctttctctgcaagaagattagaaacatacatggaataactataatcccacacagaaagcagtaagtgc

SEQ ID NO: 772594 - DNA, 588 bp, Homo sapiens
agaggctaatcacaagatgtaataaaatgagttaattacacaagttataaaaaggtaagttatctattgctatagagcaaattgccgcaaaacttagtggtctaaaacaattattatctcacaatttccctgggtgtaagatctaagtttaactttgctgagtgcctctgcttcaaggtctctcaggatattttggtcagcctgctagacagacttgtggtctcctctgaaggttcaagtgggagaagatttacttccaaactcactaacatggttattggtgtaggggttaaagaggaaagaaacataaaaagcggctcaacagttaaagayaggtttattttggataacaaacctgagaggggcttctggccgattttggtcaggagtgctgtctcttacagactaagggtgtttactggttttagggtgacaatgcttatcatggacttcgaatgtttctgtgtgggagaaaagtttattgcagggttggaatgtctctggtcggaggggagtttatcttggggctgacatctctctggcaggaggggaggttatctcagaggaggtcattttattacatcttgt

SEQ ID NO: 772595 - DNA, 616 bp, Homo sapiens
tttgaataatgtttctagtgtgataaagctatccattaatatgaaaaaactgtatatatttaacagttcatccttgcaccatgtagaagcatcatttgatatttaccacaaaactgtgtgcctagattaggtattattatccctcttattatttataagaagagattctcatatcagagatctcatatctcttcttataaataagaagaaggataatatttaccacaaatctgtgtgcctagactaggtattattatccctcttcttatttgtggaagagaatgctgaaggtcagagaggttggctaamtccctcaaggttacacagctggtaatccaggactgctgactctattttctcaagatatttaaatatattatctagttattcctgaaccatatacagggatttattttgttgaaagaaatgcaaagtcattcagtcaattaaagctatttcacatcttctctagcttagggatgatttaaatatctaaataaatattttgggataactgtcctagatatgactagaagctcatttttaccctgaatttgtggaattgagatatgacagtcataaagggcaaaaggaagagtagaaaaagttttcacaa

SEQ ID NO: 772596 - DNA, 618 bp, Homo sapiens
  misc_feature 577, 593, 594, 595, 596, 597, 598, 599, 600, 601, 602, 603,604, 605, 606, 607, 608, 609, 610, 611, 612, 613, 614, 615,616, 617, 618: n = A,T,C or G
ttgtcaacttcaatttatttttaaaaatatctatctatctatctatctgtctatctatctatctatctatctatctatctatctatctacctacgtatctatctatctgtacatacatacacatcctaatggttgtttctctggaaaacactgactagtacacctgctctctcattagtacacattccaaacatgatgcatatgtattatgtgcatatgtgcatatatgtgtttatgtayatgtttgaatttgtgtgtacatgtacatacacatacatgcatacagaactagagatagagatagaaatagagatatatccagggacacttgaataagcctgcatctagtggactgagggatttgaggccttttccatgtaacaatactttatcatctatgaatatttgaaattggtaaattattacaagaagagcctattagagccaggcttaagccattccattcctatgatgcaatttaattcagttataacaagaaaatataatacaatgttcttttgtctctgtttcccctattttgagaaattctttcttgcttgtcaccttgtgatatctntaaagggtgaatagannnnnnnnnnnnnnnnnnnnnnnnnn

SEQ ID NO: 772597 - DNA, 542 bp, Homo sapiens
gttaaagcaaacaaaatcataagactcagactttagctgaaatatgttagaagagaaaactgggcccaggtgcaatggctcacgcctgtaatcccagcactttgggaagccgaggcgtgcggatcacgaggtcagggattggagaccagtctagccaacattgtgaaacactgtctctactaaaagatmccaaaaaaaaaaaaaaaaaaaaaaacctaaactaaagtaaactaaactaaactaaaattagctgggcctggtgttgcatgcctgtaatcccagctactcgggaggctgaggcaggagaatcgcttgatcccaggaggcggagttgcagtgagtggagatcccacccctgcactccagcctgggcgacagagagagactcggagaaaaaaaaagaagaaagaaaggaagattgattaaataagagttttaaattatgaagtcccaaaaaaatttagaacactcttaggcaagagaacaaactactacttgccatattcacattctcctaactctagggaaattcagtttaagta

SEQ ID NO: 772598 - DNA, 568 bp, Homo sapiens
caaggaacttcttgatttctgcgttaatttcattatttacccaaaggttattcaggagcaggttgttcaatttacatgtagttgtgtggttttgagtgaatttcttagactttatctctaatttgattacactgtwgtctgagagactgctataattccagttttttgccattttatgaggaatgttttactttcaattatgtgatcattttcagagcaagtaccatgtggcaatcagaagaatgcatattctgttatttttgggtggcgagttctgtagaaatctgtcaggtccacttgatctagggctgagtatacgtcctgaatatctttgttaattttctgtctcactgatctatctcatataattggtggagttttaaagtctcccactattattgtgggagtatctaagtctccttgaagttctccaagaacttgctttatgaatctgggtgctcctttgttgggtgtgtatatatttaggatgcttaattcttgttgttgaattgaaccctttatgtaatgcccttgacttttttgatctttgttggtttaaagtctgttt

SEQ ID NO: 772599 - DNA, 568 bp, Homo sapiens
caaggaacttcttgatttctgcgttaatttcattatttacccaaaggttattcaggagcaggttgttcaatttacatgtagttgtgtggttttgagtgaatttcttagactttatctctaatttgattacactgttgtctgagagactgctataattccagttttttgccattttatgaggaatgttttactttcaattatgtgatcattttcagagcaagtaccatgtggcaatcagaagaatgcatattctgttatttttgggtggsgagttctgtagaaatctgtcaggtccacttgatctagggctgagtatacgtcctgaatatctttgttaattttctgtctcactgatctatctcatataattggtggagttttaaagtctcccactattattgtgggagtatctaagtctccttgaagttctccaagaacttgctttatgaatctgggtgctcctttgttgggtgtgtatatatttaggatgcttaattcttgttgttgaattgaaccctttatgtaatgcccttgacttttttgatctttgttggtttaaagtctgttt

SEQ ID NO: 772600 - DNA, 568 bp, Homo sapiens
caaggaacttcttgatttctgcgttaatttcattatttacccaaaggttattcaggagcaggttgttcaatttacatgtagttgtgtggttttgagtgaatttcttagactttatctctaatttgattacactgttgtctgagagactgctataattccagttttttgccattttatgaggaatgttttactttcaattatgtgatcattttcagagcaagtaccatgtggcaatcagaagaatgcatattctgttatttttgggtggcgagttctgtagaaatctgtcaggtccacttgatctagggctgagtatasgtcctgaatatctttgttaattttctgtctcactgatctatctcatataattggtggagttttaaagtctcccactattattgtgggagtatctaagtctccttgaagttctccaagaacttgctttatgaatctgggtgctcctttgttgggtgtgtatatatttaggatgcttaattcttgttgttgaattgaaccctttatgtaatgcccttgacttttttgatctttgttggtttaaagtctgttt

SEQ ID NO: 772601 - DNA, 568 bp, Homo sapiens
caaggaacttcttgatttctgcgttaatttcattatttacccaaaggttattcaggagcaggttgttcaatttacatgtagttgtgtggttttgagtgaatttcttagactttatctctaatttgattacactgttgtctgagagactgctataattccagttttttgccattttatgaggaatgttttactttcaattatgtgatcattttcagagcaagtaccatgtggcaatcagaagaatgcatattctgttatttttgggtggcgagttctgtagaaatctgtcaggtccacttgatctagggctgagtatacgtcctgaatatctttgttaattttctgtctcactgatctatctcatataattggtggagttttaaagtctcccactattattgtgggagtatctaagtctccttgaagttctcyaagaacttgctttatgaatctgggtgctcctttgttgggtgtgtatatatttaggatgcttaattcttgttgttgaattgaaccctttatgtaatgcccttgacttttttgatctttgttggtttaaagtctgttt

SEQ ID NO: 772602 - DNA, 594 bp, Homo sapiens
catccacatgcatatgaatgaagttagaccttaatcttacactacacacaaaaatgtactcaaaacagattacaaacctaaatgcaatacatgaaaccataaaactcctggaaggaaacataagagaaacactctttgacattgacctgggcaatgatttatttttttttaatatatgtacaccaaaagctcaggcaacaacaacaacaacaacaaacacgtggggatacatcgaaccgaaaagcttctgcacagcaaagaaaacaatcaacaaaattaaaaagcagcctattgattgtgaaaaaatattggcaaaccatatacctgacaagggattactatccaaaatacataagtaactcrcagaactcaataggaaaaaaaaagtaatgtggtttaaacatgggcaaaggacctcaatagtcatttctctaaagcacatataaaaatgagcaacaggtgaatgaaaaggtgctcaatatcactaatcaccagggaattgcaaatcaaattcacgaaaagataccatctcacacccattagcatggctgctattaaaaagacaagaaatagcaagtgttggcaaggatatga

SEQ ID NO: 772603 - DNA, 550 bp, Homo sapiens
aaaatctatttccaaagaggtatgatccttcgaccattatgtacttgttaaatattttctcttgtattagtttttattatggtatcttaacaaattactacaaatttagcagcctgaacaacacaaatttattatcttgcagtttccgtaagtcagggactcaggtaaaaattaattggtactctgcacagaaactaaccaggctgatgtcagctagaagtgctatctcatttaaggtgggagatcttcttccaacctcgttggttgttggtagaattcagtttctagcagacacaggattgagacccttacctcctagaggttgcccaccattttgtatcatttggccctctctcatagcatggcagttttytttctcaatcaatctaagatgcccataagggagcatcctctgtctctgactttcagacactcttttaatggggtcacttaattcattcaggaccccataggattatcttccttttgactgacttaaagtcagctgactagagatctaaacacatatacaaaatgttttcacatttgc

SEQ ID NO: 772604 - DNA, 615 bp, Homo sapiens
catatattttaatttcttgctttttattttttgtgtatctgttgtatgtttttttgatttgaagttaccataaagattgcaaaactgattgcaatttaacactgattgcataaacaaagtaacaacaaaacacagcaaaaatgaataaaaattcaacacttgaactttgttccccctctttttaaccttttgtgtttctatttatatcttattgtgctatgtcttgaaaagttggtgtagttattatttctgattggttcatcttttagtctttctactcaagaaaygagtagtttacacaccgcaatacaatacaagacataaccatcttattgtgtgtgtatgcaacaacagagcttaaataaataaagcaaaacctgccgaaacaggaaggatatataaacatattcacaattacaatggaagatttcaggacacttctctgataaaaatatagacagaaaaatacgtgaggatatagaaaacttgatcactcgcaaactaatgggcctagttcacattaatagaacattccacaaaacatcagtagaatacaaggtgctttacaaatgcacagtgatggaatatttacctaaacatacgagtaaatttaca

SEQ ID NO: 772605 - DNA, 630 bp, Homo sapiens
ctctggaaagactgtcagttcctcctgagttcagctcatgcatcttaatgcagcatcggctttcctgtagaccaccacatttcaggccctttgaaaaaactcatataaaaaaagacgtgatgttcaagaaacggaggtggcttgaataatttaacagctacatatagccctatgaaatgttaaaggggcaatagggtacaatggggagttttacagagactgtagcatggcatgcctccttctggcacagtcggctccttggtgctagtgatagttgatatgttatgatggtgaaataataattacaatgaagttaataagtactttaatagaagctaaactagcttactgatattcaggcctttaaaaaaataaaagggytcaaataacaacattatttggaacatttagctgacattaaaaatcattttctagaacatcccgtctttgctactttaaaatacatttgttatggataagaactgttcagccagctatttctttctttcaaaaatatgataggttttataatcgctttccaaagtgaaaggtaaaaagacagatgcaaagtctcttaggttgtgctcacatgattagaagaatcaatgtttataattcctcatatggtaa

SEQ ID NO: 772606 - DNA, 643 bp, Homo sapiens
atcattttctgattataacatgtccttttatgaccttggcgtatattatccccgccatctagaatgttttgtcttaaccctcacttttccttctttagctagaaacctcctattcttttatcaaaaacctaactaaaattatatcaaatactctctcagaccacagtggaataaaattggaaataaactccaaaaggaaccctcaaaaccatgtaaatacatggaaattaaataacctgctactgaatgatcattggctcaacaacgaaatcaagayggaaatttaaaaattctttgaactgaatgataataagggcacaatatatcaaaacctctgggatagagcaaaagcagtgctaagcattaaatgcctccatcaaaaattctgaaagagcacaaatagacaatctaagctcacacctcacagaactggagaaacaagaacactcccaaaccacacccagcagaagaaaagaaataatgaagatcagagcagaactaaatgaaattgaaacacacaaacaaacaaaaaagacaaaagataaatgaaataaaaagctggttctttgaaaagataaataaaattgacagaccattagccagattaaccaagaaaagaggagagaagtttcaaataaactca

SEQ ID NO: 772607 - DNA, 507 bp, Homo sapiens
tgacccttgtgaaggcatgatttgggacaagatacttagcgtgtgatatccttactttcctcccgtgtaaaagaaacaaatattacctgcctgaggttgctacaagaaataaatgagatattgcatgtaaaaatgcccagcacagtatctagaaagtagttggtgcctgctgccatcttccctggcctttgaaagagtcctttgagttacaacattctatgtttccatcaaagtaatgtttccacattagcacagggtctgagatcatagcaggggkggaaatcacgagacacaaatccaagcaaaccttttcatcagagggccaacagaggattcagttaaccagtcaaatcttctgatttaggatgcactttcttctgtaccagtgtttcctaaacatgcttgttaataacaatctaggtcatcatctggagattccaaagcagcacatctggagagagacctgggaatctgaatatttaactggcactagggagaatgtttcaa

SEQ ID NO: 772608 - DNA, 659 bp, Homo sapiens
tgtacaaagtaaaaataatgaacatctctatttcaccttgctatattctcactttccagagacttttttttttttttttgaggcgttgttttgctcttgtcgcccaggctggagtgcaatggcatgatctcggctcactgcaacctctgcctcctgagttcaagcctcccragtagctgcctcctgtcccagcctcccaagtagctgggattacaggcgcccgccaccatgctcagctaatttttgtatttttagtagagatggggtttcaccatgttgcccagcctggtcttgaactcctgaccttaggcaatctacccgtctcggcctcccaaagtgatgggattacaggcatgagccactacgcccggcctttttcttttctttttttttcttttgtaagacagggtctcactgtcacacaggctgaagaagtgcaggggcacaatcatagctcatcacagttcactgtaaccttgaattcctgggctcaaggcatcctcccagctcatcctccaatgtagctgggactacaggtgtgcacccactatgcctggctaatttttttttcagttttgtagagatggggctcctggtcttacgctatccttccactttggcctcccaaaacactgagagtatagttgttagccaccagg

SEQ ID NO: 772609 - DNA, 656 bp, Homo sapiens
aaacccttatagcgaataaacatatgaaaaattacctacctttatagtaataagaaatgcagagtataacagtgatatgaaataccatttcatactctgattggcaaaaatgtcagtctgacaatgctaaatcctagcaagaatttgagagaataagtgcactgttcatgggaaagtgaattgtataaacaggtttgacagcatttaggcaatatgttacttcaataaattgaaaatgtgcacaagatatgacccagcaatttgacttttaagtatttgctgtggaaaagctcatatrtctggacaagaagacacatatgtagccaattaatacaaaataagagcaattgaagaggtaacttctaggtttcccaactctgaatcttcggatttgtatgttaaaacagaggcaacacctctgaaatcagactatgtcattttatattgaactaacaataacttaatctgtactttagagaaaatatgtcattgaaatccatactaatggattcccagtgaatgaattagctattaaaagaagctgaagtatctccaaaccatttgaatgaaatttaataggcaggttgattaaaatttaatagcaaacttgttggctattaaaagtgcacagtgtgataaatcaagatgtcagctct

SEQ ID NO: 772610 - DNA, 622 bp, Homo sapiens
catttatgtattgtatattttattcacacactatgacatctggtcacaaaataattttttttctccaactagttatttgcattattttcataagctcaacataagactcattatatttcaatttgagggtaggtacgggtgagtattatccttttcattgtacagtatactcactaaactctcagtgacttttgactgtttctaaaaatcgaatataaatgggaaagagccaaaagtcattttgattcacaccaagattatggacataccatatcctactagatacacatttgcattattttttaatgcgacattattaggactcttatcattaaattcagaccttaggcaaattcagttgacgaatattactcatagcatataactctgayatgttcgttaagatgttatatactttataattacactttctatatttcaaaatacagagtttatttgttataactactgcaaaaacctttgggaaaaactgctacatatttttgcaatgacaacttttgtcattattccaagaggatgtatttgtgaaatagcttaagatttctcaggaagaatacacaaaataatgaatgatgagaaacacatgagtggcacttcttat

SEQ ID NO: 772611 - DNA, 600 bp, Homo sapiens
tacatgagggttttattcatacttggactatttggaatttgatatttaattaaaagttgctatttgggcaatcctaaagatagaaaatcaaacacatgcagaaactgcaataattacatgtgtgatctcattttaagcacaaaccattgttgctattcttataaatttttctgcacattcctcgcagttgaacatgggctctatccccggaactgcaggggaacagaaggcgctggatgaggaatcacctgacccaggtctaccctgactctccttcaaagcatgyatttcgaataagcatctgagcttctgagggttggctccatctctcaacggggagggcaggcaaatgtcactgcatttcctacctgcagaactactgccatcagccatggaaactttggatgtagaaacactttcagtcccgactttatttctccacttccagttcctcctcagccaagggcagacctgcagacagtccacccatccaacaaagaccctgagacccatcaggagtgaaggtttaggcccccctaagtgtttgtgaagaaagataaaaagtaaaataaaactgggaaatggccaggcccagtggct

SEQ ID NO: 772612 - DNA, 591 bp, Homo sapiens
agatgaattaagacatggcatcttaccacaggagctcattgtctggtgaaagagccagacctgaactagaatcatacaatggaggattggaggcgctttccaagcgctttcaagaacacagggaaggagcaattaaatcctaactgagatgcacactaatgtctccatcctgcacaatgaaaatgaacrttatagaatttattctatcattctatatatcccacagattctttaatcctgattcatgaactcgctacagtgttttcagccaggcacggtggctcacacctgtaatcctggcgctttggtaggccgaggcgggtggattacttgaggtcagaagttcaagaccagcctggccaacatggcaaaacctactctctactaaaaatacaaaatttagccaggcatggtggcaggcacctgtaatcccagctacttgggaggctgagacaggagaagcacttgaacctgggaggctgaggttgcagtgagccgagatcacgccactgcactccagcttcggcaacagagtgagacgccgtctcaaaaaagaaaaaaacaaaaaattatgctttctgccgttatttt

SEQ ID NO: 772613 - DNA, 594 bp, Homo sapiens
agttaaatatgcattcatagggatgtcccaactctattccattacctcatggatcattctagcctctttcccttccaccaacagtgagaagtctggctctgaccgtcaatcatccatttacttaagacctcctggcctcaagtgrtctgcccacctcagcctcccaaagtgctgggattacaggcatgaaccactgggcctgaccttaattttagctgaatttctatgaaagggttggtttttttcttcttggtacttttgacacaaagctcatttccttcctttgccacttcctttgctgctgcatcagctccatcttttttcagcctccgcagcagccagccatcactaacagaagtaaggggagaagtcttagcaacttcattagacattgtgaggtgagagggcacagctgggtagccaggtggtgatggatggatggagggagggagggagagagggatggagggagggagggagagagggatgaatggagggagggagggagggatggatggataggtggatagatggatgaaaaaagtatcagtttataggtgctgactcatccaagatattaatacagcaagggga

SEQ ID NO: 772614 - DNA, 680 bp, Homo sapiens
tggctaatttttttgtatttttagtagagacggggtttcactatgttggccaggctggtctcgaactcctgacctcatgatctgcccacctcagcctcccaaagtgctgggattacaggcatgagccaccacgcctggcctcagcattgtatttttacagagtaggctgggctacagaggaagaccctgtctcaagaaaagaatagattggaaggatatgggggaatgttatagaactgtaactccaagatccctaaccccatcaatatgtaaataatgtagckataatgaattcagaatctccagattttcattccctgcttgacattaataatgtaacatatctattcacatcggtctctctgacatttacctattctttcaagagaccacattaaaagcaactaaatgatgatacagacgtttagcatcttgcggctttggacactagctagagatgtgtcgggaaattctgtatggaaggagcactctgggagcgtttttgctaggggccactgaagcatggtgctagataatagccctgttttttgaccagcctcgctgagcatgcagagctgatctcacgtgttctgggtgacctgcaacgacgtcagtgtgcagcagagacaccacatccacagaacaaaacaatagaccggccctgcaactgtggaccgcag

SEQ ID NO: 772615 - DNA, 680 bp, Homo sapiens
tggctaatttttttgtatttttagtagagacggggtttcactatgttggccaggctggtctcgaactcctgacctcatgatctgcccacctcagcctcccaaagtgctgggattacaggcatgagccaccacgcctggcctcagcattgtatttttacagagtaggctgggctacagaggaagaccctgtctcaagaaaagaatagattggaaggatatgggggaatgttatagaactgtaactccaagatccctaaccccatcaatatgtaaataatgtagcgataatgaattcagaatctccagattttcattccctgcttgacattaataatgtaacatatctattcacatcggtctctctgacatttacctattctttcaagagaccacattaaaagcaactaaatgatgatacagacgtttagcatcttgcggctttrgacactagctagagatgtgtcgggaaattctgtatggaaggagcactctgggagcgtttttgctaggggccactgaagcatggtgctagataatagccctgttttttgaccagcctcgctgagcatgcagagctgatctcacgtgttctgggtgacctgcaacgacgtcagtgtgcagcagagacaccacatccacagaacaaaacaatagaccggccctgcaactgtggaccgcag

SEQ ID NO: 772616 - DNA, 545 bp, Homo sapiens
ttgcattagataaaaaaggaggactttatttagcttctaacttggggcaggtgggacagaaagggggcgggagaaacagtgagaggtggagggagctgtgttatttgctgggctctttctgcatttctgcaaacatctctctttcctacccacttgcaaatctgtaaatttgattaaactgaccggattggtgtggaaacaagcaaaggggggctggttttccatttgggtggaaagaaaaggcagcaagtgtgaatgcagaaaccagatgctgagagattactctaaaactccaggaattcatggaaattgagaggagggctttgaattttcacagctttttttagagttggaaagtttaagccaagtttactagagctcaagggacaagsaaatcccaccggatagccagattcatgaggatttgagttaatgtccctaaacaatgtactccatagtgatcacctaataattgggggctactatctttggctgcaatcaaatccaaagttgagtaaagtgtttgacttgaattgtcctttcaa

SEQ ID NO: 772617 - DNA, 589 bp, Homo sapiens
aagatttgactgtgagaacaaaacttttaattaggagttttgaattcttctcatgagatctgcaggattccagaccttatcaacacttgggaaaatccagtggatttttttttttttaaataaccccatgttctttgctaacaggaaacagaaaaagacttttttttttttaatttggaattggttctgttgtaaattaggatgacactactaaacagtttcagatataaattactttcaatgatttttttttccctttcatccagaactggagcttgtatttcctgttgataaaagaaaaaaaaaaaaggcactgtatttaccaacctccctgatccagccaatccctctggcctytgtctttcaaatgaatgtggaatttgcttgaatctgaggaagtttagaagcggagctccagaccacccactttcaggatctataagatggtgctggagttaggctgagctgaggcactaatgcaagctcatgggttagaccagaggttctcttgactccatcagaaaaagtagtttgcaaatatcttcttgctagtgtcctccagtggaggggctgactccagggcccctgg

SEQ ID NO: 772618 - DNA, 611 bp, Homo sapiens
atgcttaaattcagaaaaaagtgctatacaaatatgaagtatatgtggttattataaaaattagaataattacatggaaaattcttaagagccaatattaaataaaaagaaaagatacaaaattataaatatatgatgaaaattattttactatgcataggttaaaaaaaagactagaagggaaaataccaaaatattattagtaattaccttcaggtggtaggrttattgatcacttttaatatttaagtatttgatattattctttatattcctaattttttcaatgagaaggtgtggcttaaatttttcttatctttaatcatgaatttttcaagcctctaacaaatatcacacatatccactactcatatttaacagatattaatgttttgtcatatttaatttgagtccctttaaggaataaaacacaaatacagctaaaatctaacccctccttcattcttccccctccctctggttttagaggtaaccattattctgtaattaagatgtatcattcatgggcaggttttataacttttgctacttatatatgtatctttgaaccacatgattatttttaaagtacaaagtagtatcactataca

SEQ ID NO: 772619 - DNA, 611 bp, Homo sapiens
atgcttaaattcagaaaaaagtgctatacaaatatgaagtatatgtggttattataaaaattagaataattacatggaaaattcttaagagccaatattaaataaaaagaaaagatacaaaattataaatatatgatgaaaattattttactatgcataggttaaaaaaaagactagaagggaaaataccaaaatattattagtaattaccttcaggtggtagggttattgatcacttttaatatttaagtatttgatattattctttatattcctaattttttcaatgagaaggtgtggcttaaatttttcttatctttaatcatgaatttttcaagcctctaacaaatwtcacacatatccactactcatatttaacagatattaatgttttgtcatatttaatttgagtccctttaaggaataaaacacaaatacagctaaaatctaacccctccttcattcttccccctccctctggttttagaggtaaccattattctgtaattaagatgtatcattcatgggcaggttttataacttttgctacttatatatgtatctttgaaccacatgattatttttaaagtacaaagtagtatcactataca

SEQ ID NO: 772620 - DNA, 587 bp, Homo sapiens
ttgacaaaggcaccaagaaaacacactgaggaaaggaagtgtcttcaataaatggtgctgggaaaactggatctccacatgcagaagaatgaaactagaccccaatttcttaccacttacaaaaaccaaatcaaaacagactaaagacttaaatataagaccccaaactatgaaactactaaaagaaaacataggggaaatacttcatgacattgatctgggyaataatttttttaatcagacctcaaaagcacaggtgacaaaagtgaaatagacaagcaggattacatcaaactgaaaagcttctgcacagcaaaggaaacaatccgcagagtggtgaggcaatcaacagaatgggagaaaatattcacaaactatgcacctaaaaagggattactatccagaatatgtaagaaagtcaaaaaactcaatagcaaaaaaaaaaaaaaaaatctaactttaaaatggacaaaagactgacatttctcaaaagaagttatacaaatggccaacaggttatgaaaaagtactcaatatcactaagcattggggaaatgcaaaccaaaaccacaatgagatatcatctc

SEQ ID NO: 772621 - DNA, 574 bp, Homo sapiens
acctaaaaagggattactatccagaatatgtaagaaagtcaaaaaactcaatagcaaaaaaaaaaaaaaaaatctaactttaaaatggacaaaagactgacatttctcaaaagaagttatacaaatggccaacaggttatgaaaaagtactcaatatcactaagcattggggaaatgcaaaccaaaaccacaatgagatatcatctcaccccagttagaatggctactatcaaaaagacaaaaaataaacaaatgttacgaggatgtggataaaggggaacttgtacactgtggtgggaatgtaaatttgtatagccattacagacaacagtatrgagttcctcaataagttaacaataaaactaccatatgaaccaacaatcccaccactgggtgtatatccaaaggaaaggaaatcagtgtgtggaagaggtatctgcattcccatgtttattgcagcactaatcacaatagccaagatatggaatcaccctaagtgtccatcaatggatgaatgtattaaaaaattgtggtatatatgcacaacagaatactattcagccataaaaagaat

SEQ ID NO: 772622 - DNA, 626 bp, Homo sapiens
gattttcatgaatatatctctttagtcctctcttttccttggactgagacatggtccacgaagagcagaaccagtgaaaatccgaatcacaaatctcttactgggctcagaatccctctcctccttggacatccagggacaaccaggaaaccactcccaggagaagctctgacttggtggcgattggacagttggtgggtcagtactggcatcattkgtcaaatcctggcccagcagccagtgtgcttaagccatgtctttagacttgtgacacagaaagggcaaaggctttggaattctgacctgcatttaaatcttatttctgtcatttactgattttagacctccagcaggttgtttagcctccttaacccttaatttctaatctgtaaaatggaagaaatataaatcgacctcaaagagtttctccatgtattcattccttccctgagtgtttttgagcactgcccacatgccaatgtcctaggcactaggatatatcagcgaaaagcaaatgagtcttagagaggagtgtgcgttcaatcaatgccagcttccttcctctccatttacgtcagttgtaacctcctagaggtcaggaagccaggtctggggaagtccaggca

SEQ ID NO: 772623 - DNA, 621 bp, Homo sapiens
accccaccgccagtcttgctcattctttttaggagtacctagcaatagggcgcctagccagggcaccccacatgccaccgtgtgctactcagatggctgtgcttaggcagtcccctgtgttttcagctcccagtgggcttagcagatcactgcctccaagtgcatgctagcattccctgtctcacatcaccttggcacacctctggcatagcttagctcctttgttaaagttcaccttcctatagctgatgctcagtcacgaatgagatactttctgaagagcagaaactgtctttttaaccagactatggttggtagcacatattaggtggtctgtgtgtgtyggaagcaatctgtgacctcttgtatctaactgacatcctgaacacaggcatagctggaaagggcagtttcttgattggatgaagacctgggagcacagtatctttccctgagcttcatgtatttgatacttattgagtgaccatttagagcaaggccccttgtaaatcagtcagagtgaagagtgaattgtgctgatggaagaatttatagtgaataccatagggctccctgcattcatttttccttcttctaaaaaggaaagcaaatactgtgatt

SEQ ID NO: 772624 - DNA, 611 bp, Homo sapiens
caaaaaattggtttgacatatttatatacatattcaatcattcattcattcactcaacaaatgtttactaagtaccaacctagtacctgtgccaggtactaggctaagtgttaagaatacaaaagacttcacatgttaaaacttaacctatattgccaagtaggagggctgtgctgttcattcattttctcatttatacattcattcaccaggcagtggggatataaaatgagtaagactctcgagcagaaagtgtcagtcctcaaagaatttctaatggaataaggaaatgtaattgtcatggtaaggactgttacagagggttgcctttaattaatgtattgtttatttcttctctggagaggctgttttttctaagaagcctgtcccagctgtccctttggaayagatctatgttcaagtattgtcaatcacttaaaaagagccaggcatggtggctcacacctgtaatcccagcagtttgggaggccaaggcgggctgatcatctgaggtcaggagtttgagacagcctggccaacgtggtgaaacctcatctctccactaaaaatacaaaaattcgctgggcgtggtggcgggcgcctatagtccc

SEQ ID NO: 772625 - DNA, 607 bp, Homo sapiens
gttgaattattcaataaagagttctggggatcactggctagccatttgggacaaaaactggattcttctcttattataaaaataaattcccaggttgaatgtttcttgcctaagattaggaataagacgaagctatcttcccatcacttctattccacatggtattggaggttctagtaagtgcattaaggaaagaaaaagaaacacaaggtgtaagtttggaaaatagtaagtaaagccatctctacttgtagatgattctatttgatattcctaagagatatcttaagaaatctattttaaaacctactaaattaagtgaatttagcaaatacgcagggcacactgtcaatatacaaacatacaaaaatgtctaatactagcaataaacatactggaaaaggcaaggacactggtatttaaacagcgttaagatacataaaasacttagataaatttaacaaaagatgtgcaagatctctacactaaaagctgtaagactttgctgaaatcaaagaagacctaaataaatgaagagatgcatcatgttcatggactgttaagatgtcaattatctgcaatttgatccatggatccagtgagatgc

SEQ ID NO: 772626 - DNA, 665 bp, Homo sapiens
ttaaaaaaagtttagtgtttcattacttgcatttttctttagatgtggcgctgcaaagtgagtcagtaacctttgttgagtttcgaaaaaataatgacctgttacagtgttttgttctcgtttgttattgtttggaaaaagagtccaaaataattttattaaagtcacattactctgtagatagacataggccatatttttgagaattcacattaataacaattttgtatatgcaatactcttttttttttttttttgggagacagggtcttactctgtcatctgcagtctcagctcactgcaacctctgcctctggggttcagtggatkcttgtgcttcgctttctcaagtagctgggattacaggcgtccgccaccacacccggctaatgtttttgcaattttagtagagatagggtttcaccatgttggccaggctggtttcaaactcctggtctcaagtgatccgcctgccttggccttccaaaatgctgagattataggcatgagccaccgcgctcgacctgttcctaatttttttttcaaattttgaaatgcagataatattatgtaccccattagcttatggggtacgtaaaggaaatttgtatttgatattggctctggttattacttttgtccttccatggacaatcacttaaaac

SEQ ID NO: 772627 - DNA, 665 bp, Homo sapiens
cttcctctaaaaaaaaaaaaaaaaaaaaaactcaggggaacgtggctgaaccaaaaactaagggcagactgggcatggtggctcgcacctgtgatccgagcactttaggaggctaaggcaggtggattacctgaggtgaggagtttgggatcaccagtctgaccaatacggtgaaaccctgtctctactaaaaatacaaaaattgtctgggcatggtgggatgcacctgtagtcccagctactcgggaggctgagacaggagaattgcttgaacccaggcgctggaggttgcagtgagctgagatcatgccactgcactccagcgtgggtgacagagttagactctgtctcaaaaaaaaaaaaaaaaaaaaaaaagtaaaggcagygtcttttgtctttgttcacaaagctcttctttttttgaggaaatgcttctgtctcacagcaatacaatcatgtggttttgatgggttttctaaatcaggaccctgctctgtagtgggcacatgatattccagacattctaatgtcttatttatctggctttagcgagtgttccagacaggggcatgcatcccaagtcagggcaattagagttttgcccaggatttacatttggatatggaggagaaagtgctttgctttttgcattatggaggtgggac

SEQ ID NO: 772628 - DNA, 491 bp, Homo sapiens
gacattaaattgtacacttaagatctgtggattttactatatgtacaatacattttaccatgataaaaaatggaaatattgggaggctgaggcgggcagatcatgaggtcaggacttcacgaccagcctgaccaatatgctgaaaccccgtctctactaaaaaaaaaatgagccgggcatagtggaacgagcctgtagtcccaggtactcgggaggctgaggcaggacaatcgcttgaacctgggaggcagaggttggaggttgcagtgagccaasattgcgccactgcactccagcctgggcgacagagcaagactccgtctcaaaagaaaaaaaatcaagaaagaaaaataaaatatattctggtctcctatacattagatttaaaaatttataaggtatattttgaagcttttttttgtaagtagataaagtctccaccatatttgatgcttaattctaaattttctgtggactcttccctttttaca

SEQ ID NO: 772629 - DNA, 539 bp, Homo sapiens
accatttaaatagggaggtctgggaaggcctcactgaaatgggataatttgagcaaagatttgaagaagtgargggaattagctatgcagatatgtagaggagaggtttctaggtagagaggagctgcagccaaggcatcattgagggcagcaagaagccattatgccggatcagggatgagaaggagagctctaatggggacagttcaaggagggcctggtggcctttatgggtgttggctcttcctcagagggaactagtgaaccattgcagggtattgggcagagcgctgacatgatctgacttatgttttcagagggtcatgtgtttggaatcgacatttgaggaatgtctattccatgtaattacatggaatcacaaagagtctatgacctaagtgagggagaatggcttgagccagtatggaagcagaagaaggagtgagcagtggttaggtccgaggtagcctttgaaggtagagctaagagcatttttgacattggatgtgtgatatggtgtgttttatttataaaataaa

SEQ ID NO: 772630 - DNA, 619 bp, Homo sapiens
ccaggtgatttgagatatacaggtgaaccaaatgaacaaagacagatgataaacagtcaccataatacaatggtaatttatataatatcccagaagagacaaaatgctgtggcaacagggaacagtggagtagggtagtgggggaaaaagaaaggcactggttaccatttaaatagggaggtctgggaaggcctcactgaaatgggataatttgagcaaagatttgaagaagtgaggggaattagctatgcagatatgtagaggagaggtttctaggtagagaggagctgcagccaaggcatcattgagggcagcaagaagccattatgccggatcagggatgagaaggagagctctaatggggacagttcaaggagggcctggtggcctttatgggtgttggctcttcctcagagggaactagtgaaccattgcagggtattgggcagagcgctgacatgatctgacttaygttttcagagggtcatgtgtttggaatcgacatttgaggaatgtctattccatgtaattacatggaatcacaaagagtctatgacctaagtgagggagaatggcttgagccagtatggaagcagaagaaggagtgagcagtggttag

SEQ ID NO: 772631 - DNA, 623 bp, Homo sapiens
  misc_feature 1, 2, 3, 4, 5, 6, 7, 8, 9: n = A,T,C or G
nnnnnnnnnaaacacacacactgaattttctcgcttccacagtgtgaagaaacttgtggaaggagagtatgttagttttaggtcaatgcagaacgaattctcaccaatttggggtatttaaaacaaacaccagctcacaggtcagaagttctgctaggccaagtgactgcctcctgctcagagtcccacgagggacctccaggatgggtctggctgtgcggtcgttgcctccacctgagaagggtctggcttcgatccgattcgagttggtggcagaattcaacaatgcctcagggttgtgagccccaggcccacttgtttgttctgcctgctgccgtgaggatgctctcagctcctacccgtgctgcccaggtctgggccgtgaggctccctgggtgtgcacagccagtgctggggaatctcccacaggggagcgtaatcacaggggggttcagtcctcccttatamagggctcagatgactgcattagacccagcccttagcagccgttggttcaggataccccctaatctaatcaggaagtcgggcgggcacatcaattcgtgcttccgcccacacccaagggaggggcagacacagggcgactctctgaggggcgggaa

SEQ ID NO: 772632 - DNA, 623 bp, Homo sapiens
atgcagggggcatttcagaattcagtcctcttcacagaatcgcaaagttcacatctcacaacagtaaagaaactatttacagtaaaaatgagacattttacgaagttgagcattagaaaacttcgatgtctgagaaaaaaaactctctaacgcacagggaagaaagcggtttatcaaatactctgaaaataaaatgggctgggtgagggaaacgtgaaaatattatttcaattttattttacgtcactttattttaktttattttattttatttgtttatttctgagacagtgcctcgctctgtcccccaggctggattacagcggcctcatctcagcccactgcagcctcggcatcctaggctcaacggattctcctgcctcagcctccagagtggctgggactaaatgtgcgcgctaccacgccgggcaaatttttgtatttgctcaagtagagacgaggtctcgccattttgcccaggctggtcttgaactgctgacttcaggtgatctgccccaccttggcttctcaaagcgaagggactataggcgtgagccaccgcgcccagactatgatagtttcacactgaagcctgacgctgctctgccttaggatttttcctg

SEQ ID NO: 772633 - DNA, 541 bp, Homo sapiens
tccccaacagcaactgcaaaagaatcatgttctaggcccacggccagagggcagggtctgtttgtgcaggaataagtaccgcgttcatcttccaatgacaggagtgtgtgcgccggagctcccgcatctcagtcccacctggatttacccacgatcttcgtgtcttaaaatgcgaagttgcccttacctggatgaagacagcagatcgcttcataggagccttggctaaatctttgggcattttaatgggatgtggaggcgtttctctatgtctttccagctggaggaatcaaggtgcctgggcctagagcatcctgtggacaggcagctgcattcagagagggaagcccttcccaggagatctgtatggtttcctgctgaagcctkgtgtagctctgtcttagcttgtaggcttatgtctgggttccagtaattggagcttgcagaaatgtttccccgattgttgttcttctgtagaatttcaacgctcatatgtatttttgtgagtcaccacgaaaacagttaaactgatcaaccgttt

SEQ ID NO: 772634 - DNA, 572 bp, Homo sapiens
tgctcaacttcgtaaaatgtctcatttttactgtaaatagtttctttactgttgtgagatgtgaactttgcgattctgtgaagaggactgaattctgaaatgccccctgcatttcccgcccctcagagagtcgccctgtgtctgcccctcccttgggtgtgggcggaagcacgaattgatgtgcccgcccgacttcctcattagattggggggtatcctgaaccaacggctgctaagggctgggtctaatscagtcatctgagccctttataagggaggactgaacccccctgtgattacgctcccctgtgggagattccccagcactggctgtgcacacccagggagcctcacggcccagacctgggcagcacgggtaggagctgagagcatcctcacggcagcaggcagaacaaacaagtgggcctggggctcacaaccctgaggcattgttgaattctgccaccaactcgaatcggatcgaagccagacccttctcaggtggaggcaacgaccgcacagccagacccatcctggaggtccctcgtgggactctgagcaggaggcagtca

SEQ ID NO: 772635 - DNA, 610 bp, Homo sapiens
tgtgtaattgacaccctttcctacatctccttggaaatctttggtaaaattcaccttgctcactaatgctttgtgaaacactttctttggtatctgtaagtaaacatgacaccttgtttccaggtcagtgtagtgatcagagataactttgtagcctacgtacccataggaccattctaacgagaatgaaaaggttatgcaggagacatgaagatagaccaaagggctctggaaaccagacagatggatttaaaccaagaatattttaatagtaatggcagactaaggggaatcatttaaaaaaaaaaaaaaagtctaggccaggcagcggtggctcacgcctgtgatcacaacactttgggaagccaaggcaggtggatcacttgaggtcaggagtgtcaggcctctgagcccaagcgaasgcatcatatccccgcgacctgcacgtatacatccagatggcctgaagcaactgaagatccataaaagaactgaaaattaaaaaaaagaaaaagaaaatagccttaactgataacattccaccattgtaatttgtttctgccccaccgtaactgatcaatgtactttgtgatctcccccacctttaaga

SEQ ID NO: 772636 - DNA, 610 bp, Homo sapiens
tgtgtaattgacaccctttcctacatctccttggaaatctttggtaaaattcaccttgctcactaatgctttgtgaaacactttctttggtatctgtaagtaaacatgacaccttgtttccaggtcagtgtagtgatcagagataactttgtagcctacgtacccataggaccattctaacgagaatgaaaaggttatgcaggagacatgaagatagaccaaagggctctggaaaccagacagatggatttaaaccaagaatattttaatagtaatggcagactaaggggaatcatttaaaaaaaaaaaaaaagtctaggccaggcagcggtggctcacgcctgtgatcacaacactttgggaagccaaggcaggtggatcacttgaggtcaggagtgtcaggcctctgagcccaagcgaacscatcatatccccgcgacctgcacgtatacatccagatggcctgaagcaactgaagatccataaaagaactgaaaattaaaaaaaagaaaaagaaaatagccttaactgataacattccaccattgtaatttgtttctgccccaccgtaactgatcaatgtactttgtgatctcccccacctttaaga

SEQ ID NO: 772637 - DNA, 596 bp, Homo sapiens
gtgaaagggttgataggtattgatactgatactgatatataaaaataattccatagatgtataaagcgttctgaccaataaactctatctagagtagtacacaaatggaggcatgctataacgtccatccatctgcatttaacttatacaaaataagcattggtccttgttgctgacttctgggagataaaaattcactaaggccatgagagtcattcatgccaaatcaaggataaccctttttattctagtgaacacagaaccaaaattaaattagcctctgctgaaaagccctaacccaaatgtgcgaatgctgaaaatgtttatttaaagcttccaccaattgagrtaattcttttttttgaacatgggacaaaaaaataaattattgtattgcattttgttggctggagaagcaactttatttggtaggaaatgaatagttgaggtctgtgacttgaagatacattgctgtactgacagtgaattttagttttctctagacactttcttctgttatatatatatatataacatgcagggttatataaatatgtttattcaatgaccatttatgagtatgtcttggaaaaaaa

SEQ ID NO: 772638 - DNA, 534 bp, Homo sapiens
agagaaagtaaacaagcaattgctctggtgggttcagataatccctaaattatctagtttaatctggtgtacttaaagatatcctggctgcagaaaatctggttgaatttgcatgagtgtaagaatgtgaggatgtgtgtgtgmctgtttgtatatacatgtttgcatagtgggaaagtttagaatgaaaatcaagttctgatgcaaaagaattaatgtcacagatattcattaaaaagtaatctctctgtcattctgctattagtgagtatgcattctgtccacacaagcctgttttttgctttctgaggttgccgcaggccatttcagcttttctgattcagttgcttctagtgattgcagatatcttccactgcagaaaattgcaatttattagttcctattctgtttcctagactcatctacatagagagagtactaaaagattcagttttaaaaagtttttatgcacatcaaaaatattattcctcttttgtaactcgttcatgtctatgtctattatttgcatcaggt

SEQ ID NO: 772639 - DNA, 507 bp, Homo sapiens
tcgtttagctactcaagcctcagcaatggtggatgcccctcccctagccaggctgctgcgttgccatctgatcttagactgctgtgctagcagtgagcaaggctctgtgggttcacgacctgctgagccaggtacggaagagaatcytcttgtctactggttgctaagaccttgggaaaggcacagcatttgggtgggaatatcccatttttccaagtacagtctgtcctggcttctccaggctaggatagggaaatcccccaaccccttgtgcctcccaggtgaggtgacaccctgtcctgctttggctcaccctccatgggctgaacccactgtccatccagtcccagtgagatgagccatgtacctcagttgaaaatgcagaaatcacccatcatcttcttcaatcacatttggagctgcagaccagagctcttcctatttggccatcttggaatggatctccgatttttacaaatcttttataatcttttagaaattttgata

SEQ ID NO: 772640 - DNA, 645 bp, Homo sapiens
tggtgaaggtgaaacatgagagatatacatgcttttatgataaattattttgtggtcatttaaattttcaatttagcagtgttgactgtgtttaaaatgtgaatattgacatataagagaaaaaatgttgataacaaaaaatacaaaacaaagcatgatagtgtgaatggcttttctgaaacctcagttgttgccttagtttcaaaaaaawttaaacaagagacaaacacaaagaagatgcagcataaagtaatttattgcaaaggagtaagtctattttaaaggttaggtgcagaatacccagtacatcttgagagagaagggattcagggtgtgttgcttatggaatgagaaagcaaagactggaactagggacttttttatgggagtcttatataattatttataaagaggtggaaagtggtgttattagtaagcatgttctggatggccctcttgatgcacggacacagtagctgtacatgcttgttcatttttcacatctcactagcatcttaaatctccacccacaggtgtgctttttactattataatgagtaaaaggtcagtttgaggaaaggtaaaatcaaaatgtgcatgctgtttacaggggagtttctctattggagagagctttgcttgaat

SEQ ID NO: 772641 - DNA, 553 bp, Homo sapiens
acctgagtctagtgataagtcaaaatttttcctgtaggcagagtgcaggcaaaaatggagagtcactctcctaggtgattgatgcagagatatgtcacaaggccctctgtagaaagggcctgggcagggccagacacggtgggtcacacctgtaatcccagcacttygggaggccgaagcaggtggatcacgaggtcaggagttcagaccagcctggccaacatggtgaaaccccatctccactaaaaatacaaaaattagccgggcatggtggcaggcacctgtaatcccagcacttcaggagactgaggcaggagaatcatttgaacctgggaagcggaagttgcagtgagccgagatcgcaccactgcactccagcctgggagacaaggcgattctctgtctcaaacaaacaaaaaaagaaaaagaaagggcctgggcaggagcctcttattgtataggtgttagacctagtaacatgtcctaacgtccaaaatattcagggactaaggaaaaaaggagagtcacataacctgagagcaaggcttagcaa

SEQ ID NO: 772642 - DNA, 624 bp, Homo sapiens
agattttactagacagaggctggaggagaagcacagagatcaggtagcaggctcttgcagtggccagggcagagatcataggttcctggactgtgaaaactgttggggagacaggcaggctcacagtaggtattggagaatgatgaaacagggtctgccaatggctgggaattggggtggtatctgaggaaatgagaaaaattaatatcagctctagatcaacacagtccaatagaaaaagatgtaaggcacatatgtaatttgttttctagtagccagtttaaaaaagtaaaaggaacaagagaaattaattttaaygatgtactttattcatcatactcaaaatattattccaatatgtaattaataaaaatattaataagctatgctacattcttttaaattttttttgtgctaaccctttgaaacctggtttgtgttttacacttacaacacatcttaattcgggtgaaccacacacatttcaagggctcaagagccatgtgtgtttagtggtcagcatattaaacaacatcactgtagatatttggcctcacgattggaagaacagtggtatctgttcctgaaatagaagaaaagtagaagaagaacagaattgtagag

SEQ ID NO: 772643 - DNA, 582 bp, Homo sapiens
gattcagtcacgacacatcctgttcactcataacaacagacagccgtagagggcagctaatgagtaggtagccaaatgacaatgtctccttacttttgactttgcttccaaggcccgagtggctgcctgaccgtctccactctggcgtcaaacagtccccctgcagtatgcagacaatttaaattattacaaggcaatgttgcaagtatgagccctggcccaaaataaagtaattacattcaattagcagtccccaaagtgatggtccaatactaagagctttagatgttgcctttkgttgacttacagaagccaggtaatgagtgaaacttcaaagtgtaagagactaaattactgcttaattagtggaaactagatcagaaaacatggcaaaagagaaaaaaagaacacatacccacaattttcttttgttgaaggaattcagataatatgctccatttcccaaataacaacaactgaatacctcaacacaggaatgttctgaggaaaaacccaagggaatgacgttgttggaagtgttttctggggaaaacattgaagttgatgccatatctgcccccc

SEQ ID NO: 772644 - DNA, 582 bp, Homo sapiens
gattcagtcacgacacatcctgttcactcataacaacagacagccgtagagggcagctaatgagtaggtagccaaatgacaatgtctccttacttttgactttgcttccaaggcccgagtggctgcctgaccgtctccactctggcgtcaaacagtccccctgcagtatgcagacaatttaaattattacaaggcaatgttgcaagtatgagccctggcccaaaataaagtaattacattcaattagcagtccccaaagtgatggtccaatactaagagctttagatgttgcctttggttgacttacagaagccaggtaatgagtgaaacttcaaagtgtaagagactaaattactgcttaattagtggaaactagatcagaaaacatggcaaaagagaaaaaaagaacacatacccacaattttcttttgttgwaggaattcagataatatgctccatttcccaaataacaacaactgaatacctcaacacaggaatgttctgaggaaaaacccaagggaatgacgttgttggaagtgttttctggggaaaacattgaagttgatgccatatctgcccccc

SEQ ID NO: 772645 - DNA, 596 bp, Homo sapiens
cagtatcattctttatggtttgggaacttggcaattaagaccatagattattttcttggtatccatcagtttgataaatcttagacagctacatgagttctttaaaggaaataataaatctaataaatataccttggtaaccatttcagtctatatttatgccttgaaatctaaagctttcattaagctttctcaagtgttcttgtagagagttagaacgtagcttcaaatgatattttctaagttttatgtgattccttactgagaaagagtcaaactttcttttttcttttactgaatgagattagataacacccactttaggaaacagaatgtttcattcttacgggttttaatttttttttaatcctattatttctttataactccctgggcaatttaaccaggtttgttagrgtaagtatgctcaagtaaaatgaaattaaaacttctccaattggttattacctcaattcacaggaaaatacttctcacctacttaaagcaatttttccactaataaaaattaattttctataccactttaagccatgaagcttttggtgcaaatttataatttttatatttgacataac

SEQ ID NO: 772646 - DNA, 564 bp, Homo sapiens
agcaaacaagtaccatcactttagcaaaggacaaggcaaaacaaaatatcttctttgaccggtggaactaaaggttggaggtaacagctggagagaaatgtgggtacctgcctcccaagtgagtggattaacctgtcctggcctcttctgagaaccacagcactgcaaatccagtggttaagaaagcaacgtcgcctcttctgtctgagcttcagttttcatatcagtacactgggccttcagycttgcatggccagagccctcctccttgggtgtgtgggtttccctttatgtccccccaagtgtatcaggagcatgtggcttttccactgtggttttaagcgctatttacaggaaccatctgcagagtctgcagagttcactgtgcatgcatacagttgtgcaacagtggctttgtctgagtcactgattccactcattcatcctacagataggaacaggaacattccagaaggaaggtctatgatcctcttagtctctgtagcaatcttctcagagatacctataggcattatgtatcatttctcattctaaattaacttc

SEQ ID NO: 772647 - DNA, 601 bp, Homo sapiens
  misc_feature 314, 318: n = A,T,C or G
tcttttagagaatagttttctctacacacacatctctatcatgatactcactttttgaaaagtccagaccaattttctcataaaatgtttcatattctgaatttgttttattgcttcctcattgcatagtttaacatgttgcccaatctcttgtatttcccataaatgaagctgtagatataaaggcttgcttagattcggaattaacatttgtgacaagaacacatcataggtggtattttattccttgtattttaagtgtttcatattgcattgcatcaggactgacacaacttcaggttttaccaccattntatnctttggttaggtaagtaccaagtggggatcctctcactttacagacacattttcagctttacaatgagtaagtcatctatgagatattttagacaccrtctaactccattccttcttcttctactgctttggtttctaaccagttacttatcttgaggaagatatttcttcttcctaaagcttcctttttgttctattcattcactaagaaaaaatacaatgttgttgtaatgattcagtgaagtaatgcatgtaaaatagttttataaatcgcaaatgttgt

SEQ ID NO: 772648 - DNA, 656 bp, Homo sapiens
agtaattgcacctcattcagctctcaggggtcgatgccttacctttgcacaatttcccagtaattttcagttatatccccaaagagccactgcccccccgcccccggttgaacacatagaactgagaaggcaaatgagtttcaaagtagagagccaaacctgacttactggtagtggctgttrcagcttgtgcttcagaaatttgtaggcctgcatccaaggacaaagagaaagagaatgccttcatagattggcaaagtgttctatgaaaaagggagagtgtatggtagccctcattgagcatggtctttgtacaggttgataagtgtctaatgcagatgtcacctgaagtgatgtcccagctagctgcaagaacagagcttgaattatctgatccatgggaaggcagataagtaacttccaatgcataaaaaaacttggtaattattactttacccagttcttgccatttgatttattttgttgcctttttccacaattattcctgctgtctttaacactccatcaaagattcaaaatatatgataaatggttatgctaccatagatatcaccttcactacacatatatgtatatgtatgtacatatgtccacgctatacataggtgtatgtaaatatagacatatataaaaat

SEQ ID NO: 772649 - DNA, 635 bp, Homo sapiens
agcatagaaagggcccaggtaggaaccggaggcagaggccttctgtgatgctcttggcaatgactaagaccatggcctgacccttggagatggagaggagggagtctcatagtgcttgagattgggtttcttgtctttctgaaaggataaagatcaaaaaccaaattaatttgactttaaaaaataaagaagagaaacatttctttcacatccaagtttgtggactaaagctttacataaagaaagtgcttaacacgtaattgttattacagtatgtaatacctaaaaagactctacaatccatccrgtccgataaacttaagagaaaaataaagcctagaaagtcttaagctatttcatttcttaggggtagaagtgggtatccttccactacttatttaaagacaactaaacagggatatgctaatagcttcaattaaaattatggaagaagtagtccaggagacgtcttgaaacttgaaactttgtcaaattgaattaactattttaaatactcagaattttcattaacatacaatatatgttacacttacaatatttgttgtgtttgaaattcagagagtaatttgttagattctttctcttttaaaactctaggatccatccttggtgga

SEQ ID NO: 772650 - DNA, 646 bp, Homo sapiens
caggtcaagagatcgagaccatcctgaccaacatagtgaaactccacctctactaaaaatacaaaaatttaactgggcatggtggcgcgcgcctgtagtcccagctactcgggaggctgaggcaggaggatcacttgaacccgggaggtggaggctgcagtgagccaagattgcgccactgcactccagcctggtgacacagcaagactccrtctcaaaaaacaaaacaaacaaacaaaaaaacatagacaagccttccagagatagagacttgccctctgatatagttttctctcatatccactctgcctggtcagcaagatacttaaaagaagggtttcaaagggagcctctctaactttgaagggcccaggagccaaaggagcgagccgtgagccctcagtttatttccaagcaagagcacctgagcagggaggtacccaatatactcttttccctgaccttggggtaggtccctgctgcaccactgcctggagacaaaggcttgatgttaggtctagggtgacagggaagaggcctctgaccactggtgacccttaacgtcaaagataggtaggaggaagaggtggaaaccaatacttaagatttagggaggcaggatccttgctagctccctgcatgaatc

SEQ ID NO: 772651 - DNA, 683 bp, Homo sapiens
gcaaataattagcaactgcttggaaaatgagagtggtgttgatactaccagcagtagtttgtgaagagcaggtaagtcagatcagtttcattttctcccataatagaatggtagccatgacagacatgggaaaaggtacggatgttatgtatcttctttcatgtactcaataaaakattttcaagggcttctgtgaggtaatggaaggaaacaagaaacagacctatgtcctgtttcagagtattttgtagcccagaaggaaaaataagacatccatatagatcattgtgatatacctgtgcttcaaatcttgccctctctataatccattcttcacactgaagggaaaatagtttttaattttcccatgaaacgaactgagaatgtcagaatcctgctttaaaaatccttcgatgtgtccccactggaatcaaagtctaggctcctgaccctggctgacaaaactccccgtgagctggccctgccagtctctccaatctcctgtcccaccagttctcctgatccccctctgtcattcagaactgccgtccgtacccaggagaaatatgatctgtcctcaccttcagacctttgcacctattgtctagaacgttcttcatgccctttttgacctggtttacttgtacttgtccttcatatctcactcagcatagacactgcgt

SEQ ID NO: 772652 - DNA, 624 bp, Homo sapiens
caatatatggtagatcctaatgttggagatggtgactctttccaccttattatgctttttcagtattattttagctaggctaaggcttgtgcattttcatgcaaattttagagtaagcttatctatgactctagaaaactatygctagaagctaaatgggaattgcatgaaaccaataggtcaatttagaaagaattgatattcttactatgctgagtcttccaattcatgaacatggtatgtctctagatttaaggtttttttctccttttattgatatataataatttacatatttatcagtacatgtgagtgtttgttacatgcatagaatgagtaatgatcaactcaaggcatttggagtatccagcatcctgagtgtttatcatttttacatgtcaatataatttcaagtcctctcctcaggttactttgaaatatatataatattgttgctaagtatagtcactgtagtctgctgtcaaacattacaactcgcttcttttatctaactgtgtgtttgtacccataacccaccctttccaatctctggtatctattattctgttctttatgtccatgagatcaagtttttggctcccatttatgagtgagaatgtataa

SEQ ID NO: 772653 - DNA, 478 bp, Homo sapiens; identical to SEQ ID NO: 744052

SEQ ID NO: 772654 - DNA, 596 bp, Homo sapiens
ctatcttgcatgattgatttgaatattagagattataaatataaggtttccatgtaaggccagaccaatagtaggtacttaattaaaagtattagccgtatcttttgggagatgggatagatgtctctgtcctggtgtaacacaggtcatattcatgaactctttgctagcctagttcattcatttattcaaaaaaaccctatattgagtgcccaccatatgccaggtgctggttttatagtcccagccctcatggaaagtataccttcgtggaagaaaagacagtaaaaaaaaaaaaggaaaatacataaaatgtgaaatgctttataaaagaaaaatgggagagggaacatatttagwtggagccgtagaagaaaacttcattcaagaggcaacatttacaatgaaacacaaaggatggcaaaaactgctctatgcaaagagcaagaggaaaagcatttctagcaagaatagtgaagacaaagaccctgacatgggaaaagagcccaggatgtttgagaaaatggaagagagccagagtggccagagcacaatgaataatttaagagctatgggtgtttaatagccaaaactgt

SEQ ID NO: 772655 - DNA, 678 bp, Homo sapiens
cataaattttgtattttgacatggatcctatcccatcatatctccttatgcatatgcaaattctccaaaatccgaaaaaattcacaatccaaaacacttctggtcccacacattttggagaaggggtactcaacctgtaaaagggatacagggaaatacccatccccgccctcagtgtacctagttcctctccctcacccgacccaaggaaagcagtgttgtttcttggaaggtatcctcctaggggtctttatgcatacaaaataaagcatattatgccactgtcctataccttatatatttttttcactcagtataatttgtaactctatttgaatatgcagagaactttctcattttgttcattgctgcatagcattccattgtagagttgcaccgtcatttacccagtattctaacttgggttgctttcagacttttgctgttatcagcartactacagtgaataactttattcatgtatcattttgtacataggcaaatatatttgtgggataaattcccagaagggcacttgtacaaagagtatatacatttaaatttttgataggtactattttctctcacagatgagctaatttatactcccaccaataatagctgagagtttaccttttcccacactctcaccaacatgttatcaaatgtttagatttt

SEQ ID NO: 772656 - DNA, 593 bp, Homo sapiens
tctcccattctgtggggtgtctcttcactcttttttccttagctgtgcagaatctttttagttcgatgtaacctcatttgtctatttttgcttttgttacttgtgctcttgaggtcttgtccaaaaattcctttcccagtccaatgtcataaagcatttctcctatgttgtcttcttgtagtttcatattttctggtgtragatttaagtttttgatcctttttgtatatggtaagagataggggtctagtttcttgcttctgtatgtggatatccagttttctcagcatcatttatcacagagattgtgctttctcccttgtgtgttcttagtgtgtttgtcaaaaatcagttggctatgaatgtgtggatttctgtgttctttgttctgttcctttagtctgtgtgtcagtttttatgccagtaccatgctgttttgattactatagcttggtagtattttttgaagtcaggtactgtggtgcctccagctttgttttgctcagaatttctttggctgtttggggtcttttgtgggtccatatgaattttaggattattttttctatgaagaatgttattcgtattttgat

SEQ ID NO: 772657 - DNA, 593 bp, Homo sapiens
tctcccattctgtggggtgtctcttcactcttttttccttagctgtgcagaatctttttagttcgatgtaacctcatttgtctatttttgcttttgttacttgtgctcttgaggtcttgtccaaaaattcctttcccagtccaatgtcataaagcatttctcctatgttgtcttcttgtagtttcatattttctggtgtaagatttaagtttttgatcctttttgtatatggtaagagataggggtctagtttcttgcttctgtatgtggatatccagttttctcagcatcatttatcacagagattgtgctttctcccttgtgtgttcttagtgtgtttgtcaaaaatcagttggctatraatgtgtggatttctgtgttctttgttctgttcctttagtctgtgtgtcagtttttatgccagtaccatgctgttttgattactatagcttggtagtattttttgaagtcaggtactgtggtgcctccagctttgttttgctcagaatttctttggctgtttggggtcttttgtgggtccatatgaattttaggattattttttctatgaagaatgttattcgtattttgat

SEQ ID NO: 772658 - DNA, 613 bp, Homo sapiens
ggtgtctcttcactcttttttccttagctgtgcagaatctttttagttcgatgtaacctcatttgtctatttttgcttttgttacttgtgctcttgaggtcttgtccaaaaattcctttcccagtccaatgtcataaagcatttctcctatgttgtcttcttgtagtttcatattttctggtgtaagatttaagtttttgatcctttttgtatatggtaagagataggggtctagtttcttgcttctgtatgtggatatccagttttctcagcatcatttatcacagagattgtgctttctcccttgtgtgttcttagtgtgtttgtcaaaaatcagttggctatgaatgtgtggatttctgtgttctttgttctgttcctttagtctgtgtgtcagtttttatgccagtaccatgctgttttgattactatagcttggtagtattttttgaagtcaggtactgtgrtgcctccagctttgttttgctcagaatttctttggctgtttggggtcttttgtgggtccatatgaattttaggattattttttctatgaagaatgttattcgtattttgatagagcttgcattgaatctgtagattgctttgggtg

SEQ ID NO: 772659 - DNA, 633 bp, Homo sapiens
cctcctgcctcagcctcccaagtagctgagattacaggtgtgcacacctagcctccatttttttttctttgagatggagcctcgctgtgttgcccaggctggagtgcaatggcgcaatctcagctcactgcaacctccacctcctgggttcaagcgattctcttgccttagcctcccgagtagctgggattacagtcgcgcaccaccacagccggctgatttttgtattttcatgagagacggggttttaccacgttggtcaggctggtcttgaactcctgacctcatgatccrcccgcctcagcctcccaaagtgttgggattacaggcgtgagccactgcacccggctccctccatatttttaatcttttgtctctctgtgctaaattttgagtatgtttctgatctatcttcctgctcactcattctttcttcagctatgtctaacctgctattaaactttatattgagtttttattttcacttacagtattatttctcagatatccattttattatttcattatagtttccaagtttacaatcttgtctttaaactccttgaaaatattaagcagagttacttttttttttttttgaaacgaagttttgctcttatcgcccaggctggg

SEQ ID NO: 772660 - DNA, 563 bp, Homo sapiens
aggctggcccagggcaaagaggccagggcaacgggcctgtttcccccacggtggtgcccacagtggcttctccagcccagcggctaggcttcacagactcggggccggaggctcaggctctctggtcatctgcctgctggtgtcacttggggtggctccaactgggccctgaggccgcgtgaggtgattccgagacctccagcatctccccagagaggcagctgctccagacctcccgggaaagctgaatttggaaagtagggaatgtggagactgaagactttaattttagactggaattaaagtgtgaccggtgacacttatggaatcgagtttagcaatcatttccttggtcaaagtttaacccgcgttgaggcaggcrcagacgcgagggaggtgcagcctcctctgcttgggggccagggccggcctgctctgtgccaggtcttggggaggcctaagtttttctcctggcggctgtgggatgccagggctgcctgctcccttcggtgcccctgtgtgcccacctcccagagtggctgagccaagagaaggtgggccag

SEQ ID NO: 772661 - DNA, 683 bp, Homo sapiens
ctgaacttttgattgtattatattaaaaaaaagttctccaacttagtccttttccaaaattgtgttggataatttaggccctttgcattttcatataaatgttagggtgagcttgtcaatttatctaaagcaaatctgctggcattttgactgggattgcattgaatctaaacactacgttgtggagaattgacatcttgataatatccagtctttcaatccatgaacaagatgtgtctatgtatttagccctttaattcctctcagttctgtaatttccagttcatgggtcttgtctttcttttattgaatttttccctgggtgtcacattttttccatgctgttattaaacggtatcgtgttaaaatgttcaatttctggtagtcacttgtatacagaaatacaataggtgtttgtatattgaccttrctaaactcatttattagttccagtagtatttttgttgattccttaggattttctacatagacaattatgtcatctgcaaataaagagagtttcgtgtcttcctttccaatgtgtatgccttttacttattttgctcaccttatctcactgactaggagcaatgttgaatacaaactgtgagagtggatgtcctagcctcattcctgatcggaaggggaaagcagcctttaccataagcatgatggcacctctg

SEQ ID NO: 772662 - DNA, 648 bp, Homo sapiens
atgctcctgggccctctcatgtcaggtagatggaaagaatcttagtagaggaactctttgaatctgatacttgggtgaattgcttggcttttcttcatcagtcaatcaagcctccatccaaaaccaatgtctttaaatattgacctgttacttgggaacagtaagttgtcattgttatcattattatggtagaggaaaattttattcttcttgaggagttatcaagaagcagtttggcacagggataacagatagatgttggagtcagaagggaatgaacctctgaaacagagatacaactcagtacattagctgtgagcaccaccaattcactgctctgttattatgactccacctccrtccattaaatgcatcttactataccatattcactgtacacagcacaatgattaagaagataagctttgaagtaaaaccaatttgtgtcttaatcctcattctgtttcctgcaggttgagtccctcaggaaacactgagacagaatttagcagggaagatatttataaaggagtggctttgagatcaatatcatggagtaaagaggagagagtaagagtgggcagagagaagttgcattgtggccaaccttggctaagctgtgaggaggtttctgcagctaatatgacc

SEQ ID NO: 772663 - DNA, 592 bp, Homo sapiens
tcagttcccccataaaattaatattgagtaatagttcctagggagccacacacaagcaggtgaacgtgtgctcgcatacacacgcacaaacaatcacccataagaacagtgcagctcctgctgtacctagattgtttgcagactaagagaagcaactgcagaacaaattctggttctcactctgcctccataaaagaggtctggattagaggtgctcctcagttatttagagctggagcaaacagaaggcctaactgtgcagatgaacttctcattcttttatatgaggcagcaaaataaacaccttaacacttcatggttcccagagtgcattagttamtcggtccaatatcattctaattctcctcgtagttcattgaatttgagcctgttaggagataaaatgtatctttagctactatgtacttattccaatgactctttggttgatggatgactttctgattttttgaaacaatgccagcccagggccttgtggtggctgtacagtgcatgagacctcttgttgtgcttcggggtgcgggctggaagggagggagggaggaaaagagggaaggagggggctctgctg

SEQ ID NO: 772664 - DNA, 630 bp, Homo sapiens
acatttttgtatatatgagagtgtgtatgttaatttttgtttgagaaatctttcctgattgttggattagacaggagcaaaaatcaccttaaacttgaacttccttgttttaagactactttttatggtctttttagtgaagtaactacagatcaggtaaggccttattgtcatggaagaaggctawaccaagacttttggtgacttgagtgctttaaaagcaatctgttttaactctatgcctattgatgagcagattctaagatttatgtggaaatgtaaaccacctagaatagctaaaacaaatttgaaaaaaaggataacttgtaggattttcacttcccaatttcaaaactcaccctaatgctgcagttattaagacagtatgatactggataaggatagatgtagaccaatggaacatattgtgaatccagaaataaatcctgtatttagaatttagacttttttgtttgtttgttttacaaaggtgtcaatgcaattcactgggaaaaagtctcctcaacaaatggtgatgggacaatgggatatccatatgtgtgaaagtgaacttagaccctcaccttatacatgccatatacaaaaatgaactcaaaatgcatcacgaac

SEQ ID NO: 772665 - DNA, 436 bp, Homo sapiens
gagaatcacttgaacctgagaggcaaaaaagattgatttaaattatcatgattgtgttcattactcacaatattggtaccccagaattgttctcacctatttattttgacagcacaaacttggcctaacacatgaatttatcttcatttgtttyttttattcttccttagccaacatcaggttttgctgacctgcttgtttcatgttctgattttctgaattaggatgaaatttcgttactctaaacctgtctctctcccatatgggttacaatagaatccaccactttaaacaatccccaattggaataagaaaatcctcataaaccctgccttcttagagtgtgtacatgggacctcattctgtagattttcattacttcttgttgtgtttttttttattattagttttttaaaaaacaggaggagaaagagaa

SEQ ID NO: 772666 - DNA, 660 bp, Homo sapiens
gcagatgcaaagaaatattatcctttagaacccatttgatcccttttttaaacccaagaaaacataaatgcaacaatagatcaatttgactgtaaatattatctaagtatgtcctttaaaagccaaaggaatgtcagatacaatttattttccaccagtgcaagctgagacattaagtggcaattctacttccattagctaaatctggcaaatatgcaactgtttaaaggcattgtcgatagccattcacaattaagtatttgtactgatgccttattaaattacccttttcaagtaggcataataaactaggagttcactgtgcagattttcatggggaaagtcagatcastatggaatttatttagagagaatttagtgcactgagtaatgaagtaaatgtcaaatgttttgaccaaataaatcttatcttccttaaaacttttttttgaggtcaagagacacagcaaaataaaaatcccagtgattataatggtcataatttataactttattgaaacaactttaaaactttgattgttttttaaataatgaaatctgttttctttttaactgacagcattgccctacacaggggatttctactcttcctttacaaagctggtttcttccaaacattaagatctcttacagggactg

SEQ ID NO: 772667 - DNA, 507 bp, Homo sapiens
atttgctgactgcattgtgctgaagtaaaattacaagagtgcattaaaatcctttgtaaagaaggttgaagacattacaaaaatgcgtgggcaccttgggcattaatatttgattcaatatcttttagttgcatatggcatattttgatggaggaggcgtgtacagatataaatacaaattggagaaccaccagggccactgctagctgyctataagactcctggctggcgggatccactcagcctcaccccatacacagactttctgaggccatattctgaagtaaaaagaatcaagggagacttttttctgtctactccattgtttataaatggaaacttccatccctcttcaggaggagctgggaacgtcatgcaacaaacaaccatatcacaccacacccagtaagtattgctagagcacctgctaaacatctactaagtccaaagtcctatgttcagatactgacatgggtgacaaaaagaaaagcttagtttctactcttc

SEQ ID NO: 772668 - DNA, 433 bp, Homo sapiens; identical to SEQ ID NO: 742854

SEQ ID NO: 772669 - DNA, 632 bp, Homo sapiens
ataatactagaaaaaaaatctgagccccccaaaagagattacaagacttgcccaagcttacaccgaaatattcgaagttaagcctaaaactcaagttttaacccccactcccggcaactgtactacataatgccacacagattatactgttttttttttgttgtttattttttgtttttaagtaactcgctttttttcctttgccttttgcattttacactgaacaataatttcctagctttcaggaaatagtaatttttaaatgcttaccacctgattatattcattaaagatttccaaaatagtccctagtctagcaaagtagaaatcacaccattattatattattacagagctgaagaaagagaatatatttctcttccaaaacttctatragagtcaatataattcctattatactttctctgctattttattatccttttctttattagaggtttagatttgaagccactcaagaaaaaggataggaatggaaagagatttaaattgctctttgtccatattaaggcctaagctttagcagataagggcaaagggaaggttaagacacaatggtcaaatgctgtgacctaattacgtctggacttacttattttcttgtcctttca

SEQ ID NO: 772670 - DNA, 596 bp, Homo sapiens
agcacccaaaattactgcagcttcacagacatcacacacttaaaaaaagactcctggcttcctttcaaattccatcagtcaacttttatcaaccataggggaagcagaggaggataaacactgcctgcgataccatttgggttttaggttttgggtttcttccagttaagtttgcaaaagtgtgaaagtactaaagaacagaatattgttcctcattcttactatacaataaatacttccaaatatgtccttaaatgcaatcctttgtgattcccttaattaatcttgactaatccttgaaggaaccatgatagcaaaaatttagtgtctagcataaccttactacagtttccctttttaagttctcatttgaatttgataagttaatatktactttaaaaaaatccacatcatttctattcaatggcacttgaacttttaaaaaatgtttcaaagaaattaaagctagatatgattggaaataagcaaaacgagaaagagttgtcctatgtgtatgtagcacaaccctccctgtgtcctttaataaaaagcaggactctggtcattccatgatgtcactggcattccgcaccaaa

SEQ ID NO: 772671 - DNA, 585 bp, Homo sapiens
aaccctccctgtgtcctttaataaaaagcaggactctggtcattccatgatgtcactggcattccgcaccaaaaaaaaaggtccccacagatcaaattccacttcctttcaataaagctaaagatgaaataaatctttaaaatgcagggggaagagaaaaatgtatataagttcttccagaaaatctgagagggcttgcaaggaataaggcacagaatcaacaaccctggcttccagttttgctgacttacttcaatgaccttgggcttacccttgtactagaggcagaatgtgtgtgggcacatgtacctgtgcatactttcaagctctggggcccgaaaaagtcatttatgtactctggagaggtgagagaataccatgacagacaaatgaagtttgagacacaggatcccatccacccacccctgccccaggttgggakgtccgaaactaagacacccaagactcccaagaaagggaagacaaaaggcagacattcatacacagggctctagcagcagcattctctcacaagagtagcaggaccattaactttataaaaacaatagccaggttccctgaagg

SEQ ID NO: 772672 - DNA, 598 bp, Homo sapiens
tgccgctgcttagtggaagaaaactcttgggtcaacttatctttttaatctaagaggtctcaattgaaattggctttgaagtttgctaattacaaaactcaacaggggttttcccttatttggtgtaactcatatttctattcattaaccccagttttaaaaagattaaaaaagtctgaatagaaacaacttaaaagtttgaagaacagcctctcccctgtgataacctttacagatacttcaagtgcaaacttcccccatactatcaaattctatttaattacaatcttctgtggttgcaggagggggasgtaaaacacatacttttgaactttccaaccacacagggctgtaggaagatgagaaatcagtaaattcttttcactctatatattggggaaatttatgtcacctgagttacaaggaaatcagattctgaagggcatcctgctagctgcttttgcagggccagccctgggttcagatgctttcattcgggtgaaaagatcattaccaggcggctccggggaagttggccctcctgtaagtgtgctcctttgttatgaatatggaacagatggagccaatctatctgctc

SEQ ID NO: 772673 - DNA, 394 bp, Homo sapiens
acttcgtttaatgctcaatatcactgacatcttggtagaacggatagcatacaagccatataccattctttttaaaagcagagttatgcaaaatgtgctttaaaacatgttgtgaagaaatgcaaaatcacagtttttaaaatgggaagaaatcttgactgccctttgttttgtcagaaggaaagtytatcacccaataaaaaagaaattatacttgtagctttaaataggcaagaatcacattgtcaaaatggacatattttcttggaaatagtcacccttaggcaggaaaaacaaaattgcttttaatgacagaaatttttagattgtgcttggaagggaagggtgtttataagaaataaagctaatgagtcagagagcaaaataaaatgaa

SEQ ID NO: 772674 - DNA, 394 bp, Homo sapiens
acttcgtttaatgctcaatatcactgacatcttggtagaacggatagcatacaagccatataccattctttttaaaagcagagttatgcaaaatgtgctttaaaacatgttgtgaagaaatgcaaaatcacagtttttaaaatgggaagaaatcttgactgccctttgttttgtcagaaggaaagtttatcacccaataaaaaagaaattatacttgtagctttaaataggcaagaatcacattgtcaaaatgsacatattttcttggaaatagtcacccttaggcaggaaaaacaaaattgcttttaatgacagaaatttttagattgtgcttggaagggaagggtgtttataagaaataaagctaatgagtcagagagcaaaataaaatgaa

SEQ ID NO: 772675 - DNA, 606 bp, Homo sapiens
aaggatttggagcagagttactccctgagagagacacttttcaggtggcagaaacctacctcagacttttatttatacactggaatccacattattaaagaattttacagtcttggaaaaacacaggacttggtgcaaactttcattttgcttgcctgagaactgtgtactgtcccatggtacccatctgccttaaagttcactctgtccttaattgtcaaacagattcatggtaactcctaattagtgcaaaacaggtaacacagctgcgactctgcaactgctgaacacctttagcatctatatcaagctaagctcaggagccctytctgctctctcccaaggttaatggtttcgagtcttctgagaattatggagtaggtgcccacagtgagagagggcgcctggttctccaagccgctgttcccactactaatagagtcagcataagaagcagccagtttccagcaacggtaacaatggagaaatttctcttactgcacagctgccaaataactttgaggatctgattcagaactaacatggaagatttaaatggatccattgcaacagacgttttgcatgttggcacactggaattagagg

SEQ ID NO: 772676 - DNA, 627 bp, Homo sapiens
tatgtgtgtatatttacatatacatgtaatattgagagtgacagagaggcaaactgcaagagcttgaacagagaacctcatctgaatcgggaaaaattaaaatcctgggttcaatcaccaggcatctggcacttaataatggtctttccaaattataagtttagcttttaaatcttttttaaagcacatgaaatgttttaaatttataaaacactatacagttatatatakagagagagagctatagttgtaaatttaaatgtacagttatagataatgtatggttataaatagctatagctatatatattatgataactgtatatataattataaatatatgtaagtatatatatatacatttatgcccacagacacacacatacacacacaaagtgacaaaaacatttgcgggttttaattgaactcttcatatactatgccaagagaaaacattctgatttctcaaatcagatcacaaaacaatcaaaagatgagggaggcattgaactgcagctttgactgaatggctgcattgaatccaaaattccagaaatatttttactgcctactctttgcagtcaggttatattaaatcatttatattctgagatacccacatgcatg

SEQ ID NO: 772677 - DNA, 667 bp, Homo sapiens
aacacacaaaacattgattaagtttgccttcttctataggtgaggtttgtggcaccccaaaacaatcacaaaagtaacatcaaatatcactgatcacagaccaccaccataacagaaataataccaatgaaaaagtttgaaacattgtaagaattaccaaaatgttaaacagacatgatctgagcacatgctgttggaaaaacggtgctgacagatttacacgaagcagagttgytacaaatcttcaatttgtaaaaatcgcactagaagatggccaactagacagaagcaagtagaatagctcccacagagggactggaatgacaggcatgcttgaaacagatcttcagagggatggcgccgagagtgaatggagggaagacacagaagctgggcagaaggaggagaaagacaggaacactgaaaacactaacatgcactgggactcatttttgagccacaacagctccagggaagcaggtgaggtgaaaaggcaaggagcaatctgctctcactatgggcctctggatccctggcagaaggggaccccttgatcaccatggacactgaggtagcaggaaaagctgcttagagaacccagagggtttggtgcaggagtgtctatagtggagcacagcccggaacagccatcccgctaggctcaact

SEQ ID NO: 772678 - DNA, 359 bp, Homo sapiens
gcacagatgaagtccaaaggcagtctgctggagaattcttctcttactcaggggagggtcggtctttatgttctattcaagccttcaactgactggataaagcccacccatattatggcagacaatctgctttactcgatcaataaaaatgttaatctcctscaaaatacttagagaaatactcagaataatttttaaacaaatatttgggcacccagtggctcactcaagtggacacataaaactaaccatcactggaccatataaacttgccttgaagatgaagatgccttgcacctctaaaattatttaatttcatgtttattaaaaatgagctcaggacttctgtgtccatgaag

SEQ ID NO: 772679 - DNA, 629 bp, Homo sapiens
acaagtaaaataaaacaagtaagggtggtttcttccaggaatgcaggcacagttcaatattaggaagcattcacataattcactaaattatgaaatcaaaggagtaaggccatttggctagcatcctgggtgatgaatacacattcaataaaatttgtcaccwttcctggtttttaaaaatccttataaaacaaaaatatattaatataaatttaatttttctggctcacgcctataatcccagcactgtgggaggctaaggtgggtggatcacatgagtccagggatcgagacaaacatgatagaatcctgtctctactaaaaatacaaaaattagctgggcgtggcagcacacgcctataatcccagctacttaggaggttgaggcatgagaatcacttgaacctaggaggcaggggttgcagtgacccaagacagggctactgcactccacctgggcaacacagtgagactctgtctcaaaaaatacatatatttttcttaatatggaaaaaaaagcctgtatcatgtttagtgatcaggtactagaaggctttcactaaaatcagaaataaaaataaggattcccactaaccaggacaagcccccaaaataacccatatgtaagc

SEQ ID NO: 772680 - DNA, 678 bp, Homo sapiens
tagctataaacagtgaagatgaagctataactacaaaatacattgcacacataactatcactctgaattccgttttgcctattcaaaactgatcatactatggtactttataactttagatccattttaaatcatagaatatcagacttaggagggacttcagaacttttctagcctaataagtcacctaaaaaagaaacctcatatacagtatctctgaagatcacatgtaaatgtacatgatgaaaagagaataaaacagattattaaagttaaaaaaactcaaatcagcccatttcatttctgaatcgttctaattataagaaaattctcccataaagtcaggctaaataagattcctgaaattctactcagtggcaccttctggaaattcatctgattaatctaggatatttggtcttgtgtgtataccaagctgtataactgawcttgttacactttgctcttgtgaaacttttagtatttgttatttaaggaagcctcagatcattttctatctttacatactaagatttttcaaatatttcattattctcaaaatgagtggtttttagacatttttcatccacacctccattagtaaatattgtaaagcatcgctctcaaaaatatatttatatatataaattgcatacctgtttttatactattaaatta

SEQ ID NO: 772681 - DNA, 637 bp, Homo sapiens
ccacccatgcccttgcccaattggcccatgaacaaagtgaccataaagacaaggataaaaattacacatgggttcagcaacatggattttcatttcccaaggctgatctgactacagtcactgctgagtacccaaaatgccaatagcagagaccaacatttaactccataccattccatgwctagatcagccagtcacttagtgccaggttgattatactggcatcacaggaagctcagtgttttgttctcattgaaacagacatttaccctggacagaaatttttcttctctgcctgcaatgcttctgccaaaacaaccatctgtggacttaagagaaacacatattcactactgtgatattccacacatcattgttactgaccaggaaacttcttttgtagcaaatgaaatctggcaatgggctcttgcttatggaactcactggtattaccacatttcccatcaccctgaagcagatggcttgataaaataatgaaaccttttgaaaattcagttacagcacagtgtaggataattgtatggctgagataatgtcctcccgaaggtggtacatgtcctgaatcagcaacaaaaatatggtaccatttctccaattgctaggatccatggctctg

SEQ ID NO: 772682 - DNA, 613 bp, Homo sapiens
aatccataacaaggagactaaatgagacatttaaatacaaagataagtacaccaaaatagtcaattcagtttctatgacaaattaatgcaagcttactgacacctgacaacaattagatgatggcagcaatgggtaaacggtttgctatttctctcacattagtgccatggaccacatacaagttagatgcccaggtcttggtgcgtttgaaattattctaacaatatctgaactgtctaaattcaaatacctataggccagccatgtaacagaaacacgtaaactgggtggatctttacaagccaacagagaatagtggcggctgtaatacaactggagtatacgctctacctgaagttattcaaattcaaaaattaaaaaaaaaacaacactatgccagtgttttaaacatattttgggtgagattccttccttgggcctgagacccctgatgaagatrttttcaaaaataacagcaaaaaaacttaattaaacagattgttaaaggagcacaaaagaaacaaagaaaaaactgatagatttaactacaaaaaattcacaatgtctacgtgaaaatgtattaacccacaaagaaaaccccacatgaattaa

SEQ ID NO: 772683 - DNA, 588 bp, Homo sapiens
ttaggaagagatgtagatttgtggaaaagagggttctctctgggatagctttgtgtttgaagtggctgtgaagtattacagtgatggtaagcaggggacaattgtcctggtggccatccagaagtgtggttggtgaacatagatatgtttctagcaacatatctgtrgagagatatttttctagaaacattctggagttatgggctccatggagtcatttacttcctctcataagacagctagctggggcttgaggtgtggagagaggcaaatgagaaagaatcacaaaactaggatatctaaatatcaagtaaattatatcttgacagatagacttgttttctcagtcacagaatgaaaatattggttcaggttatctttttgttcattccaaattttatgttacctggctattctaactccaaatttagaagtctaacacctacagaggcaaagtaaatttttctaagttagcaaagttggccaggaagaggctgtggaaatttgaagagttatgtgccacttaaggtggtcacctactccttgtctccaggtaaccattgccacgtgaagctctagacattagaa

SEQ ID NO: 772684 - DNA, 588 bp, Homo sapiens
ttaggaagagatgtagatttgtggaaaagagggttctctctgggatagctttgtgtttgaagtggctgtgaagtattacagtgatggtaagcaggggacaattgtcctggtggccatccagaagtgtggttggtgaacatagatatgtttctagcaacatatctgtagagagatatttttctagaaacattctggagttatgggctccatggagtcatttacttcctctcataagwcagctagctggggcttgaggtgtggagagaggcaaatgagaaagaatcacaaaactaggatatctaaatatcaagtaaattatatcttgacagatagacttgttttctcagtcacagaatgaaaatattggttcaggttatctttttgttcattccaaattttatgttacctggctattctaactccaaatttagaagtctaacacctacagaggcaaagtaaatttttctaagttagcaaagttggccaggaagaggctgtggaaatttgaagagttatgtgccacttaaggtggtcacctactccttgtctccaggtaaccattgccacgtgaagctctagacattagaa

SEQ ID NO: 772685 - DNA, 588 bp, Homo sapiens
ttaggaagagatgtagatttgtggaaaagagggttctctctgggatagctttgtgtttgaagtggctgtgaagtattacagtgatggtaagcaggggacaattgtcctggtggccatccagaagtgtggttggtgaacatagatatgtttctagcaacatatctgtagagagatatttttctagaaacattctggagttatgggctccatggagtcatttacttcctctcataagacagctagctggggcttgaggtgtggagagaggcaaatgagaaagaatcacaaaactaggatatctaaatatcaagtaaattatatcttgacagatagacttgttttytcagtcacagaatgaaaatattggttcaggttatctttttgttcattccaaattttatgttacctggctattctaactccaaatttagaagtctaacacctacagaggcaaagtaaatttttctaagttagcaaagttggccaggaagaggctgtggaaatttgaagagttatgtgccacttaaggtggtcacctactccttgtctccaggtaaccattgccacgtgaagctctagacattagaa

SEQ ID NO: 772686 - DNA, 620 bp, Homo sapiens
ccagaaagtgaggaagttaaaaaaaaaaaaaactacattgaaaggggtatgttaagtggacacagcagcgaactgaaagaattcctaatgccccaaactgcaagaatttgagcaaygaaataaaaaagtaatgccttataatctaatgtataaaataagtatccatgaatctatactgatataaataaatgattgaataaagagaagagacaaatctttcttgcaagagaattcaaaataatttatgtgcttggctctcaacaagaggaagaataattcttcactccttaaatatatgctggacatagtgactccctgccaaagaatacagtatagaaaggagggaaggaggtggagattaactttacagtggagaaacctgaaaaactacctagccaggtgacgaaggtcagtatcaacagtgataagtcacactgatagcatgcaccattaatagatgtgttgaaaaagcactttacttctgcggtcttcctcccaaaagttcataactcgtctataatcatgagaaaatattagataaattctcatagaggggtatcctacaaacatttgacagtactccttggaactgccaaggtcatccaaaggaaacttctgag

SEQ ID NO: 772687 - DNA, 561 bp, Homo sapiens
acattgcatagacttcaagctagcatgagaccctagaggctgtgtggtgtcactcctcggggaacagacttgtttctgctctcagcctggatcccaacttttcatgacagagacagggacatatttaggcaatcaaggraaacagctgcaaacttcacagcctcaaagagcaccactgtcactcactttgatgcaggaggttattgaggcctacatgctggtgaacctgccaagtaagtccccacttgggaggcatcgagagcccagagcaggaggaagaaaatgcaccagacacccagatgccatgtgaggatgagctgtgagttcgcacccacagctcaattagtattgctaacatgccctctccctcagcaccttcagaataagtaaataatccatctacctgaaatgaactccaaaaagagagaaaaagagagagcatttggaacatttgctgagacctaaattgaccaactttgatcaagatgagttagtaaaatagcaggctcctcatcagctgcattttaatgccatatttggagccactcagtcattataaaa

SEQ ID NO: 772688 - DNA, 623 bp, Homo sapiens
gggatttgggttgcctcctgcacagtcaaggagagtgtcactcaggctagtcatagatggcatacctacaggcttgggctgattttagatagttgttcagagcagtcaggcaggcgccagaggcacaagccctgtgagaggtgtgtttggaatcacttggtatccaaatcacatgtcatccctaggagcaaggagaccggttggatttggggctggtctggaatgaagaagcatctctcagcttcygaaggctgcatggctcacggcagtatctcaatcatgccctgcccgtttgcacatttggtcctgttggtagttacctctctggtgactggcaaagtcagcaaggatattggggtggagcaccctggctaagcaccctcttgattatagagctatggagtagaagacagatggagaatgagaggcctgtgagaacaatcagtcagttgccatctttcagagctgctcgagttcaaaagtgtgtcatacagggtattttaccattgctacctttaagggattcaggtgggaaccctaggctgtggcttcacataatggaacttgggtgccatcctaccctgtgatgttgagctggccagcactggtgtaggaacctcaag

SEQ ID NO: 772689 - DNA, 587 bp, Homo sapiens
tcatacataaacatagtacagttattaaaactaagcaattagcactggtttaatgctattagcttaactacagacattatttggatttcaccagtttttacactaatgttccttttatgttctagaatctaatccaggatcccactttgcatttagctgtcatgtcttcttagtctccaatctctgacagacattccttttatctttccttttctccctacatgaccttsactcctttgaaaagtactggtcaggtaaactgcagaatgctcctcaatttggatttgtctgatgttttgaagttacacatttttgagaaaaatgctacagagatgatgtgtccttcttagtgcatcatattaggaggtacacgatgttaatatgtgttatcattggaaatgttaactttggtcactttgttaaagtggggtctgccaggcttctccactgtgaagctactattttccctttgtaagtaatacatattttgggggagacactttgagactatgtaaatgtcctgattttccttaaaatttctcccatgaattttggcacctatttgtgggtcttgattacagctatta

SEQ ID NO: 772690 - DNA, 633 bp, Homo sapiens
ttatagatttctcaaagaaataaaaatgaactaccattccacccagaaatctcatttctgggtatgtacccgaaggacaataaatcgttctaccaaaaagacacctgcactcatatgtttattgcagcactattccaatagcaaagacttggaaacaacctaggtacccatcagtggtgcattgataaagaaaatgtggtacatatacaccatggaatactacacagccataaaaagaataaaatcatgtctttggcagcaaaatgaatgcagctggaggccattatcctaagcaaattaatgcagaaacagaaaaccaaatattgcatgttctcacttataagtgrgagttaaaccctggatgcacacggacacaaagatgggaataacacacactgggactccaaaaagatgaaaggagagatgggggcaatggctgaaaaacttcctgtagggtactatgctcactatctgggtgacagaatcaatagaagctgaaacttcagcatcacgcaatatactcttataacaaatttgcatgcatttcccttgaatctacaataaaaattaaaatgaaaaaagaaatgtatgagagttctatttgttccacatctttgctaaaagatggtaaga

SEQ ID NO: 772691 - DNA, 586 bp, Homo sapiens
aaagtgtgaaggtctttgtatcttgtgttaacacctggtcagtaggtaaaatgactcacccagttgacaaattagcctacttcttctgtcagcaaccaccccagtgctggcatgatgcccacaagaacaaagtggcctggcagcagagataaaggctatgcaaaagcccaagcaacgtggaactcatttaccaagaccaaccagatttackagttataatgtgtaactcctcaaaaaaattacaaatcagtgcatagaccatatacaaatatacccatacacatttagaattaatgtgatatgatttcatattgtaattccttaaacacaaattcagtcaactctatatgaattgaaataataccagtaaacaattcagatatttatgtcaaatttcatatgtaatagagaccacgtaaacaatcagtagggatttgtttaacaattataaacctaaaaccagtttaaatagacacacagatatatatatgtattgcctattcccaaataatatacacaaattataatgacaccccttcatttagcagaatatgtatatctaatcttaacatcacagtatcagttt

SEQ ID NO: 772692 - DNA, 633 bp, Homo sapiens
ttatagatttctcaaagaaataaaaatgaactaccattccacccagaaatctcatttctgggtatgtacccgaaggacaataaatcgttctaccaaaaagacacctgcactcatatgtttattgcagcactattccaatagcaaagacttggaaacaacctaggtacccatcagtggtgcattgataaagaaaatgtggtacatatacaccatggaatactacacagccataaaaagaataaaatcatgtctttggcagcaaaatgaatgcagctggaggccattatcctaagcaaattaatgcagaaacagaaaaccaaatattgcatgttctcacttataagtgggagttaaaccctggatgcacacggacacaaagatgggaataacacacactgggactccaaaaagatgaaaggagagatgggggcaatggctgaaaaacttcctgtagggtactatgctcactatctgggtgacagratcaatagaagctgaaacttcagcatcacgcaatatactcttataacaaatttgcatgcatttcccttgaatctacaataaaaattaaaatgaaaaaagaaatgtatgagagttctatttgttccacatctttgctaaaagatggtaaga

SEQ ID NO: 772693 - DNA, 614 bp, Homo sapiens
cgaaggaatggcaatgggttgtcttacatggtggcaggcaagagagcatgtgcaggggaactccctttataaaaacatcagatctcatgagacttattcactatgacaagaacagcatgggaaaaacccacctccatgattcaattwcttcccactgagctcctcccacaacaagtggggattattacaattcaaggtgagacttgggtggggacacacagccaaaccatatcacatgtatttgtataatttccaaaatttctcttattaatgtatagttttattccattgtgatcagagaagatgctggacattgtttcaatttttttgaaagttttaagatttgtcttgtgacttaacatatgatttatccgtgagaatgatccatgtgctgaagaaaataatgtgtattctgcagccattgggtgaaaagttctgtaaatatttattagatccttttggcctatagtgtatatcaagtctgatgtttctttgttgatttcatgtctggaaggtctgtccagtgttgaaagtggggtgaaatctccagctattattgtattggagtctatctctctctttaataatatttgctttgtatatctgggtgcttc

SEQ ID NO: 772694 - DNA, 597 bp, Homo sapiens
ttttacttttatgaaatgaagaattatagtggaagaaaatgttcttgctttgttccaaattcctcctcgtctttgtttttcattgttgggggtcagtaagcctatacataggtacgctcacaattttatgctcaactttctccctgtaagttatacttatgtgtattagttcctgccatttataatagctttttggcactttattattttgacaaaaggaaaccactttacattttttaaaatgatttttacatttgtttcatctagtgttacattgaagaaaaagatgtttatttaatatccttcatttggaaatataagaaaataaagcgatttatctacaagcttacattttrctttggcaactgtgaaaatatatagaatgattttagtacttctggaaaagaagtaatttatgtctgtcacacttgaatcccttactctcattcttttttaaaatatattgtacaaagaaatgaagtttttatctgttacatcaatgagtttataatcttagggtattggtatgccaaatagaaaatacaaatagaaatgtagttataccaaaaagcaaaaatacaaagctcttcttacttt

SEQ ID NO: 772695 - DNA, 566 bp, Homo sapiens
agagtagaagacaaaaacaatttattatctcaatagatttggggaaaaatggcaaatctaatacacagttataataaaacctcaaaacaaactagaaatgggaaggaacttcctcaacctaataaaggtgttgtaaaaattgattaacaaacattatattagtgttaaaagcctgataattttcttttttttttttgatacagagtcttattctgttgcccaggctggagggcagtggcatgatctcggctcactgcaacccctgcctcccaggttcaagtgatkctcctgcctcagtctcctgagtagctaggattacaggtgtgtgccaccaggcccagctaatttttgtattgttagcagagatggggtttcatcatgttggtcaggctggtctcgaactcctgacctcgtgatctgcccaccttggacttccaaagtgctgggattacaggcatgacccactgtacccagccaaggctgacaattttcttcatagaatcataaataaagcaaggatgtctgctcttaccacttctacttaacactataattgaggtcctatg

SEQ ID NO: 772696 - DNA, 566 bp, Homo sapiens
agagtagaagacaaaaacaatttattatctcaatagatttggggaaaaatggcaaatctaatacacagttataataaaacctcaaaacaaactagaaatgggaaggaacttcctcaacctaataaaggtgttgtaaaaattgattaacaaacattatattagtgttaaaagcctgataattttcttttttttttttgatacagagtcttattctgttgcccaggctggagggcagtggcatgatctcggctcactgcaacccctgcctcccaggttcaagtgatgctcctgcctcagtctcctgagtagctaggattacaggtgtgtgccaccakgcccagctaatttttgtattgttagcagagatggggtttcatcatgttggtcaggctggtctcgaactcctgacctcgtgatctgcccaccttggacttccaaagtgctgggattacaggcatgacccactgtacccagccaaggctgacaattttcttcatagaatcataaataaagcaaggatgtctgctcttaccacttctacttaacactataattgaggtcctatg

SEQ ID NO: 772697 - DNA, 623 bp, Homo sapiens
agacaattttgaagctgaaatttgactttgggaagcctatcaaatgtgttaaaggtttaaaacacttgatattacacttaaccagtttgaccatgaggtgagattcttataaaccttttataaccctttaaaaatgtttgttaaagagcagatcagtgccttaagaaaaccttgttgtgctttgattccaatgttyaatttatggaaaaaccaaataatacccttttgagtttagtcaatatgttcacacacagaatttcttttacaagattaatttttacaaaccttccacaacttgctcaaattttagctctatcttacttaatttaaaacaatcctttaactgtttatattaggcaaaaatttacattcccatgccttcttatagtcttttactaataacatattttactttccttacacaccttgcatgtaaatctattttcagtggtctcagttatatgttataagggtaactttcagcaacttttaattttggtgcataaattttctttcaggaatcctttcttgacttacacagaccacctacaacatgctttgactttctgacttgtcctaaacaactgtctttttaaacaaccaggtattttactttaggaaaa

SEQ ID NO: 772698 - DNA, 634 bp, Homo sapiens
tacatttttatatgaaatcttctaattttatagaagataagttaaagaattaaaactgcaggaggcaaggctgtatgtggtggctcatgcctataatcccaacactttgagaggccgaggtgagaggatcacttgaggccaagagtttgagaccagcctaggcaacatagtgaaactctgtctctacaaaattgtttttaaaaatttagccaggtgcaatgatgctcacctatagtcctagctacttgggagcctgaagggggaggattgcttgagcccaggaggttgaggctgccatgagctgtgatcataccactatactccagcctgggagagacaacraaaccctgtctaaaaacaaacaaagaaattaacaaataaacacacacacacaactacaaggggcaaacaaaatccttctatgggctaaatttggcctataagaaactaggttagaatctctgtgaatgcaatcactactttacctatcataagaaatctaaagtgatgagaaaaacaaagaattaggaaggaaacccaggaaaaggttcaggccaaagcattacatgcaaggagcttctcatatattttcactacgtgggaaagggtacagcatagggtcctctgagaatgt

SEQ ID NO: 772699 - DNA, 617 bp, Homo sapiens
gtagagtgccgggccagcacctatacactaagccttaacagtgcagctgcctgctgaaacagaagagttaaataggatccagtggatttagtggatcctggttctccatatgacaagcgatatttgagtgtatcttagatatttggatattaatatgacaactcaaatgaaaatgatgaacagaagccaaaattgagatgaatcagatattagatgtgtgagacaaagaatttagagcagccataacgaaattcctttakgaaataattaggaactaaaatgaaaaaacattttagcaaagaaataaaaattgtttaaaaaatgaaatagaagatgtagaactaaaaaatacaataatttaaataaatgatttgctagaaggcaaagtgaagatgacagaagatagagttagggaacctgcagacagatcattagaattcacttaacctgaacaaccgagggggaaaaaaacatgagtagagacttggacctgtggaaaaacatcaaaagacctactgttcttaacatcagagtcccaaaaggagaggagaaaacatctgaatctgatagagtgaagaaataatgtctgaaaattttcaaaagacgtgaagtacaga

SEQ ID NO: 772700 - DNA, 589 bp, Homo sapiens
tgcatctacactccatcgtctttaccatctctctagagaaatgagaaagaatctcacacaagatgagatgcaaaggtaaaaatgttatacttggataatgttgaaattctgtaacaaatatcgtctattatatgacatggtatattttaggccatggtttctcagcctctgcactactgacattttgggttggataattcttagtcatggggctgtcttgtgtactgcaggtggtttagcagtttagcagcatcctcagcttctacccattagatgccagtagcaaccaccgccagttgtgactattaagacgtctcaagacattgcccttcctgaacagtattcttggactttagtagttggtcttgaactcctcacctcargtgataagtaactccgctaaaagcccaattgagaaatttgaatattaggaaaaacacatttaacggatgagctttctatccacatagaggtggagtctattctcagaacaaatagaaaattaagaaaaatacttttttttccttttctttttttttttttttttttgcaagacagagtcttttgttgcccaggctggagtgcagtg

SEQ ID NO: 772701 - DNA, 625 bp, Homo sapiens
gaataaaactagaaaccaacaacaaacacatggaaactatacaaacacatggaaattaatacattactgaatgatcagtgagtgagtcaatgaagaaattaaaaaagaaattaaaaattttttgaaacaaattaaaatgcaaacacaacatcccaaaacctatgggatatagtaaaagcagtactaagaggaaagtttgtagcaataagcaactatacttaaaaagtagaaaaacttcaaataaacaacctaatgatgcatcttaaagaagtagaaargcaagagcaaaccaaaccaaacccaaaattagtagaagaaaacaagtaataaagattggagcagaaataaatgaaattgaaatgaaaaaaatacaaaaggtcaatgatataaaatgttccctttttgaaaaaaaatcaacaaagtcaacaaacatttagccagactaagaaaaaagagaagacccaaataaacaaaataaacattttattaagaaaaaatagccaaataaataaacattttactaagaaaaatgagaaaagacccaaataaataaaatcagttatgaaaaaggagatattacaactgatactgcagaaattcacaggatcattagaggctacaataa

SEQ ID NO: 772702 - DNA, 631 bp, Homo sapiens
ttattcatcttgtatttatactgcctaatataatggctgtcccacaaaaggcacttaattaatgtttaatgaataagtaaatcaatgattctaagcttgaggtctcttgcttcaaaacttgtggacacagctgggtgcagtggctcaygcctgtaatcccagaactttgggaggccgaggcgggcggatcacgatgtcaggagatcgagaccatcctggctaacatggtgaaaccccatctctactaaaaatacaaaaaattagccaggtgtgctggtgggtgcctgtagtcccagctacttgggaggctgaggcaggagaatggcgtgaacccaggtggcggaggttgcagtgagccgagatggcgcctctgcagtccagcctgggtgacagagtgagactccgtctcaaaaaaaaaaaaaaaaaacttgtgtacatcatgccctgtctagcttacttatgctccctttatgaactaccctgacagagcccaactttcagaagcattgtctgctgcccctacctgctgcctgtcatcacactccttgaataactttatccacctggctggattccttgttatcaactattgagtccatctttctattccccaagcacatgcttcagccca

SEQ ID NO: 772703 - DNA, 631 bp, Homo sapiens
ttattcatcttgtatttatactgcctaatataatggctgtcccacaaaaggcacttaattaatgtttaatgaataagtaaatcaatgattctaagcttgaggtctcttgcttcaaaacttgtggacacagctgggtgcagtggctcatgcctgtaatcccagaactttsggaggccgaggcgggcggatcacgatgtcaggagatcgagaccatcctggctaacatggtgaaaccccatctctactaaaaatacaaaaaattagccaggtgtgctggtgggtgcctgtagtcccagctacttgggaggctgaggcaggagaatggcgtgaacccaggtggcggaggttgcagtgagccgagatggcgcctctgcagtccagcctgggtgacagagtgagactccgtctcaaaaaaaaaaaaaaaaaacttgtgtacatcatgccctgtctagcttacttatgctccctttatgaactaccctgacagagcccaactttcagaagcattgtctgctgcccctacctgctgcctgtcatcacactccttgaataactttatccacctggctggattccttgttatcaactattgagtccatctttctattccccaagcacatgcttcagccca

SEQ ID NO: 772704 - DNA, 635 bp, Homo sapiens
tgccctgtctagcttacttatgctccctttatgaactaccctgacagagcccaactttcagaagcattgtctgctgcccctacctgctgcctgtcatcacactccttgaataactttatccacctggctggattccttgttatcaactattgagtccatctttctattccccaagcacatgcttcagcccaatggagatatctttttatgtgtgtgccacagacattgtactgggcactagtttcttctttatayccattcgttatcttaagcaaataacgttgcaacgtaagagtgaggtggtataacttgaacagtacattattataactaccacaagttattggaatgtaactgtaattgtaatagggacaagtgtaataggagaaaataactacaccctgcctggaacatacatatctttcactttaggaaaatcttctagtaaaaaaaaagatggaggagaatcacctctgctttttgttcattggctttcctataaagcatgccattttaatggcctcttcttccatgttggtcagggaaattgagctatacgatatattgagattgggtctctcaaaacttgctccacagaaccagccatatttatgtgcaaacatttctaagaaaca

SEQ ID NO: 772705 - DNA, 635 bp, Homo sapiens
tgccctgtctagcttacttatgctccctttatgaactaccctgacagagcccaactttcagaagcattgtctgctgcccctacctgctgcctgtcatcacactccttgaataactttatccacctggctggattccttgttatcaactattgagtccatctttctattccccaagcacatgcttcagcccaatggagatatctttttatgtgtgtgccacagacattgtactgggcactagtttcttctttatatccattcrttatcttaagcaaataacgttgcaacgtaagagtgaggtggtataacttgaacagtacattattataactaccacaagttattggaatgtaactgtaattgtaatagggacaagtgtaataggagaaaataactacaccctgcctggaacatacatatctttcactttaggaaaatcttctagtaaaaaaaaagatggaggagaatcacctctgctttttgttcattggctttcctataaagcatgccattttaatggcctcttcttccatgttggtcagggaaattgagctatacgatatattgagattgggtctctcaaaacttgctccacagaaccagccatatttatgtgcaaacatttctaagaaaca

SEQ ID NO: 772706 - DNA, 530 bp, Homo sapiens
atccatccatccatccatgtgtctatctacctttggattggacacacaaagctgatgacgtgaaactgcttcagtgcctcatcggcaccgttctcccccaaaactttgtcaagatggctgctgttggctgtgtattttcacggytgggcctttatacctgttggtgccaccagctgagttcctttcttcctgcgtttgcctgaacagtgccaattgttctcctgtatctgttgcaatctgtgtcagaaagggcggggttggggggaagggttttctatgaaacaaaacaaaacaaaaaacaagttgcagggaaactgctcagttaggcctagcatcagggaaggctccctgggtgggaaagattatcctccacaggtgagttggtagacaccattcgctgtgttgaactcaatggggaggtaaaatttgatggccagcaagccgggtgtcacaggtagtgtgctctccccatagacacctgcgcatcagatgtcagaactcttctgtgctctttggaacttgctccttgc

SEQ ID NO: 772707 - DNA, 617 bp, Homo sapiens
aaaagctttgggttggtgaaaaattaagcaatctaggcatgatttatgggatgcaggaggatgtggataggttacatgcaaatgtcattttataaaaggaacacagcatctgtggatttaggtatgcttagggggtctggaaccaatcccctgcatatggttaggggataaccatattcaaaagaaacatcaagctttaagttcaaggtctaatcaccaaatttttataaaatggaaatgacgctttccccaactacatcacatgactacatcaaggatcatgttaagtacaggtgagtatatatatatatatatatatatatatatatatatatatayacacatatatagatatacacaaaataatttatacacaaacataaaatcatgaaggctttttaaaaataggaactgttaattatacataaagcatctccattcgtgcaatttttatgtcttcttccaggtaattaattttatggaaatatacaatcctcctcctgcctgcacctctcccacatacacactaccttcctagtactctggggaatattgggcaaacattctcaccacaaaattatattaagaagttaaataaacattaaatattgtatgat

SEQ ID NO: 772708 - DNA, 600 bp, Homo sapiens
aatggctcattgacacatcccccagacaagtagagctggtagccaaactccagcagagcctgaaaaggaaagtcccaggactcagtttccaggactgcaggccacctttaccctcggcaatcaagctgctccctaagcccacccccctcctttctaccccacttccttcatctagaggataaagaaggaaaagtaacatttcagccctgactctctcaggatgtgactgttggtaagaccctaccctggatgtaatgacgcgggccgtccatttttcgatcgttggcactcatgcatctatgttggccttgtggcgtctggtgataggaagacygcactttgcaatcacacagaacttgatttcacttttgctgtgtgtccccagcaaatgtcttaacttctgaagactttcatttctcctctatatactgaaatattattacatctgaggttttcttgagtgccactgaaaagatgaaataagttaacacatgcaaggtgtctagaagtttctcattgattgatagttgctgcgagtggaagtgatggtgctggggttagaacaacatagaaataatgtgtgtgagtttctttacccct

SEQ ID NO: 772709 - DNA, 605 bp, Homo sapiens
cttactagtgggatggggagccatggggagacctgggtatggggataggctttgaggacccctggtaggatgtaaattacattttttacataattgtgggttatcccttagtgagaaaaaaaacctgtagatatggcacttcactccatttgccctctcgtttacaaaagagatctagctgtaggatggtattatagtttacacttccctcgggtggccatgtctctcctctggaaagaggatactgtggccaggtggtrctgcataaaaatataagtcacttcttcagcatttgagggtcaaattggtcccaattatccagaatacacctcaggagtggcttcacttttgaaggaatgtctcccatctgaaaggagaacataggagtgcccgcacctctagtcatcccctagtgagcactagccctagggcatccctgtaggggtgggttgcccctacacacctgtgggtgtttctcgtaaggtgggacgagagatttggaaaagaaaaagacacagagacaaagtatagagaaagaaataaggggacccggggaaccagcgttcagcatatggaggatcccgccagcctctgagttcccttag

SEQ ID NO: 772710 - DNA, 511 bp, Homo sapiens
caggataatctgaagttaaacaatggggaacccactacagctgtcagagcggaattccctgagttatgaaatcccagtgatagctgacattgggcctgacagcaggaaagtggaaaagatgccttttgaaaacttcttctttaccctgaaattagttttcctttgccttagcccatatttatgtgcctcttcctttttttttttttttttttttttttttttgkcttgcaacagcgtctcactccatcacccaagctggagtgcagcggcacaatcttggctcactgcaaactccacctcctgggttcgagggattttcatgcctcagccccctgaatggctgaaattataggagcatgctaccacgccgggctaatttttgtatttttagtagagtcagggtttcaccatgttggccaggctggtctcaaactcctgacctcgttttgtgatccgcccacctcggccttctaaagtgctggaactacaggtgtgagcgaccaagcctgga

SEQ ID NO: 772711 - DNA, 522 bp, Homo sapiens
tcttggtcacagataaaaagacaaggctgggctaggcgctgtggctcacgcctgtaatcccagcactttgggaggtggaggtgagcggatcacgaggtcaagagatcaagaccatcctggtcaacatggtgaaatcccatctctactaaaaatacaaaaattagctgggcgtggtggcgcgtgcctgtagtcccagatgctcgggaggctgaggcaggagaatctcttgaacctgggaggcgggggttgcagtgagcygagattacaccattgcactccagcctgggtgacagagcgagactctgtctcaaaaaaaaaagaagacaaggctgggcaagatggctcaccctgtaatcgcagcattttgggaggctgaggcaggcagatcacctgaggtcaggagtttaagaccagcctggccaacatggtgaaaccccgtctctactagaaatacaaaaattagccgggtgcggtggcagattgtaatgccagctactgggaggctgaggtaggagaattgct

SEQ ID NO: 772712 - DNA, 567 bp, Homo sapiens
  misc_feature 418: n = A,T,C or G
acccacaaaagaatgaaaatggacccctacctcatatcatactcaaaatagatcatagacgtactcataagagctccaagaataaaacttgcaggggcaagttttctaattttctttgagccagagtctcgctctgtcccccaagctggagtgcactggtgtgatctcagctcattggctcacggcaacctctgcctcccgggttcacgccactctcctgcctcagcctcccgagtagctgggactacaggcacccgccaccatgcccagctaattttttgtattttttttagtagagacggggtttccctgtgttagccaggatgatctcgatctcctgacctcatgatccacctgcctyggcctcccaaagtgctgggattacaggtgtgagccacggggcctggcccaagttttntaattttctttctttttttttttttttttataggcagaatcaatttttttaatttttaatttttttttttttacaggcatgatcaaccaggtacagaatcagttttttggctgtagatgatttaagagttagggtcaacttgtctttgg

SEQ ID NO: 772713 - DNA, 523 bp, Homo sapiens
cgtagtggtgtaaaagttgatacaaaaaatcttatggatttgttttatgctgtggaacaattttgcccttggttcccggaacagagaactttggaattgaaagattgggaaagaattggaaaggaccttaaaagagcacaaagaaagggaaaggaaattcctttgcctgtttggtcagtttggtcattggtgtgtacagcactggaggcttttcagatagatgatgaggctgagtcagaggagagagaggagtttaatgatcaggactctgaaccacccctaccaagtactaataaaaagggagagtccagagtgttgcaggaagtcagggaccccaaacagagggaccggctgaagccatggcagaagarcataaattgtgaagatttcatggacatttgttagttccctaaattaatacttttataatttcttacacctgtctttactgtaatctctgaacataaattgtgaagatttcatggacatttatcacttccccaatcaatactcttataatttc

SEQ ID NO: 772714 - DNA, 626 bp, Homo sapiens
tattctgttggctatagcatcttgatgtaatgatttcagttgctggctgaattgtttagggcaattacagttgtgtgtctctgggtacagttctttgactcctgacaaactagattggaatggaggatattgagacagggtcagttgtcctttgttggttgagaggcatgtgactcctttcagtagttttgggataaatgggagtggaatacaagatgctgtgttccaagaactgagagctagaaaaaaaaacaaaactgrtagcaaaacacagctttccagggctttgatatccaacttatatgttgtctaagacctttgcttctccctcttaattttttttattgttcttagtactttcatgaactgcttattgttttgataaaaagtttcattgataaaatcgattgaaaaaaaccattaaaatggccgttaactttatttagtaaaaaaacaaattctcaaactcttgcctaagtaactggaaaatgaatgatttttctttttgtttatgttctgaaggctaaaataaaggaaagttgctatattttcttccagctgatttctatttcctaagatgtggctgagaaggaggtaggccacttcaccctttgtaccataggctg

SEQ ID NO: 772715 - DNA, 652 bp, Homo sapiens
ggaatttcaaaagaacacaaataattttgtctttaaattaggcatacctttctttacaacttctggaagtccctctggctcaaactcagtaccttccgtgtcttctgcagggtgaataccactcatgactgctttcttgctttttttagaaaagctctctggggtagcaggtgttggtcctcyaccattctcccatattccactggatctttgcctcttgcctgaagctttattttggccagatgataacctcttttcagtaacagaagggattggagatggtcctggaacaactggacctagcaaaggagaccctcgggaatcttgtttagattgctgtgaacacagatgggccacttgtgtctctaacatctctttagctttctctaacttttcatggcttataagcaaggaacagtacttatccaagtattcatctgcctccttggttttttcttcaagagtttctttcagttctttgatctcagttgttaattcatcgaccttggtatccataacagtacctgtccaaagtaaagcaacacatcatgtgcaacttgatgcttctctagttaacaatgggcatcgtgaagcagataatcttagacgtgttctttctttgatttttttttttaagaggttggggagatat

SEQ ID NO: 772716 - DNA, 636 bp, Homo sapiens
tggtatcatttattctttagtgcttgagcctagaattttctctgtggggggtcttaattggaaattaaactttttgctaggagcagaggctcatgcctataatgccaacactttaggaggccgaggcatgaggatagcttaggaccaggagtttaagaccagcctgtgcaacataggaagaccctgtctctacaaaatcaatarcacttagatgggcatggtggcaaatgcagctacttaggaggctgaggcaggatgatcacttgggcccaggaggtgaaggctgcagtgagctgtggtcatgccacagcactccagctggggtaagagaaagatcctgtctcaaaaagaaagggagataaattaaattttgtcattgaaaaagcgttttttgaatgttctattttattttacacagttttagtaggttctgtccttcaaagattttttctattttatctatgttgtcaaaattattggtacattgtttttcagattattctatcatccttttaatggacttgtaatatgtaatgttctctctttcatccctgacgctggtaatttgtgttctctctacccacttccctctcatcattcagctaaaattttaccaactttattgatcttttcaaa

SEQ ID NO: 772717 - DNA, 611 bp, Homo sapiens
atgtgttattttggggattcttcttgaatgtgaatgaaaagaatgcaccttggaaactggtagtaggcatttcaaatgtaatgcccatttttataatatataataaggtattatattttatatttggtacttataaatatgtattattttgaattatttttttctcatgaagttgtttgttgcaagtattgagaaattatccatattctatgttaattcttgacatgggatttttacttcttttagtgacaaaagtgaataaacaaaaactgtttgaaaagagtacaggacttcctcacaaaggtaagtagttgtgttttagtttattacataaagatgctttcatcccattttgccaattaaaactaatcatcatgaatcctttttagtggttttcttttttcctcagagatccctgttctgaagtatgttcttttaraagatcacaaatctcatttgaaaagctttatattgcatttagcagaagatgatatctgatgagatcaacttctctgatgattgaactttttaaatgtcttttgaaatgcaatcttcaacataagatttgaattttgtctttttattaaaatttctttttgagaatacaaata

SEQ ID NO: 772718 - DNA, 623 bp, Homo sapiens
ggagtgaggaatgggaaattactgtttaatgggtacagactttcagttttacaagatgaaaaaaaattctagaaatgaatggtggtgatggttgcacaacaaggtaaacattcttaatgtcactgaattggacacctaaaaaatgattaaaatagtaaattttgttatatataatttagcacaatttaaaaatagataatttttttaaaggatatctacttattgtgtcctaattacctcccttttacaggtaacctctctgtggatgacttctaacttccaacttacccaaatttccacctatgcccgtaatttacaagttatattatatttctaggtatactaggtttagattcactgggatcaaaattctggttgctaccagaaatactgctgttgagaattttaaaaagatagaaagcatktgacatgcaattttatagagagagtaactatgtttgtataattatattattctctaagactgacctcttttctatttagcttaacatatggtagtatcctgaataggattctctggttcatcagaacagaaaaagcagatgagttttattacacaatgttactgactaacatcagttacagtattaaagaaattattc

SEQ ID NO: 772719 - DNA, 623 bp, Homo sapiens
ggagtgaggaatgggaaattactgtttaatgggtacagactttcagttttacaagatgaaaaaaaattctagaaatgaatggtggtgatggttgcacaacaaggtaaacattcttaatgtcactgaattggacacctaaaaaatgattaaaatagtaaattttgttatatataatttagcacaatttaaaaatagataatttttttaaaggatatctacttattgtgtcctaattacctcccttttacaggtaacctctctgtggatgacttctaacttccaacttacccaaatttccacctatgcccgtaatttacaagttatattatatttctaggtatactaggtttagattcactgggatcaaaattctggttgctaccagaaatactgctgttgagaattttaaaaagatagaaagcatgtgacatgcaattttatagagagagtaactatgtttgtataattatattattctctaagaytgacctcttttctatttagcttaacatatggtagtatcctgaataggattctctggttcatcagaacagaaaaagcagatgagttttattacacaatgttactgactaacatcagttacagtattaaagaaattattc

SEQ ID NO: 772720 - DNA, 698 bp, Homo sapiens
attttgtggtatacagaaaggcagtggaacaatcccagatttcagaagttggttgataaaatcaacatacaatgttaagagaaaatatatttatcttcctgaagataaatcaagcagcttgatcacagcttgatcagttgtgttaacatctgtagggagaatgtgtgaatcagtaagagatggaatcattatggacacagagagaaacaagatgtcagagagatcccaggtggcacagtgtatccagcaaagtctaagcaccaccagaatttgaagacacccaaactcaaagttcctagaaagtgttgttaacagatagagatggtctggataaaatatcccttaaaattatccaccttctttttgcctgggtcctttctcattaaacaaccatattcttatgctgaataatccctctttctaggaggtaatattcctcccttgcagactttcttctgttttgmgtctttcttttactctacactcttgttggacaattaccttctctgccacagcttcaatgtcctcccataattaatgagtatcatatcactagctctagtttaggcatctctcttgagctccaaacccattgatccaattctctacttctttatatctccacctggagattccacatgaacttcaagctaaacttgctgaaaacaggggattagttagagtctcaagcagaagca

SEQ ID NO: 772721 - DNA, 644 bp, Homo sapiens
tccccgattccaggacttgactctgagatggcatttttagatctgccatgggccagaggtgagcccacttccctgatgggtgagtcccaggccaggcagcattcatgaaaagctgacataagagccattgggccttaagggaaaaacagtgatagtctagcattactccatgtgrcatgtgatgatagagactatggggtaagcctcttctgcatttggaaatgggagggaagaatgggaaggactgcatcttgttgtttgaggaccagatcaactgcagtaaaatagaacaccaggtagatttctagacttctaaggtcttttattctagtccctgactactggaagtcacctttggacccatccagggacggggagaactcactgccctgaagggaaagatacaggcttcagtggttttaccagcagctaattgtagagccccagagttttcagcaaacatagacagtagccagcaaatgtttacagtaggccttgagcaagatgcaggtgctgtgctggcttcagttctgacccagtgcagtcatagtggaggtggccaccagggtgcttgtgtgacttcacccacagatttaagtggctcagaacagagacaggatccatttgtttgggaaaaagtaagg

SEQ ID NO: 772722 - DNA, 512 bp, Homo sapiens
gcttcctggccactttgtttacctactcaagcctgagcaatggcaggtgcccctcccccagccttgctgctgccttacagtttgatctcaggctgctgtgctagcagtgagtgaggctccgtgggcataggaccctccaggccatgtgtgggatataatctcctggtgtgccgtttgttaagtctgttggaaaagcrcagtattagggtgggagtgacccaattttccaggtgccgtctgtcacccctttctttgactaggaaagggaattccctgaccccttgcacttcccgggtgaggtgatgcctcaccctgttttggctcacacacggtgcacggcacccactgtcctgcacccactgtccagcactccccagtgagatgaacccagtacctcagttggaaatgcagaaatcacccatcttatgcaacgctcatgctgggagctgtagactggagctgttcttattctgccatcttggctccctgcctgttacttctctttcaagttt

SEQ ID NO: 772723 - DNA, 512 bp, Homo sapiens
gcttcctggccactttgtttacctactcaagcctgagcaatggcaggtgcccctcccccagccttgctgctgccttacagtttgatctcaggctgctgtgctagcagtgagtgaggctccgtgggcataggaccctccaggccatgtgtgggatataatctcctggtgtgccgtttgttaagtctgttggaaaagcacagtattagggtgggagtgacccaattttccaggtgccgtctgtcacccctttctttgactargaaagggaattccctgaccccttgcacttcccgggtgaggtgatgcctcaccctgttttggctcacacacggtgcacggcacccactgtcctgcacccactgtccagcactccccagtgagatgaacccagtacctcagttggaaatgcagaaatcacccatcttatgcaacgctcatgctgggagctgtagactggagctgttcttattctgccatcttggctccctgcctgttacttctctttcaagttt

SEQ ID NO: 772724 - DNA, 555 bp, Homo sapiens
aaaacatggccagactagttaaaaaaatttaaagttcaccaaccccaagaattgaaggtagacaagcccacaaaacaagaaagaatcagtgcaagaacactgaaaactcaaatagccggagttccctcttttctccaaataaccacatcacctctccagcaagagtgtggaagaaggttgaggctgagatagctgaaatgatagaagtagaattcagaatatggataggaatgaacattactgasctaaaggagtgcattgtaacccaatgcaagggagctaaaagttataataaaacattgcaggagctgacagacaaaatagccagtataaagaagaatgtaatgaaccagagagagctgaaaaacacactacgagaattcataatgcaaacacaagtattaatagcagaatagaccaagtggagaaaacaatttcagagctcaaaaactggatttctgaaataagacaggtggataagaatagagaaaaagaataaaaagcaataaacaagctctttgagaaatgcaagattatgtaaagagaccaaatcta

SEQ ID NO: 772725 - DNA, 645 bp, Homo sapiens
agaactgtaaactaagatggccctttcaaacaacttaatcacaattcaatggcaacattttgtcacctgtcattctcctaaaaatcctgatttctatggtcatcaccatcagcacctttgaatacaagagtactggtatatcagagagcccagattataaaattcaatttatttcaactttaaaggaatgagcatgcggtagtgagatggccatgctttcatcaaagagttctgaaacaatcctgcaaaaatgcaaggctatattatgttgatcaatcagttgtagatgcagtcatttcatttggagaaacagccatctttctggtgctgttacaaaragtatggaaggtactgacccattctgaagcttggacataaaaaggaccgtatatatgatgaataatggtaggaaaaaatcacctatagaaaagaatggaatgtcaagttctctctgtaatggtatgatgcttgatttcaagtgaatttagccaataaagtccatgcccttaagaagtttataatctaagatctaaaggggcagagtcctgccttcactttccaaagaaataaagaattcaaattctttgtcacagagaacattgatgacacagcttaggggactttgcaagaaagtaaagcaagatt

SEQ ID NO: 772726 - DNA, 640 bp, Homo sapiens
tattgcaaagttacctcctttggggacaacttatttttaggttggtaactactataactgatgtattatttacccgtgatgtagtctgtacccttagtcttttgatactaactcttgtagcgtataccataatgggcacccacattgcatctgtacataccctctcccagctctgaacacccagattcctgatagttctgaccatcacaatcaatattgcaacatagtcctcattcctgactactgctaaacttctaataatttattttgaggagtggcaaaatatatcattttttttcctgggccatatgtatttaacttaacttttcatatatatgatggatttgttaatagataatatcaactacttgccacaatttggtaaagaaaatagacataaactagatttaaaaactttctatgtccagccrtctactcaacatctcaatttgctgtaccaatttgtccaaaaagtagctgagttttccttttgtttcagacctggcaatatttctgaatgagaaaaaaaatcaaacaagattggtctaagcaaaataacattttttcgacctcatggaaacgtgaagagtctaggatcaacatgactgctccacagtaatcagaaccataggttcctccc

SEQ ID NO: 772727 - DNA, 549 bp, Homo sapiens
ccttcttctgcctgctttattctagttatgctggcagctgattggatgatgcccatctacattgagggtgggtctgcctctcccagtccactgactcaaatgttaatctcctttggcaacaccctcacagacacactgaggaacaatactttgcatccctcaatccaatcaagttgacagttaatattaaccatcacagccccttttagtcacagatggagctggagcagctgggacgcaggtcaccatgtcatgaaggtgcacagagcagtagggcccttggccyagcccacaaaaccatttttctctcctaggcctccaggcccgtgatggaaggggctgccactaaggactctgacatgccctggagacatttgacccattgtcttaattattaacatctgactccttgttatttatgcaaagttctttgggcttgaattcctcccagaaaatgtcttctttttttcttttttccacatggttaggctgcaaatgtttccaaacctttatgctctgtttcccttttaaaaatgtgttccaatttca

SEQ ID NO: 772728 - DNA, 567 bp, Homo sapiens
tcccttgtacaaccagaagcacattaatccttaacctaaatgctatcacataaagttaacaacacttaaatgctaatatgaagtcaacaaatcttatgtcacatgaaaaggaaaaagaaatgagataaaattaagattttttttagtagaagtgtatacatgcacaaacctattcttaacaaaataaaaaatatattcatgacaattacagtccttgtttctgcaactggtcacattgtcatggctggttttaatgactactttcttctgctacccattctgtattccctttgccttctgcaagcacctcagggggtcatgcttttttactyctggtggagtgacccaaaccttcatgcctgaagagtctgggccatttgtagtcctgcctgggttgggccattgtagtttcccatggaccttaatcacagggcctggtaatactaagagatgccctatggaatctcctgtattttatacatactcttccttactccattgtggaatagtagattgatttcatcttgatagtctgggtcaatctccctaaccaacactgtaagatat

SEQ ID NO: 772729 - DNA, 622 bp, Homo sapiens
ccaattttgtggctagatgggtcaggaagcacccagtttatgatagtcagttcaggtcgcatgatgacttgatgacccatagtcaagcgttcagtttctaccaaagcccagtaacaggccaagagtggtctctctaaaggacagtggttatatacagaagatggcagggccttgctccaaaatcctagaggtctcaactgtgagtcacctataagtgcctgccaaagactccaaacagcatccctgtctgcctgagggatgcaccatcrgatttgctgggtcatatggcccaagtgacagagcagcttgcacagcagcctggacctgttgcagagacttctcctgttctggacccacacaaaactgacagcctttcaggtcattcaacaaatagtccagagtaacacacccaaatgaggaatgtgttgccttcaaaatccaaataggcccactagatgttgtgcaactttcttagttgtaggagttgccaaatgcaacaacttatccttcaccttagaaggaatatctcaacaggccccacaccactggacccttagaaatttcactgaggtagaatgtctctgaagtttagttggatttatttcccattccttggcatgca

SEQ ID NO: 772730 - DNA, 622 bp, Homo sapiens
ccaattttgtggctagatgggtcaggaagcacccagtttatgatagtcagttcaggtcgcatgatgacttgatgacccatagtcaagcgttcagtttctaccaaagcccagtaacaggccaagagtggtctctctaaaggacagtggttatatacagaagatggcagggccttgctccaaaatcctagaggtctcaactgtgagtcacctataagtgcctgccaaagactccaaacagcatccctgtctgcctgagggatgcaccatcagatttgctgggtcatatggcccaagtgacagagcagcttgcacagcagcctggacctgttgcagagacttctcctgttctggacccacacaaaactgacascctttcaggtcattcaacaaatagtccagagtaacacacccaaatgaggaatgtgttgccttcaaaatccaaataggcccactagatgttgtgcaactttcttagttgtaggagttgccaaatgcaacaacttatccttcaccttagaaggaatatctcaacaggccccacaccactggacccttagaaatttcactgaggtagaatgtctctgaagtttagttggatttatttcccattccttggcatgca

SEQ ID NO: 772731 - DNA, 622 bp, Homo sapiens
ccaattttgtggctagatgggtcaggaagcacccagtttatgatagtcagttcaggtcgcatgatgacttgatgacccatagtcaagcgttcagtttctaccaaagcccagtaacaggccaagagtggtctctctaaaggacagtggttatatacagaagatggcagggccttgctccaaaatcctagaggtctcaactgtgagtcacctataagtgcctgccaaagactccaaacagcatccctgtctgcctgagggatgcaccatcagatttgctgggtcatatggcccaagtgacagagcagcttgcacagcagcctggacctgttgcagagacttctcctgttctggacccacacaaaactgacagcctttcaggtcattcaacaaatagtccagagtaacacacccaaatgaggaatgtgttgccttcaaaatccaaataggcccactagrtgttgtgcaactttcttagttgtaggagttgccaaatgcaacaacttatccttcaccttagaaggaatatctcaacaggccccacaccactggacccttagaaatttcactgaggtagaatgtctctgaagtttagttggatttatttcccattccttggcatgca

SEQ ID NO: 772732 - DNA, 619 bp, Homo sapiens
aaccagacaatgtgttgtatctcatgatatctgattaaaataatgtgaacacttctatttaacaataatagtttcaattgattccttcaatattggttacattttactctataatttttaaaaaaaaatgtattctggctccaccatttgtacataaactgaaaatgtgaagatcattcaaagcagcatggaagaggaaataattgaggttaatacgggagtcctgcaaataagttttctcctcattaagtagaaagatctacaacaggttaaatggacatatcatgaatacccttttggaaaaatctatcctaaaaaaataaatactacctgtattagcctgttctcacactgctaataaagacatacccaagactgagtaatttataaaagaaagagttttaatggactcacaggtcagcatggctggagaggcctcacaatcatggcagraggtgaagggagagcaaaggcccatcttacatggtggcaggcaagagagcatgttcaagggagctgccctttatgaaaccatcagatcttgtgaggcttattcactatcatgagaacagcacaggaaagcctgcccccaggattcaattacctcccaccaggtgtc

SEQ ID NO: 772733 - DNA, 506 bp, Homo sapiens
tatgtctaaccagttcacttttctctttccacctttcagagttcttatttggttgtctcttaggagatcttgaattacagctgtatgttgcaagaggagagaatcaacaaacttgaagacaggataattgagattactgagtctgaaacagaaagaaaaaagattgaataaaagttaacagacagtgtggggcaccatcacacaaaccaacataggcactgtgggartcccagaaggataaaacagaaagaaaatggagattacttgaagaaataatggtttaaaacttcccaaattttatgaaagacataaatataaatattcatgaagctccacaaactccaaacaggatgcactcaaagagaaccacacaggccaggtgtggtgcctcatgcctgtaatcccagcactttgggaggctgaagcaagtggatcgcttgagcttagtagttcaagaccagcatgggcaacatggcaataccctgtctttacaaaaaatacaaaaa

SEQ ID NO: 772734 - DNA, 602 bp, Homo sapiens
atctaattaacctgaaggatttaaggcagttactaaacaaattttgtgactttcctcctcacaggtttgtggaaaaaacctgaagataggtccaaactcattgttatgcatatgcaaccttttgcaccatgaaggatttgctgtaggcccagtagcccatattttacaatgggatcataaatgacacatgatgtacagatatttcacagcctgaaagaaacaatataaatatgaaagtcaaggtgcatatatagggatttttgattatagataacggaaaccaagcaaagctagctttaaaaataatgagagaattcattataatgacatggagtgtttcacagaatctgaaagttggaaggtagtcaggccttagaaggggctgattctaaaccagaaaattgtcaggactctctccatctctcarctccgcatttctctacccatatgattcattctcagctcactccagacacagaggagaatcccactggccaaactgggatcaattgtttactcttggtccaatcagttataaccaaaaggcaagttcaagtcatatcaatggaaacatggctgtcagagcctactcctgtgagcta

SEQ ID NO: 772735 - DNA, 602 bp, Homo sapiens
atctaattaacctgaaggatttaaggcagttactaaacaaattttgtgactttcctcctcacaggtttgtggaaaaaacctgaagataggtccaaactcattgttatgcatatgcaaccttttgcaccatgaaggatttgctgtaggcccagtagcccatattttacaatgggatcataaatgacacatgatgtacagatatttcacagcctgaaagaaacaatataaatatgaaagtcaaggtgcatatatagggatttttgattatagataacggaaaccaagcaaagctagctttaaaaataatgagagaattcattataatgacatggagtgtttcacagaatctgaaagttggaaggtagtcaggccttagaaggggctgattctaaaccagaaaattgtcaggactctctccatctctcagctccgcatttctctacccatatgmttcattctcagctcactccagacacagaggagaatcccactggccaaactgggatcaattgtttactcttggtccaatcagttataaccaaaaggcaagttcaagtcatatcaatggaaacatggctgtcagagcctactcctgtgagcta

SEQ ID NO: 772736 - DNA, 602 bp, Homo sapiens
atctaattaacctgaaggatttaaggcagttactaaacaaattttgtgactttcctcctcacaggtttgtggaaaaaacctgaagataggtccaaactcattgttatgcatatgcaaccttttgcaccatgaaggatttgctgtaggcccagtagcccatattttacaatgggatcataaatgacacatgatgtacagatatttcacagcctgaaagaaacaatataaatatgaaagtcaaggtgcatatatagggatttttgattatagataacggaaaccaagcaaagctagctttaaaaataatgagagaattcattataatgacatggagtgtttcacagaatctgaaagttggaaggtagtcaggccttagaaggggctgattctaaaccagaaaattgtcaggactctctccatctctcagctccgcatttctctacccatatgattcattctcagctcrctccagacacagaggagaatcccactggccaaactgggatcaattgtttactcttggtccaatcagttataaccaaaaggcaagttcaagtcatatcaatggaaacatggctgtcagagcctactcctgtgagcta

SEQ ID NO: 772737 - DNA, 429 bp, Homo sapiens
tttttccctcaatgcagttgggaccattatcttattggaataattttctcttaaattatgctaaattagaaaataattggcttattttctaagtgtatatgttcattctatttaaataaaagcaaatagaaatattttcccttttaaagaaaatgaattacctaaagcggatttcttaaatttaataatcatattgggaaatattagttactsaaataacacactttaacacatatattagctatttttgcatgtcaagttacctattttctgcaatatttattttactgggttaaaatctcaatctcattaagaatccaatttacttcacaaaatgtttgctatctattatacaaaattaagaggtaggagatattgtctgaatccagagcctgttgatgtttacgcagctaaccttcagttgtttaa

SEQ ID NO: 772738 - DNA, 631 bp, Homo sapiens
aaaaaataatttgagtaaaatcagatctttatacaaatgtcacctctcaaagatgacttttctggctgtcctaattaaaattacatactatactactggtatttcccggtttaatttttccttggaatttattactatctaatgtatatataatgtctaacttttatgactttatttgttttctagctactaatcttggttgttagttccatgaaggtaggatttttgtgccaactcctccattakgcaccagaagcacagtggccaggcctacagtactgttagggacccataagtatgtttatgtttaatttctcttaaaattagaagaaaaaataaactttggggttgaaaacacattttcatatattatgtatccatctttataacaacacatttgtaaaatatcattttaacatgtatttttagggagggagggactcaggcaatgtcataatgtggttctgaattttttctgttttgttcactgctttatcttgaatacttagaacaggactttgctcagagtaagttcttaaatatttattgaatgggtgaatggatgaatttaattagctagtatataatatgtttggtagacaattctggacccagaattcatgctttaaca

SEQ ID NO: 772739 - DNA, 463 bp, Homo sapiens
tttggttctggttacagttactccagggcctgtgttatctagtttggctctctacaataaattagccaattttttaccaaatttttagtgtattaaacataggaaagtcttatataggcagatactttggtttgttttacaatttaatcatttgatttctattttgttccttgcgagcttaatattttgaacaaattatctctgctattgtccctgttattttcctttagtgctgatttcataacaagaaaaaactgacatttgaaatcaaaggttttttcytaagtaaaatgtccactagatggaagtattgtttcaaaagaacgagggtgatggctttaaaaaactatttctaaaacttacccagtgaaagttacatcataaaaactgatagacaattcctttattactttcctaatttttttatttttatataaatgacagcatttaaaatccatgtcat

SEQ ID NO: 772740 - DNA, 658 bp, Homo sapiens
tttattgagtactctccaaactttatataaccttaccattattcctaaaaaagtttttcttttaactataaaaaagacggcaaattattttaaaagaagaattaaaagagacatttgataaattatacatttatactactacctctagccacatttttttaaagaaaagattcattttagagttttcataagtgaagctaaaaataaatacttcagagaaatatataaaatattaaatgtgtcatgttcaaatttgttacagaaaaaattaacaagcgaaaaccaagacctattaactaacttactaaaataaatcagtttccaaaggatatggaagttattgaaagaatgatgacatatatcttgaaagtttctatacttttctcataaacttgaggtttgtggactttaaagtgaagtttaaatcaaagttaactcaatgagttccttgaaaaaaattggcattgtaatagggccaaatacccagctgttcygtggccaaatttgtctctttatcccaaagtgaaaaatctacagaccattttgctagtttgcttttataccacattgatcaaatttgttacccttaatttttaaaatcaaaacaagccacaactttttttattgggggaattaacattatatattacatgttttc

SEQ ID NO: 772741 - DNA, 608 bp, Homo sapiens
tgtaagtattattagataatgtgttttagaaggtttcctctggtttcactgtgcaagacaaatagaagagagatcacagtgaggttatttccagaggaaaaattaggtctgaaccaaggcagcagaaatgctgtttgggaggttaggacagctctagagatatttaggaaatagaatagacaaggcttagtgattgattggacatagarggtaatggagagaagagagtctagactgactcccagttttctggctggtgcgctaaggcagggatggtgccactagccaagagaaacacacagagaggagcagttttaggaggaatgtaatgagttctgtcttaaacttgtggagttgggggtgcctctgtgacatctgagtgccctgccatttaggcagccaaaaggaaagttcctaggagggtagacaggagctggaaggatacattcaggtgtctggcaagcatgggggaggagtaaggcagccaggaagagaagacttaggatgggacatggcagacaccaatgtcttagacatggatgaaggaagaggaccctgcaaaagaaagggatgaacaccagagaagaagggcaacagagtaggaccaa

SEQ ID NO: 772742 - DNA, 602 bp, Homo sapiens
gtagggttcagaaactagagaagtactttgtggtttgagcacagagttaagtgggtagtgacaggacaagaaacaggtgaggtaggcagaggccctgtcactacagaggtttgtgactcatactcacatttagagtcatttcttcagggatgctttttccaactcactctggatcaggtcctctgatgcattctcagaacgtcctatactttttactttygggcacttattgttacttgtgactatataattgtattatcatttgattaatgtcattttcctcacaagggccctgttagggttcatttatcacgcctttgtattcccagcaattagcacaggtttctgcatgtatgtacttgatcaacattttaaaataattgaattactaaataagtaaataaaacctaagaatcctaacaccacacttcttgttctagcctggttcatacacctagagtctccttctatctgaagatatagaatctgaattgaaatacaagtacttcccccagccaccaccattcaaagatgcttttggagatggagaatgggagtggggctgtgggcagacaaataaagtgaagaccctataaatgcaa

SEQ ID NO: 772743 - DNA, 607 bp, Homo sapiens
aatagtccactggtccattagtgggctttgtgttaaacacaaactgcttgggggaataaacttttttttttaatgtaaaaaaggtaagctgggcacggtggctcacacctgtaatcccaacactctggaaggccaaggcaggaggatctcttgaagccaggagttcaaaaccagcctgggcaaccaatggaaacctcatctctaccaaaactaaaaaaattagctagacatggtgacacgtgcctgtagtcacagctacttaggyggctgaggtgggaggattgctggagcctgggaggtcaaggctgcagtgagccatacttgcaccactgcactccagcctgggtgacagagcaagactctgtctcaaaactaaaaaaataaaaaaactaaagaaggtagagaaaagagaaaactgaaatagtatggatataataatagttcttagaaaaagaaaggatatgggcaatgtctttcattcatacctctccctaaatagaggtttaaaatattaaaacttggtagtcagtgaaaattaaagattagaaagttctaacaaaatcctagagatgaaaatcctactgctgctattaccagattataggtc

SEQ ID NO: 772744 - DNA, 517 bp, Homo sapiens
ttgaaaactgcctagtctatgtcaacatactaagtgtcaatctacattgtaatagttctgtaagtctagattgtacatgccgtcattcataggtcacacatatgtacttagtgggaaaatcaatccacaagaatagggaccccaaaatcgttttgaaaaaaacatacrtgtatacagtatttaaagttactaattttagaatttcatttggaatagtttgagaagtaggctttgtaaatgtttcagacatattagttattctcctctttctccatttgccaacaagaataatacccagaagcaacaaagtaatctccatcacctaaatttaattaaggaatataattgctattcaagattaaatactttaaaacaaaagtctgtattctaaaaattagactttggtgttttaacagagaaatttttctttctgtgttacatttttttttgttttaatttcacttgacattttaaaggaaggacatacattcattcctgaaggaattatatttcctca

SEQ ID NO: 772745 - DNA, 623 bp, Homo sapiens
atttctccttttcagaatactataaattcagtgttttcttaatactcatatatctgcaaggtgagtcagaagaaatgttgttctgaaggggtgatgtttataagatggcacaataggaaattttgaactcttcccccccgccatgaacacaccagttcaacaacaatacacagaaaaaaaamaaaaaacatccctctataaacaattcggaaacttgttgagaggctattggaaatgggacagcatgaagccagtcacactgaagctggtggggacacagcgccatgcaatcaggaagaaagccctgattcccagcttttctgtggggttggaaaaagttggactgcattttcaattttcaaatttttcaagggtttccaaggctctggcttttgtcttgcctgtgtcagagtactgacggtatctagcatactgtagatgcctgggagccacagaagaaagatggtattttttactaacatacaagcactcattttagtccatcttccttgctcaatgtggcatgagtgggtgaaaaatcacatattacatcttttccctgaagaagaagagagttgtaccatttatctaatattccaagtctttctgcctgagggagagag

SEQ ID NO: 772746 - DNA, 604 bp, Homo sapiens
ctagctattttcctaagactttactgtttgctgattactaacactatatcctgtgagttaatttaacattggcaatgggatcacttgaggagaggtacacgcataccttagaaatattgcaagttcactttcagaccaatgcaataaaatgaatattgcaataaarcaagtcacacaaatttttggttttttaatgtcttaatgcatatgacagttatgtttacactatattgtattctattaagtgtacaatagaattatgtcttaaaaacagtgtacctaccataatttaaaaatatcttatcgctaaaaaaatgctaatgatcatctaagctttcatcaagtcataattttttgcttgtagaaggttcactggagtagtacttttaatatttgtcaagagtgtttcctttgcattccccacttggctaactcttcggcacaagagtcctagcttctagcctatttgggcttttcagaagccttcctcacaaagcttaatcatttctagcttttgatttagagtgagagatgtgcaactcttccctttacttgaaccccctacaggtcattgcaggattattaactggcctaatttcaatat

SEQ ID NO: 772747 - DNA, 489 bp, Homo sapiens
atattcttgccagatatactattctaggctaaaagttattttttcctccagtgctttaaatatgtcatggcacttttcttggcctgtaagatttccactgaaatatctgctgatagatgtattggagctccattgtatgttatttgtttcttttctcttgctgcttttagaatcccttctttgtccttaacctatgtgagtttgaatattgaatgccttaaggtagtcttctttgggtgaaatctgcttggtgttctayaaccttcttgtttgtacttggatattgatatctttctctaggtttggaagttctctgctattacctctttgagtaaactttctacctctatttctttctctacctcctcccttaggtcaataacttttagatttgactctttggggtgcttttctagatcctgtaggcatgcttcattatgtattattctttctccttttgtcttttctgtgtattttcaaggcttttct

SEQ ID NO: 772748 - DNA, 557 bp, Homo sapiens
aaaaataatttgttttttttaataagtcacctaaagtctttttgttattgcaacccaaacagactaagacagaaattggtactgggattgggatgttgttataacaaatacctaataagtcactttatagaaagcctcagtttttttarataatatctaggtggttatgaattgaatgttggtagatatatgaatgataaagaccattttgatgaggtcttaaggaaaaattaacatgtcatcagaaacaggaattaaggttacccttgttacaaagtggcaaagaactagggtgaattggttttggttttgtgtcttagtgttttgtattaggtagaagttgtaagtaataaaacttagtacttggctaaggtaatttctaagtatagtgttgaagttgcatcatggtttctcttaaatgcttattgtaaaatgcaaggagagaaattatactaagacaatttttaatcaaaagaaaagcaaaacctaaagatctagaaaattctcatcctgtacatattgaaaagaatgagaaacagtattcaggagagaatacc

SEQ ID NO: 772749 - DNA, 557 bp, Homo sapiens
aaaaataatttgttttttttaataagtcacctaaagtctttttgttattgcaacccaaacagactaagacagaaattggtactgggattgggatgttgttataacaaatacctaataagtcactttatagaaagcctcagtttttttagataatatctaggkggttatgaattgaatgttggtagatatatgaatgataaagaccattttgatgaggtcttaaggaaaaattaacatgtcatcagaaacaggaattaaggttacccttgttacaaagtggcaaagaactagggtgaattggttttggttttgtgtcttagtgttttgtattaggtagaagttgtaagtaataaaacttagtacttggctaaggtaatttctaagtatagtgttgaagttgcatcatggtttctcttaaatgcttattgtaaaatgcaaggagagaaattatactaagacaatttttaatcaaaagaaaagcaaaacctaaagatctagaaaattctcatcctgtacatattgaaaagaatgagaaacagtattcaggagagaatacc

SEQ ID NO: 772750 - DNA, 528 bp, Homo sapiens
ctcagttgtatgtcacttgtttcttttctcttgctttcaggatccttttttatccttgacctgtgtaaattcaattatggaatgccttgagatagttttttttggatttaatctgcttagtgttatacaacctttttgtacttggatattgatacctttctctatgtttgaaaagttctttgttattatctctttgattagacctttctttctttctttccttctttttcttttcttttgkttttctttttttttttttttttttttttttttgaggcagagtcttactctgtcacccagtgcagtggcacagtcttggcttactgcaacctctgcctcccaggctgaagtgattctcctgccttagtcctttaagtagttgggattacaggcatgcaccaccatgccaggctaaatttttggatttttagtagagatggggttttgctaccttggccaggctggtctcaaacttctggtaccaagtgatttgccttccttggccctccaaagttctgggattacaga

SEQ ID NO: 772751 - DNA, 617 bp, Homo sapiens
gtgtgataagtgtgtaaaaataaaattatctgggtgctattgttatgtttactgattcaaagatgtaggcatatgtgtaattgggaaacttctacaaacatgaagcaagcaatcatttttaattttagtctctaggactccctggaatatcatccagtactaattatttggaaaatgcacaacagtatgcattctatttagtgatttgtgtatttaaatgtatttcaaaggtgtgtggtactttttcttaaatatttttacataattgcattaataytataaatatcattttattgcttttgtaatttttttctggatgatgtcaattacctgcatgaacagataattacgccacccaagtaagatttttaaaaattttagcctctataagtttcattaatattttcatctactaattttctttaacaattctaaaactcacttcctattaaaattatatcaatgtcaatatcttgtgtttttttcctgaatattcttgaatttactaaggataaccatgtcataaaatattcttttttcctgatttttttttttttttagacagagtcacactctttcacccagtttagagtgtagtagcattatcatggctcact

SEQ ID NO: 772752 - DNA, 683 bp, Homo sapiens
acttttcatttggggtaaattcccttatgccttcatatctatcctttagaattttattcccttaatttttgttagtttttaaatgttgtttgtttacaactttatattgtcttaatagttgaaaggtattttgtcttcatataacatctgaggttgacattcattttctcttagtgcattgaagatgtcattccactgtattctggcytctatgatttatattaagaaattcaggagttactttaattataagtttgttgaaattaaccatcttttttctttctaattgcttttagaattttctttttgtcttcagttttctaaatatttaaatttgttttgtctaggtatttctctttaccttttgagggggtgatcatacagacttcttaaatttgtggaatgtcatattcatttacacaaaattttcatccatttcttgttgaatatgtgtctcttttattttctttctcattcccttctggattcccaactggatctatatttgatattagaattctgctatttaggtctctaatcagtgttttcatattttcaacctctttggatatttgtgtgttgtatttttgataactcctttccatcatgttttcaggtctctcttcagctgtgcctactccactattaaacacatcaattaaatttgtatctaaatactatat

SEQ ID NO: 772753 - DNA, 589 bp, Homo sapiens
gcctctgccacatggctctctctgaaaggacctgcttaaggttcttcattaaaacacattttctactgcagatgcatgagagagtgctgtgagttactactgcaggcatggctacattcatgattatgattgagacagagtggaattaataaaacaatttgggcctggcacaatggctcatgcctgtaaccccagctctttgggaggccagtgccgttggatcacttgagccctagagtttgagatcagcctgagaaacatggcaaaaccccatctctacaaaaaaatacaaaaattattgaggcgtggtagtgtgcacctgtagttccagctactcgggaggctgaggcaggaagatggcttgagcccaggaggttgacactgcagtgagccatgatcacacaactgcactccagcctrggtgacagagtgagaccttgtctcaaaaaaattaaaaaaaaataataacaataaaataatttggagccatttaagttttactgtactgaaactacatcataaagctaaaaacaattaccaatagtaataataataatggaagctaccatttattgagacctgactttag

SEQ ID NO: 772754 - DNA, 595 bp, Homo sapiens
gatagccaaaaaagtcaatacacccattaacagtctggaaactgactatactgtagcagatgggaggtgcgaagtagagctttggtctatcagtctgtccttggtatcatcaagtactgaagaaattctgacccttgtaggatgtgataggaaaaaaatgaagcccatgaaaactataatttwaaaaaattaaatagtaattttaaattataaaggttgcttaccactgattcaggagaaagacaggttagagatactgtttgaggattgcaggcaaggcttgtctgtataattttgattgtttctttgataatagaggtaaaatatgttattagctatgttgcagagcaggattaacttggcctctgcccagtaattatcacgtgttcatatgcaagaaagacagtcattgagaagtctgatgcaagagagacatctttgtaacaggcccacaattattttttaggggaattggaggcagaatgaagtcattggcaatttatctctctgtgatctttctatcactatataaatacctaacttacaaagcagctctagttgccatttccccctttctccttaaatggatgaatgt

SEQ ID NO: 772755 - DNA, 552 bp, Homo sapiens
ttgccttctctgttatcttcgtcgtctttttttttttttttttttttttttttttgagatggtgtcttgctctgttgcccaggctagagtgcagtggcacgatcttggctcactgcaacctccacctcctgggttcaagcarttctccctgcctcagcctcctgagtagctggaattacaggcacctgccaccacgcttggctaatttttgtatttttagtagagacggggtttcgccatgttggccaggctagacatgaactcctgacctcaagtgatccacatgccttggcctcccaaagtgctgggattacaggcgagagccacaacacttggccttcttctttttctatatcttcagtgtctcactctctactccctttccccaaaagcctataaacatccttcttaaagacaaaagcaaatttgtttaccacatgttcccttgtccccctccagtgactgcttcttgttcttcacttcttatacaaactttccaaaggatccatctgcattcactcttcccactgtccttcctcctgttcaatcctt

SEQ ID NO: 772756 - DNA, 633 bp, Homo sapiens
accttctgcatttaaattgccttgcaattatttttataattcccagtttctctctaaagaaatccaaactgtcaataatagattgtacacattgctcatagacgatgtaagaaaaatgataaaaaatgcaaagagtagctccattcttcaagaaacagccttactcctacaatggaaaatgagcaagaatttctatattttaagttaaaattaaatgtttgtcatggttatatcactttttaaaataatttccagatttgacatccttttacgatgatcttaaccaatgactgatttcaaatgtgtcagatatgagggattctgttgtttttaaataactaatatctgttgcctaatccagtgtccaagtcacagtgaaggttgttcatagggccaatcaaaggctagagatccatcatgtgaaatctgccaactctggaatctgaattgctcatggtgggcaasgaagaggcaggaatataagtgtgatgggaagagacataatagcacctcacagcacatagaaatggtgagtttttcagggatctgaagtagtatcctggttcagagaagttctttctgtgcattgaagtttgagctgtttgttacaggagtggaagaagcaggtaatgc

SEQ ID NO: 772757 - DNA, 628 bp, Homo sapiens
ccataattatcttttatgatccaggtaaatatgatcctctaagggaaaacacataacttaaaatataatacctatcagttcttaagttttgtttttccatctgtagtcctgcaaaacacattccatttccatccacaatttaatttcttaaagttgtcttaagaattttatctgcatgaaattttcagcaattacaaagtaactggaaatttctctgaakatattatgattaaattaccaagaaatatcttacatgcttggaatttaagaacatttagataagtagccaaaatctttgtcatcaaatctttgtttacaaagtgcagctagacaccttactgccttttctttgcttaacattcctcacttctgacagaaaaattgagattatacacataagtctgtggatagctaatgaggctgtattgactgacccagggtgaaaaggaagtatattctttagaaaaactagtttttaatttttcaggatgttcttgctatttgttggcctattacttttatcaaaatgttcaaacttgtatatgcaaacaaaagccaagttaataaagtgggttctctttttttatgtaataagttctgatgatctactgtgaacctcatgtttaaa

SEQ ID NO: 772758 - DNA, 509 bp, Homo sapiens
ttgccctgtttcatcaatgtacagtttgcattactgaacagactagaacaatgtgtcaatgtaaaaacatttatatctggcttaaatgacaacagtttatctgccctccctccccaaaatacaaagcagtacctatcttayctctgatgtaattaaagtgtccatgatggtaacttttcccaagcaaagccacagtctgtcttaaaggtgagatgagatctttatctctacagacagaaaatgttgtaacttttaaatggcagttcacctcctgcttgttgaggtttacagggcagcttaacaggtgggtaggtgcagtggatgggcagagagataactgatatataagacagagagatatgtggacatattttcttactgtagtgcttttaaaaatatgtacaatttaaaataaacttttgctttcaaaatttcactatttttgttgcagtgataaccaccaagccaaagggacaggaagctctcggcattgttggtgttttactcaa

SEQ ID NO: 772759 - DNA, 575 bp, Homo sapiens
atctaagatggtcctgtcctgctcaaaaggactttgcctgttggagtgggagcccagagatctggctgagcaccttgaatggcagctggccctaccctaaaagcccatgggtaccagaccacgctataacagcagcaaggccacagggacacagggtgctcctccttcctgcaaatgatacaaaagtgtatgtgcaaatgaaagcaaaggacaaatccaaaaaaggcaagcatccttatatataagaaatctatatttttatacattacatatgtaaatatgtacgtttttgcttagaaaaaaaagtttttgcttgttttctaatagcaaatgagtagagtattctatctgggtccaggctctggaaggtggtttcataacagagagctgcttcctcttcgggcagaaatctgtccacggcccccaacccacaggccctgccccagcacgctttccagctggaaggctgatggtgaagcccccagtccacccagaggtaagtgggaagaatgtycctcatcagacagacatggtggagctgccctatcagcacacagcattacacacaaaaccag

SEQ ID NO: 772760 - DNA, 552 bp, Homo sapiens
tgcatacaatatacaggttgtgcagcttgcgtatattgcatcactgttaccagtattcaagcttcatattaccaaaaatcttttaaaataggattagatataacaatactcgcagccgtgtaaaatgccacttatggatcttttacttgcaatgaagaatgttgcctaaaatgttactctaggacgggttatgtaaaataatactccctcagggctctgccctaaagtctggaatacaaaggatttactgtgattaaaaaccatactagctttgcaaatacaataaatggtaaattacagataaggtataagggtaaagatagaccaagattgtttacagaaagtgactcatcamaatcaaaattgtgcttcttctcattaaatcatcttttaaaaattctcagattatcccttccctatcttgccaccactttataagaattcagtagtgggaacaagagatgactggcatccattttcaagtgattctgttctcttcatgttcttataaaactattgtcagaactgctataaatagccaaggcttctgct

SEQ ID NO: 772761 - DNA, 658 bp, Homo sapiens
catcatttttcactcataacaagtacttttagagactttctacagtaatactataaagaacatcacaatacattagaataataattttatttactaacttaacttcctgtgcttcatactcttttcttattatctcaaccacaaaaacattcttctggctgataactattgtattatgatgtgtttctgctttgatctctgcatatctttgagcttttaagaatactttctgattgtttttgcattatattccacatatttttcattagaattcatttgtatagagaaaaatatgtcagatcaagaaaatattatttgatatttttcaaaagttatctataagacatgttaaaaatattctttctttcttttttttttttttgagtcaragtcttgctctgttgcccaggctggaatgcagtgtggcgtggtcatagcttactgcagcctccacattgtaggcccagacaatccttccaactcagcctcctgggcagttggtactacaggtgtgtgccaccacacctggttaaaaattatttttgtagaatcagggtctcattatgttgtccaggctgctcttgaactcctagactcaagggatgctcctgcctcagcttcccaaaatgctgggattacaggcatgagccatggcacc

SEQ ID NO: 772762 - DNA, 629 bp, Homo sapiens
ctagaatgtaacatttggttcaaatatgctgcttaccaccaagttccatatgccatgaaatttgtaaatatcattaaaaattgacaattatcatccaggctatatatttttctcttttcatttccaggtatggtgggagtcaggtgaagagagatcacatgagatctttgttttgctctagttcaggaaggttcatgtaaaataataatgatgacaaaatggtaatgattaatattgataaaraaattatattactgataaaagtctatattttgaaccctgtcttttctgcttctactattattaagtaattatctgctcactgtgttcatactaatgcttgcaaactattagagctgtgtaataacagagactagaggaagctcagttttattgcctcacattactatttgttcaacaatgattattttcttaataaatgagatgtgaagcagctcttcgtgtttataaaacatgtaaattaagcaagaagattatttttaaaaaagaaatggctcttcaaatttgatctatacaaatcattgtggtatagttatgagaaatatgaatacatttaaaaaattttagactcatttcttctttaagactttggggaacaagtaaaaata

SEQ ID NO: 772763 - DNA, 641 bp, Homo sapiens
ttcaccaaaggcttcaggttggctgctctaaggaaaaggcaagatggcaggtgggtggggcgtaggaagtaccaaatgggatggagtgaatcaggatttcagtagggagctggggcctgatggggctgggagagcaagttgaacaggatctggctggatgcgaggcaggctggagcagacctggaatggggggctctgctagtcgggcagggctgctgccatcacacagtgccacagactgggtggctcaaacaacagaaattcatttcctcacagttctggaggctggaagtcactgatgatgacgtcagcagggctggrttcttctgaggccattctcgtggcttgcgggtggcagtgtccctgtatgtccgcgtgatggtcactcctctgtctgtgcatgtgtctgtgtcctaattgtctgttctcataaggactctgtgcatattggattagcgcccatcctaatgacctcatttaaccttaatcacatctttaaagaccctaactccatatacagtcacattctgaggtactggggttagaccataagcacaggaattttgggggcacattcagtccataatagagagtgaatgagcagggtttggtggcatttggaggctaccttgctttcagtg

SEQ ID NO: 772764 - DNA, 542 bp, Homo sapiens
attcagcctctttttttcagcaagccctactcctgtttcattggctcataaacaaagtggctaaggtggtagggatgaaagttatccatcgattcagcaaaagggtcttccattcaccaaaaccgatcaggttacaaccgctgctgagtgccctatctcccaacggcagaggccaacactgaaccctgaatacggttcaattccctggggaaatcagcccaccatctggtggcatgttgattacatgagaccacttctaycatgaaaggggcaatgatttgttgtcactgaagtagacatttactctgggtttggattggcccttcccactcgaaaggctgttgttgaaaccatgatatgtagatttacagaatgccttattgtgtatcacaatgtttcacattgtttctaagtaaatcattttctagtggatgaagggcaggatgggaataatgcccacataatttataggagttcctgtcttccctggatccagaaatagtaaatcttcatgattttgctagctctgtgatgccttcggg

SEQ ID NO: 772765 - DNA, 606 bp, Homo sapiens
aggggcccttcctgctctgtgcctcaacctattctccataatagggagtctaatcctattccttccctgcctgatgaggatggtgtgaggatgaggaggacggcatctcatttggggctttttggcagtgggcctcattttaatcctgcagggctgcctgccagtggatctatccagctgcttccttgtagccaagaatgagttcaatraattgtgattcactgattttattgattttgttttaaaacagggagactggtatttttgaagctgctatcattttctatttctttattaatttctttgtaatcatcttattaaagttttcttatttagtgggagagggagctttgtttaagtttggaatttgcctaaggcagaagttataaggcttcataaccttttgtatgtattgccaatatttgaaacttgggagattacgtataaaaaatacctagttttctgggtggaggatggggcatgctgtcatctcaagtctgctgcggctcacccccaccacctttaccccctcccccgcccttcccatcccccactgcacttcactcatgtaagacgtctgcccggtgctggtccaggcgggcatgt

SEQ ID NO: 772766 - DNA, 619 bp, Homo sapiens
gatgaaaagtattgatcctgggtatgtctgtgagggcgctgccaaaggagattaacattggagtcagtgggctggggaaggcagatccacccttaatctgagtgggcataatctaatcagctctcagggaatataaagcaggcagaaaaacgtgaaaaggagagactggattagcctccagcctacatccttctcctgtgctggatgcttcctgccttcaaacattggactccaagttcttcagttttgagactcaaactggctctccttgctccttaagcttgcagacagcctattgtgggaccttgtgattgtttaagttaatacttaataaactcccatatatatatatatatatatcctattaattctgtccctctagggaaccctgactaatacatgctgycatccaggctttgttgtttcatttctagaacacgtagaacagctttagcataattcttaagggccccagcattttcagaatgatacaagagcattggcttcaacttaaagtcacccactgcattagcttctgacaagaacagcctgtcctctgaagctgtgaaaccaggaattgacttctcctctctaggctatgaaagtcctagatggcatc

SEQ ID NO: 772767 - DNA, 594 bp, Homo sapiens
tctggcctgcacggctgagcttcccaaagtttagctgcacaagtccaagtgcgcaggaggcagagaactggatttgccccagggttgtggttttgccaaatgaatgggatgaagggagatgggcaagggagttggaagtttctttcaccaaattcattgttaatttcatcagaacaaaacgattcttttgcttgttcccacagagaaagcaacatccccaaatacatatgaaacaccgatcactaaaggcacaaaacagrcaccacatgatcctctattccacttctcttaggcagctctgttcagctacggggactcacctagttccctggcagtagcccaagtctctttcagcaacagcagccttgggaatcttctgtacataataccttcctgaggttggtttatcagcacattaaaagcacctcctaccagacacacagaatggagccccattagaaaaaaacaactaaactctaatgtcatcctgcagcagactgcaatccacacaccagtgtccagggtataatcagattctccagaatatggtatacacagtccattcttgactgctggcagtggcaggcaggagaa

SEQ ID NO: 772768 - DNA, 594 bp, Homo sapiens
tctggcctgcacggctgagcttcccaaagtttagctgcacaagtccaagtgcgcaggaggcagagaactggatttgccccagggttgtggttttgccaaatgaatgggatgaagggagatgggcaagggagttggaagtttctttcaccaaattcattgttaatttcatcagaacaaaacgattcttttgcttgttcccacagagaaagcaacatccccaaatacatatgaaacaccgatcactaaaggcacaaaacagacaccacatgatcctctattccacttctcttaggcagctctgttcagctacggggactcacctagttcccyggcagtagcccaagtctctttcagcaacagcagccttgggaatcttctgtacataataccttcctgaggttggtttatcagcacattaaaagcacctcctaccagacacacagaatggagccccattagaaaaaaacaactaaactctaatgtcatcctgcagcagactgcaatccacacaccagtgtccagggtataatcagattctccagaatatggtatacacagtccattcttgactgctggcagtggcaggcaggagaa

SEQ ID NO: 772769 - DNA, 594 bp, Homo sapiens
tctggcctgcacggctgagcttcccaaagtttagctgcacaagtccaagtgcgcaggaggcagagaactggatttgccccagggttgtggttttgccaaatgaatgggatgaagggagatgggcaagggagttggaagtttctttcaccaaattcattgttaatttcatcagaacaaaacgattcttttgcttgttcccacagagaaagcaacatccccaaatacatatgaaacaccgatcactaaaggcacaaaacagacaccacatgatcctctattccacttctcttaggcagctctgttcagctacggggactcacctagttccctggcagtagcccaagtctctttcagcaacagcagccttgggaatcttctgtacataataccttcctgaggttggtttatcagcayattaaaagcacctcctaccagacacacagaatggagccccattagaaaaaaacaactaaactctaatgtcatcctgcagcagactgcaatccacacaccagtgtccagggtataatcagattctccagaatatggtatacacagtccattcttgactgctggcagtggcaggcaggagaa

SEQ ID NO: 772770 - DNA, 631 bp, Homo sapiens
tgaaccttatagacacttggctaagtgaaagaatccagtctcccagaaacccacacatcgaatgattctatttacatgaaatgttcagaataggcaaatgtattgccagggactgggggaaatgggagagtggggagtaactgctcatggagatggggtttctttttggggaaatgaagacgttctgaaattagtggtgatggccacaaaactttgtgaatatactaaaaaccactgagcactctaaaagggtgaattttattgcctgggaatgatatctcaatttaaaaacttttttgtaattaaaaaaaaagacaagtcttgcctttagaatcccctcycctcattccgggaaagtacgtgtcgtgggcaagtctaagcagaaagtgtattgaatctgccaggttgaccacctgtttcatgcagcttagggtcagaagaatctgtagctctgtcaagaagacgcagggctacagataggaaacaggagggaataatccagccagaaattatcttgcccaaccacagagggcatcatctacattctgctgggatccataccagaggaggacagaaacagaaaataggatcgggactggaaactagagctgtggttgtcttctggatggat

SEQ ID NO: 772771 - DNA, 631 bp, Homo sapiens
tgaaccttatagacacttggctaagtgaaagaatccagtctcccagaaacccacacatcgaatgattctatttacatgaaatgttcagaataggcaaatgtattgccagggactgggggaaatgggagagtggggagtaactgctcatggagatggggtttctttttggggaaatgaagacgttctgaaattagtggtgatggccacaaaactttgtgaatatactaaaaaccactgagcactctaaaagggtgaattttattgcctgggaatgatatctcaatttaaaaacttttttgtaattaaaaaaaaagacaagtcttgcctttagaatcccctctcctcattccgggaaagtacrtgtcgtgggcaagtctaagcagaaagtgtattgaatctgccaggttgaccacctgtttcatgcagcttagggtcagaagaatctgtagctctgtcaagaagacgcagggctacagataggaaacaggagggaataatccagccagaaattatcttgcccaaccacagagggcatcatctacattctgctgggatccataccagaggaggacagaaacagaaaataggatcgggactggaaactagagctgtggttgtcttctggatggat

SEQ ID NO: 772772 - DNA, 631 bp, Homo sapiens
tgaaccttatagacacttggctaagtgaaagaatccagtctcccagaaacccacacatcgaatgattctatttacatgaaatgttcagaataggcaaatgtattgccagggactgggggaaatgggagagtggggagtaactgctcatggagatggggtttctttttggggaaatgaagacgttctgaaattagtggtgatggccacaaaactttgtgaatatactaaaaaccactgagcactctaaaagggtgaattttattgcctgggaatgatatctcaatttaaaaacttttttgtaattaaaaaaaaagacaagtcttgcctttagaatcccctctcctcattccgggaaagtacgtgtcgtgggcaagtctaagcagaaagtgtattgaatctgccaggttgaccacctgtttcatgcagcttagggtcagaagaatctgtagctctgtcaagaagmcgcagggctacagataggaaacaggagggaataatccagccagaaattatcttgcccaaccacagagggcatcatctacattctgctgggatccataccagaggaggacagaaacagaaaataggatcgggactggaaactagagctgtggttgtcttctggatggat

SEQ ID NO: 772773 - DNA, 532 bp, Homo sapiens
aggagcagagggcagacttcctcggggtgcttttgatggtttgttttctacatgattcctctccctctatcagccattctctttgttaaagggagttactttctgggctggatttattggctatatctagaatctattttctccgaaggtgttgtggcagattcccactcttacattctatcctgtggtgtaaagagatctgaaacggacaasgaactggaagaaatgtaaaacctaagagaaaactaagcagaatgatacaggacagccaggttctccctgagtcagattattcccactactggtgcggctctttggcagaaagaaggatttctcaaatccattcccctcacagtcctgcagaaaacctgatgagcgaggctctcttatgggttaaaaaagtttttttttttaaatcttctccatttccttaatgtaacagattcagcccatttgtgggaaatcccagccatgtgtatatccaagaggcaaagtctagatttgtgggatcccactcatttatgcagtaaac

SEQ ID NO: 772774 - DNA, 569 bp, Homo sapiens
aatatgcttagaattggcaattcttttaatttggagaatattaagcactgatttcaggacctctctagtcatttctttcagcatttaaacattaaaaaatgaatatgttatataaaaaatagcttcatttaagtgttgcagtagtctaaaggtacaaaatagtgtatggtgaaaagtaagtcacctgcccactcttgtcctctaattgaccctttggatgcaaccactgttatacatttctgatatagaggcatatatgtatataaagttttcctttataaacacaaacaaaggtctactgcacacatgtaacttgggaacattcaatgtcagtacatacccagccacatctttctttttaatgagtacacrgcataaatggaagaaatttgggctttaattatggaagatatggtaaagtttggaattcaatattgtggtgttattacatgtattatatattacatatatatcttctatctatctatctatctatctatctatctatctgtttttgtccatggtttctggctcataactcccataaaccctgttacaggcttttgtta

SEQ ID NO: 772775 - DNA, 593 bp, Homo sapiens
attaacaagccaatggataataaatgcaaaatctcatttctattttgtatcctactttgacttagtttctgggtaaagttttcatttactgaaaccaactgctttgactcatttagacttagtcattgaatgtaaaattagcaagtcccttgggttgatattgagctgaaaatgcagatgccaggaggtcagcacattccccattttacccaytccaagaagatggagccatctcagtgaacagaacggctgctcctaaacacaaagcatccagcagtaattggtcccacagcagtccccctcctgtggccaccgctcatattctggacatggtgagaagaaaggcaggtccagagcaggatggatgggggcaacctttggtggttcctcatcatccgaggctgtctggatctatcataggggaggattttggctcagtctgcagcccaagttaggccactccaggaagcaacagggccctggtcttcaaatctagaggtccatgaagactttccaagagatacacaggcatgtttagatttaagggactctatttccagttcctcaactttcatatgtacttcttctaaact

SEQ ID NO: 772776 - DNA, 574 bp, Homo sapiens
  misc_feature 566: n = A,T,C or G
attggacatttcaaaaacctgaaaggagaccaaatctgtatttttaatttgtttgaatcagtagtaaaactaagtttctctaaagataaagcaagttcttttttcactacaatatgtgtgaaaggaccaataatacctaattgggcaggctggcagactgctgttcaaagacagatgaattacagcagctatcattttgtcccttttaggttaccttacgagttttcttctttacggatgcccagaacgggcctttcagaatgtgcctagatgagaaattcatttctagtcattatcrccacagctttagctaggaaaccagctctgttccaaatcaggacgaagtaaaagcataggttttctataggcaaatgcaatttttgactggctgtcctcagaagccattgcccctggttgccgggtctttgctgatggaaagccaagccaggccacattattaggtagctcagtagcagttaattattaactccagtggaggagtgggtcatgagattactgtatatgctgttacaacatgattaactctctgctcatcaattcaattnttttcggg

SEQ ID NO: 772777 - DNA, 574 bp, Homo sapiens
  misc_feature 566: n = A,T,C or G
attggacatttcaaaaacctgaaaggagaccaaatctgtatttttaatttgtttgaatcagtagtaaaactaagtttctctaaagataaagcaagttcttttttcactacaatatgtgtgaaaggaccaataatacctaattgggcaggctggcagactgctgttcaaagacagatgaattacagcagctatcattttgtcccttttaggttaccttacgagttttcttctttacggatgcccagaacgggcctttcagaatgtgcctagatgagaaattcatttctagtcattatcgccacagctttagctaggaaaccagctctgttccaaatcaggacgaagtaaaagcataggttttctataggcaaatgcaatttttgactggctgtcctcagaagccattgyccctggttgccgggtctttgctgatggaaagccaagccaggccacattattaggtagctcagtagcagttaattattaactccagtggaggagtgggtcatgagattactgtatatgctgttacaacatgattaactctctgctcatcaattcaattnttttcggg

SEQ ID NO: 772778 - DNA, 626 bp, Homo sapiens
ctcttgtgtgtgggcagagtctgagcggatccgagtgtttcaatgagctaaactagtcagcttcaagctgttccatagacagtaggtgtgaatccaaaatcatttcagacattcagctttataatgtttcttttaagaaaaaaaaaaaaaacatggaagaagcaccagacccaaatgatcactttttctcttggccagttacctgtacaagtatcaggccagttgtaaaacacaagtctgggtaggttagaaaggcaagttgcagatgcctcttcccttacagcagcattcatgggagagcttctttctttctctctgcctcaaggatactcaccattcttctattccatttttagaaacaggctggcaacacacattctccagtctccacacaactctcctctcctcgctggtccgtttgtctctaaggctggttggttgtttgcatctgcctgagtagttcgttcatggsagtcagactcggatgaaggtttaacagtcattgaagggagagatcgtgaccacttccactgccttgctaacaaaccacgaccccactctccaatctgctgcacttcggtcttgcttcaaattcctgtggctgcaaggaagacctattgttaaaa

SEQ ID NO: 772779 - DNA, 539 bp, Homo sapiens
tatatatatatatatgtcattctcatgttaataatattcatgaaagaaaaacgagaaaaaaaagacatataagcaagagaaaatacaagactttcccaatcctacccacagaccaacacataaaatacctttgcgtatattcttcaaactttctgcatagtcatttatacatttatattatttccataaatcatgttcagttgttaaaaaactgccttttaaaaatcttactgtattgtgattatctttccatatcaataaaatagttktatatgatcattctgatatataattgtaaataatttaaccaatctgttgttggcttttaggctgtttctaacagcagtgtaactaatatccttatggctaaatcctgaaagccatacttcactattttcttaggatgaattccaggtagtttaaggactagcatgtgctttttttaagttatactttacgttctggcgtacatgtgcaagacgtgcaggtttgttacataggccatggtggtttgctgcatgcatcaacctgtcatctac

SEQ ID NO: 772780 - DNA, 527 bp, Homo sapiens
ggtcttatcagacgtgaagcattgtttgaccaccactggcatagtcaatataaacacaattctatcactagtctccatcctgctgacctcaaacagccacagccaatgcttttatctcccatcatgatcctctgacaaccactaatctgttttttagttctccctctcaatagtttgttatttcaagaatgttattgaaatgatcatatactatgtagtcttttgagatttgctttctrtactccacataattcactggagagtaatccaagttgtgtgtttgtcactgagtactatttaatggtgtggacataccagtttgtttagccattcacccattgaaagatatttgggttatttccagtgtttttttattattacaagaaatgctgctatgaacatttgtgtacaggtttctgtgtaaacataagcctttatttctctggcatagctgttcaggggtggaattactgagtcttagggtaagtgcatggtttgcttcgtaagaaactattttccagagtggc

SEQ ID NO: 772781 - DNA, 622 bp, Homo sapiens
ctgcagaagggacaacacagccggaagtccaaggagagcgcatgcacccatgccttggggaggctgccatacctccagcatgccagctgccatgacaccttctggtaaggacggacagtcacagggctcacacatggtggccaggctcggcattcccttggcttttcttgccactgagggcactgggcggagcagccctgctgtggtctgatgtggaaggcgagtggattctctgtggccatgtccactttggtcagagagtgctggggaatgaagaggggggagtccagccttctctggagaggtcccttgtggactgttgtccatgacctcctcctgtgtcacccraactctcacctcatggtccaggaaggctcctgctttgcaccttcaactcccatctccctccatcacatcccagcggtaccaagaagttaccactggaattttctttggaactgaaaatttctgtgggcaaaagtccagcagcttcggttcagaacatgtataaatactttttccttcttcacctgcctcatggatattttatgcttggatcatgtccggtcagtggggggagaatcgagttttactaggacttccgatgggtgaatactggaag

SEQ ID NO: 772782 - DNA, 634 bp, Homo sapiens
tcccagctactcaggaggctgagacaggagaattgcttgaacctgggaagcagaggttgcagtgagccaagatcgtgccactgcactccagattgggcaatagagcaagactctgtcaaagaaaataaaagaagaagaaggatttgccagatgcagtggctcacacctgaaatcccagcactttgggagactaaggtgggcagatcacttgaggtcaggagttcaagaccagcctggccaacgtggcaaaaccttgtctctaccaagaatacaaaaatggcccagaatggtgacagctgcctgtaatcccagctactcgggaggctgagggaggagactcgcttgaacccagatggtgggaggcagtgagctaagaccacgccacggcactccagccttgacgacaaattgagactccgtctcaaaaaaaaaaaaaataaawtaaaaataaaaataaactctcccccaccaaagaagggtgaggggattttcagtttctggaaaccttatgtgcattcaggcaggaaggctggctgaggggtctagggggcaacaacaggagtggcagaggcgggcttgctgggatcctcgcacaccccactgaggtgctgtgagcctgagaggaacacgagga

SEQ ID NO: 772783 - DNA, 584 bp, Homo sapiens
aaaatattccaaaatatggaggaggagggaatagtttcaaactcattctaagacccagtaatactcatcagtattactaaaaccagacaaatatgtcaaaaagagagaaaactacaggtcaatatctctgatgaacaytgatgcaaaaatcctcaacaaaacactagcaaactgaattcaacaacacattaaaaagatcattcatcatgaccaactggaatttgttccagggatgcaaggatggttcaacacatgcaaatcaatcaacgtgatatatcacatgatagaacagaataaaacatgatacaacagaataaaggacaaaaatcatactatcatttcaattgatgctaaaaaaagcatttggtaaaattcaacatcccttcatgacaaaaatccaaaaaaaactggggatagaaggaacatacctcaacacgataaaagccatataagacagacccacacctagtatcatactgaatgggagaaaattgaaagtctttctctaagatttggaacaagacaaggatgcccactttcaccactattattcaacatagtaatggaagtccaagctagagcaa

SEQ ID NO: 772784 - DNA, 520 bp, Homo sapiens
atcatggtaggcactgaagattatagaaatgcttcatttatcaacaagggtaggtacctaaaagataattttaaaaataaaattatgagaaaaaaaaactttctttctccatgtatttctactttcagactcatgcccaatatctaatattgtgtgttgaggatataattaaattgtatttcagagtaatctccttggtctttttttttttttttttgagatggggtctcactctgtcgcccaggctggagtgcagtggtgcaatctcggctcactgcaagctccacctcccgggttcacgccattctcctgcctcggcctcccgagtagctgagactacaggcacctgtgaacaygcccggctaattttttgtgttttcagtagagacagggtttcaccatgttagccagaatggtctcgatttcctgacctcgtgatccgcctgcctcggcctcccaaagtgctgggattacaggtgtgagccaccgcgcccggctatatgttggcaactgctggagg

SEQ ID NO: 772785 - DNA, 578 bp, Homo sapiens
acatattttgctctggccaaaatgaaaaaaaatgtaatttccctttatgatgcggcttggcccccagggcgatggtgccacaagcctgatcagtagtgctgctcagggaaagggaacccagaagcctggtgtgctggcaaaagggtaagaattttcctaccagtcagatttctggcttatctctctgtacagatggtttgatgaatggttaaaacaaaacaaaacaaacaaacaaacaaacaaaaaccagtgcttatttcctctgtaaagttttgattaatgtgaaaagaattctaaggctaatcttaagctggtgtattttgtgctatgaatttgtttttctgtgttgaagggtactttaggataaaacacggacttggaacacctgtaagcccacttttcaagaccacccakcaagctggtcagtaacaagcttggctgcagctccctgaaacaaaaaaactggatgaagtctccacgtttttttatgttcttgggagcctgaccttttaaccatgtggcagtactttattttggtctctgccatcagggaacaggaattttaggatttatatcat

SEQ ID NO: 772786 - DNA, 620 bp, Homo sapiens
gtttacagtggcaccacatctcaatttggactggctacattgcaagtgctcaatattagtacatgtggctcatggccaccatggtggacaacacagctcccaggtattaggtcctggatattagcggatatatgagacaagtgctgcctctataactgcttctgatgacagacttcttggggttgagacataactgaacctgcctcatctgcgtattacacccaaggcggtaagaagtgaattacaactcattaaacatctacttttcagttaagcacttttacgtccatttcatttaattktctagcacctactttgaggtagagcttattaaactatatcaaacatgaagaaatggagtcatagaactagttagaatcccagtctttttttttttttttcctttttttcagtcatctttccatcaggccaaagaatccttctcttcctccagagccccgaaccacaaattcttctgaacaacactcattgcctcttctaaaagctactgagctcatttcacttactgttttgtaatgctgttacctactgaggacgctttcatagagcaagcgagcaaagtctgtgcagtcagaccacagggcagtcacggtgccctc

SEQ ID NO: 772787 - DNA, 545 bp, Homo sapiens
tatttgtgattctcatttgctctagaagtacatttccaaatgtaaatattccctgaggtgctctttcttggcctttttctttattcatatgatctgtttttctaattggctgactctctcccagaagattaatatccactctcatcacagattgccaaatcctaggccaaatatattttgagcttcaggcccatatagccaagtgcctatggaggcctctccccagatagccagraagcatgtcaaatgcaacatatccaaatattaatatgccatcttcccagaagtcttgactctcctctcaccatcacagtcttgatgaggggcccctggacaccatcctctacttcccaattttccttccacttcccatttccactcaccacacactctcaactctaccgtaaaaatgtgccacgtgtttgtcctttgcactaccacatagatacaattctcatcatttttaacctagactactgaaataggcccctgagcgctaattatgattcctggcttcctcacctctccccagtccccaagggatg

SEQ ID NO: 772788 - DNA, 500 bp, Homo sapiens
ttattacttttctttttttaaactttgtttttataagtcagtgcttaaaacaaagaaaatactacctttaaatcttcttctctatattgaatgcttccttatatttacaaagaaaaatttgaatcaaatatgagcaaagtataagttgcatgaattttatgaagtagaaagacacttctaaacagtaagtgcagaaattgaacataatttataatagatggcactgtcttcctatgtgaagtaagagaaaggattgcttgcttagctaatgccttaccctccttaggccatttaggggattagagsagatcgggcattcttaaagtagactaaatggtggttcacagggaattcatgaaactgaagttgtatgtaatgtgtttgagtgtgtgttgtgtttctctatgtttgtgggggaaagagaatccttccttttcctcagaatctcagaggggtctgtattccccagacaaaagccttaaaaactgctgagctagaag

SEQ ID NO: 772789 - DNA, 634 bp, Homo sapiens
cccaaaggctagtctaactttcttaccaatgtacctgggtccccttgtcactgtaatgttcttcagatcccacctttagtcatgcattcaacaatatttactgagcaccaacttactgtctagacacaggagatctactggacagcaattctgattcaacccatactgggtctaggactagacacaatctcactggtcctatgatactaaaaacctagttatctggcatattgaaggggcctcaagcccagtcatgagggagaccggaaggcatctcagggaagttaatgactcctgaaagatgaactgaaattagtttgttaaagaggatgtaggccggacatgatggctcatgcctgtaatcccagcactttggaaggctgaggcaggtggatcacttgaggtcaagagttcaagaccagcctggtcaacatggtgaaaccctgtctctactaaaaawacaaaaattggccaggcatgatggtgcatacctgtaatcccagctacttatgaggttaaggcacgagcattttttgaatccgggagatgggggttacagtgagccaagattataccattgtactccagcctgggagagcgagactttgtttcaaaaaaaaaaaaaaaaaaaaaa

SEQ ID NO: 772790 - DNA, 540 bp, Homo sapiens
cctctctcaccactcctattcagcatagttggaagttctggccagggcaatcaggcaggagaaagaaataaaacaggacacaaacaaatggaagaacattccatgctcatggataggaacaatcaatatcttgaaaatggccatactccccaaggtaatttatagatttaatgccatcctcattaagctaccaataactttcttcacagaattggaaaaaactactttaaagtccatatggaaccaaaaaagggcccacattgccaagacaatcctaagccaaaagaacaaggctggaggcatcatgctacctgacttcaaaccatactacaaggctacagtaaccaaaacagcatggtactggtaccaaaacagagatatagaycaatggaacagaacagagccctcagaagtaataccacacatctacaaccatctgatctttgacaaacctgacaaaaacaagcaatggggaaaggattccctatttaataaatggttctgggacaactggctagccatatgtagaaatctgaaact

SEQ ID NO: 772791 - DNA, 688 bp, Homo sapiens
aagtctaaaccagatggtaacttagcttagctgcaaagaaaataagagccaccaacaatttaatgtttttcaaactgcctggacaatcttttccttcctcatacaggcacgataacagaagtggccggtggagggtggcccattgagtgcccatgatgcagtccaaccaagaaacaaagttctctgcacacccctcgcccaggcaaaaagagaaagtaaaagcaaccggttgctgccaaggggtgtggtgtggtggggctggcactaccctgaacatcaatgaaggctgtctgtttctggtcctgcttccgcagtgagaggcagcaggtccccaagcaggmgacctgcccttcaccgtgaggctgtcagccttgggggagcggggtcatttggagctgataaaccaatgagaagaaaggtttgttgctctaggcggtgggtgagggcatcatagctgactcttggtcttggtcactttcggaggagatggtttatttaacctgacttccttcctgatgcgcaccgtaggcgcagtgaaatccgggaatcgtggggaatccttggcgctgtgggtggaggctcctcttggccctgtggccaaggtgaccaagggccgaaggaaaagcgagaacgggagggacgggacgcaagagggcagatggggaaccccatactccagcaacattat

SEQ ID NO: 772792 - DNA, 641 bp, Homo sapiens
gtctagttcaaatagacctcttccatgaagccaaccctgattctatcagttagaatgaggatgcctgacaggttttcctttgtttgacaattatgtggatgcttgtcattcacgtgggagctggaaccaagtcttatgtttttattctctactctctggcacaattccttttaatgcaagtaaaagaatatcgttcagtaacaagggaagatcattcaagaataaaaatggaaacttttgtttcttccataaatgacactgggtttttcttctcccttttggggagtagggtttggaccactgtgctgtatgaggccactacaagcgaatttgggtagaatctttatgggtccttytatcctcaattccttcaaagacaccttgtatattttgtgacttcatcgattgttctcctgttttataatattgtctatgtgtgagttcaatagttatttggtttaaaggattttttagcgttttattattcttacagtgaaataatgtaatgtataaatcacctaccagattactctgtgcaatttgtagaatgaaagatagatacctaacaattcaaaaattaaaaacagaatacagtcatacataaaagtgtaccctgtctaccacgtaaatagctgtaatag

SEQ ID NO: 772793 - DNA, 640 bp, Homo sapiens
aaatctgtcttagtagtgacttgccagagacaggatttaaagtagataaacatcaaattagtgcaaggactgcccactttgtgatattgaggtgagcattttttctccccaggcctagtaacttcatttatgtgtctgactttttaagaaaatgtataagtaggacttcatgtaaccattcatgtagataatggtcaggtccagatgagattggggaagggaaaagtgatttacaatgccagtacagcatgtgaaaacaaaaataaaaacaaaacaacacaattaaccttgaggcccagtatacatggaccttcagcatggcagataatctagctccttctaaaaccaagtagctgtatccatgtcattgcatayaccttacctgcaccaagatttcaacttccagttgtaatagtatctgggagctcccaggagtaatgatgatatgactacattacatttttttttaaaaagcaacaacattcattaacatttttgagcacctactctatgccttgcttttcttatatataaaatggggctaatagtaatattcacttcataaagttattgtgagaattaaatgaaggaagcatttagatcagcacctgaaacatagttctagtatgtaataactgat

SEQ ID NO: 772794 - DNA, 621 bp, Homo sapiens
tatggctagattgtcgggatggtttcataagcatattctttaaaaaacactcatgtctttggttagagaagtgaaaatttataagttaatgtttgaagggtattcaacaaattgatcactaaaattgaatctaatcattctgcaaataaaacctgtcaaacaaaattaaatrcaaatgaatctaggttcataccgaaattcatcattggctctttcttcttgaagtccaatccaccaacttgcaccatactttgatagctattgaaagaaaaaaagtcagcatttattctacttgttttcctttttcactattaagagtaatggggttgctgctaatagctttctattcttcagtattttacccaattatctaaggaagaatacactaaggcctagcatcttgagaaaacctgaaacttcattatcctaaaatattccccccattacgaagaaaaactggaatcaaacatggaaaataattttagtttcatacaacttgaaaagtaatgtttctaactctctaagaaggttttaaaaagtaatattagaaaatgaattcattttctgacaaaaaattattggctcatcctctcagttatttaccctctcagtgatttataa

SEQ ID NO: 772795 - DNA, 569 bp, Homo sapiens
tataaagatgggccagagagggatttgaagatgttggacctgaagattctgcttatgcagccacaagccaaagaatgctggtagaccccagaagctggaaaggaagaaacgggttctcctccagaacctccagagagagcgcagccctgccaacaccttgatttcaacccaatgatacckgattttggacttctgacctccagaattgtgagagaataaatttctgtggtttcaggcaaccaagtttgtggtaatttgttacatactgaaaactaacacaaacataaagaagtaggccccgtacagaatgcagtctaacgaggttggtggcagccacatacagctttcagaagcagcagtagcaaagtttccaggactgctttctagttcacagtgagcagcagagtctatgtccacaaggtctggccgtggagtgctccagtataatctgtgctttgcttttgctatgttgtctctgaccctctctacaatcctgtgagctactgagtatattttcacaaattacttttctgcctgaactatagagtattccattttttacaactgag

SEQ ID NO: 772796 - DNA, 569 bp, Homo sapiens
tataaagatgggccagagagggatttgaagatgttggacctgaagattctgcttatgcagccacaagccaaagaatgctggtagaccccagaagctggaaaggaagaaacgggttctcctccagaacctccagagagagcgcagccctgccaacaccttgatttcaacccaatgatacctgattttggacttctgacctccagaattgtgagagaataaatttctgtggtttcaggcaaccaagtttgtgrtaatttgttacatactgaaaactaacacaaacataaagaagtaggccccgtacagaatgcagtctaacgaggttggtggcagccacatacagctttcagaagcagcagtagcaaagtttccaggactgctttctagttcacagtgagcagcagagtctatgtccacaaggtctggccgtggagtgctccagtataatctgtgctttgcttttgctatgttgtctctgaccctctctacaatcctgtgagctactgagtatattttcacaaattacttttctgcctgaactatagagtattccattttttacaactgag

SEQ ID NO: 772797 - DNA, 717 bp, Homo sapiens
aagtttccaggactgctttctagttcacagtgagcagcagagtctatgtccacaaggtctggccgtggagtgctccagtataatctgtgctttgcttttgctatgttgtctctgaccctctctacaatcctgtgagctactgagtatattttcacaaattacttttctgcctgaactatagagtattccattttttacaactgagaatgctggctataacaataattaaattagcatgatcttcaacatgttgggccatcctcacctatagcagatcatgtgtagggcatctccttctcccagatatttatccatgtgaaatccagttaaactaaaaagtaascaaaaccatttggtggaaaagaaaaggaggtgatgtcagaagcatgttcaattaagataaactggtcaagtcactgtattcaacaaaaataatgatgaatgaagcccaatccctgtgtttgaggaggctaaatgggtactgtaaacattgtagaatattgtaagtgaataccacattgttactgccctgctatcttgccctgtggtttaataatagagcatgcctcaccttagggcctcacgaccccaagtatgtccagggacctgtggcatcactcaggaacttgttagaaatgtattagtagactctcagaccttaaccgagacttataaatcagaatctgcattttaacagatgctcaagtgattcatatg

SEQ ID NO: 772798 - DNA, 717 bp, Homo sapiens
aagtttccaggactgctttctagttcacagtgagcagcagagtctatgtccacaaggtctggccgtggagtgctccagtataatctgtgctttgcttttgctatgttgtctctgaccctctctacaatcctgtgagctactgagtatattttcacaaattacttttctgcctgaactatagagtattccattttttacaactgagaatgctggctataacaataattaaattagcatgatcttcaacatgttgggccatcctcacctatagcagatcatgtgtagggcatctccttctcccagatatttatccatgtgaaatccagttaaactaaaaagtaagcaaaaccatttggtggaaaagaaaaggaggtgatgtcagaagcatrttcaattaagataaactggtcaagtcactgtattcaacaaaaataatgatgaatgaagcccaatccctgtgtttgaggaggctaaatgggtactgtaaacattgtagaatattgtaagtgaataccacattgttactgccctgctatcttgccctgtggtttaataatagagcatgcctcaccttagggcctcacgaccccaagtatgtccagggacctgtggcatcactcaggaacttgttagaaatgtattagtagactctcagaccttaaccgagacttataaatcagaatctgcattttaacagatgctcaagtgattcatatg

SEQ ID NO: 772799 - DNA, 592 bp, Homo sapiens
atttaattgtctccactggatatatcttaggtccacaaattggtggatctgtctctatgaaagaaaacaagataacaataaaaaccaaaacaggacagtcctcattcatattccattgcattaagtccaaaagccttgaggttgaaaagatgaaaaagtacttattgttgttaaaatatgagrgaatgttgaacaaaggtaagaaataaagaaaagcaattatttattaaaaaataagaaatcagtttaaaattctttgtttcagcctttgattcactagtacattttattaaaatgcacttatatttctctgtagacttgtagctatatgttccatatattctgctgaacttgagagtatgcattgtttttagatttggaatctaccccttctctaaaatgtatctgtattacacttacaggcatattacatttatatatatgtatacacacatatgtactgatcatacataccatgtaccaacaaaaggttaaattatgtggaatattattggtcgcctaaaagtgtaataaattttagaaaacattttcaaatggagttagaggcagagaaaattttctgtgcttatat

SEQ ID NO: 772800 - DNA, 639 bp, Homo sapiens
gtaaaatttagaagcaattttcaatgaactataaaactgctaatactttatataaattcaaatttgagaagccagttagattgatagtatagcctttgataacagaagggagagtggggagaaatgtagataccattttactttactttttccaggaaaacatgaaatattaagaaaaatgttaagactttaattctcaaattattattattattttttaagacagtcttgctcagtcttccaggctggagtgcagtagcacaatcttggctcactgcagcctctgcctcccaggttcaagtgattctcctgcctcagccactggcgtagctgggactacaggcacccactaccrcacctagccaatttttgtattttcagtagagtcagggtttcaccatgttggccaagctggtctcgaactcctgacctcaggtgattggcccgcctcagcctcccaaagtgctagaattacaggcatgagccactgcacccagcctcaaattatttttaagcagagattggctgtatgaaattaattagcagaaaacccatagaaggtttttaaagaaatctctgaactgaatgtaaacagatcattgaaactaaaggtatatcctcctacaagttctcaaagaa

SEQ ID NO: 772801 - DNA, 565 bp, Homo sapiens
cttttctaaagacctgcactctcaggtcacccagttcctattcagagaggtctttcactgcccatcctgtccaaagtagtgccctgtgcccctccaccccatctctccctctctctcactttctctctctctctctctctccctctgtctcacacayacacacacacacacacacacacacacacgcacacacacaccccactctgtcttctcatcctatttatttttcatcatggcaccgctacctgcaatgatactgtatgtttacttgtatatttgctttctctttctctctccttgatagaagttccacataaaggaacttttgctggtttgttcactgttgtatccccagtactgagtacattaaatgttcaataaatatttattgaatgaataaattaataaatgcctatgaatctattgagctttagatgctaatggctgatgtatttggcgactggaaggtattatgaagttaaatctccattaaagtttctttctcatccatccacaaatatgaatgttactgtgacagctcaccatagtaagtaaacaagtagat

SEQ ID NO: 772802 - DNA, 637 bp, Homo sapiens
acatcgttatcacccagagcccctagtttacattaggattcactctgctgttgtacattctgtgggtatggacgaatgtataatgacatgcatctaccattatagagtattttcactgccctaaaaatctgctgtgctttgcttctgtgtccccttaccccatggcaactactaagctgtttrctgtctctacacttttgccttttccaggctgtcaatagttggaatcgtacagtatgtagccctttcagatcggcttcattcacttagtaatatgcattaaaggttcctctgtgtctcttcattccttgatagctcaattctttttagtgctgaataaaattccattgtctggatgcatcacagtttatccattcactaactgaaggatatcttggttgtttccaagcttgagcaattatgaataaggccattgtaaacattcatgtgaaggattttatgtgaacataaaatttcagctcctttgggtatataccaaggacatgattattggatcatttggtaagattgcatttagttttgtgaaaaactaccaaactgtcttccaatgcggctgtatcatttttgccttcccaccagcaatgaatgagacgtcctgttgcttcacatcctcatc

SEQ ID NO: 772803 - DNA, 504 bp, Homo sapiens
caaaatagattccctaaaactttatcttacagtcactttcaaataactattcaaaaatgtaactgttatattaacgtcttaaaataatttaaaacattttaaaatacgaatactgtagcttaaaacaaagaatctaggggaaggaaaagtagagaaagaaatgccaattccagtccaaagctgtatttgccaagttttcttagaacgacttttaccgatttatgaattcttatacacagaatgcatgatggaaatactgatttttgtctaaagtggcattattgactgcttctgtgatgctactgtaatgtaatarattattagattatttcaaggtgctgttttgcctaaaaattttgtgtgtcttgaaaactatagtattaaaggtattgagactgtgcaaatgctgggcatgcttggcatgagataatcggtttttattcttacaaaattgtaaccatataagtgtgtttattaaaagaacacaaactaaaaaattacagg

SEQ ID NO: 772804 - DNA, 504 bp, Homo sapiens
caaaatagattccctaaaactttatcttacagtcactttcaaataactattcaaaaatgtaactgttatattaacgtcttaaaataatttaaaacattttaaaatacgaatactgtagcttaaaacaaagaatctaggggaaggaaaagtagagaaagaaatgccaattccagtccaaagctgtatttgccaagttttcttagaacgacttttaccgatttatgaattcttatacacagaatgcatgatggaaatactgatttttgtctaaagtggcattattgactgcttctgtgatgctactgtaatgtaatagattattagattrtttcaaggtgctgttttgcctaaaaattttgtgtgtcttgaaaactatagtattaaaggtattgagactgtgcaaatgctgggcatgcttggcatgagataatcggtttttattcttacaaaattgtaaccatataagtgtgtttattaaaagaacacaaactaaaaaattacagg

SEQ ID NO: 772805 - DNA, 325 bp, Homo sapiens
cccaaagaaaggaaagcaatatatcgaagagatatctacactcttatgcgctcttatctgcacttacgtttatcgcagcactattcacagccaaggtagagaatcaacctaaatgttcaccaacaaatgaatggatcaaaaaatgtgatacatayacacaatggaatattatttggccatgaaaaaagaatgagatactgtcatctgcaacaatacggatggaactggaggacattatgttaggtgagataagctaggcacaaaaagacaaatatcacatgttatcactcatatgggggagcagaaaaaaaattgaactcttgga

SEQ ID NO: 772806 - DNA, 585 bp, Homo sapiens
ttgtgagatttatccacgttgctccatagagtcggagtttattcatttcattgctgcatagtattgccgtttgtgagtatacataatctatttattcactctgctcttgctggacattcggttactttctagtttggggctgttacaaatggtgcttcggtgaacattcttatgcatgtcttttggtactaatttggtcttggggtggagtttctgggttataggatatgtatctgttctgatttagtaagtactgccaattttccaaagtgattgtagcaaatacccagaagtgcatgagagttctgatatttttgctcactaaaaaaataaaaaaaaatttttttgctcacttaaaaaaaaaaaaatgaacwcaacggccgtgttcattttagctattctggtggttgtatggttgtgtctcattatggtttaacttgcacttccctagtatctactgaaatagggcaccttttcatgtgtttactggccatttggatgtcttcttttgtgaaatgcctgttcaagtcttttttccagatcaggttgtctgcttttttcttaattatttgtgggaattcttta

SEQ ID NO: 772807 - DNA, 608 bp, Homo sapiens
cagggaaaagaatagatggctgaaaacctatagacagagacttaagagataaatcaaccagttgtaacacatggagtttgtttggatcctgatgcaaacaaacgaaaaaaagagaaatttatgaaacaatcagggaaagtccttcaaaataakgggggtagggaagggtgtagataaaacaagattggacatgaattgacaataattaaagctaaataattgctataatcaatttatggatttttttattttgggggaaatttttcataatacattaaagaaaggtcacaaaaatattatgactcctttccagattcattaaaaattcttctataacatgatctataatgactgtataatacttcatcatacaattgtgtaccataatacatttgatcatttagtagtttcttgacatttaaattgttcccaattggcctctattgctactaacactgatgaaacccctttatataattttgggggtccacccatcattattttccgtgaattaatttcattaaatgtagacatagatacctaggtcaaaagctccacacaataaaaggttttgagtatatattgccatattattttttggaaaggtt

SEQ ID NO: 772808 - DNA, 596 bp, Homo sapiens
ccttctccccaggatgtgggtggcagaggaaaaaggctgctgggagggagaggggaggctgcaaatggtacccccaaagcagcaaggagtatggcagtggtagaggcccccaaagtctcctataaggatgacagggccattggaacctagctgtagagagccctggaggggtgggttctgtaaccttctactccaagatgggatccaaagagcatgtttctggctgtgtcttcctggagaggccttggataaaggcccaggcatcagggggcgctgggcctgcgctaggagaaagatgcatgcyggatgtatccctagcagcagctctttgcacattctcccacccccctccaaacatctacactttctttctctgctcttaaactcatcttggggctccagtgtccccctctgtgaacacttcctgcctcctggagaccctgctagcccttctgtgcaggttagaagacaatgcccttcctccaggcagacatagcccggcaccggggcacaaggctgggtgagcagagtgtgagctggctctgaggtccctcctgtcctcatgtcttatacagtatgccattagcaagtgaagg

SEQ ID NO: 772809 - DNA, 533 bp, Homo sapiens
gtattcatcagagaactatactttatatggatgctgtattagttatgatagtctaaactcatgctacagtaacaattcttcagtgattaacgtaacaaaagtttatttttactttttttgaagtctgctggatgtctgggtgattccccagggatgtcgatctttcaggaagttacttggcaatctaaggatcttgttattctatgatcccaacctgaggtgttctccagtattatcctaacaagagaagaggaagattggagagttatctggggacttttcattgcctcaagccataaatgacccatatcacttccaatcacatttcatcgatgaatgacaattagattgccttgcccaacwtcaagggggctggggagaggtttttgtttaccaatgaaagaaggccatatgcccaggaaatgagatttgttaaaacacatctgctgtataacaaggttggctttatagttaggtgggtatttggttacacatatgtacttatattgttttttacagattaaaattattgt

SEQ ID NO: 772810 - DNA, 645 bp, Homo sapiens
aaaaaaaaacccaaacacctcatgttctcactcgtaagtgggagctaaacaattagaacacatggacacagggaagggaacatcacacaccagggcctgtcggggggtggggggcaaggggaaggagagcattaggagaaatatctaatgcatgyggggcttaaaacctagatgacggattgatggatgcagcaaaccgccatggcacatgtatacctatgtaacaaaccagcacattctgtgcatgtattccagaacttaaagtataataacaataaaaaaaaagatcagagcagaaataaataaaactgaaacgaagaaaacaatacaaaagattaataaaacaaaaagttgctttcttgaaaaataaaactgatagacctttaaccatactaaggaataaaaagagaagatccaaataaataaattcagaaatgaaaaaggtgatattaaactgatactgcagaaattctaaggatcattactggctactatgaggaactgtatatgccaataaatgggaaaatctggaggaaattgacaaattgctggatacacacaacctactgagattgaaacaggaagaactccaagacctgaacaggccagtaacgagtaatgagtttgaagccataataaagtctt

SEQ ID NO: 772811 - DNA, 482 bp, Homo sapiens
ttcgaggcaataataataagattaacaacaatattaataataaaatatactacttgcacacgaacttaaaagtttaaagaaaagaaaaaagatttttaaaagatactaccatattttaccatttattatatcactgattggtggttgtgtttttggcagtggtatttggattttcttagttggtaaggtwatttttttgactgattccacaagtgattacacaagtgaaaaaacatttaataaaaatttgtttactgaatagacaaatgtataaacagccttgacacatttgttgtattggtcaactcaattaattgctgccagatgaatgaatgaatgaacatttgctgagtgtctagcattcatgtaggtactcttctactttgtcctatcaagttctccacttacccaagcaacccactttacaggtagattatttaaaataaggggacccaggtcattgcaaagagggcttgtggggc

SEQ ID NO: 772812 - DNA, 657 bp, Homo sapiens
catgcatgcaaatgtttattgcagcactattcacaatagaaaagacatggcatcaacctaaatgtccatcaattacagattggttaaagcaaatgtggtacatatacaccaggaaatacgatgcagccataaaaagaatgagatcctatcttttgtgggaatgtggatggaattggagtcaatttttcttagcaaactagcacaggaacaaaaaaccaaatactgcgtgttctgactyataagtgggagctaaatgatgagaacacatggacacaaggaaggggacaacagacactgggatctttttgagggtggagggcgggagaagggggaggatcagggaaagtaactattgggtactaggcttagtacctgggtgacgaaataattgatataacaaacccctgtgacatgagtttacctataaaacaaaccgacacatgtacccttgaacctaaaataaaggttaaaaaaaaaaaaagaaagaaagtaggagaccctgagggcttctctttgttggggctgttataacaaaataccataaactgagtgtttgtaaacatcagaatctatttcttataattctagaggccagaaagtctaagatcaagatgtcggcagattcagtgtctgatgagggcccacttcctggttcat

SEQ ID NO: 772813 - DNA, 611 bp, Homo sapiens
gctctctactgggacaagaatgcatattggcatctcatccttaaagccacagagtcacagcatattggtccaaaaagggttattacagctcatgcggtctaactttttttacttttttttttttttttttttagacagggtctcgttytgtggtgcaatcatagctcactgcagcctcaaactcctgagctcaagtgaacctcctgtcacagtcttccaagtagctaggactacaggcatgtaccaccatgcccagctaagttttttaagtcacatgtagagatgggaggtggggtctcgctgttttgcctaggctggtttcgaactcctggcctcaagcaaccctcccaccatgtcctcccaaagtcctgggatttcagacatgagtcaccatgcccagcctaacttatttattttatatttttctttaactttatattggcattccttgctctcttttagcaaagtccttaattaattgacaatatagaatatttatattacaggtaggtacctgttacaagatgccaagacaaattaacaagatttagcaggtcattcaagcactctcacaactctgatacttgagagacagtccaccagacagatca

SEQ ID NO: 772814 - DNA, 611 bp, Homo sapiens
gctctctactgggacaagaatgcatattggcatctcatccttaaagccacagagtcacagcatattggtccaaaaagggttattacagctcatgcggtctaactttttttacttttttttttttttttttttagacagggtctcgttctgtggtgcaatcatagctcactgcagcctcaaactcctgagctcaagtgaacctcctgtcacagtyttccaagtagctaggactacaggcatgtaccaccatgcccagctaagttttttaagtcacatgtagagatgggaggtggggtctcgctgttttgcctaggctggtttcgaactcctggcctcaagcaaccctcccaccatgtcctcccaaagtcctgggatttcagacatgagtcaccatgcccagcctaacttatttattttatatttttctttaactttatattggcattccttgctctcttttagcaaagtccttaattaattgacaatatagaatatttatattacaggtaggtacctgttacaagatgccaagacaaattaacaagatttagcaggtcattcaagcactctcacaactctgatacttgagagacagtccaccagacagatca

SEQ ID NO: 772815 - DNA, 611 bp, Homo sapiens
gctctctactgggacaagaatgcatattggcatctcatccttaaagccacagagtcacagcatattggtccaaaaagggttattacagctcatgcggtctaactttttttacttttttttttttttttttttagacagggtctcgttctgtggtgcaatcatagctcactgcagcctcaaactcctgagctcaagtgaacctcctgtcacagtcttccaagtagctaggactacaggcatgtaccaccatgcccagctaagttttttaagtcacatgtaragatgggaggtggggtctcgctgttttgcctaggctggtttcgaactcctggcctcaagcaaccctcccaccatgtcctcccaaagtcctgggatttcagacatgagtcaccatgcccagcctaacttatttattttatatttttctttaactttatattggcattccttgctctcttttagcaaagtccttaattaattgacaatatagaatatttatattacaggtaggtacctgttacaagatgccaagacaaattaacaagatttagcaggtcattcaagcactctcacaactctgatacttgagagacagtccaccagacagatca

SEQ ID NO: 772816 - DNA, 611 bp, Homo sapiens
gctctctactgggacaagaatgcatattggcatctcatccttaaagccacagagtcacagcatattggtccaaaaagggttattacagctcatgcggtctaactttttttacttttttttttttttttttttagacagggtctcgttctgtggtgcaatcatagctcactgcagcctcaaactcctgagctcaagtgaacctcctgtcacagtcttccaagtagctaggactacaggcatgtaccaccatgcccagctaagttttttaagtcacatgtagagatgggaggtggggtctcgctgttttgcctaggctggtttcgaactcctggcctcaagcaaccctcccaccatgtcctcccaaagtcctgggatttcagacatgagtcaccmtgcccagcctaacttatttattttatatttttctttaactttatattggcattccttgctctcttttagcaaagtccttaattaattgacaatatagaatatttatattacaggtaggtacctgttacaagatgccaagacaaattaacaagatttagcaggtcattcaagcactctcacaactctgatacttgagagacagtccaccagacagatca

SEQ ID NO: 772817 - DNA, 601 bp, Homo sapiens
gagtgcatgtgtctatgggtgtgtgtgtaagtgcatgtgtgtgaatgtgtgagtggatgagtgtgtgtgagtgcatgtgtaactccatgtgtgtatgtgaatgcctgtgtgagtccatgagtatgtgtttgtgtgcctgtgagtgcatgtgtgtgtatgggagtgtgtgagtgcatgtgtgtgcatattactgtgtaagtgcatgtgtgtgcatcagtgcatgtgtatgagtccgtgtgtgtggcagtgcatgtgtgagtgtatggatgtgcgtgagtgcatgtgtgtgtggttgtgtgtgagtgcatgtgtgagtttgtgtgtgagtgcatgcatgagtttgtgtgtgagtgcatgtgtgtgttgcatatttgtggagtgcatgtgtgtgygaatgtgggtgagtgcaagtgcatgtgtgaatgtgctcgtgtgggtgaaagtgtgtgattgtgtgagtgcatgtttgtgtgtgcatgtgtgtttgtgtgtgcatgtgtctaagtgtttcagtgcatatgtgagtgcatgtgttagtgtatgaatgcatgagtgcatgatagtgtgagtgcatgtgtgtgcaagtgagtggttgtgagtg

SEQ ID NO: 772818 - DNA, 625 bp, Homo sapiens
gaccagttcaccaaaggagatattaatttttaaaatgcacttgtttttccgttgagatcctgcccagtgaatgttttcataatgagagaaatccctacaccacgtctttagccacctgtgcattgcgctttcagggtggaggcagtgtggaagaaaagaaacacctccctccgggccggctttgaatccggatcaaatgtgggcaagtggtcaaatagctctgagcaacagtcaaaatgaaaactgaaaatctagttaaaacgtctgaaaccacttcccccttgaattctgagcttctggccctccacacccagaggcctccacacacagcaggcctgtgccctgagcacgaaaagccactcatctggggaggcccakgcaggaggagcacttggacccaggtgtttgagaccagcctgggcaacagtgagaccttgtctcttaaaaaaaaagagagagagagagaaagaaaataaaggaaaaaaaaagcctctcacctgctttagcgagctctgcctgtgcagctggactgcttttctctttttcttcagttctctggatgctccctgcgcctgatttctttgatgtcttggatgattcactcaacacctgagacgatgaggaa

SEQ ID NO: 772819 - DNA, 625 bp, Homo sapiens
gtgccctgagcacgaaaagccactcatctggggaggcccaggcaggaggagcacttggacccaggtgtttgagaccagcctgggcaacagtgagaccttgtctcttaaaaaaaaagagagagagagagaaagaaaataaaggaaaaaaaaagcctctcacctgctttagcragctctgcctgtgcagctggactgcttttctctttttcttcagttctctggatgctccctgcgcctgatttctttgatgtcttggatgattcactcaacacctgagacgatgaggaatgaggggaggtgtttacagctgcctggatcttaggtgagcctggacctgcgaccttacaaatgtggttcccatgatgtccgctctcacctcctgtaacactgaacaaggcggggagtggcgggacttccttccggcccgcgctggccctcgagtgctcgtgcatttgaccacggtggcttttgtcaggactcgcgaacgtgtgggtctgtccgggcccagtctggacctccaactccactggccagggcacccttaggtctccatccctgctcctccctctgggaacggagtggcagctctcaggaatcaaggttactgcatttctgaggaccatgt

SEQ ID NO: 772820 - DNA, 600 bp, Homo sapiens
ttctcatgaggagtgcacagcctggatccctcacatgcgcagttcacgacagagttcgcgctcctatgagattctaatgccaccgctgatctgacaggaggtggagctcaggtggtaatgtgagtgacaggtggcggctataaatatagaggaagctttgctcactcacccgccgctcatctcctgctgggccactgggttcctagcaggccatggaccagtatgcatccatggcccagggggtgggggaccccggaataaaagaatttgccaaagatttgcattcaaggaaacataccaaagcccgctatgatcctagacccttacagctggatgcaactcttggggaccacctgcccagccacctcagaggaagaggacaaggctggagccacgccagcaggtgcacctgagccctgcaccccttaccactgtggggctcttsggggaggataaggtcggagttcctgggcacagagcggcagttggctcagaagccattcatgcagcagggtgggattctaggctgaaggcagtgcagctcctctaatcaaagcccactatcagcagaaagagaaggttcacagacacagcaacctg

SEQ ID NO: 772821 - DNA, 625 bp, Homo sapiens
gtgtctgtgtacttgtgatttaattgcttttctataaacttggtgatatttaataatttcataactatcataaagtataataaccccttaataattatactatatgttatagctacttaagtaaacaaaatatcaatatttagtgtacctaataataatttgtctatactaatttttgtgtttattgttttagaatatctcacaagaacttaatttarcatgagattgagaatttctgactgacaataaatatctccaaaatttaatattttcttctttcctacagaaattatttaagaatcttttatgacactacagttaaatagcaagaaaggggttttattaaaccagtcatttatttttctctgtgagtttgaagggttgcggaaaatgtgaattcatatttctaaaaatctatagaaaaaggtaagagataatatcagtaccctctattcaagtgcaggatcattttcccatgaatttagagtgaagacacctggttttgattttaatttcaaatattttaggttaatttacacttcattacattagaccatattgagctaagaagctttataaaatttaattaacacagtcattgctcttgacaaacttctgtactgag

SEQ ID NO: 772822 - DNA, 631 bp, Homo sapiens
tctgtactcacgtagccccacatccaagggagtatggcaaaaaagagtaaataaaaagcaccctccgggcacggtggctcacacctgtaatcccagcactttgggaggccaaggtaggtggatcacaaggtcaggagatcgagaccatcctggctaacacggtgaaaccccgtctctactaaaaaatactaaaaattagccaggcatggtggcaggcacctgtagtcccagatactcaggaggctgaggcaggagaatggcgtgaacctgggcgggggagctagcagtgagcggagatcgcaccactgcactccagcctgggcgacagagcaagactctgtctcaaacaaacaaacattaaaaaaataaacaaacaaacaaacaaaaaacaccctgacaggtctggagcaacaccactgarggaaaaaggaaaaaatctcatttactgctttttgaataggtcctcctgtttttattttttactggattctgtcatttacgttgtcacactttctgcaaggcttgcaatgacaagggcccataggcatcatatgaagtaatatgaatgaatcaagcgaagtggacagaagccagagcaaagtagagagtatatgttcctccaaaagggggt

SEQ ID NO: 772823 - DNA, 626 bp, Homo sapiens
gatgaaaataaagctgtgttggaaggctccaaaatgaggaaagaggtaataagaatatgaaacctataatttattccattcatatggctcccttttttgacttgatgtggtctctgatttggtaatctgggacactcatatatttacagtttatcaatggcaacaaaacatattaatctattaatgtsctcacactgttattttccgacccacttgataaagataattttatccttgagacttcaatttctcacccttacttagcctctaaggagagtttcactctatctgacattctgtgatgcagaattgggagaatgataaaataaaggctgaagaaaaagtggactggaaacaaaagacgttgcagttgtggttcagggaggaggagaatggtaaataaagagtgaatgtttggaagagtgctatgccaaatagctgagtgaattacagagttggaaaagtggatctaaaaagtgaaataagaatttgttaattgtctttaatttgatgtttcattgaaggttagaactaacgtagtcacctttaatcgtttttctgttgattggacatcatactaacaacttcttgttaacaagaagttaaattcagatatttatttccaa

SEQ ID NO: 772824 - DNA, 617 bp, Homo sapiens
gagagaaagcggtggagaaggatcaaaggatcaaaggggttgactgtatggtgccttagaggccaccgtaaaaatgtaggtttttattctgaaaacaaacaaacaacaacaacaacaacaaaaaaaaaactaacaacattgggggttactggaagagttttaggagacacataatgagactttcattttaaaacagtcactttggatgtagtggatacgaatggactaaatgagaagtgacagaagaaacaaagatgctaggaggaagctgttgccaaaacytagaagaggtaagaagggttttgcacagggtagtagcaatgcaggtggtgagaactggtggcatatattttggaagtggagccagtaagattttctgatggactggaaaggggatgtgaaagaggcgactcaagggtggctatttttttccccaaagcaactaaaaggttgaaattaatataaacgtagatggggaagactgtaggaagaacagcttttttaagggcttatcaggaacaaagattaaggtgttaagcaggatacaagagtttaaggaagagagatgggctggagatgtagatatgaagattgatagttaatagcaggtatttaaa

SEQ ID NO: 772825 - DNA, 635 bp, Homo sapiens
cacataaatgtctcttttgagaagaatctgttcatgtacttttcccacttttaatgtggttgttttttttttcttgtaaatttgtttaagttccttgtagattctggatattagacctttgtcagatggatagactgcaaaaattttctcttactctgtaggtggtctgtttactctgttgatagttcctttcgttgttcaraagctctttagtataattagatcccatttgttagcttttgcttttgttgcagttgcttttggtgatttcatcataaaatatttgcccatgcctatgtcctgaatggtattgcttagattttcttttagggtttttatagttttgggttttacatttaaatctttaatctatcttgagttagtttttgtaaaaggtgtaaggaaggtgtccagtttcaattttctgcatatggctagccagaggaaaacagtatattttcaacatattttgcagaaacaattggatatccatgagcaaaagaacagttaactttacctcatacatatataaaatttaactcaaaattgatcataaaccttaatgtacagtgtaaaagaacaaaagcaggcaaacttctataagaagtcatgaattgggagaaaatatttataaa

SEQ ID NO: 772826 - DNA, 630 bp, Homo sapiens
aaatcagcaagatggcaaaataagatttctcaggcttccctttcaccccatggaaaatgcaactagcaactatccacagtccttagcatctttgtgaaaactccaataacaagcctgagacatccatgtggtccacagaattgaataaaaactgaattagaagtttaacagaactggtctcctccccgaagttggcacaaagacaaggagtgtattcccctgggtccagggtttctacagggggaaaagagaaccagaagcaacaatccagcttctctagcattccaagacccttcccaggaagcccactctggtctcacctcatagggaccaatggggtaarggcagggcttgaacacccagcagcaggtagaaacaaagaagggcagtggaactcacaagtgaccagcccactgaccttggtagtgcctctatgttcctgacagctgtgacattctatcggaaataccacccaactggatagcccaaccacaaaactgagcggctactttcagaagcacaatgagaagttcaacctggctagtctccacgctcagcttcagagcctaacccaatcccctgcacaggcagggagacgatggcctctgtattttggagaagtatagggtt

SEQ ID NO: 772827 - DNA, 549 bp, Homo sapiens
tatccagattcatatgccatcaattttgtcaacaaaacaagttgaaaagagaaaggacagcctcatagtgatttagagtgagcaggattctcttttttgacttcaaaagaatggttcttacctgcatcagccgggtaggatttaagtgtaatctaacaccatttatttgcttcccaaatacytattataagaagctaaatacagttgttcaagtcaggtaattattacagtcactatcagaaattaagtaaaacaaacaaaaaatgcttaatggaattactgtaaccttatttgcaaacgtaagccaatttaagtgatcagggaatatcttcacataatatcacagaaacccaattgaattaatttaaaatgctgagttactaccagcattgactagacttgtaatcagcactgaaacttttctaacaactaattaaaaaagggagtatacaaagttatgtttctaattcatttaataccacagtctctaaaggcatcttcaattagctacattttctttagttttactcaatttatcaaagttagata

SEQ ID NO: 772828 - DNA, 599 bp, Homo sapiens
atcataacaaacagtctctgagaccacagagcaatgaaattagaacttaggattcagaaaatcactcaaaactgcacaactacatggaaactgaacaacttgctcctgaatgactactgggtaaataacaaaattaaggcagaaataaataagttctttgaaaccaatgagaagaaagacacaatgtaccagaagctctgggacacagctaaagccccgtttagaaggaaacttatagcactaaatgtccacaagagaaagcaggaaagatctaaatytgacacattaacttcacaattaaaacaactagagaagcaagagcaaacaaattcaaaagctagcagaagacaagaaataactaagaacagaggagaactgaaggagatagagacataaaacatccttaaaaaaaaaaatctatgaatccaggagctgtttttttgaaaagatcaacaaaatagactgctagctagactaataaagaagaaaagagagaagaatcaaatagatgcaataaaaatgatataggggatatcaccactgaccccacataaatacagactaccatcagataatacaataaacacctctatgcaaat

SEQ ID NO: 772829 - DNA, 561 bp, Homo sapiens
acaagtgtttaatccatcttgagttaatttttgtgtatggtgagaagattcttcttcatgtggcaatccaattttcccagcaccatttatttaatagagaaccctttccccactgtgtttatttttgttgactttggcaaagataagttggctgtagctatgtggctttatttctgggttctctattctgttacattgatctgtgcttctatttttgtaccagtatcatgttgttttggttactatagccttgtaatataatttgaagtcaggtagagtgatgcctccagatttgttctttttgcttaggattgctttggctctgtgggctcttttttggttacatataaatattargaatgtttttttctaattctgtgaaaaatgacattggtaatttgacagaggtgaattgaatctgtaaattttttaggcagttcggccattttaatgatatcgattcttctgatccgtgagcatggtacgtttcttccattttcttgtgtcatctatgaattctttcaccagtgttttgtagtagagatcttttacctccttggt

SEQ ID NO: 772830 - DNA, 660 bp, Homo sapiens
gctcatggccctgctctgtcactaactagctgtgtgaaatgtggataagttacttaatcttttatgcctcaatttcatcattgtgaaaacagtaatagcattataatcaattcctctgtggctggtgaaaagatgataataggcacacatgtttagatggccatcaaatcatggttaccttcccattctgagtgcagatccaattgagataggcataatgaggcataaggaagtgaagatgttggctgcattatgagaaaggtaattggaaagcatgactttagacctacagccaagagtgtttaccagtactttaccctcaatcagacttactaacccagtcactagtgcaaccgagttactacaggcttcccctgaagcggcactgcatagcacagggcagtccagagtgcacccatctgcctggcagactggctcctaaacaagcctggatggacttcagccttaccttttaaaaactcatgtattagagatgtctttcctcctctktggcatgaacaagcaatacaaagaggaattagaaataatgatctactctgattgaattttctccagaagaaagaaagtttttcataaaatggagcccagtaccatgcataatagaagtttctgctgaatattccatcttattatcactat

SEQ ID NO: 772831 - DNA, 594 bp, Homo sapiens
agtatacttgatgtcagaattgtttataggatgatttcctccaacgtttgctgaacaactggaaatttcagccaaacagacaaattgcaaaactcaaagcttagtggaaatgtggctagacagaaacaagatcagatgacaacacagattaagtacaaagcaaagatctgctatgtttactgagtgtgttagaggaaaaataaatagctgtttatttggaacaaagatgcaagaagacttaggccaaaaaatgtaattctaattgttagcaggcaacaaggtgaagggttaatgagctcaaggcttgaatcctatctctaaccacttcctagmtgggtgacttgcaggaagttgcgttcatttagcttgagtttcttcatcaattaaataaggcaaatgttaatatctacctgatagacaggtgttagaatgaaattctctttggtagaaaatacccaatacctatttttttcagagacaaacataattcatcctaatattgaattcctctcaaagataacaaaagtgaagatgaaatgtcaaaaatagtagaccaattaatagaacttgaatgtatatatgacaatatatagc

SEQ ID NO: 772832 - DNA, 617 bp, Homo sapiens
ccatcagctacagggcacacctgctgggttaatgggaattcagatagctggaccacttccgtagtgcaagcttttgatgggcctctcaaatgctgattgcccttaaagtgtgtattcctgatcactgtagttcaaaaggaactaaccaccctagggtgtagatcaaaactgaacaacaaatgcatcgtttaccatgtttttgctaaagcattttaaagtaaattataggcaatataacatttatgcattcaaatttaattagagctgccttgaaacttcacacagagcaggaagtctcctccttcagaccmtggaagaatcttgtataccaacattacagtcctccaaacagcccaagcctagatgttttttctttgcaatctagactctctcccttggtgagctcatcaggtctcgaggctttaaatgtcatctataacccaacacttccaaatttatgtctccagcctggacctctcatgtaacctctgggcttgttcatctcattgcctccttgacatctccacttggatatttaatagacatcttacatttattatgccaataactgggcacatgtattatatcttttttacgccagcagtgtttagcttagt

SEQ ID NO: 772833 - DNA, 617 bp, Homo sapiens
ccatcagctacagggcacacctgctgggttaatgggaattcagatagctggaccacttccgtagtgcaagcttttgatgggcctctcaaatgctgattgcccttaaagtgtgtattcctgatcactgtagttcaaaaggaactaaccaccctagggtgtagatcaaaactgaacaacaaatgcatcgtttaccatgtttttgctaaagcattttaaagtaaattataggcaatataacatttatgcattcaaatttaattagagctgccttgaaacttcacacagagcaggaagtctcctccttcagaccatggaagaatcttgtataccaacattacagtcctccaaacagcccaagcctagatgttttttctttgcaatctagactctctcccttggtgagctcatcaggtctcgaggctttaaatgtcatctataacccaacacttycaaatttatgtctccagcctggacctctcatgtaacctctgggcttgttcatctcattgcctccttgacatctccacttggatatttaatagacatcttacatttattatgccaataactgggcacatgtattatatcttttttacgccagcagtgtttagcttagt

SEQ ID NO: 772834 - DNA, 625 bp, Homo sapiens
taattttttatgtaaccttctttatgttggtgtatagcaaaaatacatgggtccaaaatagagtggcattcatcttaacattttctgtgtgtgtgtgtgtgtgtgtgtgtgtgtgtgtgtgtgtgtgtgtgtgtgtgatatatgtatatatatatgtacgtagatatgtgtgtgtatatatatatatatatrtgtgtgtgtgtgtgtgtgtgtgtataattttttttgagatagagtcttgatctgtcacccaggttggctcactgccacctgggttcaagtgattctcctgggttcaagagattctcctgtcagcctcctgagtagctgggattacaggtgcacgccaccacatcctactaatttttgtatttttagtagagacggtgcggggattcatcacgttagccaggctggtgttgaactcctgactacaggtgatctacccgcctcagcttcccaaagtgctgggatgacaggggtgagccaccacacccatcacattttctggccatttttaatgtgttagtaaatgctacgtatatttacattgcaaatattataccctgtatcatgataatttgaaatgactgaagaaaaaaaaatgaagtccaatactttcaca

SEQ ID NO: 772835 - DNA, 693 bp, Homo sapiens
aatgatggctggatccaatcaagacaggttattggcctctgttaactcacatgggtcacacctcatcagccaatcacaggagctccctccttctatattttcatatcaggctctcttaggcggstctgacctggttaaagctccaggctgaggctgggctgtttccagactctccccattctccccccaggatcgcagagccacagtttcttttctagtccttgctaccatcccattactggcatctccatttcttcctgtccctcccctctctttccccccagacaaagcagcccaatcagaagggtgtgtaggggtgagctcctgagacggcagcctagccctgtgtgaagagaggctggggcgtgaggctcctgctaggtgcagtcgagccagccttcagcagtagcagctgtagcagcaatgcctcctttcccttctcctcaacctcaggctcccaggcaggctcccagatcgggggtagttcctgccgcactgctctgcatgtgtgtgtgcgtgctgcctaggtttcctgccctgacccaccacacttcccccaggaagggatggaggggagggaggggcagagatgagggcaggagccttcccatctccctcaccagcacactggaagtagacaagcttatgtggagcctaaatgggtcccccaagaaccctaccccctggtctggg

SEQ ID NO: 772836 - DNA, 522 bp, Homo sapiens
aggggtcagtcccctgggtgtggtctcatctgtgggactccactccctaccccaagccccagtgccttaggtctctttcacccttgggtgtcccctcacagctgccacttggagctacagatgcccactgggcactggcctggctagtacttgagggcttgcctctcctagacccatatccagccttacttctctatgaagcatcaggttctgtgatggtggtacaagygcccgggtaaattaggcccctgaaccctgggtggtgggggacagggagtgtgatgttgagcatgtggggtgcaggaataggacacccaaattggagcagcctttggaatgtggaatcccacttccctctttggaaagataggttgaggggagctgagtgaggacatagtactaatgtgtgcctggaatctagggctgatgtctgtttcattcaggatatttgggactgctggtttcagaatacaggaaggactaactgaaaaccaagactatgcactggggaggatcctgggg

SEQ ID NO: 772837 - DNA, 612 bp, Homo sapiens
gtctttatcagaggcatcccaggcatctcagtccctagagccccaggtcagagcttactccctgcccggggcctcagtgttgctgtgcatgaatgggctgatcccctcctccagctgttttggggagcaccgtaaaacagaacagagcctggctgggtgcggtggctcacgcctgtaaccccagcactttgggaggctgaggtgggtggatcacctgaggtcaggagttcaagaccagcctgaccaacatggtgaaactccatctctactaaaaatacaaaaattagccaggtgtggtggtgtgcgcctgtaatcccagccactctggaggctgaggcaggagaattgcttgaacctgggaggcggaggttgtggtgagctgagatcgggccacgcactccagcctgggtgacagagcaagactcttgtcaaaaaaaaaaaaaaragagagagagagaaaacagagctctacatactccaggtttgctcaaaccctttagtcctcaggccaaggcatggttggcacccaccccagcaggaggggtgtaagagggtcaggggtgtggagtcagggatatagaaatgctgtcccttgttctgtccttggcagtc

SEQ ID NO: 772838 - DNA, 617 bp, Homo sapiens
gttccaagatcccccgtgaatgcctgaaactggatagtaccaagtctgattataattactggaaacacatttctgttcctgtcttctatccacaaatttaatgccttttccatcttaactaagcacttatcatggaccgtggctataatttttgcagtttgaagtgcaacarcaagactagcatagattccttcctcaaaatgttatggtagaagattcatttttagcatagatgttatcaatctcagcatattaatgtttttttttctttcctaattaggtcaagaactttcaccttttcaattaaaggaagcattttacaacttcttttgggaatatctgagttgttagcaccactactctggggctattactaagtagaataagggttacatgaacacaagcactgtgacaggtggcagttggtctgataaccgagaaggctaccaagtgactaatgaatgggtaacatctacagaatggatacattgcacaaagggaggactcctgtcccgggtgggatgaagcagggcagcattagatttcatcacattgctcagaatggcatccaatttaaaactcattaatcgtttatttctggaatttgtcattgaata

SEQ ID NO: 772839 - DNA, 628 bp, Homo sapiens
aaaatcttatcaaagcatggcttatgttacgctatgtaattttggagaatgggcctctcaaccttacaaggttgtatattccagcttttcataggaatcctagttaagtatttctcttaattccataccatgctttgytttagtagggtgaggtctgagagggaaagcagtaatcagatcagcctctatatgtacttttccttttaaattcattaactagactcccctaaagatgagtttatttcacttgtgattgagtctagctctagaagggatgagattataaagtccaactctatcattttacagataaaataagagtactgatgataagaggcttccccaaggtgacagagcctcagagcggccaagccaaagccagaagatagtcttgataaagtgttcttcctgtcatataccacatataaggaactactctaagaatatattaatatcagatgtagctaggtaatggaatgtaagcttctcctgtgcctgagactgaggccacaaagttaactgtatgttttgagcccagtgcttgaccaaaaaagaataattttgtaagtcactgaagtaaagagaaagaataaaaaattatatggggccaaattcccttcagcccata

SEQ ID NO: 772840 - DNA, 645 bp, Homo sapiens
gaaatggctgttatataattgtgggtcattttttgcatgcatactttcatgcttcttagtaattcagtttcacatacctacagaatttaaatgcttttcttcttacctgcataggtaatgcatggaatgaccccgaaactctactagggagcatgtattacaaaatcttgctgatgtttgagttttgtaggtatgtcttcaycatttcttcctgttccgctttgctggttgtcttgtagttttgagcagcaccaggagacttgccggggggatgccaggtttgtgtgcaaggctgacagctgtggaaagaggctgaagagcaaggatgccctgaaaagacaccaggaaaatgtccacactggtgaggagtcgttggagggtcgtttccgaaggggcttcctttccccaggctgcagcgatctgtttttaattctcgctcttgaggagagagctggcttttccattgtgtttcacacagatgtggagcgctggcagtggatttttttctttcactgaacactatttctttctcaggttgaatttagcagcatttgttctttttcccattcctgaattaattataactgtaagccttagttaaagtctagttatgtttgggtggtcagatgcattaagaattaatat

SEQ ID NO: 772841 - DNA, 583 bp, Homo sapiens
cagcatcttgggttgtcttaccaaaacttcctaaagatgtaccttactgaattagatagcttattttttttctgttgttgttaaaatggaattaaaaacttttaaaataggaccaaaaatgtctgggaattagagcyatctaaatgctcatgtaatgtgaatgcaaaattgaaactgaaatgtgttatggcccaaatgtaatagtatcttttttgaatggagtcttacaaaatgcaaataatactgggaaaatatgaccttgcagaggttgttcctctagcacattttttaaatctcttttgagttttaataatagtttgattgtactagctgataaccttagtaggcttttgaaaatttgaactaatatgcaaagattatctgtatttattcaatgcttaggaaacaggattttcaaaataaaactgtctgggtaaaatatttttaaaaatgcatgaaaaaggaaaattaaaaaagagtttgaggtaaaacccaaaaggcttacacatatttaccctgttccttggatcttctactcattactcattgtgggggatcctgcctaaaatcctgggtgcttctg

SEQ ID NO: 772842 - DNA, 694 bp, Homo sapiens
gctcatgtaatgtgaatgcaaaattgaaactgaaatgtgttatggcccaaatgtaatagtatcttttttgaatggagtcttacaaaatgcaaataatactgggaaaatatgaccttgcagaggttgttcctctagcacattttttaaatctcttttgagttttaataatagtttgattgtactagctgataaccttagtaggcttttgaaaatttgaactaatatgcaaagattatctgtatttattcaatgcttaggaaacaggattttcaaaataaaactgtctgggtaaaatatttttaaaaatgcatgaaaaaggaaaattaaaaaagagtttgaggtaaaacccaaaaggcttacacatatttaccctgttccttggatcttctactcattactcattgtgggggatcctgcctaaaatcctgggtgcttctggtctataaactctcttgagttccyttagtcaaagcctagaatttgttttctttttgtgcagttaatgtcagaaaacttctgacaagggaccatctgcagctgaatactttggagacagtgttgggatccttaaatcgaggttcagaaattcaaaagaatatgggacttttaaatttggggtcattactgtaatttgcttagtgtggaaatataccagaaaatatatgagacagtggaatgagaaaatattcaatta

SEQ ID NO: 772843 - DNA, 539 bp, Homo sapiens
acccgtccccacacctagcccactgctgccacttttggcactagaaaaactctctggaggcccaagaattggtgtgcttagacccactcacaccaattaatgctcatgtatattacctggaggcccaataacaagcatccttagcttattgattccactactggggcctgagatctggcccacctggcatccctcaggtggatggaaacctcactacagcctctactatcaactgtagcctaagccagcaaagaagtcagacacmactgattgtatttacagctgaaaaaatcatattaaaaactaccactacatttacccagaatcaaggtcaaaatgccttattcaaccaacactataaatatatatttaggaaaaaatatttccctatgaaaggcaaaaaagttagaagaagtgactgttacatcagatggatggatataaatataaggacatgagaaatataaaaaagcaaggaaatatgacacctacaaaaatgcaataattcctcagcaaaatattttaattaatatttcaat

SEQ ID NO: 772844 - DNA, 552 bp, Homo sapiens
gagattagtgctcttagaagaagagaccagaaagctagcttgttctctttctgcctttcgagaatacaagaagtcagcagtcttcaatacagaaggtcctcacaagaacctgccaatactggtgccttccccttataattccagccttcagaactgtaagaaataaacttctattgttyataagccacccagtctgtggtgttttgttatagcagcctggaatagccaagatggattgctttatacatgataattttttgtatgttttattttaatattaattgtgtttaaaatgtgttttaatttctcttattatttattctttgatgtggtgtatgggttatttagaagcataattttcaaatattttgaggatgatccagatacccgttttttaattttattttcctaatctagttcttatggtaaaaaacacataatgtttattatttaattattttgaagtatataaactagatttatcaaccagatcatcaactagtttatcaactagttaaagtaaaaagaaaaaaattagacataaagtacaaa

SEQ ID NO: 772845 - DNA, 512 bp, Homo sapiens
ctcctatatatgctaggtgcttttctcttgctgtttttagaaatctttctttgtctttgacttttgatactttgacaataatgtgccatggagaagacttttttgagttgtatccatttgggacctataagcttcctacatccggatgtctaaagctcttgctacacttggacatttttcagctattaccttgttaaataggttttctatggctttaggcttttcttaaacttcttaaaaactcaaaatttgaayatttggtggcttttggcattccatgtgttacataatctttgttcattcttttcttttttgtctgactgggttattccaaaagatatatcttcaaattctgaaattcttttttctgcttgatccagattattgttgaagctctcaaatgagattttttgtacttcatccattaaaatattcagcaacaggattttcatttgcttttttttgtgttatttatttctttaataaattcctcatttatatcttgaattttt

SEQ ID NO: 772846 - DNA, 512 bp, Homo sapiens
ctcctatatatgctaggtgcttttctcttgctgtttttagaaatctttctttgtctttgacttttgatactttgacaataatgtgccatggagaagacttttttgagttgtatccatttgggacctataagcttcctacatccggatgtctaaagctcttgctacacttggacatttttcagctattaccttgttaaataggttttctatggctttaggcttttcttaaacttcttaaaaactcaaaatttgaacatttggtggcttttggcattccatgtgttrcataatctttgttcattcttttcttttttgtctgactgggttattccaaaagatatatcttcaaattctgaaattcttttttctgcttgatccagattattgttgaagctctcaaatgagattttttgtacttcatccattaaaatattcagcaacaggattttcatttgcttttttttgtgttatttatttctttaataaattcctcatttatatcttgaattttt

SEQ ID NO: 772847 - DNA, 582 bp, Homo sapiens
tttacaacgcagagagttgaaaataaatctaaatctcacactttaaaaattaactcaaaatgaatcatggactcttatgtaacaggtaagattgtaaaacttttagaaaaaaataggaggaaatctttaatatctaggggtaggcaacgagttcttagacttgacgtgagaaacacaattcataaaaaaagagaaattggtaaattggactccaaattgaaactttttctctrcaaaagcccttgttaggaggatgaaaaataagctgcagactgaatgtttgcaaaccacatacccaacaaaggtctcaaatctgcaatagaaaagggctgtcaaaacccaacagaaaggtaacacatgatctaattagagaatgggccaaaaacatgaacagatatttcatggagcaggacagacagatggcaaataaacacgtgcggtgatgttcaagtccatcagccaccagagaaacacaaagagaaagaaccataatgaatcagatgctactgtccacccatctgaaagcccaaaagaagagagtgccaacagtcaatctgcagagggtgtggtgaaccgatggct

SEQ ID NO: 772848 - DNA, 628 bp, Homo sapiens
aaagtcctttgtctctgattcggaaatcttgtgtcttctttcggcatttataaaatggtggcaggctagcaggtagcttataattaggataaaatttcagagtttttacagttcttgactaagatagtattactctcttactgtgtctagtcttactacttctaccaggtgatgcttgtgaggtcaagtcctttcattacatcaaaccacagttgagtagcagcatcttccatacatataagggagattaagtgtttcttaaatttttctacattgtagatattgcacatttcaacagagtttctcttgcttctttcgacattcaactatttaatttccctctaatgaatatccttgttttgagatcataattccaccacagtttgtgatacactgctacgtgttcctagagatattatacaaataattattatatagtrgttttaaaatgtaattgttcaatccttttcctacatacaggcaatacatttcaaaatataatatcaataatgtgttttgttttatataattgaagtaatgcattaggcatgaataaaagaaaggttaatagtttaatttgaaacttcataacagtaatcaataaaatttaattgcatgcatttcatta

SEQ ID NO: 772849 - DNA, 708 bp, Homo sapiens
ctgcacttcctgtctgatccttgagagccaaccggttcctccgctcctggggaaagtgccttctagcagtgaatcttttggctgctacggatgtcagggagccaacgggactgggttttggctgggtgcaggggaggttgcgtcaggggtacctaagcggtagcggcgtrggggtggggtgtacttggtccaaagctctgggctcctctggcgggcctccctgaatgtggcctggactcgcgcacaggccctgcctcgcaggttttcaggagcgcttggcttttcctccgctttgtggggcaggtctccagtggcccccgggcgcacgcctggaaatccctgtccgtctcgtcgttgccccctatggcctcaaagacacacgctcactgcctgtgctcttgggggacgtcagtgccacgtgtggtcacacgggctccagctcggactcgcctctgtctgtctttgccggtgtcgccagaagccgcgtcgggatgccggagcccccgggccttggagatgaaggcaggcccctgctccacccaggaaggtgggaggcagtgggctcatgggtcagtgcctttgcagccgaccacacgccttgcggccctggggatctttctgtgccccagcgagaccctttccgcctcactgcattatgaccccattgccgatcgcccggtgggatccatcatcggatcccaagaggag

SEQ ID NO: 772850 - DNA, 708 bp, Homo sapiens
ctgcacttcctgtctgatccttgagagccaaccggttcctccgctcctggggaaagtgccttctagcagtgaatcttttggctgctacggatgtcagggagccaacgggactgggttttggctgggtgcaggggaggttgcgtcaggggtacctaagcggtagcggcgtgggggtggggtgtacttggtccaaagctctgggctcctctggcgggcctccctgaatgtggcctggactcgcgcacaggccctgcctcgcaggttttcaggagcgcttggcttttcctccgctttgtggggcaggtctccagtggcccccgggcgcacgcctggaaatccctgtccgtctcgtcgtygccccctatggcctcaaagacacacgctcactgcctgtgctcttgggggacgtcagtgccacgtgtggtcacacgggctccagctcggactcgcctctgtctgtctttgccggtgtcgccagaagccgcgtcgggatgccggagcccccgggccttggagatgaaggcaggcccctgctccacccaggaaggtgggaggcagtgggctcatgggtcagtgcctttgcagccgaccacacgccttgcggccctggggatctttctgtgccccagcgagaccctttccgcctcactgcattatgaccccattgccgatcgcccggtgggatccatcatcggatcccaagaggag

SEQ ID NO: 772851 - DNA, 708 bp, Homo sapiens
ctgcacttcctgtctgatccttgagagccaaccggttcctccgctcctggggaaagtgccttctagcagtgaatcttttggctgctacggatgtcagggagccaacgggactgggttttggctgggtgcaggggaggttgcgtcaggggtacctaagcggtagcggcgtgggggtggggtgtacttggtccaaagctctgggctcctctggcgggcctccctgaatgtggcctggactcgcgcacaggccctgcctcgcaggttttcaggagcgcttggcttttcctccgctttgtggggcaggtctccagtggcccccgggcgcacgcctggaaatccctgtccgtctcgtcgttgccccctatggcctcaaagacacacgctcactgcctgtgctcttgggggacgtcagtgccacgtgtggtcacacgggctccagctcggactcgcctctgtctgtctttgccggtgtcgccagaagccgcgtcgggatgccggagcccccgggccttggagatgaaggcaggcccctgctccacccaggaaggwgggaggcagtgggctcatgggtcagtgcctttgcagccgaccacacgccttgcggccctggggatctttctgtgccccagcgagaccctttccgcctcactgcattatgaccccattgccgatcgcccggtgggatccatcatcggatcccaagaggag

SEQ ID NO: 772852 - DNA, 559 bp, Homo sapiens
attagttacttacctacagaccttatttacatattttgttcatggttccactaacgttttttaactatgatcaaaatcagggtcacatattgcatttagctgctatatttctttagttttctttattcsggcgcggtggctcacacctgtaatcccagcactttgggaggccgaggcaggcggatcacgatgacagaagatggagaccatcctggctaaaacggtgaaaccccgtctctactaaaagtacaaaaaaattagcctggcgtggtggtgggcacctgtagtcccagctacttgggaggctgaggcaggaaaatggcgtgaacccaggaggcggagcttgcagaaagcagagatcgcgcctctgcactccagcctgggcaacagtgcaagactccatctcaaaaaaaaaaatgttaaaaaagaaaattcagcttttctttttgtctttcatgcccttgatacttgctttttgtagattattctgaagtttgattttttttctaatatttcttcatggttaaattcacataatatattttggcaagaatgccac

SEQ ID NO: 772853 - DNA, 559 bp, Homo sapiens
attagttacttacctacagaccttatttacatattttgttcatggttccactaacgttttttaactatgatcaaaatcagggtcacatattgcatttagctgctatatttctttagttttctttattcgggcgcggtggctcacacctgtaatcccagcactttgggaggccgaggcaggcggatcacgatgacagaagatggagaccatcctggctaaaacggtgaaaccccgtctctactaaaagtacaaaaaaattagcctggcgtggtggtgggcacctgtagtcccagctacttgggaggctgaggcaggaaaatggcgtgaacccaggaggcggagcttgcagaaagcagagatcgcgcctctgcactccagcctgggcaacagtgcaagactccatctcaaawaaaaaaatgttaaaaaagaaaattcagcttttctttttgtctttcatgcccttgatacttgctttttgtagattattctgaagtttgattttttttctaatatttcttcatggttaaattcacataatatattttggcaagaatgccac

SEQ ID NO: 772854 - DNA, 580 bp, Homo sapiens
cacctagaatcaggcattgttccaaggagctctgtatccttttaaagaagaaaagagtgaatccaagatttgaatgctagatgtactgattgctattaaaatgttattgcttctagtcttagtggttaaaattaagaaatatacacacattcggccgggcgctgtggctcacacctgtaatcccagcactktgggaggccgagatgggcagattatgagatcagaagatcgagaccatcctggctaacacagtgaaaccccgtttctactaaaaatacaaaaaaattagctgggcgtggtggcaggtgcctgtagttccagctacttgggagactgaggcaggagaatggcatgaatccaggaggcagagcttgcagtgagccgagatcgggccactgcactccaagctgagcgacagagaaagactccatctcaaagaaaaaaaaaaaaagaaatatacacattcacacacaaacatgtgcatctaggtctatttatatatctacacattcttctcaattcctatctaacgtagaaaaaaagtaaagtgaagtatatgttgatagttttgattctgatt

SEQ ID NO: 772855 - DNA, 640 bp, Homo sapiens
tgctcttttgtgtcttttataataaattcactaattccatcgtgaggactccatcctcatggtttcatctcaaccttttgacctccaaaagcccacatctccaaaaccataatactggggattagggcttcaaaatttaaatttggggtgggagagacacaaacatttagtccaaaatatttgcattttaaattaatgagaatccattcaaactaaaaaatagggtcattattattgattttcaaaaaaataaatttgaaaaaaaagatttgtctctgatttactctttgaagagtcacatattgtagaaagtgattgttactttccccttaaaaaaagtttaccagttttaaaccaaagaaaatccgaataatctatagtctcmtaccattaagtgtacctaaaaattgtcatcctatgaaatgtatacattattacaatgcactgtgaagaatgcctaggattattagaattactaaatgagaaaagttaatggatataagatagaatacaaaatcaattttctataataacagaaatatttaagaaatacaatttcaaaagtaaactttagtagctactaaagcaaggttgtttataataaaaagacaatgtatctcattctcactctatacatctc

SEQ ID NO: 772856 - DNA, 500 bp, Homo sapiens
cttcttttctatgaattaaatacattttatggtttcatcttatctccttttttacttgagaattaaaactctctatattgttaattttaatggttgcttttgagtttgtagtatacatctataactcatcacattctaccttcaaattataatatactactttacatacagtatcatgaagtaacattttcattattttatcctgttgttctgttattgtcatgtaatttatttttatataggttgtaaactcattataaattgttattattcttgtttacattcgaggttaataatgttgttttcttctctctctttctttttttttttttttttgagacasagtctagctttgtaccaggctggagtgcagtggtgccatctcagctcactgcaacctctgcctcccgggttcaagcgattgtcctgcctcagcctcccgagtagctgggattacaggcatgtgccaccacacccagctaatgtttgtatttttagta

SEQ ID NO: 772857 - DNA, 508 bp, Homo sapiens
aactaaatacaagtaatataaatagattatatggaaataaaagccaaattaagtgttttattgccagttccagaagcaagcctttaagacaatctttattattgtaggacccataacactatgcattctctcaatattctgagatttttctcatctttaccatactacattgtattaatgggtgcaacaaatatgtttatttacttcaagtcatagtcaacttttccatatagattaagaattatccttttttttttttttctgggaccaggtcttgctctgtccccarggctgatagctcactgcagcctggaactcctgggctcaagtgatcctcctgcctcagcctctagagtagctagaactatgcccaatcctcctgccttggtctccctaagtgctgcaattacaggtatgaaccacaacaccggacctagattatgaattattcttgtatacagctatggccttgtcagaggagtttgaaccaaagcaactccatcttgaa

SEQ ID NO: 772858 - DNA, 632 bp, Homo sapiens
ttggctgagaggagaggtccgttcagatgcttggggggccttagaattttatttttggtttacaattacttggccaggcacggtagctcatgcctgcaatcccagctctttgggaagccaaggtgggcagattgcctgagytcaggagttcgaagccagcctggacaacacggtgaaaccctgtctttactaaaatagaaaaaattagccaggtttagtggcacgcgcctgtagtcccagattcttgggaggctcaggctcaagaattgcttgaacccaggagatggaggttgcagtgagctggattgtaccactgcactgcagcctgggcaacagagcaagactctgtctccaaagaaaaggaaagagaaaaaagaaagacaattacttaatatacttatggccacagcactgtaatttatgcttgaatgaagcttatctaatacaaggatttatctgtaagacacatcacacatgtctagtgcttaggaacactaaacagcaccttgccactacactgggaaccattttgtttcattttattttccagaaggagtttcgctcttattgcccacatactacatggcatcataattatatgctcacatgtcttactgtccaaacgcaattat

SEQ ID NO: 772859 - DNA, 635 bp, Homo sapiens
atacagtttacccatatcaagtatataattcagtggtttgtagtattttcacagatatgtgcaaccatcaccatagtcagttttagaacatttcaccacctcaaaaagaaaccctgtacatgttagctatcactcttctcccctgtgaccccaagtcagtgttgtttttaagggtcaaaaatgcagagtgatttatgtgtttattagttgaggtctggctaaataattagaaaacatctaaacaatggaatattttgatgaagatataaaataaagatttggaggtatttttgcaatctacttttgagtggagaagtggattatagattaagagagcacaattagcatcgtaacatttatgtgaactgtatgcttatacaatacragtagatgcacagatagatcacagaaggaatgttcaacaaaatgcttatgacaagatagtgataattcaagtattatttatttattttggggtactttttgtatatacatttaaaaacaataaaacaatttagaaagaaaaacaagcttgctatttgaaataagaatgaatgttaactaagtggaggtgaacttttacatgccaggaggcactggatttaatattttgagtcccattagttacaggcttc

SEQ ID NO: 772860 - DNA, 613 bp, Homo sapiens
ctgttgtttcatgtgcaaaggttttttgaattatggatgaataatgtctgaaagatcataatttcccacaggaatatgtctataatagagtggcacacaaaagagagaaggttcttgtcctcagggaatttatcttccagtcgggaaagatataaaaaataagtaaaatgataaataaataattttaagttgsgatagcatttgtagagtagtccccccttatccatgggggataagttccaagaccccagtggatgcctgaaactgcacagtaatggatcctatatacactgatatggaatggctgtatccccaaccaaatatcatcttgaattgtagctcccataatccccatgggttgtgggagggacccggtggagataattgaatcatggaggttcaacaccatcctgttctagtgatagtgagttagttctcacgagatctgatggttttatcttttatttatttgtttatttatctatttttagatggagtctcactctgtttctcaggctggagggcagtggcacgatctcagctcactgcaacctctgcttcttgggttcaagcgagtctcctgcctcagcctcctgagtagctgggattacag

SEQ ID NO: 772861 - DNA, 536 bp, Homo sapiens
catgtagctttctatagagtagcagttacctctgagatatgaaacagggaaatgggattggaaagcagacaaatggagctttaatgtaaccaaaatgttttatttattaagcaaaaaaaaaaaaaaaactccagtaraaacatgacaattgttagcatttgttaaatatggatacgggacacatgggtgtttcttaggcatttgcatttgctatattatcctctgtgtttttctgtttaaaaagatttcagagtttaaaaaatggcccaaggaatttccctggaaagacagatatattttatatggtttttcaatctatgacctcatttgtattgaagtgactctgttttctatgtttcttattaaaacaatacatcagacactattcactctattcattaatccaatgatttattcactcagcaaacatttatttagtgtccattataaaaaaaggtaccattctacatgataggggatacctaccagctaaaaagacaagactccctacttcaatgagtatattatctgttata

SEQ ID NO: 772862 - DNA, 613 bp, Homo sapiens
ggtcagagccagacaacccatagactgaccaatggccaattagctcaaattcttctgagagggcatctaggagccacagaaaccatcatctctgtgagtcctaagcaatagaagagtgaggtcttattaatttagggtatgcagtcacattggtcaatgaatgagcagaaggaaatggtgaaacccatctctactaaaatacaaaaaagtagccggacatggtgtgcacctgtagtcccrgctacatgggaggctgaggcacaagaatcacttgagcccgggaggcagaggttgcagtgagctgagatcaagccactgcattccagcttgggctacagagtgagactccatctaaaaacaaacaaacaaacaaaaaaaatacagagaagctggataaagcagaaatgaggtagagtatggcttttgcaactggaaaaatttgaaaatccagtccccagtttcttagagatagagagagatgctttccactgcaataggatgcttaaatccagatcacctaacatctgatcagcttgcatttcccatattctataccatttctccccccacaaaaacacattactttaactagaccatgtggctttcctgatct

SEQ ID NO: 772863 - DNA, 595 bp, Homo sapiens
attcacaatagcaaaggcatcagatcaacctaactgcccatcaaaggtctactagataaggaaaatatggcacatatacaccatgaaatactatgcagccataaaaaagaataaaatgatgtttctttgcagcaacatggatacagctagaggccatcattctagatgaattaacataggaacagaaaatcaaatgacacatgttctcacttataagtcagagctaaatattggttacatatggacataaagatggcaacagtagacactsgggactattagagagaacagggaggaaagaggttaagggtttaaaaactaactattggggactatgctaagtacctgggtggcaggattagtagaatcccaaacctcagtatcacacaatatacccatgtaacaatcctgcacatgtacccccaaatctaaaataaaacttggaaaaagtttaataggaaaaaagaaattaattttttaaaaagacaacatgttaatgaatgaatatggctgtgttccaagagaattttatttaccaaactaagactgctgccattgggctttaatttgccatctcctgcctcagtttattcta

SEQ ID NO: 772864 - DNA, 611 bp, Homo sapiens
tttctacataatttttatgtctcagccacatgtatgcatgtgtgtactttaaaaccttaatataaatgtaaatttagttaatttatcctttattgtctgtactgcattttgagtgagtaccacagtgtttcttccaatttactacttctccttttaactatgtcttacctaaaatttagcttgtgtgtatgtatacacacacacaaatacatacatatgtatgtatatgtatttacctatttaaattttgttgctttatttctgtcctgtttttcataattctttcatttgtttctctgaccttctttaacatgattactrtgaagtcttggttgaaaccctctatgaaattagcatcattccatgtgcattctgtcacagttgtgactctgttggctggctttcttagcaggagatttcttcataagttttggctgtcagtttgcaggttcatttcgagtgttctctctgtcctctgtactcttccacccactaggccatcccacctctcctggctagtggcatcatggtgttcaggtaccactctcacctgaccctagtttttgtgtctttgaatcataacactactcacattttattaagttatttac

SEQ ID NO: 772865 - DNA, 487 bp, Homo sapiens
gtagactttctcatcaggctgcaatcaaggtgttggccagaactggagtctcatctgcaggtctgattgaggaagatcctacttccaagctcatgtggttcttggcaggattcagttccttgtgagttactggactgagagtctcagttcttgctggctgtggccagagcccaatctcagttgatttccagggggttttctccatagagtagctcacaatawggcatcttgcttcatcaaagccagtaaagaacaaagtctgccaacaagacagaagttgcttcttatgtaacataatcatagaagtgttgtttcattgccttgccatattctattgttagaagcaggtctcagggcctgccaacactcaagtggaggggattacatagggtgtgaatgccaagaggtagggactgttgggagtcaatttagagtctgtccaccatggtgctcagtaaatacttgcaaaatgttaaatccaatgttg

SEQ ID NO: 772866 - DNA, 662 bp, Homo sapiens
acatggtgcttctcactttcacccaaaaggactggtaacttggatcctttaaagtcaaaagtgagttttgactgtacacagggtgactatttgtgaggaattgggagactaaaaggggctgagacattcaccaaggtccagacatgacaccgcaccttacctgggccaggagccagcataggtagggaggatgttgagatcctccatcctcccaaactctcttgggcccaacaggggtttccaccaggaggagtgagaattaatggaggaacccaagttgtcggatggaaggggaatgagactgagaagggaggcaagagtcaggcaaacagaggtcaaacctggctccgcccagagagccrtgtgatgctaggcaggctgttgaaacctctgagcatcattctcctcatctgtaaaatggagttaatattcccaacaaccactggagcttgaatgagatggtatatgtgaagatgtttagcaaaaggtctggtgcacaggaggtgctcaataaagggcagttgtttttatgggtcatttagaattcttgaggaagcccttctcctgagagagaagcacatacagacgtgctttgcttttgagcttcagttgagagtcatggccttcagaatatggaaagagagtcccatctgcaaactgtc

SEQ ID NO: 772867 - DNA, 612 bp, Homo sapiens
gggttttttccaagtatttttggatccacagttgaatcttccaatgcagaatctgaagagatggagggccgactatattttcatcaaaatctgaatattttaacaaaccgtatgggaacttatcgtattcatttctacagattatggaaggcttgctattttcatgaaacatccaaggatgggacacttcacagttgaattcactcacatatatttttagagcatctgctatgtgctaagcaccctctgggctccagggatggagcagtggaccaggcagacaaggcctgggtagtcagatccaggtccaggactcgagttacctggtctgctttccactaaaaagatacagccatttgttgtcaaatgttttttttctttttctttttcttttttttttttttttttttgagacagggtatctctttgtcacccasgctagagtacagtagtacaatcacagctcactgcagcctcgacctcctggactcatgtgatcctcctgctttagcctcctgagtggctgagactataggcctgcgccaccatgcctggctagtttttgtattttttgtagagacatggtctcactatgttggccagtctcaaact

SEQ ID NO: 772868 - DNA, 638 bp, Homo sapiens
attagtcacatgtcaaaaggatccggagcctctttcgaaagccccttgaactccttgcctctttacccaaatcacccattgtgtgagatgggagagctcacacagacaggtatgtgtgacccccatgcgctcaggggttcccccacccgctcttctgcttgcataccttccgagcagttctcctgggcggggtgctgtgcagctcagagsgggtaagcaaggactggctctgcaaggagctcggtcaccagggcctctaaataaacatcagagttctcaaaactaaatagaacctttctccttcttacaaaaacaatacgtgttcatgaaaataatttaggaaagacaagtaaaaagaagaaaaagtttaagcaaccgtaattccaccacagaaatagacccttaagagtaacccttcttcctgtgcttatgcacacacacacatcttactaaacacactatttcataacccacttttccactcaacaacacattttgttaatatttccctatgaataactgtttatccactacatcatttatgatagcgccatattctttcactctggatgggcaattgatcatttatttaactaatctcatgttctcagatatttctaacaaaacttctaataggt

SEQ ID NO: 772869 - DNA, 634 bp, Homo sapiens
ccctttcttttttccgcgatggaaccatctccctgctcagatgtagttactgccaagggaaacactgcattgagtccaaagaatttctagtgagaaggtagtaactttttaaacacagaagtttggggatgttactcctccctcctccttaaaaaaaaaaagaaacttcagtgggctgggtgcggtggctcacgcctgtaatcccagcactttgggaggctgaggcgggcggatcacaaggtcaagagatcaagaccatcctggctaacacggtgaaaccccgtatctactaaaaatacaaaaaattagccgggcgtggtggcgggtgsctgtagtcccagctacttgggaggctgaggcaggagaatggcctgaacccgggaggcggagcttgcagtaagccgagatagggccactgcactacagcctgggcgacagagtgagactccgtcacaaaaaaacaaaaacaaacaaacaaacaaaaaacttaggtgtactaaaacaaagtacacgaatcctaagtacatagtttgatgcatttttacatatgtatgtattcatataatcatcacccagatagaaatgtgaaacttttctaggaccccagcaagctccctcatgctcattcccaaaa

SEQ ID NO: 772870 - DNA, 634 bp, Homo sapiens
ccctttcttttttccgcgatggaaccatctccctgctcagatgtagttactgccaagggaaacactgcattgagtccaaagaatttctagtgagaaggtagtaactttttaaacacagaagtttggggatgttactcctccctcctccttaaaaaaaaaaagaaacttcagtgggctgggtgcggtggctcacgcctgtaatcccagcactttgggaggctgaggcgggcggatcacaaggtcaagagatcaagaccatcctggctaacacggtgaaaccccgtatctactaaaaatacaaaaaattagccgggcgtggtggcgggtggctgtagtcccagctacttgggaggctgaggcaggagaayggcctgaacccgggaggcggagcttgcagtaagccgagatagggccactgcactacagcctgggcgacagagtgagactccgtcacaaaaaaacaaaaacaaacaaacaaacaaaaaacttaggtgtactaaaacaaagtacacgaatcctaagtacatagtttgatgcatttttacatatgtatgtattcatataatcatcacccagatagaaatgtgaaacttttctaggaccccagcaagctccctcatgctcattcccaaaa

SEQ ID NO: 772871 - DNA, 598 bp, Homo sapiens
aaaataattttgcaaaagaatacagaaagtatattcacctttttcttgtgcttctgcataggtatgaggaaaacttggggattttaaagtaacagcttattggacagaaggagataacacatatcagattatagatggtataaatkgaagtagctggcaaaatctcagtagaaatcctgagaacaaactgagctaacctctggaagcatatgtgtttatatcctaaacctacaaccttacaaagttctggaaaacccagaacacagaaacacatatttcattaaccatcagaacaatggaattattagacatcatgtggcttcaggaaaataccttatacacatgtgaaagaaaaagagtgaagagggcaaatgacatttgtattagtccgttctcgcactgctataaagaaatacctgagactcggtaatttataaagaaaagaggtttaatcggctcatggttctgcaggctgtacaggaaacatggcagcttctgggaagggctcacaaaattcacaatcatggtggaaggtgaaggggaagtaggcatgtctttcacagccggatcaggaggaagagagatgtggggatgtgct

SEQ ID NO: 772872 - DNA, 616 bp, Homo sapiens
caggtggatagtctctgctgaaactgttcaactcagccattgtagcaggaaaacagcattagacagtctgttaataagttatgcctcaaatggtgatgttccaattaaactttaattgcaaaagcagacaaaggggtgaattttgtctgtggttcatagtttgctgacctctggtctagactacttttgatttttgcagtttagtgacttttaagcactttaatatatggttaacttttataaatattccctgatcactagaaaagaaggtatgttctatctacacatggtacaatttttayctcttaaatcttatttcatataatgtaggccattttagctttttttttttttggtcaagtttcttagcctttgacaaatcagttcatttctatcaattataacaattttatgtggtacaaataaaatatttgccagttgtccttttaaaaacgttccaggaggcgagtgctgaaacgtctttttatgaaacattataaactggtagctcagttactttttattgtgggggggctttacagtggggttttctgtttcgttttgcttgaatcagttaccaacatttagctatatggagattttataaaattttata

SEQ ID NO: 772873 - DNA, 525 bp, Homo sapiens
gatttcctaacccataaatagctctttatttccatttgtatatatctacatatccaagtattactatacaaagcatgggctctggagacacactgtctggggtccaggacaagctctgacactttttgtcctgcttagaaaggcctaaccccaagactatatgaatattaactcctatttttttttttccagatactttttggtcccattttctacttatctgcattttgaaagctgtattagtggctgtgctggttgttctgtttgctccatcaraaccatttccgctcctttcccagtctgctcggtgccatgggggggttgcaagaatgttctgcctcaatgggctgccttgcctgctggcttttggttgggtccaagaaatgcatggcagagaaagaaaaggaggagtctggaacactagattgtagagagcagcagcatgtgctgagctgaagggtccggatttaattctgtgctcggtgggcaactgtgaagagttttaggtgggaaagtaagatgatc

SEQ ID NO: 772874 - DNA, 599 bp, Homo sapiens
gccaggaccctaagaggttagaaatggagctttttaaccactatatattaaatatatttaaaaaatattaaatatattaactaatatattaaatatataatatattaaatatattaactaatatattaaatatataatatattaaatatattaactaatatattaaatatatatattaaatatattaactaatatattaaatatataataaatatattaagaaagatctctagataattcatcttaagatattcgagaaactagaacaacaaaaactaacccaaagcaagcagaaagaataaataacagagaagaaataaatgaaatagagaatagaaaagcaatacagaaaaatcracaaaattaaaagttggttctttgtaaagattaacaaaattgacaaacctttagactgaagaaaaaatttttattaaatcagaaattgaaagagaagacatcattgatcttgcaaaaatgaaaagaattataaaggaatactgtgaactgtatgccaataaatttagatgaaaagaataaattcctagaaagacacaagctactgaaactgactcaagaataaataaaagaactaagtagac

SEQ ID NO: 772875 - DNA, 760 bp, Homo sapiens
ttaattcctcaggtttgcctcttacagccttccctgagatggcaaataggagaggtggataaatcatacactattggcaaaggtctggattgccttgcaatgtatagaaagcctgcacataaggggactcagatcatctgtcctcaagtatacggaaatgtttcaactgctggatgatatcaaaatgaatggtttcttcctgaggccaggacagtccttgttgtaaatcataatttggccaaacctttgtgcagagggctatgaggyattttttcctccagattctaaggtcaaagcagtcccaatggttcaggatacacaccagaggagtataagctgggggtggtgaagcgaactggttgccagttctgaaagacaagaaatagagatgtccctcatttcccttttttatttcagtaaaaacttagggtgtgatggagagagaaagaaagcatctccccttcaccttccacctcttatccctgagccccggcaaacttagcaggtgtcagccataggtaccaaagtggcatgtacccatgaagcaggaaaaacctggagaataggaattaatcgcccacacctatgcctgcctttctctctgctgtcggaaacctttgagttccctgaacctgtttatgccacagagcacggcctctttctgtggggtgggggtttagtcagcaggaattcgtcctgcccgtttacattgttcctgttgcctggctttggatccctcagaccggttttttctttctag

SEQ ID NO: 772876 - DNA, 614 bp, Homo sapiens
agcagctttcacagatttccctccatcctcacagtaaactttgagaatggttaaatggaaatgaagataaagcttattagattttaaactgtcaagttattgtgaagtgcagatgttgtactgatcctcaaagaaaacaaaatatagattctactaatttggagagaggattcaaatttagtamgttaaatgtgaataattagactaaaaccctttgtgctaaattcatagaagaaatcagtcacaagtaaaaaataagagccccatgaagtctaattttgccttcttatctgagtgtgtagttgcatttgtctgagaccacatctcaatcaattctcaagttgtactttgtcaaatatgaaaacattagaaatcatacaccttaattattcatctctacaaaaagcaaatagtagctgctttcaatctcttcacagattctttttgtaaaaaggaaaaggctatagttatgactttcctctgggaaattgataaatatatactaatcttcaggatcctgtctaaaatgtgataacagtgtctataatccctgaggttaagaaactaacaaagaacgtactgtgtgcatataggtatgcatatgtatattactt

SEQ ID NO: 772877 - DNA, 614 bp, Homo sapiens
agcagctttcacagatttccctccatcctcacagtaaactttgagaatggttaaatggaaatgaagataaagcttattagattttaaactgtcaagttattgtgaagtgcagatgttgtactgatcctcaaagaaaacaaaatatagattctactaatttggagagaggattcaaatttagtaagttaaatgtgaataattagactaaaaccctttgtgctaaattcatagaagaaatcagtcacaagtaaaaaataagagccccatgaagtctaattttgccttcttatctgagtgtgtagttgcatttgtctgagaccacatctcaatcaattctcaagttgtactttgtcaaatatgaaaacattagaaatcatacaccttaattattcatctctacaaaaagcaaatagtagctgctttcaatctcttcacagattctttttgtaaaaaggaaaargctatagttatgactttcctctgggaaattgataaatatatactaatcttcaggatcctgtctaaaatgtgataacagtgtctataatccctgaggttaagaaactaacaaagaacgtactgtgtgcatataggtatgcatatgtatattactt

SEQ ID NO: 772878 - DNA, 614 bp, Homo sapiens
agcagctttcacagatttccctccatcctcacagtaaactttgagaatggttaaatggaaatgaagataaagcttattagattttaaactgtcaagttattgtgaagtgcagatgttgtactgatcctcaaagaaaacaaaatatagattctactaatttggagagaggattcaaatttagtaagttaaatgtgaataattagactaaaaccctttgtgctaaattcatagaagaaatcagtcacaagtaaaaaataagagccccatgaagtctaattttgccttcttatctgagtgtgtagttgcatttgtctgagaccacatctcaatcaattctcaagttgtactttgtcaaatatgaaaacattagaaatcatacaccttaattattcatctctacaaaaagcaaatagtagctgctttcaatctcttcacagattctttttgtaaaaaggaaaaggctatagttatgactktcctctgggaaattgataaatatatactaatcttcaggatcctgtctaaaatgtgataacagtgtctataatccctgaggttaagaaactaacaaagaacgtactgtgtgcatataggtatgcatatgtatattactt

SEQ ID NO: 772879 - DNA, 567 bp, Homo sapiens
gagagatccacatgtgtattggggaacacactgagttttcttgcacctgtgatttcctagccaagaatatgaacaccttcaaagctcaaatcactgtgatttgagcatttctgaaaatggctaatgactacatcttcaataaaagaacagttacctattcacataaaataaraggccagaactgaaattaattgagaaatgccaaatgtatctttaaaatgtatccagatggttttcgttaaggatttaattatcatgtggatcaatgatggataacaacgtgtataatcactaatgtactcaacctcataaatatgttaaaacatgtaatactacttcattaatgattactaattattaaatctgtaaaaagaattattagaaacttaaatgccactaataagcaatctaatatacacataggagcaagaaaaacaaaccaggaaatatatctttattaatttgctgatagcttggtgaaggactagtaaaggtagttattatctatttgatctttgcttaggacagagaaagagtatacaagaagactataggtgacactggttt

SEQ ID NO: 772880 - DNA, 570 bp, Homo sapiens
cattatgatggtagctggttattttgctgtttagttgatgcagtttcttcctagtgttgatggtctttacaatttgtcatggttttgcagtgactggtactggttgttcctttccatgtttagtgcttccttcaggagctcttttagtgcaggcctggtggtgacaaaktctctcaccatttgtttctgtaaagtattttatttctccatcacttatgaatcttagtttgtctggatatgaaattctgggttgaaaattcttttctttaagaatgttgaatattggcccccactctcttctcacttgtaggatttctgctgagagatctgctgttagtctgatgggctttcctttgtgggtaacctgacctttctctctggctgcccttaacattttttccttcatttcagcattggtgaatctgacaattatgtgtcttggagttgctcttttcgaggagtatgtttgtggcattctctgtatttcctgaatttgaatgttggcctgccttgctaggttggggaagctctcctggatgatatcctgaagagtgttttccaacttggatc

SEQ ID NO: 772881 - DNA, 570 bp, Homo sapiens
cattatgatggtagctggttattttgctgtttagttgatgcagtttcttcctagtgttgatggtctttacaatttgtcatggttttgcagtgactggtactggttgttcctttccatgtttagtgcttccttcaggagctcttttagtgcaggcctggtggtgacaaagtctctcaccatttgtttctgtraagtattttatttctccatcacttatgaatcttagtttgtctggatatgaaattctgggttgaaaattcttttctttaagaatgttgaatattggcccccactctcttctcacttgtaggatttctgctgagagatctgctgttagtctgatgggctttcctttgtgggtaacctgacctttctctctggctgcccttaacattttttccttcatttcagcattggtgaatctgacaattatgtgtcttggagttgctcttttcgaggagtatgtttgtggcattctctgtatttcctgaatttgaatgttggcctgccttgctaggttggggaagctctcctggatgatatcctgaagagtgttttccaacttggatc

SEQ ID NO: 772882 - DNA, 570 bp, Homo sapiens
cattatgatggtagctggttattttgctgtttagttgatgcagtttcttcctagtgttgatggtctttacaatttgtcatggttttgcagtgactggtactggttgttcctttccatgtttagtgcttccttcaggagctcttttagtgcaggcctggtggtgacaaagtctctcaccatttgtttctgtaaagtattttatttctccatcacttatgaatcttagtwtgtctggatatgaaattctgggttgaaaattcttttctttaagaatgttgaatattggcccccactctcttctcacttgtaggatttctgctgagagatctgctgttagtctgatgggctttcctttgtgggtaacctgacctttctctctggctgcccttaacattttttccttcatttcagcattggtgaatctgacaattatgtgtcttggagttgctcttttcgaggagtatgtttgtggcattctctgtatttcctgaatttgaatgttggcctgccttgctaggttggggaagctctcctggatgatatcctgaagagtgttttccaacttggatc

SEQ ID NO: 772883 - DNA, 570 bp, Homo sapiens
cattatgatggtagctggttattttgctgtttagttgatgcagtttcttcctagtgttgatggtctttacaatttgtcatggttttgcagtgactggtactggttgttcctttccatgtttagtgcttccttcaggagctcttttagtgcaggcctggtggtgacaaagtctctcaccatttgtttctgtaaagtattttatttctccatcacttatgaatcttagtttgkctggatatgaaattctgggttgaaaattcttttctttaagaatgttgaatattggcccccactctcttctcacttgtaggatttctgctgagagatctgctgttagtctgatgggctttcctttgtgggtaacctgacctttctctctggctgcccttaacattttttccttcatttcagcattggtgaatctgacaattatgtgtcttggagttgctcttttcgaggagtatgtttgtggcattctctgtatttcctgaatttgaatgttggcctgccttgctaggttggggaagctctcctggatgatatcctgaagagtgttttccaacttggatc

SEQ ID NO: 772884 - DNA, 659 bp, Homo sapiens
gaaagtacatgatatgtttcagtaatgaatcatagggtgatggcaattaactctccacctgtagttccagccatgcacaacacttgcctgaagacatgacagcttcaagagcaaggaccaagttttcacgaggtctgaactacatcttggcctctgtttggctgacggcaattataaatcatatctccatattgcagatgctaaaatgtgaaaaaatatacaccttagaaatgatgaaatagagtggttggattttgctttgtgatgcaggctgacaggctctctttttatttatttgtttgtttgtttttgaggtagggtcttgctctctcacccaggttggaattcagtggcatgatcatggctcactgtacaaagatgtacaactattacaatctatttccagaacattttcatcacctcaaaaggaaacctcrtgcctgtcagcagttactcccatttccccactccccaccccagcttctagcaaccactattctactttctgtctctatggatttgcctattctagatgtttcatataaacagaatcatacaatagccacatatcatttttgatttaacctttttttaattaataaaagacttctgtttaaaaaccactgaattgtacactttattttttttatttttttgag

SEQ ID NO: 772885 - DNA, 643 bp, Homo sapiens
attggatccttatttcacaccacataaaaaaattaacttggctgggcatggtgtctcatgcctgtaatcccagcactttgggaggctgaggtgagtggattgcttgagctcaggagttcaagaccagcctgggcaacagagtgaaaccttgtctctacaaaaaatatgaaaattagctgggcatggtggcttgcatctgtaatctcagctacttgggaggctgaggtggtaggattgcttgaccccaggaggcagaggttgcagtgagctgagattgcatcactgcaccccagcctgggtgacagagtgagactccatctcaaaaaaaaaaaaaaaaaaaaaaaaaaagattgggaagtaaatttggcataraaaatatgattaaattttttaataaaagaaaaaaatcaactcaaaataggttaaagacttaaatataaaaccccaaattgtaaaacggctaaaaaaaaacagggggggaagctccatgacattggtgtaggcaaagatttcttggatatgaccgccaaagcacaggcaagaaaagcaaaaataaacaaatgggattgaatcaaactaaaaagcttctgcacagcaaaggaaacaagaaaatgaggagacaacccacagattaggaaaaaag

SEQ ID NO: 772886 - DNA, 519 bp, Homo sapiens
acaaaactgtttatacacaagcagaggaatgaaattggatccttatttcacaccacataaaaaaattaacttggctgggcatggtgtctcatgcctgtaatcccagcactttgggaggctgaggtgagtggattgcttgagctcaggagttcaagaccagcctgggcaacagagtgaaaccttgtctctacaaaaaatatgaaaattagctgggcatggtggcttgcatctgtaatctcagctacttgggaggctgaggtggtaggattgcttgaccccaggaggcagaggttgcagtgagctgagattgcatcactgcaccccagcctgggtgacagagtgagactccatctcaaaaaaaaaaaaaaaaaaaaaaaaaaagattgggaagtaaatttggcataaaaaatatgattarattttttaataaaagaaaaaaatcaactcaaaataggttaaagacttaaatataaaaccccaaattgtaaaacggctaaaaaaaaacagggggggaagctc

SEQ ID NO: 772887 - DNA, 643 bp, Homo sapiens
attggatccttatttcacaccacataaaaaaattaacttggctgggcatggtgtctcatgcctgtaatcccagcactttgggaggctgaggtgagtggattgcttgagctcaggagttcaagaccagcctgggcaacagagtgaaaccttgtctctacaaaaaatatgaaaattagctgggcatggtggcttgcatctgtaatctcagctacttgggaggctgaggtggtaggattgcttgaccccaggaggcagaggttgcagtgagctgagattgcatcactgcaccccagcctgggtgacagagtgagactccatctcaaaaaaaaaaaaaaaaaaaaaaaaaaagattgggaagtaaatttggcataaaaaatatgattaaattttttaataaaagaaaaaaatcaactcaaaataggttaaagacttaaatataaraccccaaattgtaaaacggctaaaaaaaaacagggggggaagctccatgacattggtgtaggcaaagatttcttggatatgaccgccaaagcacaggcaagaaaagcaaaaataaacaaatgggattgaatcaaactaaaaagcttctgcacagcaaaggaaacaagaaaatgaggagacaacccacagattaggaaaaaag

SEQ ID NO: 772888 - DNA, 643 bp, Homo sapiens
attggatccttatttcacaccacataaaaaaattaacttggctgggcatggtgtctcatgcctgtaatcccagcactttgggaggctgaggtgagtggattgcttgagctcaggagttcaagaccagcctgggcaacagagtgaaaccttgtctctacaaaaaatatgaaaattagctgggcatggtggcttgcatctgtaatctcagctacttgggaggctgaggtggtaggattgcttgaccccaggaggcagaggttgcagtgagctgagattgcatcactgcaccccagcctgggtgacagagtgagactccatctcaaaaaaaaaaaaaaaaaaaaaaaaaaagattgggaagtaaatttggcataaaaaatatgattaaattttttaataaaagaaaaaaatcaactcaaaataggttaaagacttaaatataaaaccccarattgtaaaacggctaaaaaaaaacagggggggaagctccatgacattggtgtaggcaaagatttcttggatatgaccgccaaagcacaggcaagaaaagcaaaaataaacaaatgggattgaatcaaactaaaaagcttctgcacagcaaaggaaacaagaaaatgaggagacaacccacagattaggaaaaaag

SEQ ID NO: 772889 - DNA, 499 bp, Homo sapiens
tgttggaagaattaaatgagatagtatgtcaagtgtgggtgaagagaagcatttcagtacttggaaaagctgtagcatctacttaatgtgtgctatcagtggactaactaggcactggggtacacccaggaaaaggcacaacacagcttatggccccgtggggaagtcggacccrtgaacagatcatttcacatgtcatgagggtttggggagcagaaacccagaggcacgcagatggtgctagaggagctcatgtgagtccagctgaaatctggtactacttgaatttccttgtttcttttgtttgtaattgcctgatagtaacgtgttttctggccacagttggagtcatgggtgtaactaggtggggcagatgaggccaaaggccaggtgcagcctggggaagaggtgtgggggtgaggtaaggtgtggtgtacagggccttgccctaccataagcagcctacagggatgctacttcctggagaggcaaaacctca

SEQ ID NO: 772890 - DNA, 499 bp, Homo sapiens
tgttggaagaattaaatgagatagtatgtcaagtgtgggtgaagagaagcatttcagtacttggaaaagctgtagcatctacttaatgtgtgctatcagtggactaactaggcactggggtacacccaggaaaaggcacaacacagcttatggccccgtggggaagtcggacccatgaacagatcatttcacatgtcatgagggtttggggagcagaaacccagaggcacgcagatggtgctagaggagctcatgtgagtccagctgaaatctggtacyacttgaatttccttgtttcttttgtttgtaattgcctgatagtaacgtgttttctggccacagttggagtcatgggtgtaactaggtggggcagatgaggccaaaggccaggtgcagcctggggaagaggtgtgggggtgaggtaaggtgtggtgtacagggccttgccctaccataagcagcctacagggatgctacttcctggagaggcaaaacctca

SEQ ID NO: 772891 - DNA, 539 bp, Homo sapiens
gagtattgccagggaagaaggctttaatcgggtgcaacagccaaggagaatgggagatcagtttcaaatctgtctccccaactgactaaaattggggtgtttaaatagtttaatagttcaaattagctatgtgtgggaaggaattagggaggggtagggaagccatctcaacgaatgggggtatggcctctaattgtctggatatggcaatctggtgagtttcagtcccttgtttgagggtcagtttcctgagaaagagactcagatgagacaaatgtaagttttaagatttggagggtcaaattctatgtttattcaaaaaacttgggccaggtacaatggctcatgcctgtaatcctagcactytgggaggccagggtaggaggatcgcttgagaccaggagttcaagactaatctggccaacatagcaagaccctgtctctataaaaaacaaaacaaaaacaaaaaaactcataaatatcagttatatgagacaattgggccagtttcattaaaatcacaagataccactacattc

SEQ ID NO: 772892 - DNA, 479 bp, Homo sapiens
atgggcttataacaaagagggtgatatcagtggcccttaagtcaaagaagattattgaacaaggctgtgagctccatgaaggcagggactgtgtctgttttattcattgatatatccctaccacttaccccagaagggctccatcaatatgtgttgaatgaactttgaatgaacgggygctttcaggatcaccatgcaataaacagtcatggatgacataagccatcaaattgatgctaatcacttccccaccgagcccagttatagtgggcatttgcccagctttgccccccagcatgcaatccactattctaaagcccctcatcttccctttagggagttttacgctgtgggttgttttctaggggtgggagaggagagcgcttgcctcttagaaaccaaaggggccagatgctctttctggaaactttgaacaactgctgcaagaatgcggattggttggaggccattcactgcag

SEQ ID NO: 772893 - DNA, 349 bp, Homo sapiens
gactcattaactccactaccagaaatagattctaagaaataatcagaagcttacacaaaggtttgtgtataagacagtgagtcaccatgatctttagagtagtaaaaggtagaaacaactccctttgttccatctctgctcacacgacacctccttagagagggtcttgacctggrcaaataaagtggcccctgtcttcttaccatgcctttatttgttatgtcataagacgatcaccatgtgatgaagtatatatttatttgttaatgtgtttgctttctttctcacaactaggatgtcagccccatgagagcagtaggggaagatccaagttttgtgtgacccgaag

SEQ ID NO: 772894 - DNA, 562 bp, Homo sapiens
attcccttcttccctttgtaataaaatccccccatctttttttttttttttcctgagacggagtctcgctctgttgcccaggctggcaatcgagtgcagtggcgcgatctcggctcactgcaacctccgcctcccagattcaagtgattctcctgcctcaccctcccgagtagctgggaccacaggcgcccaccaccatgcccggctaatttttgtatttttagtagagacagggtttcaccatgttggccaggctggtctcgaactcctgacctcaggtgatccacccgcctcaccctcccaaagtgctgsgattacaggcatgagcaaccatgcccagccaaaatcccccatctttgtggggctcacattgagaccctatctcccaggctcttgtgccacttggtgtggctacatcagtgagttcatgctaatggaccatggatggaaatggtttctgctacttcttggttctgtatttataaaatgggcaacgggcaataaatgggcaatgttcccctctcttttatcctttctcacaggcagagcaaagacctggtgc

SEQ ID NO: 772895 - DNA, 615 bp, Homo sapiens
tctgaaggcagagacaaaatggtatttggggaaaagctttccaggacgaggaggcagaacatgcaaagaccttcaggtgacaaaatctttgggatgtttgaggaacagcagaggaaattgtaggctgtagcagatgattaagtataagagtattagtgatgaggttagggatggtaggttgggggagagtattataagtaattagagggactttggtttttgtgctgaatgatttgggaaaccattggagggttttgagcaaaaacgtgacatgtttggacttaaaatttaagaggatcgaggtgggcggatcacgaggtcaggagatccagaccatcctggctaacacggtgaaaccccgtctctactaaaaatacaaaaaattagccgggcgtggtggcggcgcctgtagccccagctgctcgggaggctgaggcaggagaatggtgcgaacccgggaggyggagcttgcagtgagccgagatcgcgccagcctgagcaacggagcaagactctgtcaaaatagaaaaaaaagaggatcagtctggtcgttgtgctgagaaaagtctaagagagacgagagataggaagtccagtaattaggccatggcaata

SEQ ID NO: 772896 - DNA, 576 bp, Homo sapiens
aagaacattttcaaaacacagtggaattaaattagaaatcaatatcaaaaaataaactgggaaaatccccaaatacttagaaattaaacaacacacttataaataactcatgggtcagggaggatttcacaaggggaattaggaaatattttaaattgaataaaaataaaaaacaaaacataaaaaaattgtaggatgcagccaaagcagaaatctgagggaaaattataggattaaatacttgtattataaataaagtcttcaaataagtcatstaagctttcactttaagaagctagaaaaagaagagcaaataattaaacccaaagcaagcagaaacaaggaaacaatatcagaaataaaattgaaaacagaaacaacagaaaaattaataaaacaaaagctgtttctttgtaaaaatcaatgaaattaataaacgtctagtcagaccaatcaagaaaaatagaaaacacacaaattagcaataccaggcataagagaggagatatcactacaggtcctacagacattacaagaaaagtaagagaatgttatgaacaactttatactagtgaa

SEQ ID NO: 772897 - DNA, 605 bp, Homo sapiens
catatgacatactatttgtaacatgcttttttttcacccccaaataacaatttacaggatctcaatattgaggccagaagagattacatagagattataggctctgcctgtaatcccagtgctttgggagccaagatgggagtattgctcgaggccagaagtttgagacaaagctgggcaacatggcaagaccccatctctacaaaaaattaaaaaattagctgagtgtggtggtacatgtctgtactcctagctacttgggagcctgagggggaggatcacttgaacccaggagtacaaggttacagtgaattatgatcataccactgcactccaggctgggtgacagaatgagactccatttctaaagttaaaaagtgtatatattgaaaaaacttacttgaaaactttkagagtagaaattatctttatagtatgtaatctatccagtcaaatgagctggcagtggaaggagcactggacttagagtcggaaggcatggccttttctcttttgccaatcaatgtgacatttagattttcattattatcattatcattattattattaagatttaaaaaaattgtgggctagaaatgtaactt

SEQ ID NO: 772898 - DNA, 569 bp, Homo sapiens
agacttaccatgtgtttagagtttctgtgtctgccaagggagtctttaattgctaaaactaaaagactttatccatattttcttttagtgctttcctgtttttattttagtatcttaaccttaattatgtgaaatattttatgttgtaaagaatgagtagtagagatccatttttttcttcttsagtatctgacaagttttctgaatatggtaaacaatctatctttttatattgatttgaaagctgctttcttcatgacactaaattattacatgtatttgaatttacaaatgaattgttatatttcacttatctgaatatatatttctttacccagaatgttccttcaattaatgcttaatataactctatattataattcctggctgaagaagttcccactcattgttcttcattttcataatttttctgactattaacacacatttattcttctagatggaggctgttcaaccttggcactattgatattttggactggataaatagaaatctgtagtgggatccttctaatttcctctactttctttttgtagctctgtttggt

SEQ ID NO: 772899 - DNA, 569 bp, Homo sapiens
agacttaccatgtgtttagagtttctgtgtctgccaagggagtctttaattgctaaaactaaaagactttatccatattttcttttagtgctttcctgtttttattttagtatcttaaccttaattatgtgaaatattttatgttgtaaagaatgagtagtagagatccatttttttcttcttgagtatctgacaagttttctgaatatggtaaacaatctatctttttatattgatttgaaagctgctttcttcrtgacactaaattattacatgtatttgaatttacaaatgaattgttatatttcacttatctgaatatatatttctttacccagaatgttccttcaattaatgcttaatataactctatattataattcctggctgaagaagttcccactcattgttcttcattttcataatttttctgactattaacacacatttattcttctagatggaggctgttcaaccttggcactattgatattttggactggataaatagaaatctgtagtgggatccttctaatttcctctactttctttttgtagctctgtttggt

SEQ ID NO: 772900 - DNA, 569 bp, Homo sapiens
agacttaccatgtgtttagagtttctgtgtctgccaagggagtctttaattgctaaaactaaaagactttatccatattttcttttagtgctttcctgtttttattttagtatcttaaccttaattatgtgaaatattttatgttgtaaagaatgagtagtagagatccatttttttcttcttgagtatctgacaagttttctgaatatggtaaacaatctatctttttatattgatttgaaagctgctttcttcatgacactaaattattacatgtatttgaatttacaaatgaattgttatatttcacttatctgaatatatatttctttacccagaatgttcyttcaattaatgcttaatataactctatattataattcctggctgaagaagttcccactcattgttcttcattttcataatttttctgactattaacacacatttattcttctagatggaggctgttcaaccttggcactattgatattttggactggataaatagaaatctgtagtgggatccttctaatttcctctactttctttttgtagctctgtttggt

SEQ ID NO: 772901 - DNA, 569 bp, Homo sapiens
agacttaccatgtgtttagagtttctgtgtctgccaagggagtctttaattgctaaaactaaaagactttatccatattttcttttagtgctttcctgtttttattttagtatcttaaccttaattatgtgaaatattttatgttgtaaagaatgagtagtagagatccatttttttcttcttgagtatctgacaagttttctgaatatggtaaacaatctatctttttatattgatttgaaagctgctttcttcatgacactaaattattacatgtatttgaatttacaaatgaattgttatatttcacttatctgaatatatatttctttacccagaatgttccttyaattaatgcttaatataactctatattataattcctggctgaagaagttcccactcattgttcttcattttcataatttttctgactattaacacacatttattcttctagatggaggctgttcaaccttggcactattgatattttggactggataaatagaaatctgtagtgggatccttctaatttcctctactttctttttgtagctctgtttggt

SEQ ID NO: 772902 - DNA, 490 bp, Homo sapiens
gggagtctttaattgctaaaactaaaagactttatccatattttcttttagtgctttcctgtttttattttagtatcttaaccttaattatgtgaaatattttatgttgtaaagaatgagtagtagagatccatttttttcttcttgagtatctgacaagttttctgaatatggtaaacaatctatctttttatattgatttgaaagctgctttcttcatgacactaaattattacatgtatttgaatttacaaatgaattgttatatttcacttatctgaatatatatttctttacccagaatgttccttcaattaatgcttaatataaytctatattataattcctggctgaagaagttcccactcattgttcttcattttcataatttttctgactattaacacacatttattcttctagatggaggctgttcaaccttggcactattgatattttggactggataaatagaaatctgtagtgggat

SEQ ID NO: 772903 - DNA, 605 bp, Homo sapiens
ttcacagtgtaatcgtgtgcctaacggctgtagctactaacttggcttacattgactgaccactaagggactctaggagtcagaatctaaatgctgagtgtctcaaaggtgtagagagaatttcagagggccttaccatgacatggggattaaactccagttctgcccaattctcgtcacgaaatccttatcccgtgcctctttgtgtttggtgtccccttgcctaggggacagttttcctgggtaacatcagcaagataacacttcagtcacattccatttgatmctttgaatactctggggtccttacccaccaaatggatggagttcagctgctcaatcactgcctttctcagaactctgttgtccaaccacaattcccttcccctactcacgtagggatagggctatattggcaaaatgccgcccgaacagcctgctgacagtaaaccaaatattagtttctctcaccttcttgaaggcatttacagtctttgtaagcttttctcctaattttccctttcccgttcctgcttagattctaagaatgaagtgcatccttctccttttcttcatcaggtgaagtgggatttacccattaccat

SEQ ID NO: 772904 - DNA, 490 bp, Homo sapiens
caaactggttttaaaatgggtaaatgatctgaacagaccttcctcaaaagaaggcatacaaatggacaacaaatatatgaaaaaatgctcaacattactaatcatcaaagaaatgcaaatcaaaaccacaaggaagtatcatcttgcccctgttagaatggctatcatcaaaaagacaaaaaatagcaaatgctggtgaggatgcagagaaaagggaactgttatacacttggtgggaatgtaaactagtacagccactatggagaacattaaggaggttccttaaaaaactacaactaggactacacgtgatccagkaatcccactaccaggtattgacccaaaggaaaagagatcagtatgttgaaaagatatctacaacctcaagtttattggagcactatttacgatagccaagatatggaatcagtctaagtgtccatcaggagaagaatcgataaagaaatgtagtatagatacacaatggaat

SEQ ID NO: 772905 - DNA, 571 bp, Homo sapiens
aacttttccagagtttttaaaactcagaagatacaatgactaaatgcaaaaataatcctggatttttttgtcgtaaagaatattaatttgcggccgggcgcagtggctcacgcctgtaatcccagcactttgggaggccgaggtgggcggatcaccaggtcaggagatcgagactatcctggctaacgtggtgaaaccccgtctctactaaaaatmcaaaaaaaaaaaaaaaagaaaaaaaaaaaattagcggggcgtggtggcgggcgcctgtggtcccagctactctactggggctgaggcaggagaatggcgtgaacccagggggcggagcttgcagtgagccgagactgcgccactgcactccagcttgggcagacagagcgagactccgtcaaaaaaaaaaagtatatatatttatgtgtatatatacatatatatacacatatatatgtatatatataaatttgcaaaagctgaataaaatccggagattagataatagtgttgtgtcagtgttaatctactggttttgatgactgaagtctggttatgtaagtgaatgtttgta

SEQ ID NO: 772906 - DNA, 555 bp, Homo sapiens
aagcaaaaattgacaagtgggatccaattaaacttaaaaacttctgcacagcaaaataaactattaacagagtaaacagacagcctacagaatgagagaataatttttgcaaactatgcatctgacacagatctaatatccaccatctataagaagctttaacaaatttacaagagaaaaacaaccacaataaaaagtgggcaaagaacatgaacagacacttctcaaaagaagacatacatgtggccaacaaacatrtgaaaaacagctcaatatcactgatcataagaaatgcaattcaaaaccacagtgagctaccatctcacaccagtccgaatggctattagaaaatcaaaaaataacaaatgctggtgaggttgtagagaaaaaggaacacttatacactcttggtagttccataagttagttctaccattgtggaaagcagtatcatgattcctcaaagagctaaaagcagaactaccatttgacccagcaatcccattattggatatatacccagaggaatataaatcattctaccataaagacaca

SEQ ID NO: 772907 - DNA, 704 bp, Homo sapiens
attacagtacttcagatgcattctggatcctgaataactaatctactcagtaacaaataatgtaatcttcaacataacattctctctgagagagtgcaaggcagacaatggagacaacaattcaaaaacacttttcaagttgaagtacaatcttaacaatggcagtatttttgagatatttaggtggctttcacaccatcctttttttatgccccaaggtgtaagggtaccaaataaagcagttttccagatcttatcagtagacccaaaagtagaaattaactagtagtaaaaatcacttatattaaacccctttcatttgcatatatttgcatatgaatacctaattgttttgaagtaacaagagaacaatggaggaaaaaaagggggcttgaggctgcaacagacacctgggagactgtattttaaaagtctatatttttacatatttgattttatttcttaaataaagagaaaggtactgagtcatgcacacaaagtactaccaaaagaattaaagtgtgagaaagtttcaacctaatgatgctattttctgayagacacctctttaattcttcccacttaaatcttgagtaacaaagccatgtaatgtgtatagaaatcaaaattctacagatagtgctaaaggaatttttaagattcccttaacaagctcttaagttgataatggcctctgtttgaac

SEQ ID NO: 772908 - DNA, 566 bp, Homo sapiens
tgcatgttttgtgtgcacatttgtaagtttgtataatgtaattaatattcatgtatagtctgaagtaatatccagcatacagttaatagtatttccatataatgggattgtggcaaaatttaaaaatattttcttgtctacatttttcaatttttcccmaatgtgcatattatatcatgtaattagcagtaacattgatctataaatacaatttttaaaatgtcagtcaggtgtattccatgtattaagtaatcctttatgatctgtaaactcactgaacacatgctacatgtacgtctcttcaaacatttttaataattgcattcattgtgatttgtgcttctaaaaaaaaccaagtatcctcataactgacctctctttctctgccctttattcctaccatcaacatttgcatctttgagtttttcttcattctgcatttcttctatagtttctagagcttaaactcatcatcactaattctacagcattaatgttgttctttattgcttttaatgcagatttctatactattattgcatttttaatcttcttataatctttat

SEQ ID NO: 772909 - DNA, 568 bp, Homo sapiens
tttatcctttcatgataaaaactctcaaaaaattgggcataaaataaatgtttctcaacacaataaagactatatatgacaagcccacagctaacattatacccaacaatagaaaagtgaaagcttttcctctaaaatcagaaacaaggcaagaatgctcactcttcctactcctattcaacatagcactaaaagtcatagctagaacaattaggcaagaaaaaaagttatccatccacattgcaaaagaagaagtaaaattgttcctattttcagatggtgtgatcttatatatagaaaaccctaaagattccatttaaaaaactgttagaactaayaaataaatacaatagtccttgccttgtccctggttgtactttctttggtttcagttacatgcagtcaaccatggtccgaaaatactgcatacaataagatattttgagagagaagggaggagagaccacattcctataacgaagattgcagtatattgttataattgttctattttattattagttattaatctctttttttttttttttttttttttttgagatggagt

SEQ ID NO: 772910 - DNA, 568 bp, Homo sapiens
tttatcctttcatgataaaaactctcaaaaaattgggcataaaataaatgtttctcaacacaataaagactatatatgacaagcccacagctaacattatacccaacaatagaaaagtgaaagcttttcctctaaaatcagaaacaaggcaagaatgctcactcttcctactcctattcaacatagcactaaaagtcatagctagaacaattaggcaagaaaaaaagttatccatccacattgcaaaagaagaagtaaaattgttcctattttcagatggtgtgatcttatatatagaaaaccctaaagattccatttaaaaaactgttagaactaataaataaatacaatagtccttgccttgtccctggttrtactttctttggtttcagttacatgcagtcaaccatggtccgaaaatactgcatacaataagatattttgagagagaagggaggagagaccacattcctataacgaagattgcagtatattgttataattgttctattttattattagttattaatctctttttttttttttttttttttttttgagatggagt

SEQ ID NO: 772911 - DNA, 611 bp, Homo sapiens
ttagggaatgatcatgtggacccaggctgccaccgatggctgtgcagtttgtgcctggcacaacagtgtccagcagagggtacacaaggggttgccatcacacctggggtgcctgcaggctggggctgcagtttatcggctcagaggcgttgcctgaagtggactgcactctacacccaaggcaatcttttttcttgcacccctgactaacttccacatggcactgaaagtactcctggcctagcaagcccattaaaacatcctttgtatgaattggccagagcccagtgcagaaaagcaggccatataaattcccaaacatctcagatctaagaagagcatttagagaatgcagatatgtttataaaacctcctgtaggaaatcatgatattaataaatgggagttattagtttggatayaatttggggtcactatttactgctgactaaataaaacatataggtaaattgcataatctcatgtgtcatattaactaatcatgacaatgtattggaaatctaactaacatgaaagatattttgattctctatgtactagatccgctgcaaaccatttgttgtcataaagaggatgaattctagagaatct

SEQ ID NO: 772912 - DNA, 602 bp, Homo sapiens
gaggattggatgcaggcaggtgaacagggcagaaagggctagcaaggcacgctggggcctgactgggaaggacagcaaggccaggcgaaggggtctggagcatatctacagccattgggtcagagttgtccctgggaccagtctctggctgccctgtgtgcaggaggggccaggggtgccccttgtcaaggaggccctgctgggctggctgggttctagcttgtcctggcatctgagggtcaggctggtgctcttctcatagcagccttgtgctgcagaagaaactggaggattcatctgcagaccccatgaggggtgagggggcctctgcagcctggaagggctgctggtgatcagctccacgttcccaggagaagacaactcctgagatggcccccggcctccactctgggcagctcttggccaacatccttttccccggaaatgggactggctggkggggggttacagctggggtagggccccccatactacaataatcaataagccattctttcttaaggagggagggtcagacaacagaagagccccagctgaacatgtgaagatttcaagggaccagggccagcctgacagcacct

SEQ ID NO: 772913 - DNA, 602 bp, Homo sapiens
gaggattggatgcaggcaggtgaacagggcagaaagggctagcaaggcacgctggggcctgactgggaaggacagcaaggccaggcgaaggggtctggagcatatctacagccattgggtcagagttgtccctgggaccagtctctggctgccctgtgtgcaggaggggccaggggtgccccttgtcaaggaggccctgctgggctggctgggttctagcttgtcctggcatctgagggtcaggctggtgctcttctcatagcagccttgtgctgcagaagaaactggaggattcatctgcagaccccatgaggggtgagggggcctctgcagcctggaagggctgctggtgatcagctccacgttcccaggagaagacaactcctgagatggcccccggcctccactctgggcagctcttggccaacatccttttccccggaaatgggactggctggggkggggttacagctggggtagggccccccatactacaataatcaataagccattctttcttaaggagggagggtcagacaacagaagagccccagctgaacatgtgaagatttcaagggaccagggccagcctgacagcacct

SEQ ID NO: 772914 - DNA, 615 bp, Homo sapiens
tttaactacactactactcagtcaattaaattttcattcattcagcagtcccttactgcgtatgaataaggctctaagctgagcaccacctgtaagacaaaaggacactctggggcataaagcgaaaaaaaaacccactttcacttcacatgcctagaataactttttctagagaggaatgttgtcaacttatgcttctattaataataatacacaattgtttaaatgagtgatctgtgttgtcaagcactcagcatagggcctggaacacagcacttaagtattagctgttgttactgtttcttttagggatatgtaatataatcacctaaaatatagtatctgtatattcatgcttataacatgtactggtattggactccccccaaaatgcataygttgaagcctaaatccccagtgtgatcatatttgaagatggggcctttggggggtaattaggtcatgagggtggaaccctcaagaatgggattaatgcccttataaaaagaagaggagacacaggatctctctttctctgctcttcaccatgcgaagacacagcaagacagtcatctacaaattaagaaactggccctcacaagacaatggatctgt

SEQ ID NO: 772915 - DNA, 570 bp, Homo sapiens
tggaggtggaggttccagtatgctgaaatcgtgccactgcactacagcctgggtgacagagagagactccatctcaaaaaaaaaaaattatttagagagaaggaaaataacacaggtcagaaactaggatccacataaagaaagagcamcaaagaagtagtaagtgaaagtaaaataaaaagtttttcttatttttaattgatctaacagataatagtttgtgcaaaataatattaacaaatatatttgcttatgtgtgcttatatatgtatggttatgtatgcttacatattgtaagtgatataaatgacagcaatgatacaaggatgggaaggaagaattaggattatttcattattataaggaacactgttcaagaaatggtatagtgttatttgaaattgggcttggattagctgtaaatgtacattgcaaactctagggcgactcctttaaaaagtaaaaaaagtcacgcctgtaatcccagcactttgggaggccgaggtgggcggctcacgaggtcaggagattgagactatcctggctaacatggtgaaaccccatctctac

SEQ ID NO: 772916 - DNA, 634 bp, Homo sapiens
atttgcttttgaaagattacagcaagaccttttcactagcaataattaagacacacgttatattttacaaatattttaagatatttcaggagttgctgccagccactttccctaaagtccaagtaagaggagaaagagcagcttttcttcaactaaaaatagctaaaatttatggagaattatgtgccaagtactcttacatgcattatctcatttacttctcacaattgtgttatctcatttgaaaaatcaraatgctgggtgcagtggtgtgcacctgtagtcccagctactcaggagagtgaggtaggagtattgtttgagccctggacttcaaagccagcttgggcaacatagcaagaccccgtctctaaaaaaaaaaaaataataaaataaaaaaataaaataaaataaaagaataaaaataagaagaccacacctcacagcaattagataatccaaacgacatggatttggaacttggattcaaactcaagcagtctggttccaaagatttcattcctaaccacttaagtgatagatttttcatttctgttcacctttagtattaagccaatacagtttgctttgaagccccagttccatctttttaagtaaatgtgggcaagaggct

SEQ ID NO: 772917 - DNA, 549 bp, Homo sapiens
tttgttaccttgattacttattaccttgaaccacagatgtacccagaacattgcactttacaaagatataatttctatttaaatacagtgaataaatgactggtagaatggtagaaaagtgtcatggttgaatacggatgctatagttaggatttatatccttgttttgacaaccactttatctgtagcctaaagcatttctaagcttttyttatgagaaaagggagaataataataatacgtatcttgtagcattgctgtaaaaataaacagtgttttaaaaaataaaataattcatacaatgtgcttagcattcactaatcagcatcagataattattaataatattagtagtggtacattataataatacccataagcgtctcaattttgtggatttttctgcagcaaattttttgctccagatttgctttcttttactaatttagagttcatttctctgtgtcaccatttgtacatgattcagttttgtaatctaataaataccattctaataaaaatattagtaagatataaaagatacaatat

SEQ ID NO: 772918 - DNA, 620 bp, Homo sapiens
agcattacatgcctacatgaaaaagtctgaaagagcacaaataggcaattcaaggtcacacctcaaggaactagaggaacaagaacaaaccaaacccaaacccagcagaagaagagaaataacaatgatcagagcagaactaaatgaaactgaaacaacaaaacaatacaaaagataaacaaaaagctggttcttcaaaaaataaaactgatagactattagtgagattaataaaataagaagagagacgaacctaatacgctcaattagaaatgaaacaggagacattacaaccgatactatagaaatgcaaaagatcgtacaaggctacaatgaacaccttcatacatacaaactagaaamtctagagaaggtagataaatttctggtaatatacaccccttctggattaaatcaggaagaaacagatactctgaactaaccaataataagtagtgaaattaaaacagtaataacaaaattgccagcaaaaaaagtgcaggacctgatagattcacaagtgaattctgtgtggcattcaaataattggtaccaatactgctgaaactattccaaaggatagatgaagagggaatcctccctaaagcattctatgatgc

SEQ ID NO: 772919 - DNA, 620 bp, Homo sapiens
agcattacatgcctacatgaaaaagtctgaaagagcacaaataggcaattcaaggtcacacctcaaggaactagaggaacaagaacaaaccaaacccaaacccagcagaagaagagaaataacaatgatcagagcagaactaaatgaaactgaaacaacaaaacaatacaaaagataaacaaaaagctggttcttcaaaaaataaaactgatagactattagtgagattaataaaataagaagagagacgaacctaatacgctcaattagaaatgaaacaggagacattacaaccgatactatagaaatgcaaaagatcgtacaaggctacaatgaacaccttcatacatacaaactagaaactctagagaaggtagataaatttctggtaatatacaccccttctggattaaatcaggaagaaacrgatactctgaactaaccaataataagtagtgaaattaaaacagtaataacaaaattgccagcaaaaaaagtgcaggacctgatagattcacaagtgaattctgtgtggcattcaaataattggtaccaatactgctgaaactattccaaaggatagatgaagagggaatcctccctaaagcattctatgatgc

SEQ ID NO: 772920 - DNA, 625 bp, Homo sapiens
attcacattccaacagtgtacaagggttctcttttctccgtatccttgtcaacacttaccatttttctttttgataataggcattcttacagatgtgaggggataccttgttgtggttttgacttgcatttctctgattattttgagtatttttccctatgctagttggacaattgtatatcctcttttgagaaatgtctattcagatttttttgtccatttttaattgagttcttttattactgttgttttagttatgtattttggataatctttatcagacgtatggtttacaagtcatttcttccattccataggatgtttcttcactctgtgtattgtttscttggctgtgcagagctttttattatgtaatttcacttactaatttttgttttttgttgcctttacttttgcgtttatattcaaaaattatcactcataccaatgtcatggaacttttccacatgttttcttctattagttttacagtttcagatcttacatataaatccttaatccattttgagctgattttagtatatggtgtgaataagcatttaatttcattcttctgcttgtggatatccagttgtccctactctgtttattgaaaagacttctt

SEQ ID NO: 772921 - DNA, 586 bp, Homo sapiens
caatatattctggtagcaaaagggagattaaatcaatgttgtcagaggtacaagtctaaaaggtacgtcttcactagtaaaactagaaaaggaaaagaatggatatttgaactatctcgatagcttctgtaatttttaagattatagttcaacattcaagcaaggactgtttgcacctacttaaaattttctaatagttaaatctttcctactgaaaattccaacttttcattgaagaaaagctattggtaaatgaatattatacatatatttctatgtatactcctgaatgtctctcttctctccctccctctgagtctgtgtgtgtgtctgtgtgtctgtgtgtctgtgtctgtgtgtgtgtctgtgtgtgtgtstgtgtgtgtgtgtgtgtgtgtgtgtgtgtgtgtattatatatgataacatatagattatcctagatctgagttactgcatggagaactgttgccctggagagtcacctggcacaatgacctcatgtgcatgagaaataaatctttgctgtatttaagcttctgagattttgagactgttggttgctgtagcataatttaataagattaa

SEQ ID NO: 772922 - DNA, 571 bp, Homo sapiens
cctatttacaggactaaaacagcccattgtttatgtgaaacatcccaaactttattgcgattcctattggctttgccacaagccaaggtaaaatcccagagatagctggtgatttgcccaaggtcataggatgaccacacagtgcaacccaagtgaaggaaaattccttcacaggggtagaataggatactacttctcagcttggggcctggagctaaattgcttggacttaaatctaactattacttattagctgtataacttaagcatgctactttgcatttctatacctcagtttccatgtctgtaaattgggctaataaaatcatytttggttttatggaggttaatcaagtgagcatttgtaaagtgatatacaatatctaagctcatagtacacactcaataaagtcaaataaacttactattatttctgaacctagttagtcattagaaccaccaaggaccttttaagactgttttcctgtcccactcatatttacaaaacgactgcatcaggcgtatcccaagaaacttaatttataaaagctctccagtgagttcagagatc

SEQ ID NO: 772923 - DNA, 637 bp, Homo sapiens
ttcacatcagacgacaaagaacatctggggtgaaaggctccattagaagagcaatgtgggatggtgctgtgctgacaactggtagtccctaccctacatctttgtagaggactggagcccagagtatgccatggtcaacttgcatgttgaagtgaagacctcattcgaggtgtgcatgtgcttattacagatatgccacggtgcyaagtaccccaggactacaggaaaaaataagaattgatgctttatccatgatcatgaggcacacaggccagagcgccaactgtggaattgcacagcctgggttcaaagcctggctgggccatgaccacctgaatgacctgaggaatggtctcaggcaaatttgtaaaaagtagagacccttcctgccagggcggcatgtggtaagaggcgcatccagtcaggtcagggcaccgcgtcctctctttggaaacctgcggagcgaggctggtggcccttgaggccacggcagccatggagaaggcaggcctggctccaggcagcacagaggcactggagaggccccgggggagcctggcgggatctggctggtcctgcgctctgcttccaggttctggccctgtaacccaggggacagggccggccaagacagggc

SEQ ID NO: 772924 - DNA, 637 bp, Homo sapiens
ttcacatcagacgacaaagaacatctggggtgaaaggctccattagaagagcaatgtgggatggtgctgtgctgacaactggtagtccctaccctacatctttgtagaggactggagcccagagtatgccatggtcaacttgcatgttgaagtgaagacctcattcgaggtgtgcatgtgcttattacagatatgccacggtgctaagtaccccaggactacaggaaaaaataagaattgatgctttatccatgatcatgaggcacacaggccagagcgccaactgtggaatygcacagcctgggttcaaagcctggctgggccatgaccacctgaatgacctgaggaatggtctcaggcaaatttgtaaaaagtagagacccttcctgccagggcggcatgtggtaagaggcgcatccagtcaggtcagggcaccgcgtcctctctttggaaacctgcggagcgaggctggtggcccttgaggccacggcagccatggagaaggcaggcctggctccaggcagcacagaggcactggagaggccccgggggagcctggcgggatctggctggtcctgcgctctgcttccaggttctggccctgtaacccaggggacagggccggccaagacagggc

SEQ ID NO: 772925 - DNA, 569 bp, Homo sapiens
gtgcttggagcctggggaaaagagttatgaaggaaacgttttccctgtgtaactttcatatgtcttgaatattaaaccatgtgaatgttttccttattgaggatataaatgtaattttaaagtaataaacagaatagatgttttttaaagagacctctaatcctgctagtttagaatcaaaagtaactggtggtattatacccacactccccaattgcttagccctattcccaaacatctgctggcacgtattttatagataaatttctggtaaatataaaatattataatttcattaatctgaaaatgttagtaaatctcagaactctgatgcatacrtatgttttacctaatagtctattcaatgtttattttgatttcagtattttaaagaaatatttttataccccaccttcccagattccttcaagatttacaaagagcatgaacaaaaagcatagggaaggaatatgtcttcttctgcctgcagtagagcttgttttacttaaatggtgagcctgttttacttcggataggaaccttcatttcatctgggattcaaattgctt

SEQ ID NO: 772926 - DNA, 571 bp, Homo sapiens
acctcaccaacttaactttttttgtatagtgagaacattaaaaaaatctattctttcagcaattttgaaatgcacaatatattattattaaatgtggtcaccactcagtgctgaatgactgttaagtcacgtgtacttcagatcacagctcctttctaggtgatgttaatttgatttcatattttctaatgattctgaattttctgtttcaagatttaaaaaaataaaagaacttctgttaattttgcagccatctgcttgccctagtctccatcacctgcctaggaaaaattacctttatttggtagttattatcgctatataggcccctgaaattaaggactcacccagctttggttcaactggactttaaactcagtccctttccctggaaaacsgtgctatgtggcactctgtagatttagtaaattcactcacaatgaagtggagtttatcacaatgaggggcccactctaccactcttggaattctattccatctgcttccttacccatcccacttctctccactaagcatcaaatcctcctccttgtcttatacaggtctcctt

SEQ ID NO: 772927 - DNA, 550 bp, Homo sapiens
atgagaggacacagcgtaggcgctcaacaagtatttgtcaaaggattgacacattttctttgtaactggacaccaggcatgcacagagacaacttacagctggttagcagtggggaggtaggtgccagagacatggctgataccagtaaaccctggaatgatagagtaaargtcatgtccagtgattttcatttcagctacgtggcactaaaactcatcctgtcaacatgtgtcctgactgaatccatcccagtttgcacatgcaggctggaaaccactatctgaggccacagcagcctccttgtcccatgaatgccacacacgggcctggcttgggcgtgagtcctgcaagttcatcctgtcagagggtgagaaacagagaagcaggcccacacgaccaggggtgactatgagaacacagggctgtgcaggtgcctggggcacacagaaggcagggccccatccctgaggtgccaaagacgtaggttagaactgtggatcagggctagagccaagcctaggggaaatctggacctccccatgaggatcc

SEQ ID NO: 772928 - DNA, 613 bp, Homo sapiens
tgggattacagacatgagccactgcacctggcctgccataacttatctttagaaacaagtgtctaggtccagtctacacttgaagggaagggattacacaaaggaacgaatattcaaagacagagattattgagagccatggcaaggcctctttccacagaaaggcttcagaaaattatgatcagagcctctctcctaaggcctggaacataagagtatctgggatattcattcattcattcatttttcaaaaagtatttaatgactgtctgctatggaccaaacatttctcgtctagtccggtctagtctagtccagtccagtccagtccagtctattcttctattctattctattcttaagatggagttttgctcttgttgcccaggctggaatgcaatggcgygatcttggctcaccacaacctccttctcctggattgaagtaattctcctgcctcagcctcccgagtagctgggattacagcatgtgccaccacatctagctaattctgtatttttaatagagacagagtttgtccatgttggtcaggctggtctcgaactcccaacctcaggtaatctgcctaccttggcctcccaaagtactgaga

SEQ ID NO: 772929 - DNA, 589 bp, Homo sapiens
agtagagaatgcaaaattaactctcagctcctacaccttctgcctagtttatagggttgatatcttcctatcattagttgaggcattaatgttgaacaacataataaatgcagaatttccatagagagttcaaagagcactgaaactttagcatactgggtaagcctgttgttacaggtaccagtgcagacagaaagctcccaataataaaatgaccaggagtaaattagaaatatgaaagacaaaagagatatgttatagggatgataagaatacctaaattacaaaaaaaaaacctttagaacagatttraaaataagctacactgaatgtcctaaacatcctgaataacatttttccaagcatacaaaaagaaaaaacaagacatttacatggataaacatttatataagtaaatgactgatctcagatttctttacaatactgggctgaaaacgctaatgattaaatatctgcaggatttaaagcactctgttcatttatggaagaagcagaaaagtatttacaaatgtaaaaggactcagaaaggatgtacagaaacactaccaccaccatttacctcctccct

SEQ ID NO: 772930 - DNA, 679 bp, Homo sapiens
gttatgaacaagtttcctaacaatgtcctaacaatggctttgaaaagcaacatgatgtccttttggtgatcagaatatacagctgccagataaatgggaaaacctgtctgtgctaatatccacatagatgcttgccttgacactcagttttctgtgacatcatacctagattcaaaaagtattatattccaaatggtgtaatgggaagtgaaagtgatggagactggcatcgttcaactaaaaaagtgcttcttctgatgacaaacactgctgcatttgacgagttagaataaaggggttgtctgggaggcagaggttgcagtgagctgagactgcgccattgccctccagcctgagcaacgaaagsaaaacttcatctcaaaaaagaaaggaagaaagaaagaaagaataaagaggttctaaagtctatgtgaatggataataaaccactatgtcttttaacctaacatgtgtataccacttcctggacagtgttctaagggctttacatgtttttacatcgtttaatacttcaacaacactgtgagctggatgttattatcacccttattttaaagaggaggaaactgaggcccagaatgtcaactctctcaaaagtgagttacagtaaatggaggagctgagatttgaattcaggccgtctggatccagaatctgt

SEQ ID NO: 772931 - DNA, 506 bp, Homo sapiens
aactgaggcaggagtggatgatgcactcagcgtcagatcagggactgagccaagactccaatcatgggtttgtttcttggccagaaggtctgacaaccaaggcgacctccaagataggtccacctacaaaatttggagygccccttgcaagactaaaatgcagagtctcttcttcaaaattaagaaatcaagatggtgccaggcgcgatggctcatgcctgtaatcccagcactttgggaggcctaggcgggtggatctcctgaggctggagtttgagaccagcctggccaacatggtgaaatcccgtcttcactaaaaatacaaaattagccaggcgtggtggcgcatgcctgtaattccagctactcgggaggctgacacaggagaatcgcttgaacctgggaggcggaggttgtggtgagccgagatcatgccattgcactccaatctaagcaacatgagcgcaactctgtctcaaaaaaaaaaaaaaaaaaaaatagaaatc

SEQ ID NO: 772932 - DNA, 574 bp, Homo sapiens
aatgaaataagaggacacaaacaaatggaaaaacattccatcctcatggataggaagaatcaatactgtgaaaatggccataatgcccaaagtaatttacagattcaacactgctcccatcaaactaccattgacattactcacagaattagaaaaaatagttttaaatttcatatggaatcaaagaagaccccaagacaatcctaagcaaacaaaacaaagctggaggcatcaaactacttgactttaaactatactacaaggatacagcaacmaaaacagcatggtacctgtaccaaaacagatatacagaccaatggaacagaatagagacctcagaaataacaccacacatctacaaccatctgatcttcaacaaacctgacaaaaacaagcaatggggaaaggacatcctattaagtaaatggtgctgggataactgcctagccaaatgcaaaaacagaaagtggaccacttccttataccttatagaaaaattatctcaagatagattaaagacttaaatgtaaaacccaaaaccataaaaatctcagaagaaaacctaggcaatacc

SEQ ID NO: 772933 - DNA, 638 bp, Homo sapiens
tcttcctcttcctacaaagatatatgtttttgagtgaacatcgcttacttataaaggctgaaatgaaaaaaatgtgtatatgttgccagcccaactatttactctgtgaaggtgtaaaatagcccacttaatattaggacagaactgttgatgtaaatctgaaagaaaaatgggagcatggctttcacagtaaagccttttgttagtgctgagggcttacacaaaggcacagttccccttttgcctgggctgtataatataggatgtaaattacagcagattccctgagcagggatgaaatttatggtgaggattcagaaggctacatttgagagtcatggatwtctaaatgtgcaggccaccatcagcatctgatatagctcaagcagtatttttgttttttcttttgtagcttacggtctgtgattttgtttatgcctcctgccaaatgtactattacaagagtagaacattacatgctcaatggcttaaaaggccaaggagggtggaacatgagcacgagtcccatgtagcacccagtgaaagacgttcagggcatggaacaagctcctctaacaggaagcgtgagacttcaccagcgagccgagctgtgctgctctgcgtttgctgcaggtgga

SEQ ID NO: 772934 - DNA, 459 bp, Homo sapiens
gaggtctgtatattcttgctggctgtcagccaggggtcactccaagctcctagaggccactctcacatttggagagtgtcaatcaaaatatgactgggcagcggctcacacctgttctcccggtactcatagaggcagaggcaggaggatcgcttgagmcaggaattccggacttgcttgggtggcatagggagactgtctctacaaaaggaaaaaaaaaaaaaaaagagcaaaatatggcagctgacttcctcaaggccagaaggaggatgtctattgctgcctcttgtctcctttaagggatcacccgattaggtcaagcccactcaggataatctcctttttattgactcaaagtgaactgatcagggaccttcactacatttgcaaagtccctttttgcctgttcacactgaaaccctgttgtcttcacaggagtatcccacactcaaggggaga

SEQ ID NO: 772935 - DNA, 646 bp, Homo sapiens
ctccgactcaaaaaaaaaaacaagattctagtgacataataaattctgccttatttccacccaagatcaaaagctctttacacttagttccacaggaatgtgggggcagcaggtgaccttagcggttgacgtgaatctctcaaaggctggccgcctcagaagagatcaagccttagatcttccttcccctgcatgcgactctgccgccaagtctcaggagggcatctgtactcacatttgcaaaaggtcagccgagcgtgatggcttgcacctatagacccagctactctggagactgaggctgggggtcacatgagaccaggagtttgagaccagcctaagccacacagtgcgacctgtctctaaaaaaaaaaaattgttttaaattagcaagccayggtggcatccatgcgcgtgtagtcccagctactcagaagactgaggcgggagtttgcttgagcccaggagttcaagactgtggtgagctaggatcaggcctctgcacaccagcctgggtgtcagagagagaccctatctctaaaaacaaacaaacaaacaacaacaaaaaaaacttgcaaaaagtcaggatgggcatggagagaaggcactggcaaggaggtggctccctacaagtttcttacatctt

SEQ ID NO: 772936 - DNA, 646 bp, Homo sapiens
ctccgactcaaaaaaaaaaacaagattctagtgacataataaattctgccttatttccacccaagatcaaaagctctttacacttagttccacaggaatgtgggggcagcaggtgaccttagcggttgacgtgaatctctcaaaggctggccgcctcagaagagatcaagccttagatcttccttcccctgcatgcgactctgccgccaagtctcaggagggcatctgtactcacatttgcaaaaggtcagccgagcgtgatggcttgcacctatagacccagctactctggagactgaggctgggggtcacatgagaccaggagtttgagaccagcctaagccacacagtgcgacctgtctctaaaaaaaaaaaattgttttaaattagcaagccatggtggcatccatgcgcgtgtagtcccagctactcagaagactgaggcgggagtttgcttgagcycaggagttcaagactgtggtgagctaggatcaggcctctgcacaccagcctgggtgtcagagagagaccctatctctaaaaacaaacaaacaaacaacaacaaaaaaaacttgcaaaaagtcaggatgggcatggagagaaggcactggcaaggaggtggctccctacaagtttcttacatctt

SEQ ID NO: 772937 - DNA, 613 bp, Homo sapiens
aaccaggccacctctttaatgatttgctgcttagaaatttcttctgccagataccttaaatcatctctctcaagttcaaatttccacagatctctagggcagggggaaaatggcaccagtctctttgctaaagtatagtgagtcacctttattccagtttccaacaagtttctcatccctttctgagacaacctgagcctggactttattgtccatatcactatcaccattttgatcaatgcaattcaacaagtctctaggaagttttaaactttcccacatcttcctgtcttcttctgagccctccaaactgtgtttcaacccttgcccgtcatacagttccaaagtcacttccacatttttgggtatctttacagcagtaccccactctctgcagtaccaagcactgtattagtctgtyctcagaatgcaataaagaaatacccaagactaggtaatttatagaggaaaaaatcttaatggactcacagttccacatggcatggggtgagcctcaggaaacttacaattgtgacagaaggtgaaggggaagcagggatgttcttcacatggtggcaggagagagaaaagtgaggagtaaaggggaaataac

SEQ ID NO: 772938 - DNA, 624 bp, Homo sapiens
atattaatgtatatcatatagacttatagatgtgtaatagacatttatacatattacacatatatgtatatatatttgcaagtatatatttttcaaatatatattagaaataatatgttatacgtcgtatataatatgtgcagtatatattatggataaagagtaccatttgcatattaattataaattaataggactaatatctcatatattgatttatgatggaccaatacgtatgaaatattagccctttatgtgtgatatatattataaatattttctcctggtttgttatttctcttttgtctttgcttataattttttgccatgcaaaggttttcgttgttttaatcttatgaagttgcatttagttcatctccattttgactcaaaatcaatattcttytctacaccaagtttataaagaaattaactcaggtttctgctattactttattactttcatggtttcatttttacatttagctccctgatctacttggagtttatttttgtgtttaatgtgaagtgtaaaccaaattttattctgttgatatagtaatcccatttcttcagaactgtttagaaaatgtttatatttccctagttatttaagatgccacc

SEQ ID NO: 772939 - DNA, 595 bp, Homo sapiens
ttaattttttttaagttaattcatttaggtcatatctgtaataagcaaaggtttttgaaccttataaaaagtattctcccttttcaaataataattatctgtagcatgtcagagtgattcttaagaggtagaaagggaatgaattagaacttagttttcaacatttgtgtttaacactttgcaggcatgtttattatcaatatatagtataccacaagcattttcagcatcaattatttgtgagtgaagtcaaaggtccatgatgttctgcattctgtaattttgctgaagcagtargttaaattacttgtagagagactggtgtgtggaggcaagtcacttaggtcatgcatatgacaccccagtatctcctccctatctctggctagcaatggggttgtgtgatgaggcttaataaatggtcccccaaatatatctgcaacccaatccctggaacttgggaaggttacttgatacagcaaagaggactttgaatgtgtgtgtgattaagaatcttgagatgtgggaaaatactccggattatctggtttagctcactgtaatcacaaggatccttataaaaaggaggcaggag

SEQ ID NO: 772940 - DNA, 594 bp, Homo sapiens
atactttactaggatggagtaaaagggaaaagattacccttcagaggaattaaatttactttaaaattaaaattaacattactttaattccataattatgagaacatttactattggcctccattgtggaagagagtgtggcaattcctcaaagrtctagaaccaggaatgccatttgacccagcaatcccattactgggtatatacccaaaggattataaatcattctactgtaaagacccatgcacacatatgtttattgcagcattgttcccaatagcaaagacttggaaccaacccaaatgtccatcaatgatagaccggattgagaaaatgtagcacatatacaccatggaatactatgcagccatgaaaaaggatgagttcatgtcctttgcagggacatggatgaagctggaaaccatcattctcagcaaactaacacgggaacagaaaaccaattgctccaggttctcactcataagtgagagttgaacaatgagaacacatgaacacggggaggggaacatcacacaccagggcctgtgggggaggttgggggctaggggagggatagcattaggagaaatacct

SEQ ID NO: 772941 - DNA, 594 bp, Homo sapiens
atactttactaggatggagtaaaagggaaaagattacccttcagaggaattaaatttactttaaaattaaaattaacattactttaattccataattatgagaacatttactattggcctccattgtggaagagagtgtggcaattcctcaaaggtctagaaccaggaatgccatttgacccagcaatcccattactgggtatatacccaaaggattataaatcattctactgtaaagacccatgcacacatatgtttattgcagcattgttcccaatagcaaagacttggaaccaacccaaatgtccatcaatgatagaccggattragaaaatgtagcacatatacaccatggaatactatgcagccatgaaaaaggatgagttcatgtcctttgcagggacatggatgaagctggaaaccatcattctcagcaaactaacacgggaacagaaaaccaattgctccaggttctcactcataagtgagagttgaacaatgagaacacatgaacacggggaggggaacatcacacaccagggcctgtgggggaggttgggggctaggggagggatagcattaggagaaatacct

SEQ ID NO: 772942 - DNA, 608 bp, Homo sapiens
aggggcagtccaaatctagagataatgtcccttattagcacttttgttacttctcgtgctttctctgttctggtggggaaagcctcaacacatcctgaaatggtgaagattagtgctaacatataccaatagccccctgctcgaggcagctcagtaaagtccatgactaggttttcacagggtgtggctcccatttcttgaattcccgggggctgagtgggcccttgccatgggttattctggacacagattagacattgttcacaaacagcttgagggatggtagtgagccgtggcatatagaaatgaygttccagtagtgtttctagtgccgttttttctatatgagttccttgatggaattgcttcacaaatctaggggccactgtttcagggatggctagcctcctattggagaatttccaccatcctcctttaatgtaacttccagtatctttggcaaaccaggccctttcatttggagaataatttgggacctctagaaggggaggctctgggaggagaggtaaagctatggcttcctcttcacaatgtagggtagccattgctacctctctgtccacttttctgtttcctttggcctctag

SEQ ID NO: 772943 - DNA, 577 bp, Homo sapiens
aggctgccggtgtgatttctgtgcttgccggggcttcgggctctggggtccacggtgacattccaggtgaagccaccaagagacagccacgcagcgtccacttcctcacctgctggctgtgtggtgtgcagaagcctccgtgagtgtgggcgtgtgcaccaraagtgtgcgtgtgcaggcatgtgtgtggcacgggggtgcctgtgtgtgcagcgccggtgtggtctgtggggtcgggcacgtgtgtgcccacgggggtgcctgtgtgtgcagtgccggtgtggtctgcggggtcgggcacgtgggtgcccacaggggtgcctgtgtgtgcggcgctggtgtggtctgccaggttgtacgtgagcagtgcttccctgtaaaccggcccagacctggctttaaggggcagcttcatctgccggacgccctgccctggccccttcagatgcgggaaagggcctgaggggcctggggtctccctccagagcagcgagggctcggggtaggcgggggaagctggggtctccctccagagcagcgtgggctcggggtgggtgagggaaggacacagcctgac

SEQ ID NO: 772944 - DNA, 575 bp, Homo sapiens
aactatttttgagtgataaatatttatttaagaaatgaaaattcatctaactgctgcatgagcttttcttttctgtaaattttcaaacattattctcaactggattgcttgcaaaaacatttcgtacttaatagtctgagatttttctctrattttagccaataattcattttgatgggcaaatcacagctctctaaaagagaaatgttgataggcctgaggtttctgaatggtgtttctgagttatacagttatcccttgttatcggtgggtactggttccaagactgccccccattgataccaaaatccatggatggtcaagtccctgatataaaatggcatagtatttacatataacctactcacatcctccaatatactttaaattgtccctagattgcttataacaggggtcttgaatccctgggctgcagacctatactggtccgtggcctgtaaagaggtgagtagtggacaagtgagagcattaccacttgagctctgcctcttgtcagatcagtggcattagattctcataggagtgggaactctattgtgaactgcacacgtgag

SEQ ID NO: 772945 - DNA, 527 bp, Homo sapiens
tcctggccagactgggtggctctcccctgtaatcccagcactttgggaggctgaggtgggcagattacttgaaatcaggtgtttgagaccagaacatggtgaaaccctgtttttactaaaaataaaaaaattagctgggcatggtggcacacccctgtaattccagctacttgggaggctgaagcaggggaattggttkagtcggttaggtggaagttgtagttaactgagatcaggcccctgaactccagcctttgtttcaaaaaaaaaaaaaaaaaaaaaaaagctgctgcttctttgtcaagggtctgttgcctacatttgcatgagtctatttctgggctctctattctgttccattgatctatgtgtctatagtttcctcaataccacgctgtttataaatcttaaaatttggtagtatgagtcttacaactttttcttttttttctttgtgtttttttttttttcattttgtttttgttcttactccttactattgtattggataatctaggccttttgcc

SEQ ID NO: 772946 - DNA, 640 bp, Homo sapiens
agctctatcagtattcattgagagatgtttagattcagccaggccaaaacaatgttattacacttcttaattttatttttattttaaaaagttcatcctacatatatataattatatagatatgtaattaatatatatttatgtatwatatatatatatatatatatatatatgactctctgcctttttgaatgtgtgcccacattccttttatcagttgatcttcataaaagacttgtcaagtagacaaggtcagtgagatgagcctcagtttcaggaatgagaagaaattataaagaagagcagggatatctgaaggctgcagggagcagcattaccaaaggaggaacacaggtaccttttactttagcacaatctaggtgagaaagagggaagtagaaggaggctgtacatgtgattatttcatcaattctgcctgctcccagagagccagccgaacagtggccttccctgggcttgctatgccaacagttgccccaaaacattctcaatcattgtgaaacacgacagaaaccaggtttcatccactcactgccagcaacacacacaaaaaaataaagtaaaaaataaacagaagacaatgctggatggtcaaaaaaagttaaatgctgccagcatt

SEQ ID NO: 772947 - DNA, 640 bp, Homo sapiens
agctctatcagtattcattgagagatgtttagattcagccaggccaaaacaatgttattacacttcttaattttatttttattttaaaaagttcatcctacatatatataattatatagatatgtaattaatatatatttatgtattatwtatatatatatatatatatatatgactctctgcctttttgaatgtgtgcccacattccttttatcagttgatcttcataaaagacttgtcaagtagacaaggtcagtgagatgagcctcagtttcaggaatgagaagaaattataaagaagagcagggatatctgaaggctgcagggagcagcattaccaaaggaggaacacaggtaccttttactttagcacaatctaggtgagaaagagggaagtagaaggaggctgtacatgtgattatttcatcaattctgcctgctcccagagagccagccgaacagtggccttccctgggcttgctatgccaacagttgccccaaaacattctcaatcattgtgaaacacgacagaaaccaggtttcatccactcactgccagcaacacacacaaaaaaataaagtaaaaaataaacagaagacaatgctggatggtcaaaaaaagttaaatgctgccagcatt

SEQ ID NO: 772948 - DNA, 657 bp, Homo sapiens
cctccgtaaggtcttccttttaatgaaaagcagccccaaaatcattttcttttctaataaagagcagcctgtaaaatcgaactgcagacatagacaagcaagctggaagcttgcacaggtgaatgctagcagttgtgccaatacaaatatactacctgggagtaagcatgttcaaaatggtggctcyatcttctccttttgccagccatgtgtacagtaaagagcagacaagatggcactggccaaatggaaaggccgtttgcgtaataagattagggtggggcaaccaggctttccatgccctatgtaaacatcacacctggttaaaccaatctgtgggccctacaaatcagacaccgcctcctcaaggctgcctataccatctgctgcgatctgcagcctttcccttttggatgcctctctctcacaagagagcgggagctgctctcctctctcctttctgctattaaaatttctgctccttaacccactccagtgtgtgtatgtccgtgtggttaatcttcttggtgcgagacgacgaaccctgggatttaccccagacaatgatgctgcttcattttcacaaccagggagcttctaagaggactctacagaattgaaagtgactcctgaaaaatggaactgcccagttggtgc

SEQ ID NO: 772949 - DNA, 621 bp, Homo sapiens
caaaatcattttcttttctaataaagagcagcctgtaaaatcgaactgcagacatagacaagcaagctggaagcttgcacaggtgaatgctagcagttgtgccaatacaaatatactacctgggagtaagcatgttcaaaatggtggctccatcttctccttttgccagccatgtgtacagtaaagagcagacaagatggcactggccaaatggaaaggccgtttgcgwaataagattagggtggggcaaccaggctttccatgccctatgtaaacatcacacctggttaaaccaatctgtgggccctacaaatcagacaccgcctcctcaaggctgcctataccatctgctgcgatctgcagcctttcccttttggatgcctctctctcacaagagagcgggagctgctctcctctctcctttctgctattaaaatttctgctccttaacccactccagtgtgtgtatgtccgtgtggttaatcttcttggtgcgagacgacgaaccctgggatttaccccagacaatgatgctgcttcattttcacaaccagggagcttctaagaggactctacagaattgaaagtgactcctgaaaaatggaactgcccagttggtgc

SEQ ID NO: 772950 - DNA, 630 bp, Homo sapiens
acccaaaatataaaataaatataaatgagtctatcctgatataaattagtaaaataaaaaaggaagggacaaatgtcttttatgaaaggattccgattaagatatgtagatactccctatgccggtttaatcatctctcctgtcttgagtctgggctgcatttaggacttagtgaccctcttacaaagtatacagtggggaaaggagaaaaactttacagtgaaaagacctgaaaaacactacatgaaacaagcaatcaaggttaacgtcgccagtggtggtaggtcacagtacttcataaaactccatgaccccaatctgaccatgagaaaaacatgagacaaacccaaattggggggcattcttctaaatatctgaccagtattyttcaaaactaccaagatcatgaaaataaagaaagtctcagacactgtcacagacccaaggtgactgagaagatgtgaggactaaatgcaaggtgaaatcctgggttggatcccagaacacaaaaaagacattaatggaaaaactggtgaaatccaaataaagtcagtagcatatttagtagtaatgtacccatttagtagtaatgcacccaaaaaattaaataaatgaggaattatgcacaat

SEQ ID NO: 772951 - DNA, 641 bp, Homo sapiens
agcagttcacattttcaagactattaattagatactcctcacataaacttgaagagtcagagttagtcaccctcagctaatagatgaggaaagtagaatatagaaagtcaggcgaattgccaaagatttgaggccttttagtagaagacaagattgaagaaggatgtagactctgaggattgtgcttaaagccgggtcagtgcttcccgccacaaatctttgtatttcagcctcctcctatcacacaacacacccagkaacagaaacaaagaaacaaaccactgccctaatgtttaaaatttcatatttaattttgttcttatgtataaatgtaagatttaagtgtcatccattcatttgcatttaaaaataaactttagttctgaagttaacttaaaattttagtttaaaatctgctgtctttattcatgtagctggtttgttaagtacaatgcaaaagataaacttaagattctaatttttaaaattgtttcccactttcttataattctacttcatggagggaagtttggggttgttctattttgatttaatttgcttagttttgttttgttttttaatagttggagagatagggaaaagcgtttgcctcgccactgggtctggcaggctcctgtctt

SEQ ID NO: 772952 - DNA, 612 bp, Homo sapiens
aactaaataccttttaaaaaaatatgttctttgagtttaatagcatttgaactatttaatagcttaaattaaattaaagttaatagagtttaattaaagttatagtcaaaggagaaatattctctcattaaaaagaaagtgttgttctggagtcatgaaygtttttctcgattctcaatgaagaaatcacttcttgctatgaggagtctcccagcattacagtcttgtcaaaggcccatgaattaactacattgtgtgagagttaagagtattccatttccacaggtaacatttgatattcaaagaaaaccccaatgttagtttacagaaattcttaacatgtcaggccaattaaaattctattactttctacatataaatatggaaatcaaaatttttacaccagcaaaaaatgatcgacataaagtgaaaatggagagtagctcctttggccaatgttgcgcttggggtcacccagagatgctgtttctaaattgaacaaataaggacttgcttaggacttgtttgtttctcattcagattgtgcaattatagacttattttttgcattgaatggaagcctaaaaagtagggtcaggagaagaattgatg

SEQ ID NO: 772953 - DNA, 612 bp, Homo sapiens
aactaaataccttttaaaaaaatatgttctttgagtttaatagcatttgaactatttaatagcttaaattaaattaaagttaatagagtttaattaaagttatagtcaaaggagaaatattctctcattaaaaagaaagtgttgttctggagtcatgaacgtttttctcgattctcaatgaagaaatcayttcttgctatgaggagtctcccagcattacagtcttgtcaaaggcccatgaattaactacattgtgtgagagttaagagtattccatttccacaggtaacatttgatattcaaagaaaaccccaatgttagtttacagaaattcttaacatgtcaggccaattaaaattctattactttctacatataaatatggaaatcaaaatttttacaccagcaaaaaatgatcgacataaagtgaaaatggagagtagctcctttggccaatgttgcgcttggggtcacccagagatgctgtttctaaattgaacaaataaggacttgcttaggacttgtttgtttctcattcagattgtgcaattatagacttattttttgcattgaatggaagcctaaaaagtagggtcaggagaagaattgatg

SEQ ID NO: 772954 - DNA, 332 bp, Homo sapiens
atactttttcctgtgtatttccttacaatgtagtactattcaaccatttaaaaaaatgagatcatcatttgcaacagcatggatggaactggagatcactaagtgaaataagccaaacacagaaagacaaacatcacatcagttayttgtgggatcagttctcagttatatgtgggatctatataaatcaaaacaattgaactcatggacataaagagtagaaagatggttaccagaggctgggaaaggtatttttaaattttaggttcctggggtacatgtgcaagtctgttacatgggaatgttgcataatggtgaggcttgggcttcta

SEQ ID NO: 772955 - DNA, 525 bp, Homo sapiens
tactatttcaattatttgacacatggaattttggaagaatagtaaactgtagcacatcttttatttgtgtcttagaaaatttttctggattctacaattgttccaaggtctaagaacttgtcagtccaaactgtaccaattactattartgtaagaagactctgtgactacattttggtcctttatatgatctcctgaattttatattgacctgctggtgaagaatattctgatacattgcaatattgacttactaataaattactacaaatataaaagagagaccaaactttgttcactttattgctataggaagtcaatttatagcatttcattaaagaaaaaaactccatgtgaatctttgttattgacacatagtcattcaataaaataggtgattcatatattaactatagaagatttaaacatttaaaatttaaaaatttgtctgacaaatttctgagaaagttgatatacctgaaaaaatactcataaaccagatgctttatccctagtattagagaa

SEQ ID NO: 772956 - DNA, 621 bp, Homo sapiens
gtttcttatgcagtcctagtgaacaaaagtatgaaatatacgggggacaaaggcattagagaaataattggccacaccacatatatcaatgtatggattgatatccacttggaggataggactatggtagaatgtcaaggggtactatctgtatctttattctgctcaacatttattgctatgaaaatattgaagcatattttcacatttgtatatgacataaggtcatatttaaagtattttaaaacgctggaatagtggggctgaattcaaagtgaaattcaaaaggaataaatactatgatcttacagtaaaaacttctgcatcaggagaggatttggaggagccaaactcagccatacaacatgtatttaatattttttaacagtgagtttcaaagaaaawtttaaaaactaatgtaatttaattgtgtgtaattgaaatttagtttccaaaaaagaaaaaagatgagaagaggtagccccagtctaacttaaatttatatcatataattccttttagttctgcatatcatacttctaaaaggttgtattcaaattgggacatattgaaaggacagtgaatgcagagttgtagaacagttgaaggcacttgaaataa

SEQ ID NO: 772957 - DNA, 633 bp, Homo sapiens
ccttcagaataattacaaacttctgtgttttaattacaatgacttttaggatgctgcagatttcttccaatcagttggcttttgtattttcttcctgtaccttttcagcacaagacttctaaactgtcttataccygagtgggagtgttccttaggcagaaaccctaacggatagagcctgtttccatggcgcgatggaggatcactgaagtaggctctactgaatattaggtgtaaatgctttcaggtagcccttcttggttgacttaaactataaagcagtatttctttcaagccatttggaggcaatttacaggcaaaaaaacaatgtggtctacataaaagccataactctgatttccatgtgtcatgtgcatgttgcacaactccacagattattcatagaaacaaattaggaaaaggaagcaactccgcaatatgttttgatgaaagaatcactgagcatctcttacttggctgatggttagtatctatgtttgtttataaaacctatgccaatgtaatgaaatggctcctatgatgttcaaggaaatagatgattgtattattacgatagttgtggcttttccataaataacttaaaggccagatttctctccccattaagaatca

SEQ ID NO: 772958 - DNA, 633 bp, Homo sapiens
ccttcagaataattacaaacttctgtgttttaattacaatgacttttaggatgctgcagatttcttccaatcagttggcttttgtattttcttcctgtaccttttcagcacaagacttctaaactgtcttatacctgagtgggagtgttccttaggcagaaaccctaacggatagagcctgtttccatggcgcgatggaggatcactgaartaggctctactgaatattaggtgtaaatgctttcaggtagcccttcttggttgacttaaactataaagcagtatttctttcaagccatttggaggcaatttacaggcaaaaaaacaatgtggtctacataaaagccataactctgatttccatgtgtcatgtgcatgttgcacaactccacagattattcatagaaacaaattaggaaaaggaagcaactccgcaatatgttttgatgaaagaatcactgagcatctcttacttggctgatggttagtatctatgtttgtttataaaacctatgccaatgtaatgaaatggctcctatgatgttcaaggaaatagatgattgtattattacgatagttgtggcttttccataaataacttaaaggccagatttctctccccattaagaatca

SEQ ID NO: 772959 - DNA, 633 bp, Homo sapiens
ccttcagaataattacaaacttctgtgttttaattacaatgacttttaggatgctgcagatttcttccaatcagttggcttttgtattttcttcctgtaccttttcagcacaagacttctaaactgtcttatacctgagtgggagtgttccttaggcagaaaccctaacggatagagcctgtttccatggcgcgatggaggatcactgaagtaggctctactgaatattaggtgtaaatgctttcaggtagcccttcttggttgacttaaactataaagcagtatttctttcaagccatttggaggcaatttacaggcaaaaaaacaatgtggtctacataaaagccataactctgatttccatgtgtcatgtgcatgttgcacaactccacagattattcatagaaacaaattaggaaaaggaagcaactccgcaatatgttttgatgaaagaatcactgagcatctcttacttggctgatggttagtrtctatgtttgtttataaaacctatgccaatgtaatgaaatggctcctatgatgttcaaggaaatagatgattgtattattacgatagttgtggcttttccataaataacttaaaggccagatttctctccccattaagaatca

SEQ ID NO: 772960 - DNA, 659 bp, Homo sapiens
ttattttcatattctaaggcacatgtgaagggtaacagcaacaaaatcttcttggttgagatgtaggtctaatgaaaatatttgattaaaccttgtcttcccgttaacatttctaaatgtagtaagtacagtagcattaaraaagctagatgtcaaatacacttttagatcagttgcatattgtaaaattgacttcagtagtcattttacttgaaaatattttcaaaatgtttttagtatctatttacttacatagaagtttctgcctttctaatctcaacctgagaagagatttgaggactaggaaataaacaaaatggcttctgcacaactgaagcttctggcttaaatcttcacagcaaaaaaccatacattgtcttcaggagagatccttagcttttggtcagaagccactttctcttacttagcacacaattattattaacaaataaacaaagtaagagatttatttcttaacatggaggcaattagaaacagcaaaggagtgaagactggataggaaaaaaggtttatttttgtctcccaccaactcaactcacatttcaactgccttctacaggtgacccaagtctccagcattgggatcaatcacctcatcatctggtatccagaacacttataaaaaacaaatttacatc

SEQ ID NO: 772961 - DNA, 542 bp, Homo sapiens
aacttgcataggagggcttgcctaagacatggcctcactgcatagataagacaggccacacagctgacttgcccagacatgtctgcaatggaaaattccatcccctgacacatgtgcagtaaggggaacaaagcaatatggagtaactcaaggtaagggcctgcatgcacactaggaggacagagtggagctatcagaaatttgtactttatgcaaattagatgcccagccctcattggtttcttaaaaaagcctctgtattcaactgtaaaatggcaactcttttctgggacccttctctgtggcagagagctttctctctttcttttgcttattaaactgctgctctaacctcacccttggcatgtcsccttcttgattttctcagctgtgagacaaagaacttcggaaaaatttagtttgtagtttaaaagagaatagcccttaccagaacaaaactgtctctataaatctaatgaaaggccaccaggttaaaaggatgaaaggggcctgaactctgctaagatgtaggtgtaattaaa

SEQ ID NO: 772962 - DNA, 458 bp, Homo sapiens
attagaaacataccctgggagggccgggttcggtggctcacgcctgtgatcccagcactttgggaggccgaggcaggcggatcacaaggttaggagatcgagaccatcctggctaacacggtgaaaccccgtctctactaaaaatatawaaaaaaaatagctgggcgtggtggcgggcgcccatagtcccagctgcttgggaggctgaggcaggagaatggcttgaacccaggaggcggagcttgcagtgagctgagattgcaccactatactccagcctgggcaacagagtgagactccgtctcaaaaaaaaaaaaaaaaaaaaaagtaccctgggagatgagttggttcaagcctccatcctggcaagggccagaatttcccagaatcccttctacatatatacagaaggaaccagaaaaaatcaacctaccacctttcccagtgtatcctcagaa

SEQ ID NO: 772963 - DNA, 608 bp, Homo sapiens
taccgcgctttggcgaaactgggttcgctgctgatttgcgaacctttgcctgactttctcaggccttgagagatctaagtaaatttgtgccccattgaaaggacctggagagagcgtatgaaggtaacaccccgtcaaactgcatgcggcctcagacctgctcctgtggagagctgttggtacctggagcctgaggagatattcagggaaaccagaagaggacaagagraaaaggggaagggacttgggagaacctggcaccagaggctttcctgggacttccaggactcaaagccataggggcccacccgctacattcctgtctttgcccctcttcctacagatctgcctcttctccaagaaactcaaccactagtgacaatgaccagcctcctgactactccttctccaagaggtaggtgaaggcctttcctaatcccagtgagaaagaattgttcaacatccccttccccagaccagtcctggaagcctcagcccaggtgggaagactcccacctctctctgcctgcctcacacaggaagggcctgggaggaagcaggaactagagtgtgccccttagtacggttttaatctgaagtcacatgga

SEQ ID NO: 772964 - DNA, 607 bp, Homo sapiens
agtgggagtcccaagatttatcatcatcccaagtccttttgatcaattcagcatcccttctctagacttactgagttttttaaagtcaacttcattaagatataatttgcatataataaaatgcatcaattttaagtgtctagtcatgaatgttgccaaatataacaaccatcacaatcaagaactagaacatttctatgacccagaaaatcccttgtgccctttagcatgaatcatcacacttagggtaccagacagccattgatctgctttcgctcactataaatgagtttgcctactctaagttatcccacaaatgaaataatatagtatatgcttttctatccagcctctttcatacaatgtttttgagatygaccctcactgtacatcagtagctctatccacttcattactgcatagtagtgttccattgtttgtgtgcatatgtgtaccattaacttatctattgacatcttcataaatgttgaattgtttccagttttgtggcattacaaataaagctaccctgtgtataaatctgggtgaatattagtatataaatctttgtgtggacatatgttttcattttctcgggtaaatatct

SEQ ID NO: 772965 - DNA, 607 bp, Homo sapiens
agtgggagtcccaagatttatcatcatcccaagtccttttgatcaattcagcatcccttctctagacttactgagttttttaaagtcaacttcattaagatataatttgcatataataaaatgcatcaattttaagtgtctagtcatgaatgttgccaaatataacaaccatcacaatcaagaactagaacatttctatgacccagaaaatcccttgtgccctttagcatgaatcatcacacttagggtaccagacagccattgatctgctttcgctcactataaatgagtttgcctactctaagttatcccacaaatgaaataatatagtatatgcttttctatccagcctctttcatacaatgtttttgagattgaccctcactgtacatcagtagctctatccayttcattactgcatagtagtgttccattgtttgtgtgcatatgtgtaccattaacttatctattgacatcttcataaatgttgaattgtttccagttttgtggcattacaaataaagctaccctgtgtataaatctgggtgaatattagtatataaatctttgtgtggacatatgttttcattttctcgggtaaatatct

SEQ ID NO: 772966 - DNA, 507 bp, Homo sapiens
atatttttcttcagcttatagaaaagccagatgctaatggtttaaaaaacagctggagttcgtaaagttaattctctccataacaacactagttcaggggataaataattttcaaatatcaacttgaagcattttattctttaagaaaaagcatatatagggcagggtgtggtggctcacgcctgttatcccagcactttgggaggccaaggcagacggatcacaaggtcaacagatcaaggccatcctggccaacatggtaaaatctcatctatactaaaaataaaaaaataactgggagtggtggtgcacgcctgtagtcacagctactcgggaggctgaggcagggaattgcttgaacccaygaggcagagcttgcaggagccaagtcaccactgcattccagcctggcgacagagcgagactctgtctccaaaaaaaaagaaaaagctattcatgattaagaaccaatcatcaagaaatttggttaaggtagtaatcataaaa

SEQ ID NO: 772967 - DNA, 541 bp, Homo sapiens
ggcttttaagccgctcccaattttgttggtaagggctcacgaccacatttcttgttgcagtctgtgaagaaaattgaaggatatttgccaccrtcccgttgtcataattatagcatatgactgttgaaagcaagaaagggcaattagggagaaaattccttcttagtctgcagagaagacaatgaaaatggcacatttagctgctgacactttgcactttgccagataaatcttttgagagttcctccgttgatttacacagagtcgaggtcaggtatttctgtgcccacatccagatttctgtgtctggagctctccagctcttaaggtgccccttctgtgctcctgattttttttttttttttttttttgatatggagtcttgctctgttgcccaggctggaatgcagtgacacgatctcagctcactgcaacctccgcctcctgggttcaagcgattgtcctgcctcagcctcctgattagctgggactacaggcgcctgccatcatgcccggctaacttttgtatttttagtagcgg

SEQ ID NO: 772968 - DNA, 631 bp, Homo sapiens
gaggtttcttacagcactgacttgagctattctagttgtaattcttttttgactgccttctagtgcagcacttcaggatactattcaggaaaaaaagtatctaacaacacattcgtagaatcatttaagtgcaaagtacctaagagagagtttagtacggtgatttttcaaagttgtccaaaatatttgtagatgcttgagagagagacatgagcaagagcaaaggtggatctctgctcacctttcaaatcagaacacttcgtccatcagtttctcagctcaccaggggaaaaaaaatgtggcaaaaaaaaaaaaaaggaagggagagagtggggagggagaagccactgacttataacttaattctttaattttgccagagattaaaacacttcccatcttgcaaggacagcaggagaaatgttagttcttctgcctcattcattcataaaggcttgttgctgactgatctcagccggccacgttgctcatwctatagagcaaagaccatgctgtatttaagtccaaaagcataccccacaacctatcaagaagtgacccaagacacctgggtgagcagaatttacctttttggtgtccaaataaaagatgacttttgtccatttcaagt

SEQ ID NO: 772969 - DNA, 577 bp, Homo sapiens
tgattagaatttctgttccatttcctggaaaggcaatttccagtgctttctgtgacacccacgccttctccacaagcccgcaccctttactctttcagcaggtggctctgcctttcatctcaatgacagccatccagaactttcagaatgaattcacttgttttggcagacccaaggtccagccccagtatgagcctggagaccctgacactcacaaggttgttaamagcttttctcataagaaaaaatgtgttcaccaacctcagatattgtcgttattctcaagtcagtcacacacaagtctgtgtgtgccatttgaagagataaatacatagacacacacacacacgcacacacacacaccccaaaacacagtgcagcattgagagagaatctgtaattgtttgcagttccagagggggagaccagtctttctaggcagaatgcttgcttgctctttcagtgctctcctagtgccttgagtgacatgacaaagctgtagttagatgtcactataaaccagccccaaattatacaggagtcatgattaactatgattgcaggcctaaggcaggta

SEQ ID NO: 772970 - DNA, 516 bp, Homo sapiens
ggagtttgctggaggtccactccagaccctgtttgcctgggtatcagcagtggtggctgcagaaaagcggatattggtgaacaggaaatgttgctgcctgaacgttcctctggaagttttgtctcagaggagtacctggccatatgaggtgtcagtctgcccctattggggggtgcctcccagttaggctactcaggggtcagggacccacttgaggaggcagtctgtccgttcacagatctccagctgtgtgctgggagaascactactctcttcaaagctgtcagacagggacatttaagtctgcagaggtttctgctgcattttgtttggctattccctgcccccagaggtggagtccacagaggcaggcacgcctccttgagctgcggtgggctccacccagtttgagcttcccagctgctttgtttatctactcaagcctcggcaatggcaggcgcccctcccccagcctcgctgccgccttgcagtttaatctcagactgctgtgctagc

SEQ ID NO: 772971 - DNA, 584 bp, Homo sapiens
aacattttcattaatcttagcgcagtgcttcctctatgagtctcttaatctacttttttaattggatgtcattaatttaacttttgagttgatttataatgtaatattccagaaggattatggagagaaaaatctacrcatataggtacattttaataacatttaaaataggcatgaacagaatataaagctgctctgaataatactggaggtttggagtgagggaggatctaccttgtgctgccctataggtgctttccttctttagctaagtaagtccatcaagacctctgcaccatgttgtgatgtccttcaagaccgaagtgcttgcctgtagataaatgctatccctttgttctcccaggaaagaactctttgacaagagacatatgtgcgtgacagattgttttctttctcttcatgggtattggaaaataaagggtcagaaatgtcagtggaaacataaacagccttaacagtattcaaggcaaggaactgctgggaataaggtttattgttcttaatatttaaatgctttatatataaactgtatcaaactgtcttgcgtccctgcaaaggccagg

SEQ ID NO: 772972 - DNA, 570 bp, Homo sapiens
  misc_feature 73: n = A,T,C or G
agagataggagcagcttgataagttaaaaatttttcttttttggctgggtgcagtggctcacgcctataatcncagcactttgggaggccgaggtgggtggatcatgaggttgagagatcgagaccatcctggccaatatggtgaaaccctgtctctactaaaaatataaaaattagctgggcgtggtggtgtgcgcctgtagtcccagctgctcaggagactgaggcaggagaatcacttgaacccaggagacagaggttgcagtgaactgagatcgcgccactgccctccagcctggtgacagagcaagattctgtctcaaagaaaaaaaaaatttttttttctkttttttggaaacctaacttttggaggttttctcctactaaatcttcctggattttattagagaggcagacatgcagcaaccttgactggctggcttcttccatctgctttgctggaggcgctagtggggtggccacgcgcaggctgctgcagggaggaggaggagccaggagcccaggtaatccatccctcaggtggatccagggaagctctaactggatttt

SEQ ID NO: 772973 - DNA, 634 bp, Homo sapiens
ctcgctctgctgcccaggagggagtgcagtggcacaatcttggcttactataacctctacctcccaggttcaagcgattctcctgcctcagcctcccaagtaactgggattataggtgcacgccaccacgcccggctaatgagacagggtcttgtttggttactcaggctggagtgcagtggcacaatcacagttcactgcagcctcaacctcccaggctcaagcaatcctcccacctcagcctcctgagtagctgggactacaaagtgtgcaccacatgccccagctaatttgtaattgtttgtagagatggggtcttgctatgtggcccaggctggtcttgaactcctggscttaaacaatcctcctgccttgacctcccataagtgctgggattataggtatgagcccccatatgaggtatcagccctaattttatttccaggcccagtctgttctaggtaacatctcagggtgcttccagcttaatttctccaattcatgctgactgggaggaagatgctcagagctaggggtggtggagactcactgagctctagctaagggacaagtaaagcctgatcaggacttctgtgttgtttccatggcaatggggggtaggccatgtgcacta

SEQ ID NO: 772974 - DNA, 660 bp, Homo sapiens
agggaggggctatatttatgatgatcatgatgataacattataaagatggccaacttgtatgtaacactggctttacaatgtacactgtgtccctgttctcacaacaacgtgaaatatagtatttctctctccatttayggacaaagaaataggactagaagttgagtaactatccaagctgttaaataatggtatgaagatttgaacctagacctatctgacttcaacacatattctttcactgtgttacatccctctttactcagaatgtgattctgtgcattttccagaggaagacatgatatcctgatgggttaacttaggaaggatttgtcaatagtgtttgtgaactactacagccatgtttatactttatattttaatgaaaatattaacgtatgtctattaaaaatatttctgtaactatagaatttcattcttaataataaaacataactccagcaagttgtatgacacttttggcatcttgtgccctgcatacttcctcttaatcaataaataaattttccatattggggagtggtcagaatgacttgcgaagttcaaggtgttaggaactgtaagtcaactgttgtcatcacactacaaattatattatttgattagagaggatatcaaataaataatctgaaaattat

SEQ ID NO: 772975 - DNA, 660 bp, Homo sapiens
agggaggggctatatttatgatgatcatgatgataacattataaagatggccaacttgtatgtaacactggctttacaatgtacactgtgtccctgttctcacaacaacgtgaaatatagtatttctctctccatttacggacaaagaaataggactagaagttgagtaactatccaagctgttaaataatggtatgaagatttgaacctagacctatctgacttcaacacatattctttcactgtgttacatccctctttactcagaatgtgattctgtgcattttccagaggaagacatgatatcctgmtgggttaacttaggaaggatttgtcaatagtgtttgtgaactactacagccatgtttatactttatattttaatgaaaatattaacgtatgtctattaaaaatatttctgtaactatagaatttcattcttaataataaaacataactccagcaagttgtatgacacttttggcatcttgtgccctgcatacttcctcttaatcaataaataaattttccatattggggagtggtcagaatgacttgcgaagttcaaggtgttaggaactgtaagtcaactgttgtcatcacactacaaattatattatttgattagagaggatatcaaataaataatctgaaaattat

SEQ ID NO: 772976 - DNA, 613 bp, Homo sapiens
atgtttagacttgttagctgatgtaaattatcacattttttcctaacgactacactgacatttatttagcattggcttcagcttttaaaatttatataatcatatatgctaacaactcacaaagttttaaaacctcttgtacaaatttcaaatcaggatacattaaacataacataaatattatttttagaattataacaccattgcaaatatgctcaagtgaaaaactggctgggaatttgctttcatgtattttgaaaatctcaagatwtatttttagaaactataaaaagcaaggggaaaattattgccagacacaaaaatagagaaagacaaaattactacttagaaaagatgccattgattgtcatatttacaagttcaaaactgggatctacacctaaatatattctaagttcaaaaatattacaatcaaatcttcctgctctttaacataagtgtgagcattttctagcatctgcttgtgtgttgttacaggggtttcatgtgcatttatatatggtcaccaaatctaacccttaatgtacagagaaagatatttgcctttataaccttttaaatcttttgagcaattcattgtctgaacaacatg

SEQ ID NO: 772977 - DNA, 619 bp, Homo sapiens
tgcttttaacagccgaaacacatacagataacacagccaaactaacagtatgatcatcttcccttccctgacccagctctcttgaagacactgtgaggcattttcagtcagtttatattgtaggaaataactttttttttttttttggcaggctgacaggccragaccagatcttccagcaactggtgtctttagttcctggaaggttttgaaaatgttagactatctgtgcattgtgcattgcctttctcacttgtcagtaaagattgcaatgtattatcaccaccactaatttaattttctgaccgagaagcatataccttaaaaaatgagaaaagaaaaagaaatcttaatgatagcttcttgaacactttaggcattactgtaaattaggttttgtgctagaacagtctgtttggtgccaggaacaattcaaaaggcttacaatacaaaaaaggtaaggttttaacacaatgtagtctagacagaaattgtgcgacaatgcagtaaattcattattgtaaaatttaaaaaaattaaataaataatgcaaaattgtttttatttacctcttggtgctagatcctgccccctaaactagggtattttttactgacat

SEQ ID NO: 772978 - DNA, 561 bp, Homo sapiens
tacaacaagtagacaaaaaccagaatggatagaaaggacctaaatggcattaaaaaccacttgacataaataaaatttataaaacattcacctgagaaaagcagaatatacatttcttttacatgtatatgaaacattcaccaagatataccatattttaggctacaaaataagtttcaatatatttaagagggctgaaattaaacagagtatgttctctgactacaattaaattagatgagaaatatcagaaaaatatatgaaaaatgctaagtatttgtataaagcaaaacaaaatatcacttctatatatgtatggtcagaaataagccataacagaaatttaaaaatatttcgaattaagcaaatatatatatrtatatttaagatataccgaaatgtgtaggatgcaggtaacactgccattaggaagaacaaatatagctttaaaaagcttttgtgtagaaatgaaacaagttgcaaaatcaattatctgagctttcattttaaacatataaattagaaaataaattcaatgtaagcagaagacaggaaataata

SEQ ID NO: 772979 - DNA, 563 bp, Homo sapiens
ctaaacatttcaattaaaagatagtgatggttagattggatttaatagaagacccagttataagataagctgtgtacaagaaatctggccgggcrtggtggctcatgcctgtaatcccagcactttggatgccgaggcgggtgaatcacctgaggccaggagttcgagaccagcctggccaacatggtgaaaccccatctctactaaaaatacaaaaattagccaggcctggtggcgggcatctgtaatcccagctactcaggaggctgaggcaggagaatcgcttgaaccccagagatggaggttgccatgagccgagatggcaccactgcactccagcctgggtgacaagagcaagactccatctcaaaagaaaaaaaaaaagaaatctactttaagtataacaacatatataagttaaaactaagaggataaatgtcatgcaaacagtaggcataaaaagctgcaaggctatattaacatcagaaaaaaatgacttaaagacaaaaagcattatcagagataaagaggaacattttataataatggacagaaaattcttc

SEQ ID NO: 772980 - DNA, 563 bp, Homo sapiens
ctaaacatttcaattaaaagatagtgatggttagattggatttaatagaagacccagttataagataagctgtgtacaagaaatctggccgggcgtggtggctcatgcctgtaatcccagcactttggatgccgaggcgggtgaatcacctgaggccaggagttcgagaccagcctggccaacatggtgaaaccccatctctactaaaaatacaaaaattagccaggcctggtggcgggcatctgtaatcccagctactcaggaggctgaggcaggagaatygcttgaaccccagagatggaggttgccatgagccgagatggcaccactgcactccagcctgggtgacaagagcaagactccatctcaaaagaaaaaaaaaaagaaatctactttaagtataacaacatatataagttaaaactaagaggataaatgtcatgcaaacagtaggcataaaaagctgcaaggctatattaacatcagaaaaaaatgacttaaagacaaaaagcattatcagagataaagaggaacattttataataatggacagaaaattcttc

SEQ ID NO: 772981 - DNA, 632 bp, Homo sapiens
tactgggcactcattctattccttatcatgttgtgtttgaattcagttattctttcttgtgctctttgacattgtgctgggattttggccttccccatatatcactttgaattttagcaaatacaatgccttatattttaaaaattgctttwaagaaccatatttagacctaagtagatagagttctctttaaaaaaaaagaaaaaaaatacccttgggtcattcagcctagcagaaagagaaaaacagttatacctgttaacttgttttcattcttgtactagcaagaaagaatgagagtaagattggtgtcccttccaactttcttccctagagatgattttctggggggccctactgaagaactgaaaaagtctgaaagctgaaccagaagtgatgcaaaattagccttgaataagtcttatacttaagcccacctattattgaaaatatgaaacttaaagcaaaatattaaaatacaaattaatttcaaaatttcaaattaattgtattcagttccttagtctaaaaccaacataaaaccataattacatattaatgaggtgaatggattttaaactacaacaaagaatattatatttacaagcagataaacctatttgagatgaagc

SEQ ID NO: 772982 - DNA, 632 bp, Homo sapiens
tactgggcactcattctattccttatcatgttgtgtttgaattcagttattctttcttgtgctctttgacattgtgctgggattttggccttccccatatatcactttgaattttagcaaatacaatgccttatattttaaaaattgcttttaagaaccatatttagacctaagtagatagagttctctttaaaaaaaaagaaaaaaaatacccttgggtcattcagcctagcagaaagagaaaaacagttatacctgttaacttgttttcattcttgtactagcaagaaagaatgagagtaagattggtgtcccttccaactttcttccctagagatgattttctggggggccctaytgaagaactgaaaaagtctgaaagctgaaccagaagtgatgcaaaattagccttgaataagtcttatacttaagcccacctattattgaaaatatgaaacttaaagcaaaatattaaaatacaaattaatttcaaaatttcaaattaattgtattcagttccttagtctaaaaccaacataaaaccataattacatattaatgaggtgaatggattttaaactacaacaaagaatattatatttacaagcagataaacctatttgagatgaagc

SEQ ID NO: 772983 - DNA, 587 bp, Homo sapiens
gcatttggccctggagctgctactgaacgtacattgcagtggtggttcaagaagttttgcaaaggagacagagccctgaagatgaggagtttggtggcaggccatcggaagttgacaacgaccaattgagaccagtcatcaaagctgatctcttacaactacacaagaagaactcaaggtcgaccattctaggtcatttggcatttgaagcaaattggaaaggagaaaagsctcaataagtgagtgcctcatgaactgagcgaaaataaaaaaaaaaaatcatcagtttgaagtgtcatctcctcttattctatgcaacaacaaaccacttcttgatcggattgtgacgtatgagaaaaagtggattttatacttcaatgaccagctcagtggttaggcagagaagaagctccaaagcacttcccaaagtcaaacttgcaccaaaaaaaaggtcatggtcacagtttggtggtctgctgctggtctgacacactacggctttctgactcacggtgaaaccattacatctgagaaatacgctcagagaatcgatgagatgcactgaaaactgcaatgcctgcagctgg

SEQ ID NO: 772984 - DNA, 644 bp, Homo sapiens
ccaaagcacttcccaaagtcaaacttgcaccaaaaaaaaggtcatggtcacagtttggtggtctgctgctggtctgacacactacggctttctgactcacggtgaaaccattacatctgagaaatacgctcagagaatcgatgagatgcactgaaaactgcaatgcctgcagctggcattggtcaacagaaagggcccaattcttctccacgacaatgctcgtggagcacacattccacattccacgacacattccacaaccaacacctcaaaaattgaacaaattgggctaccaagttttgccttatccaccatattcaccggacctctygccaaccagctaccacttcttcaagcatctcgacaactttttgcagggaaaacacttccataaccagcaggatgcagaaaatgcttttcaagagttcatcaaatcccgaagccgggatttttacaccacagggataaacaaacttatttatcattggcaaaaatgtgttgattctaatggttcctgttttgattaataaagatgtgtttgagcctagttacaatgatttaacattcatggtctgaaagtgcaatcacttttgcacggacctaatataaaattagaggaaggaaatcaagtctctaaaatatta

SEQ ID NO: 772985 - DNA, 644 bp, Homo sapiens
ccaaagcacttcccaaagtcaaacttgcaccaaaaaaaaggtcatggtcacagtttggtggtctgctgctggtctgacacactacggctttctgactcacggtgaaaccattacatctgagaaatacgctcagagaatcgatgagatgcactgaaaactgcaatgcctgcagctggcattggtcaacagaaagggcccaattcttctccacgacaatgctcgtggagcacacattccacattccacgacacattccacaaccaacacctcaaaaattgaacaaattgggctaccaagttttgccttatccaccatattcaccggacctcttgccaaccagctaccacttcttcaagcatctcgacaactttttgcagggaaaacacttccataaccagcaggatgcagaaaatgcttttcaagagttcatcaaatyccgaagccgggatttttacaccacagggataaacaaacttatttatcattggcaaaaatgtgttgattctaatggttcctgttttgattaataaagatgtgtttgagcctagttacaatgatttaacattcatggtctgaaagtgcaatcacttttgcacggacctaatataaaattagaggaaggaaatcaagtctctaaaatatta

SEQ ID NO: 772986 - DNA, 592 bp, Homo sapiens
ataaatcaacccatttgttgtttacctggccattctctgagcccaaagagggctcagggaccaactagtggtttttgaactgctcttaggagtcttttgttctatgtttgtgtcttaaggaagagctgatttccaactagcatgctacagattgacctaggtgtacccaattcatcattccctcagctttgaagtgaccttagaccccccgccaagtctaagctaaacccccaagtcattcactttcacccagtcctgccatcagcccatccatctgcctaggtgagctacacaaacattatcagttyctatgtgtgccggaagtgaaaagagtgccttaaccttggctcagtttgaagtgggagactgtgggtgagtagaatggtttgggactgaagtcatcctcctttctttgcacctgctgccctatcccacctgcaacgtgaggatcagagcagctataaacttatcagttttaacaagtgaagattctggttaaattttacttcttagattttttttttcatgcaaaggactctgttcctgaaaagataattgcaaaatattatttaaagggcctcattttactaaa

SEQ ID NO: 772987 - DNA, 607 bp, Homo sapiens
atttctgggctaccagtttaaacagagttgagctcagcaaaatgacaagcagcttataattggaccaatacccacaaatgatctttcttgaaggatgtttttaaaaaaactgtattatttctgattacttctggcaaagtcctttgcttttctccccctactaatgagtgatcaaaaacagcaacatgactatctttgtcaatcagtgtattttattgttcttttcccaatgatttttaggtacatgttatgggtatgtatctggagacactgaaatatccatcttartttttggaataatgaaaaggctgtagaaatagatttagattcttgtcaaaattattttagaagacattccacagtcataaaagaactctattgatccttggtacttaatccagtctgctatccctccactacttcctttctaatataatctagcaattataaactataattaccaatcttctacttagtcatgaggaccacatcaaatgagaatcaagttaatacctgagtccctagacaagactttttcaaaatttacatgctggtgagtcgcttgcatctgaatcacctgggtttgtcccatttcttattcatcaaa

SEQ ID NO: 772988 - DNA, 607 bp, Homo sapiens
atttctgggctaccagtttaaacagagttgagctcagcaaaatgacaagcagcttataattggaccaatacccacaaatgatctttcttgaaggatgtttttaaaaaaactgtattatttctgattacttctggcaaagtcctttgcttttctccccctactaatgagtgatcaaaaacagcaacatgactatctttgtcaatcagtgtattttattgttcttttcccaatgatttttaggtacatgttatgggtatgtatctggagacactgaaatatccatcttaatttttggaataatgaaaaggctgkagaaatagatttagattcttgtcaaaattattttagaagacattccacagtcataaaagaactctattgatccttggtacttaatccagtctgctatccctccactacttcctttctaatataatctagcaattataaactataattaccaatcttctacttagtcatgaggaccacatcaaatgagaatcaagttaatacctgagtccctagacaagactttttcaaaatttacatgctggtgagtcgcttgcatctgaatcacctgggtttgtcccatttcttattcatcaaa

SEQ ID NO: 772989 - DNA, 631 bp, Homo sapiens; identical to SEQ ID NO: 761681

SEQ ID NO: 772990 - DNA, 606 bp, Homo sapiens
aattaataataatttgtaaagactttgaaagcagtaaatctctgattttattgtgttttgcagtttacaaaactgttattcatttgtgaaattgtaatctactgattcatagcattaacttgaatttacctttcaagggagggttaaattatataaaatcatagctatttcctttgaaatttaagactagattactgccaaatcatgagtttagagttagaataacaaaatttgtattcacagtttcttgaattatgttcccttatgctctctgtacttacggctactgcctgagaaatatgggacaaatttcaagatttttttcattagtattaaaatatttatagaagaatttacctgagtttctatcttctatgatactactcttgggaactattctgcaagctctgctcatataagctatccttcagcaagtttccatttcagcattgcctawtgcacccacattgttcctgctgataatgccttttttgtttgttttttaactgaggcaatatgaaagatccaaaagaaaatgtacaaatattattgctattatttggggatagaaagtacaagatagccacatgttataggtttacccag

SEQ ID NO: 772991 - DNA, 633 bp, Homo sapiens
tctgagaaatatgggattacataaagagatataatctatgacaaattggtgcccctgaaagagatgcggagagtataaacagcatggaaaacatatttcagtacatcatccaggagaacgttcccaatctagctaaagaggccaacattcaaattcaggaagtgcagaaaatcccagtaagatacttcacaaggtcatccccaaggcacataatcatcagattctctaaggtcaaaattaaagaaaaaatgataaaggcagctagaaagaaaggtcaagtcacatacaaaaggaagcccatcaggctaacagcagwcctctcagaagaaaccctacaagccagaagagtttaggggccaatatccaacattcttattaaagagaaattccaacccacaatttcttatctagccaaactaagcttcataagtgaaggagaaataagatccttttcaaacaagcaaatgctgaggaaatttgttttcaccagacttgcttacaagtactcctgaaggagatctgcaaagagacttagactcccataaaataatattgggagaccttgacacccctctgacattagtagatagatttttgaggcagaaaactagcaaacatattcaggacctgaac

SEQ ID NO: 772992 - DNA, 612 bp, Homo sapiens
aatgcaagttcttcaccgctaactctactatcagaggagctggtgcctttagaggtagtttgctttcccatagacactggtgtaaacactgcccatgtactgtctcaagtaaccttcctgacagtctttgagggaagcactgttagtttgctcgttttacagatggggaaactgagcgccagagaagctcagtgggccaagggtacacagcagagactgcctcacgcagtgggaagtgtgtggaatagagctggagggctgggctcttatcccaaccctgctggtgggcatctgcataccgtgggttcagtcatgtaaacacctcatctcctcatcagccaagtggacatgataatggacttttccggggttggcaggaggtgtccctggaggagtacgtaagaaagcaccgcatcagtgtaacccatgygatacagggtcccggatgacaaactctgtaggggctgaggaaagatgcttgaatgccaagactctcttcccgtttgctcccaggttttcactggtgcctacctagcagctattgacttagtgaactttatgttcattctcttcccagtctgtggatccaaattcaagtctaattcaggtgag

SEQ ID NO: 772993 - DNA, 667 bp, Homo sapiens
agtcaccaacactcttatcagaaatatcctggccctagttctctcttgtccctataaattgtgcagcctccagcatctctctctgctgtcctcactttctgtcactgggtacagagaagaggtagctctgagacccaagagtggacataaaggacattcaggataaaagggactcccatttcaaagtgcagtttgctctcccccaaatatgttagcaaaaaaattagacccatcttgcacctcaaggattagttaactttcaaaggggctacataagtacttcgcattccttttgtcaacacagctttaatctttcactttgtagaacagaggtcccgctgccttctcaaccctaggtctttatcacaatgtgcttttccattaactcggggaaattatgctcacatgttcctgcctaattcttgggttcctacagtggatgggaaggtaggaaatgggagaggctttgaagagaaaggwttttatgtttgcagcagccagggttcaactacagaaacagagcaagtaggatatgtatgctgatatatgaagaggttccatgcaaggaattggtttatgcaatggtgggggatggctaggtaagtctgaaagccccagggcagtccatcaggaaggacatgcaagttctcaggtggaatttcttttt

SEQ ID NO: 772994 - DNA, 563 bp, Homo sapiens
aggtgcttaggttaacacgaggctgttaaggccaggtgtggtggctcacgcctataatcacagcactttgagaggccaaggcaggtggatggcttgagctcataaattcgagaccagtctgagcaacatgagaaaccccggctctacgaaaaatacaaaaattagctgggtgtggtggtgcaggaggctgaggtgggaggatggcttgagcctggggggcggagtttgcastgaaccgagatggtgtcactgcattccagcctgggcgacagaaccagagcttgtctttaaaaaaaaaaaaaaatggggccgggcacagtggctcatgcctgtaatcccagcactttcggaggcagagactggtggattggtcaggcttgaggccaggaattcgagaccagcctgaccaacgtggcgaaaatccatctctactaaaaaatacaaaaatttagtcgtggtgcacacctgtaaattccagctactcaggaggctgaggcacaagaatcgcttgaacccaggaggcagaggttgcaatttttaataaaattttatttttcttggtc

SEQ ID NO: 772995 - DNA, 583 bp, Homo sapiens
tatcaggtgagcacactggtgtggaagggctgggatgggtggctgggctgagactggactttcctgacctctctctagctggggtttttaatgtcattcaatgatgtgtatctgaggtattcagggagagggatcgggacgcacaaccaagccaaaatataatagattcaaaggcctggacgtcctaaggcccttaagactgaattttttttaaatgttttccactcagctgggtacagtggctcacgcctgtaatgccagcactttggtaggctaaggtgggcagatcacctgaggtcgggagtttgaaaccagcctgaccaacatggagaaaccccatctctactaaaaatacaaaattagccmggcgtggtggcgcatgcctgtaatcccagctacttgggaggctgaggcaggagaatcgcttgaacccgggaggtggaggttgcggtgagctgagattgcaccattgcactccagcctgggtgacaagagtgaaactccgtctcaaaaaaaaaaaaaaaatatatatatatatacacacacacacacacacacacacacacacacatattttccactc

SEQ ID NO: 772996 - DNA, 566 bp, Homo sapiens
ttccttctttttctctcagagctctttagtaaagtgtagggtgagatacagcatttgtgagatctgattatttgttttgcagctcctttagaaataatgggccagatacagtggctcatgcctgtaatgtcagcacttcagaggctgaggcgggtggatcacctgaggtcaggagtttgagagtagcctggccagcatggtggaaccctgtctctactaaaaatacaaaaattggccaggcgtggtggtggacacctgtattcccagctacttgggaggctgaggttggagaagctcttgaacccaggaggcacagattgcagtgagtggagattgcaccattgcactccagcctgggmgacaagagtgaaactccatctcaaaaaaaaaaaaaaaaaaaaaaaaagaaagaaataatgaagcccacacaattttctaatgtcttctggaacctatctagttttacatatcctcacttgtcacggaaataatggtatgaaatattttaccttgggtacaatatcaccaagaaaaatgaagagccattatgatctgaccactttgag

SEQ ID NO: 772997 - DNA, 622 bp, Homo sapiens
tatctatatattcttttattaaaaataacaataactgtatctttttatatctgccaattattccacatgaatgtaaatattatactgacaatcttaaaatagatcactttttgctgaataaatttcatctattttcctaaatttagcagatcttattcttatgcaaaataatgctctgcacatatctattccttcattacttaattcaatatcagagaaatggtattttggtgatttaaaaagttgtatgtttttaaagagtatattctaatatactaagtcaatggttttttgctaacaggtttcttgctaatgctttttaaatctgtacttaaaggcaaacaataaattaatcagattaaactctcttccttctgccttttggaaagttgtgtcctttggaaggatgtagattgccataatcatccatcaaggaactacatataccagaatagagcaatggtctcaaacctaaactttctrtagatagaccagacacaacaatttcacttctggtggtagggcatacatgtgtttttaaaatctaatatatctttgaaatattgtcatttatttgcctacttgctattaattaaataacaaacatttattgcatatctac

SEQ ID NO: 772998 - DNA, 641 bp, Homo sapiens
cacttgtcccacagtttggtgaggagattttcccttcctagttttgaagaggattttgtagccaaatattcctttagttatctctgaactacttccaattatcattttccctaaatcttcccatttatgtcagtatttatattataatagctcaaacagacttcagaatagaatgtttaaatagagtttaaagtcttggattactccctatagtctataaaatgaaatcagatttctttggtattttacccaagtgtgctagcctaacctggctatgcaaatatatgcaattctctgaaccgtccttccttttcatgccaccaggccattgataacacacatctttagttaaaatgyttttgcctcccaatattcccctggctcatttcttctgttcttcaggacttagttcaggtattttattccagttcacattttaaaaatagtaagttaggtgccccttcctttttctgtgcaaatatagcactgcattttatgatagctaactttatcttgttctcacaactgtcttttatcttggtattctcagataaatagatactcaaacaatgtccaatatcacaaatataattagatattaaaacctgagttttttcacctttagtctagtttacttttta

SEQ ID NO: 772999 - DNA, 640 bp, Homo sapiens
gaaagacagctattagtatgcatcttaactaaccagtgataaattgttaaagtaatggaaaacaaatacatacacggcaggctttataaaaactgatttaaaatgattaaaaacaggaacatgtaattactaatgacaactttaatagattctgaggatacaaataggcagaggggttatgcacctaggtattgatgtcaacatggttttaatgactgtttaaaactgaractgtcatacttcaaatcaaaattccttcataaatgatacctttctggaaccaaaactatctatatgtgctgagggcagcattgtttttctcacataccaatttcctgcaactcctagctcagctcaaattcttagtatactgtgggaataatttcaaaatttggtcattaaacaaatctataacaagagatatgtcattcttattcttgataacaaacagatgttcagagcagcttgtgtccaattatgatacgaatgcttaaaatctgcgttaatatacaatctccactcttcgtaatcagaggcaaagatgagtgtgctttttcagagaatttattttaatgatgctttaatgggtagtacaagctacaatgaataaagtcagcactgacaggtggcacaaaatcca

SEQ ID NO: 773000 - DNA, 640 bp, Homo sapiens
gaaagacagctattagtatgcatcttaactaaccagtgataaattgttaaagtaatggaaaacaaatacatacacggcaggctttataaaaactgatttaaaatgattaaaaacaggaacatgtaattactaatgacaactttaatagattctgaggatacaaataggcagaggggttatgcacctaggtattgatgtcaacatggttttaatgactgtttaaaactgagactgtcatacttcaaatcaaaattccttcataaatgatacctttctggaaccaaaactatctatatgtgctgagggcagcattgtttttctcacataccaatttcctgcaactcctagctcagctcaaattcttagtatactgtgggaataatttcaaaatttggtcattaaacaaatctataacaagagatatgtcattcttattcttgataacaaacagatgttcaragcagcttgtgtccaattatgatacgaatgcttaaaatctgcgttaatatacaatctccactcttcgtaatcagaggcaaagatgagtgtgctttttcagagaatttattttaatgatgctttaatgggtagtacaagctacaatgaataaagtcagcactgacaggtggcacaaaatcca

SEQ ID NO: 773001 - DNA, 612 bp, Homo sapiens
agagaatgacaaaggttactactgaagtaaacaatgccttcaccagtttttccaccttctggaggctttatagagaagaattaagcaaaataattttttaaggttcatttgagttaaaaattactctgaaatagtgtcaaataaagggtagtgctacctatagggtaaaagaaaatattaattgtaataatactaagaaagacttggagattgtgaacttgggagaatcatgataatatttccstaattctaaatgtaaagcaaactgtaatgttatatacatatgtcctatttctggatcaaagtcacatacaaaaataattgataacctaatgtttaaggcaaagtaaatttaatttttttaggtttttaatgccaatttttgaggtttgtgaaggtaaggagattcccagccacccaccctgccacatacatccttgtttgtaatgcacaattaatgatggaaatctatgtcaaaaattgtggtgtgcttggctctggcacctctattacaacacttgctacaatcatctggttatttattaatctccttcaccctcttagaaacttgtctgcttttcacacttatttgtttatttcatgtgttcccat

SEQ ID NO: 773002 - DNA, 494 bp, Homo sapiens
ggggtttcactatattggccaggctgatctcgaactcctgcccttgtgatccacccacctcggcctctcaaagtgctgggattacaggtgctagccaccacacccggcctcttctcgatagatcttatttggctgacaacgaaagctgttgtgctggtagcatcatccctttgcatgcaaaagataaactgaaatctraagtagccatatccttccggccaggtttttcaagtggttactctgttctgatcattgtcatgacaggaatagtgaaaataacaataaatcatttttctttaacgatccatttactgtatgctgggcactgcacaaaatggtttacatggtttatcttgtagcgttccatttaagtctgctaagagtagatgctatcattctctccattttacagataagaaaattgaggcttagagaaattgagtaatttttgccaatcctgagacttgaatctccgctctgtcttctgcatacac

SEQ ID NO: 773003 - DNA, 587 bp, Homo sapiens
tatgtctagagttctgctttagaaatcataatgtggacatcattgatttctctgatgctggaagctgctgctgcttcttcatctttatcttctcctccctgtgtattgagagcagggacctccttgtgctgttttgggctctccttgttcacccagattggctgcatcagcaccttcttaaaatattagtgttgctgagataggagcttttggtagatggataaactgggatttgtaaatattttgcttagtttttttcccagagttttgcagaagagaataaggtgttggtttgttataaggtggtcctttataaagtttagacctattttaataaggctgacttgggttgaagataactagagccatgacttycatcttgatggacaatgagtactcactctacttttttattttatatttttattttagttcatttcatttaagacagcgtctgttacccaggctggagtgcagtgacatgatctcagctcactgcaacctacaccttctgggttcaagtgattctgatgtctcagcctccccagtagctgggattacaggcatgtgccaccacaccggctaat

SEQ ID NO: 773004 - DNA, 587 bp, Homo sapiens
tatgtctagagttctgctttagaaatcataatgtggacatcattgatttctctgatgctggaagctgctgctgcttcttcatctttatcttctcctccctgtgtattgagagcagggacctccttgtgctgttttgggctctccttgttcacccagattggctgcatcagcaccttcttaaaatattagtgttgctgagataggagcttttggtagatggataaactgggatttgtaaatattttgcttagtttttttcccagagttttgcagaagagaataaggtgttggtttgttataaggtggtcctttataaagtttagacctattttaataaggctgacttgggttgaagataactagagccatgacttccatcttgatggacaatgagtactcactctacttttttaktttatatttttattttagttcatttcatttaagacagcgtctgttacccaggctggagtgcagtgacatgatctcagctcactgcaacctacaccttctgggttcaagtgattctgatgtctcagcctccccagtagctgggattacaggcatgtgccaccacaccggctaat

SEQ ID NO: 773005 - DNA, 607 bp, Homo sapiens
actagtatttgtgttaacattattttaatctcctgtgcacttaagggagctggcataggccggcagtggctataggccaggacctgtgctatgtagcttatctatttctcatgctgattctacttttgttactaccgaaggagcttagagggaatcagtgacgtggacaaggctatgtaactaaagggggtggaggaggattcaagccccttgcaacggactgaagtgcccaagctctaaatccctgccacccacagcctctgttggccccaggttgtgtctgarattcagaggttgtttttatagcagcaacacagtaagttgggaagagggacacatttttaacatagacaccaaaagagaggctggaagagttgaccacttagaaatgtcacgagtgtctgtgaatagtgttgggggctgagaggcaagagaagaaaatagtcctaatgttgtacaagtagcaatggaaacaaacttgttaaaaaaaatttaattttgtttatgcatgtgtgcataaacaaagcaatagaaaatatttgatatttaagattgagcacttaacaaaatactttgtctctttttggtttgctgtcttaagcaatag

SEQ ID NO: 773006 - DNA, 607 bp, Homo sapiens
actagtatttgtgttaacattattttaatctcctgtgcacttaagggagctggcataggccggcagtggctataggccaggacctgtgctatgtagcttatctatttctcatgctgattctacttttgttactaccgaaggagcttagagggaatcagtgacgtggacaaggctatgtaactaaagggggtggaggaggattcaagccccttgcaacggactgaagtgcccaagctctaaatccctgccacccacagcctctgttggccccaggttgtgtctgagattcaraggttgtttttatagcagcaacacagtaagttgggaagagggacacatttttaacatagacaccaaaagagaggctggaagagttgaccacttagaaatgtcacgagtgtctgtgaatagtgttgggggctgagaggcaagagaagaaaatagtcctaatgttgtacaagtagcaatggaaacaaacttgttaaaaaaaatttaattttgtttatgcatgtgtgcataaacaaagcaatagaaaatatttgatatttaagattgagcacttaacaaaatactttgtctctttttggtttgctgtcttaagcaatag

SEQ ID NO: 773007 - DNA, 607 bp, Homo sapiens
actagtatttgtgttaacattattttaatctcctgtgcacttaagggagctggcataggccggcagtggctataggccaggacctgtgctatgtagcttatctatttctcatgctgattctacttttgttactaccgaaggagcttagagggaatcagtgacgtggacaaggctatgtaactaaagggggtggaggaggattcaagccccttgcaacggactgaagtgcccaagctctaaatccctgccacccacagcctctgttggccccaggttgtgtctgagattcagaggttgtttttatagcagcaacacagtaagttgggaagagggacacatttttaacatagacaccaaaagagaggctggaaragttgaccacttagaaatgtcacgagtgtctgtgaatagtgttgggggctgagaggcaagagaagaaaatagtcctaatgttgtacaagtagcaatggaaacaaacttgttaaaaaaaatttaattttgtttatgcatgtgtgcataaacaaagcaatagaaaatatttgatatttaagattgagcacttaacaaaatactttgtctctttttggtttgctgtcttaagcaatag

SEQ ID NO: 773008 - DNA, 607 bp, Homo sapiens
actagtatttgtgttaacattattttaatctcctgtgcacttaagggagctggcataggccggcagtggctataggccaggacctgtgctatgtagcttatctatttctcatgctgattctacttttgttactaccgaaggagcttagagggaatcagtgacgtggacaaggctatgtaactaaagggggtggaggaggattcaagccccttgcaacggactgaagtgcccaagctctaaatccctgccacccacagcctctgttggccccaggttgtgtctgagattcagaggttgtttttatagcagcaacacagtaagttgggaagagggacacatttttaacatagacaccaaaagagaggctggaagagttgaccacttaraaatgtcacgagtgtctgtgaatagtgttgggggctgagaggcaagagaagaaaatagtcctaatgttgtacaagtagcaatggaaacaaacttgttaaaaaaaatttaattttgtttatgcatgtgtgcataaacaaagcaatagaaaatatttgatatttaagattgagcacttaacaaaatactttgtctctttttggtttgctgtcttaagcaatag

SEQ ID NO: 773009 - DNA, 546 bp, Homo sapiens
tctttgacttggaaagcacccacgtgaatgttgaaccatttggccctcagttctccgtcctgcagcaaactgcattgactcctgttttctacacagtggtcttcagctacaccttaccaagcaccccttacccagcaaacgtggcttctcttccccaggcagagcagtycgttacttagactaggaaatggctccgagaagctcacccatcaccatttgctctactgcaaaacaggactcattagcaggagctcataaaatgaaactggcagtgagctcatatggaagaggcatcacgggcaactcggcttggctcaccagcccctgagctgcccccgagtgaccgctccagccttctttccttccacctctccctcttggccaacttcatgcttcagccaaagtgaactgagctcaccaggctgagtcatctgtgccagctgtgccctctccccgaggctgcctgccatgctcgtgctttcttgtctattggcaaaaggctctccatccttcaaaatccagctcttggcctcatatcttccacaa

SEQ ID NO: 773010 - DNA, 657 bp, Homo sapiens
atgttacacaacctattttttttttttttttttttttttactctgaatgtgtaactttaaatgaagaaccaggacacctcatcctttagtcttttctttactagtgagtggcagatatgtgtggaccacagagatggactgaaaagagaagtaacagtccttggtttgtattccagcccccaccttcctatgtctttgagcttggtaattagatgcttggagcttcagtttccccatctgttggatcagaacggcagtatgtgctctccagtattttcataagagtcacatgaaatatgtacctacagagtctatcactgtgctttttaagttggggcttaatatgtggtagttgttgctgtttttgttrttattattattaatgttattttttgtttgtttgttttttgagatggagtcttgctctgtcacccaggctgaagtgcagtggcgtgatctcaactcaccgcagcctccgcctcctgggatcaagtgattctcctgcctcagcctcccgagtagctgggactataggcacctggctaatttttgtattttatattagagatgggatttcaccatgttggccaggttggtcgtgaactcctgacctcaagtgatctgtccgcctcggcctcccaaattgctgggattaca

SEQ ID NO: 773011 - DNA, 478 bp, Homo sapiens
gcagacgtgtccaatgacctgctgtgtccttgcttttgaagaactaaagagtagacttgaccactttttaaacatgacattcgatccacgtggcatagcaaggatgggatccacaagatggagtgatctttacgccatcctcctgaccataaatactaaacgaatactctatttcagttgagtttttagtttgctctgttacgtgaggacacatcacttgcacctcagtgtgagtttgaaagtgttttctctggagaataattctgaagaaataggccctccagatatcagtagtgacagggstatcagtaatgttgattactaagttcttgccaccaggtagaagccatgctactgcacaagtttcatacttgaagagtggacatctgacacagtgttggtggttgttgaagtgtatgactattactgtgttgctttggaagcttgatgccataacaaaagtgcagaattccatgtt

SEQ ID NO: 773012 - DNA, 694 bp, Homo sapiens
caacattgaatcaatgcaatcccatgcaaagaaagctgagcatgggattgtgccggtttagccagctaaagtgtggtctctgatgctgatcatgactatgaaaagggaaaatggaggagaatgatgacgaaggaggaggaggaggaaaaggtgacttgcctctagctgatgtggattatttctcttttttaatttccatgtctgtgtagcttcatcatagatctcagcttaaggacaatgaaagtcgtttattgagtacttagtatgtgctggttgcagagccaagtcttttttttttttttttttttcctccttttttgagagagagagtctcactctgtcacccagamtggattgcagtggcacaatctcaactgactgcaacgtgcacctctcaggttcaagcaattatcaggcctcaacgtcctgagaagctgggactacaggcatgtaccaccacactcagctaatatttgtatttttagtagaggcggggttttgccatgttgtccaggctggtcttgaacacctgacctcaggtgatctgcctgcctcagcctcccaaagtgctgggattacaggggtgacccaccacacccagccagagtcaagtatttcaagtattagagttgtctgcctgcctccctgtctccctgccttccttccatctgtttgttatctgacttaatctttg

SEQ ID NO: 773013 - DNA, 558 bp, Homo sapiens
aactcagattttcctgataatgaaacagactatgacctcaggatatgctttatctcaaatctcacaatgaatctaggactaaatcagcaaatgaggctcagtgactagctttccagtagtggttaggcaaatcacatggtctcctactatcatacttgtccaaacttcctactaccttcctttttccctrcaaccacacagtgacctactattccaaaagaaagttgaagagctcatgatgagcaaggaaattatacagagataatcttggatgcttaagctcattggatgctccaggctgagagaatcttttaagttcctctagtccagattcctgattcaggtgaagacgctgaagcctagattagaaagtgattaacatacaatgttatagtgattggtggccgaactagaaacacatcatgtttttgtagatagagctctttttttttttttaagaatgaccatgtcaggattgagatttaaaactcttccttgctgatttaacgaaaattgtagttaaactgcatatgggatccttagatgttctttagagtc

SEQ ID NO: 773014 - DNA, 558 bp, Homo sapiens
ctatgagagggattgagaataaagagagccagaaaaatctctttgagaaagtaacaattaccttgatacctgaaggataggggaaatttccaaaaaatgagaatatagaaaggatctgagatgggaaagatttgggcaagtttaaaaaaaggcgagttgcctggccgggcatggtggctcacacctgtaattccagcactttgggaggccmagacaggcgtatcacaaggtcaggagttcgagaccatcctggctaaaacgatgaaaccccgtctctactaaaaatacaaaaaaattagccaggcgtggtgacgggtgcctgtagtcccagctacttgggaggctgaggcaggaaaaccacttgaacccaggaggcggagtttgcagtgacccgagatcacgtcactgcactccagcctgggtgacagagtgagactccatctcaaaaaaaaaaagagagttgtccaatagaaatagagtagtaagtaggatgagtttaacattgggtagatcacacatgatcttgtagaaaaatggaagatttcatattttagctca

SEQ ID NO: 773015 - DNA, 558 bp, Homo sapiens
ctatgagagggattgagaataaagagagccagaaaaatctctttgagaaagtaacaattaccttgatacctgaaggataggggaaatttccaaaaaatgagaatatagaaaggatctgagatgggaaagatttgggcaagtttaaaaaaaggcgagttgcctggccgggcatggtggctcacacctgtaattccagcactttgggaggccaagacaggcgtatcacraggtcaggagttcgagaccatcctggctaaaacgatgaaaccccgtctctactaaaaatacaaaaaaattagccaggcgtggtgacgggtgcctgtagtcccagctacttgggaggctgaggcaggaaaaccacttgaacccaggaggcggagtttgcagtgacccgagatcacgtcactgcactccagcctgggtgacagagtgagactccatctcaaaaaaaaaaagagagttgtccaatagaaatagagtagtaagtaggatgagtttaacattgggtagatcacacatgatcttgtagaaaaatggaagatttcatattttagctca

SEQ ID NO: 773016 - DNA, 558 bp, Homo sapiens
ctatgagagggattgagaataaagagagccagaaaaatctctttgagaaagtaacaattaccttgatacctgaaggataggggaaatttccaaaaaatgagaatatagaaaggatctgagatgggaaagatttgggcaagtttaaaaaaaggcgagttgcctggccgggcatggtggctcacacctgtaattccagcactttgggaggccaagacaggcgtatcacaaggtcaggagttcgagaccatcctggctaaaacgatgaaaccccgtctctactaaaaatacaaaaaaattagccaggcgtggtgacgggtgcctgtagtcccagctacttgggaggctgaggsaggaaaaccacttgaacccaggaggcggagtttgcagtgacccgagatcacgtcactgcactccagcctgggtgacagagtgagactccatctcaaaaaaaaaaagagagttgtccaatagaaatagagtagtaagtaggatgagtttaacattgggtagatcacacatgatcttgtagaaaaatggaagatttcatattttagctca

SEQ ID NO: 773017 - DNA, 562 bp, Homo sapiens
agttcctcatcctaacatcagggaatcaatgccctagaatccagacctgtcagagctccaggatgttcttttattatttgagaggttttttttttttttttcagtctcaaaagatggtgtgtgtgcgtattcataagtgaaattccaaggaagccaagcaaaggctaaaactggggctttcttgggggctgggggaggggggtgaaggggagagaaaaaccatgatgcagttttagaggttcacaaactccaactttcaaaaacgaatttccaaaaggataaaatattttcttcttaagagattatcaattatgtagatccaagaaactgccagagaagagaagtagggagaagacgcaagacttgttctgctctcaraaatattgctggtagaactgaaatgaacacacgaagccacggatctttgaaagaacttcttaaacttcattaattcatcagacaacacccagtaattcacttacagagtgtgacttgttcctgtaatcaattcaccacaaaaatttgaggtatgttaaacctatggcttcaccttctttgacct

SEQ ID NO: 773018 - DNA, 500 bp, Homo sapiens
acagctgtttctagccctcggcactctcccgagccccaaaaaacaaaacaaacacaaggtcggcctcgcggggtgaggggagaaaggaaagcagagctgggacgagccctgacgcgcgcggggtccaggctgcaagttgggagggacggcgaggcgagcgaccggcctcggcattgcctgactagggccgtggccgctgcggcgggcacgggaacccgccttctcgcgcgcggccctcccgsggggggcttccgggcgcgcggcctcggagccccacgggaagacaaaggggtaggcgactgccacggggtggagggaggccgcccagccccatcggccctgccagcgtgcggtctgagctcggggaatgtgtgcgccttagccggtggaaccgcagccgctggcctttgcccccagttcgagcttgagttttcggatgccaagaaaaagcaaagacgtgctcttccctcttgcgaccgctgtagtatgagtccgtcccc

SEQ ID NO: 773019 - DNA, 432 bp, Homo sapiens
atatacaaacaacttttctaaactgatataacaatattcaatagaaaaaaatgggcacaagatataaatatgccattttagaggagaaatacaaatgaccagtaaatatgtgaaaagatgttgaatctcaataataattaatcagcaagayaccacttttcaactagaaaactaaaaaaatttctgataaaatctaaaaagatttctaacatctggtgttgtgataatgcaggcagatagttagtcactctcatacatcactggtggacttccctggagtggatttggcaatatctactacaataaaaaaaaaatctactctgaaacctgcaaagtcacttcctgtcattattccacaggaatacttaattactcatgcacaattcattcatgtacaatcaattcagttcacaattacaaaacgtgttacat

SEQ ID NO: 773020 - DNA, 667 bp, Homo sapiens
aagaaaaattcttctgccttgggatcctgttgatctatgaccttacccccaaccctgtgctctctgaaacatgtgctgtgtccactcagggttaaatggattaagggcggtgcaagatgtgctttgttaaacagatgcttgaaggcagcatgctcgttaagagtcatcaccaatccctaatctcaagtacccagggacacaaacactgcggaaggccgcagggtcctctgcctaggaaaaccagagacctttgttcacttgtttatctgctgaccttccctccactattgtcctatgaccctgccaaatccccctttgcgagaaacacccaagaatgatcaataaaaaaaatwaaaaaataaaaataaaaacattacctggggaaaaaaaaaaaaaaaaaaaagccaaacacatagaaacataatagaatggtagttgccaggggccagaatagagaggaggaaatgaaatgctggtcaaagggtacaagcttaaaaagaatacattctgctgagctaatgtgtagcatggtaataatatttaatagcactatatcatatacttgaaatttgctatgagagtaagtcataggtgttctcatcccccacacacaaaatggtaacaataggtgatgtatgtgctaaagtacttcattgtggtaatcact

SEQ ID NO: 773021 - DNA, 632 bp, Homo sapiens
tacttacttattaactaaataatcattattagcaacatatatgtgttcattgtcaaattggttcatagccctttcactggcttaaccatgaaaacataaaatctagtctattattttctctaaaaaaactaatgaaagtttttctgggcattaaaatcctatgcytaaatgtgattttagtttcatatcacatttttttacttttcatttttcttcaggtaaaaaataatcaaatcaaattgtagtttccattttacccagttattttggccccaaagagatgatagtgaataatttaaattatattatatattaatcatttttattacgtttttgttaggcaggaatagtaccattattcctctatcccttcccttaaaaaaattcagaaatgggcaatggctgtgaatatggaaggagttgtgcatagtgtttaaaagtgttaaatctgagctgagagaaaattagttcttttgcaaacaatggaaaaccagggaattatttcattgtcacgacccagtagccaccagatgcttagaattccatgtattttaaaaacaaaccattcaacgactcctttgacacccaaagtatgtcaataattcaatgtattagttggatgcaaattttat

SEQ ID NO: 773022 - DNA, 563 bp, Homo sapiens
cttctagttccgagataagtaaacatttgcaaataagtcataaaagttaaataaaatattcaggaatgctttttataataaatatttgagttgacaaaactatgggcacagaaaatcaccaaacacatttgatggcagatttagacatataataaactttaaaatcattatataatttcaaaattgtaccatagggaatattgactaagaggttaaaaatatgggagatgttgccagtttcctccaagcttaatatctgttcttttaaaatagctctgagaagtgtctggggatttctctgtgcccaaaagttcaatgatgtgtcatcaaatatgcattttatcacagtattacaatagctaccagtttttatytacttcctctgtacctagagctgtgctgaaactttacaacaatccagtgaaataggtcctgtcatttgccaaatgttatagatggaagtgagatttagatacattaagtaactttaaaacataagtgcagaagttgtgatgacgaatgatacagttaaattccagataccacactcttaaatactttat

SEQ ID NO: 773023 - DNA, 509 bp, Homo sapiens
tttagatctgttaataaataataatgtaaggaaacatctttctaaataattataaaatagttttcatctacaaatactgatacaaaacagttcaaaatttctttctagtgttttcactataaattaaggttactaagagttaaaattattatttttatrtataattaaaactactaaatatgaataaacaattgcatatacagagttataaacaaaaggaaaatatgtttttgatgagcagttataaaggcatacaaatgtgtgtttgttaaaaaacgtatctgataactttaggatcatatcatctggactgcataaaaattcccagaattccagtgaagacagtgaatggtttataaaactgttaacccaagcaggacaaaaaataattgaataccaaggaaatactttgccggattttcatgctaaatcagccagtactgaaattgttaagatatgcaatttgaatgaactccatggtccaagtcaaattacctatgataacccat

SEQ ID NO: 773024 - DNA, 588 bp, Homo sapiens
tatcaggaaaaaagtccagtgcaggactaaagctttaaagagagtgaaagccactgccagttttaaaacaaaaaagaaactgattgtcatgagcagtcacgggtttatgggtttattgatttctgctgaagatctgggtgacctgggttcatttgcagatttgaagacgatactctcattttgtcctacttttatacaagagataataacatttgcaaatggctttgactcacctgatctgaatatcctcaaatatctggcaagatgaaatcatgcctttttcatctaaagaaaaagtagagggagtgaaggattgtgttttaagtacagagtttacctaaaaaccaatcacctccccttcaacttatttcccccaggtccaaatggcaattcctttttaattagcctggggtgttaaagaaggctgtattttcttcttcyttcccaggtggtcaggattcagtgcagtaaattttggccgttcccccgtcctggagcagagtgacaagaacccaagacaggagattcgaatgactttgctagaggtcactttggggaaaatgtttcaaaggcaaccctcccagcagt

SEQ ID NO: 773025 - DNA, 594 bp, Homo sapiens
aagcacaccttgggagaggaggatccctgctggtgcgtgtggaccactgcaggctgccatgtcgataaaacagatcacaggagattgcaagttcccgccacagctcgataccccaccctctttcctatggctcagacactccagctttaggagccctcatgtttgtttctgtttctttagttcatgaggtgccccagcttccccagtttccaaagccacgcaggtgtatgaaaatcttcccccgatcttcttgcaggttatagttagaatattacctcascaatccccaaggtggaagaaatgagaagcagaaacatttcattagtctagaacgcctacacgaagactatgtgcctgcagatatgttgacaagttttgaaggaacgccaaagggagtagaagatccggtcttgcttagaagaaattatttaaggagtagaatttctttgagaccacgagtgagcaggttagggcagtgccaggaacccttagggactcccatcaaccccagcatcagaaccttcttcctaggatgcagaagcatcagaaccttcttcctaggatgcagacatgagtgtgaggagaagttttcac

SEQ ID NO: 773026 - DNA, 662 bp, Homo sapiens
aaagagaggctgagctctgaaatgcatatccctgcccccacctgatggtctttctctacccaccctggtagccaaagacaaaggtcataatctcttgggagctctatggccctgcccaccgtcttaaccaggtgtccctagggcaaatttgcattctccttataggactgcagcagatgtgctcttgaaagcaccacctcctgcatggaggccaaccaacacaaaaccaagtaccctcacagagtccatttcactcccctgctacctccacaggagcaggtgctggtatccatggctgcaatacctgaagatggatcatatcacaggactctgcagacactccccagtaccagcctgtagcccagtagctcagctaggtggctagacccagaagagcaaaaacaatcactacarttcagctctcaggaagccccattcctaggggaagggggagaacaccacatcaagggaacaccccatgggacaaaataatctaaacaacagcccttgaattccagacctgccctctgacatagtctacctaaatgagaaagaaccagaaaaacaattccagtaatatgacaaaacaaggttctttaacacccccaaaagatcataccagctcaccagcaatggatccaaaccaagacaaaatctctgaa

SEQ ID NO: 773027 - DNA, 548 bp, Homo sapiens
cttgaataatcttttgtatttctgtggtattgaagtggcttcattgtctggggaaataccctaggttcgtcttgcactgagaagattaacaacacagacacacacacgtgaagcaggttaaggaggggaargtttaatagacaaaaaagaagagagagtgagctttctcatacagggcaggtgggatgcgatccattttatagagaggcttgaggaggcggtgtttgatttacacaggggccaggggattggtttgaccaggtgtaaatggttacatagcccgagaagaaattggccatcccaccttaatcttttattatgtaaatgtgacctctacctgtccggtgccatttgaaccttgattcctcattgtaccacacataaaattaatttaagatggatcatagactgaactatgaaacaatcaagcttctaaaggaaaccatggaagcatagtttcatgacctctgggtagggaaacatttcttaaatgggacatagaaagcactagccaaaatataaaagattaatatgttggatttgtaaga

SEQ ID NO: 773028 - DNA, 613 bp, Homo sapiens
ggtgccatttgaaccttgattcctcattgtaccacacataaaattaatttaagatggatcatagactgaactatgaaacaatcaagcttctaaaggaaaccatggaagcatagtttcatgacctctgggtagggaaacatttcttaaatgggacatagaaagcactarccaaaatataaaagattaatatgttggatttgtaagaattaagaacttttatttatcaaaagatcctattaggagaatgaacaagccaaagcacagattgagagggaatatttgcaatacatatatccaacaacaaactcatatggagaaaatatatagacttctacaattcagtgaggaaaatgcagaaatcccaataggaaaatggacaaggacttgaacagtcatgtcacaagaaataactaataaacacctaaaaagatgctcaatatcaccagggaaatgttcttttaaattgcaatgagatattgctacacacccaccaaaatgactgaaattggaaaagctaacaataacaaatgttgacaaagatatgaagcaactggaactctcattcattgccattgggaatgtaattttgttcatccatttagaaaaatggtaa

SEQ ID NO: 773029 - DNA, 544 bp, Homo sapiens
tgagtttcaccttcccttgagggtctgtcacagtcacactgccaccgccaacatgctaggttctgaagatgccacttctctgataaattttggtttcagacaatacctaatctctttacacaatactcagagaaggaccaagtataagtaaaattataactaaatgttataaaatatataattaaaattttagggaggactgtaagaaaatcagcaagggaaatcacaaaagtaacacttactggttttattattttaartcttgctgccttctttgtttttaaaaagctctatagatctcttaggccaacgtgttacatgaagagaaagtaggcttctcgcatagctgttcaactgctttcctagtttatgaataaataagccaagatcaatagagtgctgtttccattccctctctattggcttgtgattgtctatgcagaggctgatgccaggctctggcagaacattaatgtggactcacagttatggatacatgattcacatttaaaaatccaataagaaccagagttggcaggcacga

SEQ ID NO: 773030 - DNA, 586 bp, Homo sapiens
atactcattaagcagtcatctctttctaccctacctgtctctacgaatttgccctttctggacatttcatatacaaatggaataacacatatgtggccttttgcatctggcttctttaacttaccaaaatgttttcaaggttcatccatgttttagcacatatcaatagttcgttccttttcatagctcaataatattccattgtatgcatataacatattttatttatccattcatcarttcatataatttgtttgggttgttttgttgtgattttgatttgtgtttccataatgactaataatgttgagaaaaattttcatatacctgtaggtcatttgcataccttctttggagaactgtctactctgtttctttgcccattaaaataaaattaattatttgtcttcttgagttgtgaacactctttatatattctggatgctagacccttatcagatataggatatataaatatttcacccatcttatgggttgtcttttatctttttttttaaaaaaatattaccttaaattctgggatacatgtacagaatgtgcaggtttgttacataggtatacatat

SEQ ID NO: 773031 - DNA, 518 bp, Homo sapiens
gcggaaagcctgtcttaaattgacattgaagtagaagtaatgtattggtttgctaactgaaaagtccagaggttgggatggacttgaggtcagggtttatctaacattttagtaatgtaatgaaaaacccagtttctttccttctctctcctgtgccctcagtgtctgctttgtccctagacaggcatcctcatgatggcaagttggctattggcagcttctatgggctgcttgttccttgagtgtggccagtgggagtagagagcctctctcccagtagttcccctcccctcccctctcgcctytttttcttttttcttttctttttgcttcccttccctttcccctttcccctttcctttcccttctcttctctttcttttcttttctttcctgacagggtctcactccatgacccaggctgtagtgtggtagtacagtcacagctcactgcagcctcaaactcctgggctcaagagatcctcctgcttcagtctcccaagcagctgagaccacag

SEQ ID NO: 773032 - DNA, 539 bp, Homo sapiens
tcctcctttccattgctctacatgctattttatttcttcctctgtgaatgggaatgacaaatccaaagctgctgatatttgcaaaggggaaaactcaacacactctgcctttttttttttttttttttctgagacagggtctcactctatcacccaggctggaaggcagaggcacgatcatagctcacagcagccttcatctcctgggctcaagagatcctcccatgtcagcctcctgagtagctgggactacaggcmcatgccaccatgcccagctatttattattattattattttttagtagagatgcaggtctcactacactgaccaggctgctctcagactcctgagttcaagtgatcctcccgcctcagcctcccaaagtgctgggattataggtgtgatccactgcagctggcctaatacactttgcttaatgtatgagaatatccagtaagcaaaggagatgataccttttaaatgggggtaaaactcctattggacatcatttgttcaacaaatacacactgggtgtcct

SEQ ID NO: 773033 - DNA, 512 bp, Homo sapiens
actgaatcatggggaatgaccaccgtttaagccacccagggatcctggaagcctccccacccccgaccactgatagacaccaaagccgctttcttcttccgccctcgcaccgcacacagttctaggtgacccagcacatctctgcttccttctaccagggcatggccatgcgtggggaatgtttactgaatgcaggaagagatgrttgatttgatttaagttagatattaggaaggacttccagatgccactggggcagacttagccctggactggatgtctatggaggtgaggctgatcctcaaaaagcctgtcaggttgggggtgacccccggcatccccaccttcccccagaggcggagtcctgcctttcgagtgtggtgaagcaccggcttccttcctgcaggggccttgcttgtcccagagcctcctgcagtgcctgtctttttcccagcccagggagtgtgggttctgtgcggtggtcagctactgaaatattgctgtcatcgtgt

SEQ ID NO: 773034 - DNA, 470 bp, Homo sapiens
gtggttcaagagtggggaggggaggtgggcatcagggaaggaggcgcagagcaggagagacttgactgggcatcagaagtagacataggagtttccaagtagactgggtggggaggacattccttgtagagggtcagcctgaacaagggcctgaaaaccagaggccacatagaccacaaggggaggtacaagttcgtaatatccggcggggagaggatgatgttactccttatatcrcagggggtgtacaccttgctgcgatattttttgtaatatccagggagggagaggatgatattactccctgtattgcagttgtttgtaatatccaggggaacagatgatattactcccaatatcgtaaacaccctgagcgtacaccctctgtgatattgttcataatatccggggggaagaggatgatattacacccaatatcgcagggggtgtacaccctcctgtgatatttt

SEQ ID NO: 773035 - DNA, 437 bp, Homo sapiens
gggaagacagagagaagaggtgtttggacacgtgtgacacctagctcagactctctgtgaccacacctccctccccactgtcactaataaaataagaataaaagttgtaaccacagtttgctgagaggatgaaatgagccatgtcaggtgtcatcccggttgcatcccattggactctcccaggtgcgcatgcagtggggctgcagttggtccctggagggaagcagagctggagcagccccactgsccagtgtcgatactgcccttgggatctgctcaaagccaagggtctgtggcctgggaggttttggaaaggagtgctccacatggcagatggaaccccagggagacccccagagctcacccccgagacaggagagctgagggttgatggggtgggtgcaggaggagggcagagagagaagatcgtgggctgg

SEQ ID NO: 773036 - DNA, 650 bp, Homo sapiens
aatcatatagtatttgtccttttgtgactggcttatttcacataacataatgtcttcaagttttatccaagctgtagcatgtgtcagaatttccttcctgtttaagactgagtaatattccacagtatggttataccacagtttgtttatccattcatctgttgatgggacacttgggctgcttccacattttggctcttgtgaataatgctgctataaacatgagtgtacagatatttcttcaagtccctgctttcaatgcttttggatrtatacccagaagtggacttgctggatcatatggtaattctacttttaattttttgaggatctgccatacggttttccacagcaactgcactattttatattcctaccaacccagtgcccaagggttccaatttctcacatcatcacccatgcttattttctttctttgatagtagccatcctaatgggtgtgaggcggcatctcattatgggtttgctttacatttctctagtgattagcaatggtgatcgtttttcatgttcttatcagccatttgtatatcttctttggagaaacgtctattgaagtcctttttaattgggttgtttcttctgttgttggacacaggagttctttatatattctggatattatctta

SEQ ID NO: 773037 - DNA, 601 bp, Homo sapiens
aatatgtgatgtcattttaaaaaccactacaggtaactctgacaactgccaagtacacaggagtagaatgctcttgtagtaatgtttgtaaagataccaaatgattatatttggaaatcatatggaaatatatactcaagaattgttcaattattttagcactgctacttgctttgcatattaaagatctttttgatattttagtcatgcttatcctacatacattcctactactggttccataatgcagaattattctttctttctttcaaaaaacaatcaatgcttaacatctgaaagaaatataatgcttgttatttcagtattagatcattgtccacatcaaaggagaagatcagttcaactatgatggatgtattttccacctmcctagaattgtattgtattattttttcttgttaaaaatcataaggttcctggtcaggtgcagtagctcacgcctgtaatcccagcactttgagaggctgaggaggtcggatcacctgaggtcaggagttcaaaaccagcctggccaacatggtaaaaccccacctctactaaaaatacaaaaattagttggggccaggtgtggtggctcaca

SEQ ID NO: 773038 - DNA, 582 bp, Homo sapiens
aaatctgaggagaattttttttaaagacaagtaacaggcatctttaagttatttaaacattcataataatatgttctacttaaagggaaatagatggattttcctagtcatcacagcttcttggaggcagttactaaaacacccsttagaaattcgagtggtgacctaggtatctaagtttgtcatccatttgagcacctacataaatctttagtttgcagaaacccagcactagcagtttaatcgatgcaccccaacatataacacaaaactagacttttctaggatttcctaagaggaaacaaatacgcaaacacttgtagcacttaggggacctgtggcaaaagtgagcatttgctatgggaggcatattacatgtcagtttaatattactgctacctactttcacagaaggtttgatttcatttcttttgggctcttgcccccaactattaggctgatcaaagacttggcaacagaaaatgagaagagagctcctctagagaactttgaataaagggtgcttatttttagacactatcatgatgtggaatcgttttgaaagtgttaggcacataagga

SEQ ID NO: 773039 - DNA, 464 bp, Homo sapiens
  misc_feature 303, 315: n = A,T,C or G
attgggagataacgggaggagagatgatcaaagttaaaagacaagtaaaggacctgggggcatttgtgtgctggaggagagggggtggaaatagaaggaactcctttttattaaaatgaagctcacttgagagcagacacttaaaaaagtttgtggcaagtgggcttagaaatggacgaaaaatcattagcaggctctaggctgtccaggcctcacagtggacgtgtggcaggccagggctcagggccccaggataagggaaaaagrgatcatggaaatgatccaggtttggaaatgggccanaggatgtggcanaaggttaagggaggagagggaggctaagtgccaaacgagtgctgagtattgcatacctaaacaaacccatgccctcatagaaatttcctggtaaaaacagggagagtcactgtcacctacatagataacattaagtgttccatcaaatc

SEQ ID NO: 773040 - DNA, 634 bp, Homo sapiens
tgtttttgtactttactaatctttaaactatcaggaaaaaaaccaaaactttataccaatgatttagtaattttgaggcatagggtagcttacgtagtggaggatgtgccaaatattctcttcaaatgccaccttctcaatttataactaaaatagtgttatctgactaattcctctgaattttgatgtaagatctatataggcccccaaaatgatcgtagtacatgccagtcatttctcagtgaaataaayacaataccagagtacattatgggttttattgctttcttttatggtagacctgttaatggggaaaaaatacatcaaatcaaatagaatcttatatctgtatgttaaaatagagcacttacctgaagtcagtggccaggatcatagccctggatcatttcccagtctgtcctgtgctgtgtgaccttggacaaggcgcttcatctctctgggcctctatttctccatttgtaaaacaagtggctgcagtagatgatggctgagagcccttcctgttcccagatgccttggtccaaagaccccacccctctgctggtcctgccaacgtgttggtgctataagctgcttcagatataaaattggtttatctataatgtttgttcat

SEQ ID NO: 773041 - DNA, 634 bp, Homo sapiens
tgtttttgtactttactaatctttaaactatcaggaaaaaaaccaaaactttataccaatgatttagtaattttgaggcatagggtagcttacgtagtggaggatgtgccaaatattctcttcaaatgccaccttctcaatttataactaaaatagtgttatctgactaattcctctgaattttgatgtaagatctatataggcccccaaaatgatcgtagtacatgccagtcatttctcagtgaaataaacacaataccagagtacattatgggttttattgctttcttttatggtagacctgttaatggggaaaaaatacatcaaatcaaatagaatcttatatctgtatgttaaaatagagcacttacctgaagtcagtggccwggatcatagccctggatcatttcccagtctgtcctgtgctgtgtgaccttggacaaggcgcttcatctctctgggcctctatttctccatttgtaaaacaagtggctgcagtagatgatggctgagagcccttcctgttcccagatgccttggtccaaagaccccacccctctgctggtcctgccaacgtgttggtgctataagctgcttcagatataaaattggtttatctataatgtttgttcat

SEQ ID NO: 773042 - DNA, 590 bp, Homo sapiens
aaggatcctcgctttcagatctctgtgaattgaaaccatgtgaatcccactagactattttaagaagtcgaaaatttctcccacccaaaactatgtcaacaattggatgtactcatcaagtcacccttactctgccactaatttatttccttgktgctgaaatgatgagagaggtataatctccaccctcacggagttgtcatcaccctggagaggaaggagagagccaaaagacatacgtattgtcttgtagacttattagatttacacagtatcgtcctccagtgtgtaaggcattgtctaaataggtccagttaaagcactacagagtagccatcttttacaaaaatttttggccacatttttaagttcactggtgagggggaacgtctcatactctagccctcctgagcctagaccctctgtgagatgtgtcaccatttcttggacaccatgtgagacattccccctcagattagagatgctcagcttgcatcaacttacctaaagcctacatctggctactctgggacaagtcctgtttacagtgcccattcctggagcttgcctctgtcttttgttcgattaca

SEQ ID NO: 773043 - DNA, 573 bp, Homo sapiens; identical to SEQ ID NO: 738533

SEQ ID NO: 773044 - DNA, 455 bp, Homo sapiens
tttgcgaagttcaagtgacaattctggtagataaagttttaaggagcagatggtcacaactgtcagtctcagaagtaatttggtaagtaaaatagtcatttatttggaagttttttggtaacctaattgtgatctaattgtcaccagttgggagtctaattccattttcatcactcatctgcagaaaggtgagagaaataagctattaattaatagccaatatttacgagctcttactatccaccataaagtatgmtaagtgctttatgtgcattatacttaattatagtaactttctgaggtagttactattattatttccagctagttagtggaagaaccaggatttgaatccaggcaaactgactgcagagccctcacttttaacactacacataaaactgagtttatttaacagaaaacactgtcctttaacctgagattgtgtctacctt

SEQ ID NO: 773045 - DNA, 534 bp, Homo sapiens
tttataatatctgagtaaatttagttcaaaacacattaatttgagcattttctgtgtacagaagcatagttgcaaagttaagattcttgtgtttatgttgttttgttaaattcggaaagtctcagtcattgcaaatgtattttttttttaagtatttaaattagctcagctatgagaataagcacrgtccataaattaagagcttcaaataattttttaaaatccttcatattctttgagttttgtaggaaaagaatcaacagtttacttattcagcctttcctgaagtccatagtaggtgctgggcatcatgctgggtgaatgagatagtacttgcatttgaatagtttacagtcttatagcgaagaagccatgtaaacagagaattgcaatataaaccttggaggagaggaaggaagactactttgagaaccgagattaggttgagaatggatgagtctgctgatcaatttatagataaagaagcagagaggtgaagtctttttttttttttttttttgatatgtgaaatag

SEQ ID NO: 773046 - DNA, 528 bp, Homo sapiens
gagtaagagagagagagagagaataccgtttaaaggtctggtgcgtgtatttaaagttccagaaaggcaagagaaagaggatgaatcaaaatcaggatttgaagagaaaatggtttagaactttctaaaactgatggaaaacattagtccataaattgcagaaatgatatgaaccctgagcaggagaaataccaaagaactctacatatataggcattattgttaaattgctgaaaaccaaaaatgagaaaaatcttaaaaggagctagagagcaaaggaaaattaccttcaaataagcaacaactagctagtagctgtcttctcaatagaaatgatggaaacaaaaagtcaaycaaaggccatttttaaagagctgaaagaaaataactgtcaacttagaattttatatccagtaaatggatgaatgatcatagaaatatataatggaatacaaggcagtaatgaaaataaatagcctacagctatatacagttgtgaatctcacaaataaattattgagcaaaaga

SEQ ID NO: 773047 - DNA, 620 bp, Homo sapiens
ttgtgaggattaataaacacaataataaagcacacagaacagcgtctggcattatataagtattagccaccaccctcattataatcaccaacttacgtatgggagtaacgcgggagaaaacaccagccgcttcacttcaggagtcatgggaattcgattcctcaagagaatggtttttgaagactaaaaacaaattcacgcccagttcctcaaatgtcagaagctctgctctccctcagctygctctgctcccactctttcttctttaatgctgccttggctgcctaaaggcctggatgcaaatgttctcatgtttgaagggcagactacttacaccattactataatgcagaacattctgggggaaagcagtttgttatatatggagaaactttttctcttcttgaccaaataggataggtgttctgtctaccctctaaggggctgccagcaaagcccttggaatccaggccttttaccctgcactctcctcctccacagaaaacttcatgaaggcggaaggatgtacctgtttcctgctgactttccatgctgatggtagagtcaccccaagaaacatactgtgatattatcttttgtctgttggcttttaaaatcac

SEQ ID NO: 773048 - DNA, 607 bp, Homo sapiens
  misc_feature 414: n = A,T,C or G
ccacatttcaagcacatgaacagtcacatggctattggctacgacactaaacagcacagacacagaacattttaatcactgcagaaagtgcctcctgggcagcactggcttatccatttgaaaaatttaaccaaattactaccttacacacaaccatctcataactcgaacattctcctcggtttcccactcctcaatcgatgcaatctctgcagctactgcccaagttgaaagttgatcatttggagaccaggtgcggtggctcacgcctgtaatcccagcacttagccgggcagatcatttgaggtcaggagttccagaccagcctgcccaacatggtgaaaccctgtctctaccacaaatacaaaaattagccttgcatggtggtgaacgtctgtaattccasctactcangaggctgaggcatgagaatcgcctgaacccaggaggcggaggttgtagtgagccgagatcgcgccactgtacttcagcctggggtgacagagcgagactctatctcaaaaaaaaaaaaaaagaaagttgatcatttgagtcctgtgcctaattcaatattcagaacagaacagtagtaatgttcacatgccac

SEQ ID NO: 773049 - DNA, 597 bp, Homo sapiens
gatgtgacgttacatataagattcagatgtcaacattttggagcccatcataaggtggaagagacagacatgcacacaattaattaaaagagagaataaaaagaattctaacagtagtctattctaagtactatgagtctaaagtgagggaacgccctattcatttttgctaaagctagatgcctgccatcaggatgatattttaaaaattaaaggcaggtatgtcttttttacataatataacatttatttttgaatgggtaatgatcttttttgttaatgcccttaactgtaagcttcagaccatatgttttcttacccttgtgcttacaaggaagggaaactgggatttattaatgaattgtgatgtgcctggtgctgtactaagtgaaattattcatatcatttactttttaaaagtaagtgtagactcatgtatgtttattttctgttaawactttgggttataaattagtactacattatttattttgttgcttaaatttttctggctttggccattcagggttctttcaggttggctccagagtctccttgacatgcccccagcctttttttttttttttttaatctatt

SEQ ID NO: 773050 - DNA, 649 bp, Homo sapiens
cctttgccaaggtgttccctgttacagaggtcagactgtacattctcaatgttattcgtggcaatagcaacaatagatactgttcctgggcacttcacagtgattatttcacttaatcttcactacagctctgacaggggagtggtattatcccaattttccatatgaggaaactgaaacaaaacaaagctaaataatttgyccaaagatccatggttagtaagcagcagaggcaggatcctaacccaggtcttaaatcctctaaacttacaaactcctccctggcctcacagcttcccactggatcttctcttttttgctattttcgtcccattcctcaggagcttcctcctggactattcctggaaagtccaaattcttctttcttacttttcttttttcttttttttaaatgtgtatacatcttgtttctttactaagcaaagctgagcagaccctgcaagaatctcaggaaaacaagaggactctcctgtcatagatccctctgctttagaaagcaattgtggtagtttatagtgtggttgttatttttctcctttacacacacattatctcaatattcagtataaccctatgagaaaagtattattattgttcccttttgcaggtgagaaaatagtcacaaaag

SEQ ID NO: 773051 - DNA, 611 bp, Homo sapiens
gagatggtatctcattgtggttttgatttgcatttttctaatgaccagtgatgatgagctttttttcataagtttgttggcctcataaatgtctttcttttaagaactgtctgttcatatccttcacccgctttttgatggggctgtttgtttttttcttgtaaatttgattaagttccttgtagattctggatattagccctttgtcagatggatasattgcaaaaattttctcccattctgtaggttgcttgttcactctgatgatagtttcttttgctttgtggaagctctttagtttaattagatcccatttatcaattttggcttttgttgccattgcttttggtgttttagttgtaaaatctttgcccatgcctatgtcctgaatggtattgcctaggttttcttctagggattttatggtttggggttttacatttaagactttaatccatcttgagttaatttttgcataaggtgcaaggaagggggtctagtttctgtttgcatacggctagccagttttcccagcaccatttattaaatagagaatactttcctcatttcttgtttttgtcaggtttgtcaaagatcagatggttgtagat

SEQ ID NO: 773052 - DNA, 549 bp, Homo sapiens
tctggttaaatatatgcaaatcagtatatgtgattcaccatgtaaacagaatttaaagcaaaaaccacaagaccatttcaatagacacagaaaatgcttttgataaaatctaacatcccttaatgaaaaaagtctttaacagattagaaatggaaggaacatacctcaaaataaaataaaaagccatctatgataaacccaaagccaacatcatactgaatgggaaaaagctcaaaacattccccttgagaactggaacaagaaaaagatgactgctctctctcaccactcctgttaaacatagaactgaaaatactatctacagcagtmaggcaagagagaaaaaaaaaaaaaaaagcatccgaataggaagtcaaactatctctcttctctgacaatatgattctatacctagaacatcctaaaatctctgtataaaaagcctcctaaaactgataaatgactaataaagtgttaaggtaaaaaataaatatacaaaaatgagtagtatttctatacatcaaaaatatccaggctgaaaatgaaatc

SEQ ID NO: 773053 - DNA, 620 bp, Homo sapiens
gaaactgttctatcagctgcaggttgtaggcactgacatcatgacagcataatacaactcatctgaatagagaaggacattttcaacttaaaaaaaaattttgcaccaacacattgttattgcattattaaaatatagttgcttatgttattcctaaaatgatggtaacatgattttggaaaacattaataggttttagttatgaggattctataattttttcctatgtaaaatattctgtgtaaatatatggctagcccactctaggcttgttgtaagcacgggataaaatgcactatgctctcttctaggagaggatgcatttacacacaatgcttgaaatgctaattcttacagcctattgtgaattttctttttattgctactaygttttgtcaaattttttttagtttttgtatttgatgttagcaatttgcatcaaaacagataataatttgggctggaaatactaagaatgcatttctaacactgtatagacctattgtggagtgccagaatatgagtgtttgaagtgcagaacgtactggcaagaaataaacatggctgatgctacatagggcccttgttgcctttcttctttcatagaattctctaattag

SEQ ID NO: 773054 - DNA, 611 bp, Homo sapiens
gattgtgatttatggtgttttagagattcggaattttgatctttagggatattgatttgtcagaaatttaacacttagaatgatggcatttgagactgtgtcttttacggttatgatccaaacccctaaataactcttaaatctcaaattaaatgacgacaacaataatacaataagaaaatgagaaaaagacataaaaatacaatccactgaagacactacagagatgacaaataagaatatgaaaagatactcaacattttcagtcattatagaaattccagctaaaaccacaatcaaatgcaaattaaaagcacacatatcagaatggttaaaatamaacaaaaacttaaatgatggcaagaatgtagagaaacttgataactcatacataactgacaggaatgtattatagccacactggaaaagagcttggctgtttacaaaaaatctaaaactgaacttactacatgacccaaagttgaactcttgggcatttatcccagtgaaatgaaaccttatgttcacaaagatatttgtacatggatgctgctatttgtatatggcatataggaatagtattgtttaaatcctaatttcaacaatttatt

SEQ ID NO: 773055 - DNA, 679 bp, Homo sapiens
catcctctggcattcaaatgtctcactaagtccagtgtgtttgtcacctcttgctcactggatccaattagcataatgtcatcaatgtaatggaccagtgtgaatcttgtggaagtaaaaagcaatcaaggtctctccaaataagattattacacaaagccaaagcattaataaatttctgaggtaagacagtaaaaatatattgctggccttgccaactgaaggcaaattgcttctggtgggccttatggacaagaatggagaaaaaggcatttgccaaatcaatggctgcataccaggtaccaggaaatgtgttaatttgctcagataatgaaaccacatctggtacagcaactgcaattggagtcaccacttagttaaacttatgataatccactctcattctccgagatccatctgtcttctgcacaggccaaatgggagggttgaacggggatgtggtgggaatcaccacccctgcatctttcaagtccttgatggtggtgctcatstccacaatccctctagagatgcaatattatttttgatttactatttttctaggtagatgcagctctaatagcttccatttggcctttccaccataacagtccctactccaccagtcagggagccagtgtgggggttttgccagctgctaagtaggtctatgccaatt

SEQ ID NO: 773056 - DNA, 643 bp, Homo sapiens
aatttccctaagcctttggatcccttactctacattaacccaagggagatcaggcatttccagctcactcacagtgggccgtcttttaatccatatttcagctaacgaaagcaaataaactattagaaccttttttttttttttttttgtaactccctgagctgcaacgttaaaagcagagttcctactttgtgggcccaaatcaataaattcagcctgattcaactctatgttccttccaccttcacccacacccttaatatctattcccatgcctgttctacagatttctgtttatataatttcgaaaatccaagcagttcttttcaagtgtagcatacctcctcatgggtcacactctcaacctcacctctaggggyccacggggactttagttatagatctagaagcaaatgagaggtgttgggggtggcttctgaggagaatcaacattgtcttgcctggcaactgcctcaggggaggccatcactgttgcctggggcagtgcaggttttatctcctcagacaaagtggaaaggctgatggcagcatgggtcagggaggggatgttgccactagtggggatggggaaactgttccttctggcaaaaaaaagttcgtcagaatttacaaactcagtgtc

SEQ ID NO: 773057 - DNA, 627 bp, Homo sapiens
tgaaaaaggtgcaaaagaaatttaatgaaagagggttagatttttctacaaattatgctggagtaccttgacctaaacttcacattttacaaaaattaactcaaagtgtttcataaactgaaatatatatgtaaacctacataacttttagaaaataaaagcatggaagaaaaatttcagaacttaggagtagacaaagttctgatttgacattaaaaacatggttcatgcaactataaatttataaatctaacctactataaaattttctctgtgaaaattcttgttaggagaatgaatggagaaataagagactgggagaaaaatgttgcaaataattctaagatttttaagggcaggaattrtgtttaggtcttttcctcaccgtctgtctacaaaaagtacctaagtatacatagcacacagtaaacttgagtatacctgttgagagaaaacttgcaagttgactcacagaaatattctctttctacttcagtgtcaaggagggcaagttattgtggaatgcaaagagaaaagttcaatttggtattacataattcatgaaagataatgcagaacattttaagcgcactgattttctgtgggtctttttaacacaatgtttct

SEQ ID NO: 773058 - DNA, 632 bp, Homo sapiens
ctgcaatataacattaactattgcagtatgcagctgtcctcctacccaaagggcctttaaatattagttcatgacttcaaaatctaggggctttaattatctcagacatgggggacaaatcttccaatgtccacatcttttgatttaaattctaggaaagtctgactcattaaaaatgttgtctttcttctttcaggtattttataatttttttgccttgctgaagttttcttatgtgatatataccatgctcttttattmtagtatgtgcttcattaatttgcctggacagtcaaatattgacaacagggagttggtggtctctaaattctaagaacttgaattgatgataaaaccaaatataggaaagaatgttgttttagttttagagcaaaatataagagatgtaagaagtagtctttgggtcgttatttcaaagatcaatagttgtcttatttttaaaaatagaagaataaaaagggtggagggagggcagctgcatctctaacaagtaactaagagcttttcttcatcctgagtaagcgttttctggactgaactactggttttggagtagctgaaggtgaaatgcaaattagtagaaacccggaagcaatgctccagggaaaagc

SEQ ID NO: 773059 - DNA, 632 bp, Homo sapiens
ctgcaatataacattaactattgcagtatgcagctgtcctcctacccaaagggcctttaaatattagttcatgacttcaaaatctaggggctttaattatctcagacatgggggacaaatcttccaatgtccacatcttttgatttaaattctaggaaagtctgactcattaaaaatgttgtctttcttctttcaggtattttataatttttttgccttgctgaagttttcttatgtgatatataccatgctcttttattctagtatgtgcttcattaatttgcctggacagtcaaatattgacaacagggagttggtggtctctaaattctaagaacttgaattgatgataaaaccaaatataggaaagaatgttgttttagttttagagcaaaatataagagatgtaagaagtagtctttgggtckttatttcaaagatcaatagttgtcttatttttaaaaatagaagaataaaaagggtggagggagggcagctgcatctctaacaagtaactaagagcttttcttcatcctgagtaagcgttttctggactgaactactggttttggagtagctgaaggtgaaatgcaaattagtagaaacccggaagcaatgctccagggaaaagc

SEQ ID NO: 773060 - DNA, 610 bp, Homo sapiens
gcctcttaaccaacttctccccatcctttccttttcacatatctttcccagcctctggtgtttattatactattctcttatctccatgagataaactttttcagcttccacataggagtgaggatatgctatatttatctttccttgctgagattatttatttcacttaaatatgatgtcccctactttcacccatattgttctaaataaaaaaaattcatttttatggctaaataatattccatcgtgtaaatatgctacattttctttacatattcataagatgatraacacaaggtttgattccatattttgactattgtgactagtgctgcaataaacatgaaaatgcagatatctctttgatatatttgtttcttttctttttaatatatactcagcagtgggattgctagatccagtctatcactgatgggcatttgggttgattccatgtcttagctattgtgaataatgctgcagtgaacatacacatgcatgtatctttgtaatacaatgacttatgttcctttgggaatatacccagtaatgggattgccagatcaaatagtatttctggttctcgacctttgaggaatcgccaccatct

SEQ ID NO: 773061 - DNA, 610 bp, Homo sapiens
gcctcttaaccaacttctccccatcctttccttttcacatatctttcccagcctctggtgtttattatactattctcttatctccatgagataaactttttcagcttccacataggagtgaggatatgctatatttatctttccttgctgagattatttatttcacttaaatatgatgtcccctactttcacccatattgttctaaataaaaaaaattcatttttatggctaaataatattccatcgtgtaaatatgctacattttctttacatattcataagatgatgaacacaaggtttgattccatattttgactattgtgactagtgctgcaataaacatgaaaatgcagatatctctttgatatatttgtttcttttctttttaatatrtactcagcagtgggattgctagatccagtctatcactgatgggcatttgggttgattccatgtcttagctattgtgaataatgctgcagtgaacatacacatgcatgtatctttgtaatacaatgacttatgttcctttgggaatatacccagtaatgggattgccagatcaaatagtatttctggttctcgacctttgaggaatcgccaccatct

SEQ ID NO: 773062 - DNA, 619 bp, Homo sapiens
ctaacagaggacaaatatttaataaaggattgctattcttactatattttctgtgaaaggtaattattgcctgatacaaaagtaaaacaggtagtaactgtgctggcatcattgtaaaactcttccaactaagaaagaaacttagctgggtacagtgtctcatgcctgtaatcccaacactttgggcaatatatggagacctcatccttacaaaaaataaaaaaaattagcccagcacagtggtgtacamctgtggtcccagctacacaggaggctgaggcaggaggattgcgtgagcccagaagatcagaggctacagtgatcgtgattgtgccactgcactccaggcatcagagcaagaaactgtctatttaaaaaaaggaaatcattaaaaccagtttcctaaaatttattatagagctagaaatagattagtgactgcctaggacaaggggaagagagtagtgagggctaaaggatacagaatttctttttgtgtaataaaaatgttctaaaattgattgtggtgatgattgcacaactctgtgaacatactaaaaatcactgaattgtatactttgagtgaattatacaatatgtgaattatatctcaataaaa

SEQ ID NO: 773063 - DNA, 588 bp, Homo sapiens
gctgctgtagtcaggatttcttgatctatgttgaatgggctatggatggttggagagtgtggattattacacttgagctcagacaagtctttcagaactcattctgagacaggaagtgatgaaatcagctctcacatgaactgtgaggctgtcacgtgcacttagccactttctgtctcaatgggtgacaggggaatgcggaggggagagtagggcatggggaagtgggtagtggggagcgggaagaaraggccagatacagatggtgggaaaagtcccaactctgcccctcacagtttcccttattcttctagggctaggattaagtaaactgggttatttctactcccaatgaccaatctctcattgtgacaatctgctgaatttaaccaccccttgtgaacattcaatttcccaactctgacgctattgacaacggttatggaagacagcaagtcgcatcattatcgcacagcctactaactgtttagttagagctgacacagcaaatggacttctgtaattcctcttctgctttatccctaaatttccaccctaaatagtaaagtggggggaaggtatagaaaa

SEQ ID NO: 773064 - DNA, 540 bp, Homo sapiens
agattttaaaggttctggagctatgaccacattatataagtatttaattttcacaacattttctaagtgatttcatttgtggaagatgaggcttagattaagtaacacgaagctgatacttgaaagactgctgtgttgaaagcaggtctgtttgaatataccatgctctttaaacttcattatagaaacattttctcagactagtacattggtgttttatgatttccaatagcataacaaatattttagttatakatgccataactaatgtggtagttcaagatattactgctaaaggtcatcagaaatatttctaaacacaatttatcgcatttcataaagaccatgggaaccttaaactggacggcgtatgccttaaagtataatatctgcaaactgtaaatccctttttttaaacaaataggagttgtgtcctaaaagggatggtaaatcataaacaaaacaataaattaactatataagaaagcagagaccatactcttgacattggaagtgattaccatattacaaaaacactga

SEQ ID NO: 773065 - DNA, 549 bp, Homo sapiens
atccctttgcccagtcaagttaacacatacaattaactgaagtcctttatacacctagatgaatacaagaaaaagagacataatattaaaaagtagaaatattacacagaaatcaaattcatagatgaaataaattttctacgtaatattctatttctagaatgacatgctttgacatttcattaagaatttttagatgtttcaaatggaacagactacatatttcagatcaattgaccttgaggatacaattcagaaacaagttttactcaacagtttccatgaggagatgtgactgccagattggattaaaggccaaggttttgttggratgtgtgtgtgtgtgtgtgtgtgtgtgtgtgtgtgtgtgtacacatgtgtgacattttatcaataatgattattggcaatttatattttatcccaagattactatgtttgcagtggcaataaaaattcataatttcatgagttactgttttaaagagcaaacagagaatttatctaactttaattattcaaaatatctggaattgtgtggttatttgc

SEQ ID NO: 773066 - DNA, 611 bp, Homo sapiens
ggatgcatagtttgcaaaaatgttctcccattctgtaggttgtttactttcttgatagtttcttttgatatgcagaagatctttagtttaattaggtctccattgtcaattttttttttgtatttgcttttgaggacttagtcataagttacttaactaggccagtgttgagaggggtatttcctaggttgtcttccaggatttttacagtttgaggtctatacagttaagtctttaatccatcttgagttaatttttgtgtatggtgtgatgtagaagtccagtttcattcatytgcatggggcaacccagcttctccagcaccacttattgaaaagggtatcctttccctattgtttatttttgtcacctttgtcaaagatcaattgtttgcaggtgtgtggttttattttggggctctctattctgttctgttgtcctatgtgtctgtttttgcaccagtatcatactgttttggttacactagccttattgtatagcttgaagtcaggtaatgtgatacttctgactttaattttgcttaggattgccttagctattgggggtctttttggctctacatgaattctgtaggaatttcagaatagttt

SEQ ID NO: 773067 - DNA, 609 bp, Homo sapiens
aaaaatagtgttttattcattggggctcttcttgaaaacaagtatgcacgcttttttaaaaaagacagagacaaaatctaaagtacctaagaaacaccaggtccttttcaatgaattatgagcagttggttatttctcccaagtaactgtgaacacagattgtaaaatattaatcagcttcagcctctatttawcatgcagcaaagatggaaacctcagacacaaatgttattagccatgactcaggtcatttggaaaagtatcttctggagctggcaagggtgggtcagaagttcaggacaaatgtgattggacagtagaaagtagaatgatgtcactggttaagtcagctgagacaggtagtctgaaggctgcaccttaattctcataccatcttcataaccgtcagataaaattaatgacacattccaaacaacaaaggactgttgtttggtacaaattacttgcaaggtcactgcatgtgaacaccacatactttgttaacctcaggctgagataatcaagagggaaataatgaatttgattccaacaaacccccaataaatgacaaagtttttaattttttcattcaattaccatcataattca

SEQ ID NO: 773068 - DNA, 609 bp, Homo sapiens
aaaaatagtgttttattcattggggctcttcttgaaaacaagtatgcacgcttttttaaaaaagacagagacaaaatctaaagtacctaagaaacaccaggtccttttcaatgaattatgagcagttggttatttctcccaagtaactgtgaacacagattgtaaaatattaatcagcttcagcctctatttaacatgcagcaaagatggaaacctcagacacaaatgttattagccatgactcaggtcatttggaaaagtatcttctggagctggcaagggtgggtcagaagttcaggacaaatgtgattggacagtagaaagtagaatgatgtcactggttaagtcagctgagacaggtagtytgaaggctgcaccttaattctcataccatcttcataaccgtcagataaaattaatgacacattccaaacaacaaaggactgttgtttggtacaaattacttgcaaggtcactgcatgtgaacaccacatactttgttaacctcaggctgagataatcaagagggaaataatgaatttgattccaacaaacccccaataaatgacaaagtttttaattttttcattcaattaccatcataattca

SEQ ID NO: 773069 - DNA, 609 bp, Homo sapiens
aaaaatagtgttttattcattggggctcttcttgaaaacaagtatgcacgcttttttaaaaaagacagagacaaaatctaaagtacctaagaaacaccaggtccttttcaatgaattatgagcagttggttatttctcccaagtaactgtgaacacagattgtaaaatattaatcagcttcagcctctatttaacatgcagcaaagatggaaacctcagacacaaatgttattagccatgactcaggtcatttggaaaagtatcttctggagctggcaagggtgggtcagaagttcaggacaaatgtgattggacagtagaaagtagaatgatgtcactggttaagtcagctgagacaggtagtctgaaggctgcaccttaattytcataccatcttcataaccgtcagataaaattaatgacacattccaaacaacaaaggactgttgtttggtacaaattacttgcaaggtcactgcatgtgaacaccacatactttgttaacctcaggctgagataatcaagagggaaataatgaatttgattccaacaaacccccaataaatgacaaagtttttaattttttcattcaattaccatcataattca

SEQ ID NO: 773070 - DNA, 540 bp, Homo sapiens
tttttttctacagtgctcaattgccgcagcaccatttattaaaacatctatctttcctccattgtttttatgtctttgtcactaattagttggcaaaatatgtcttttcctctaccaactccaccaataccacacaatcttsgttactctagctacacagaaatccttagtatcaaacaggatcattccttccactttattctttatttttccaaaattcttttggctatttcagctacagtgcctttctatatgaattttagaatatgtttatgtcaacaaaaagtttacctggggtttcttataggaattgcattatatctacagatcagtttggggagtattaactttttttttttttctgtaaggaggtttcaaaacaatgaacatggaatgcctctttacttgtttaagccttgtttaatttttttcatcagcattttggaatttttaccatatattgtaaattttttagatttgtatttaggaatttcattttctctggagctaatgtaaatggttttgtatttttatttcagt

SEQ ID NO: 773071 - DNA, 540 bp, Homo sapiens
tttttttctacagtgctcaattgccgcagcaccatttattaaaacatctatctttcctccattgtttttatgtctttgtcactaattagttggcaaaatatgtcttttcctctaccaactccaccaataccacacaatcttcgttactctagctacacagaaatccttagtatcaaacargatcattccttccactttattctttatttttccaaaattcttttggctatttcagctacagtgcctttctatatgaattttagaatatgtttatgtcaacaaaaagtttacctggggtttcttataggaattgcattatatctacagatcagtttggggagtattaactttttttttttttctgtaaggaggtttcaaaacaatgaacatggaatgcctctttacttgtttaagccttgtttaatttttttcatcagcattttggaatttttaccatatattgtaaattttttagatttgtatttaggaatttcattttctctggagctaatgtaaatggttttgtatttttatttcagt

SEQ ID NO: 773072 - DNA, 540 bp, Homo sapiens
tttttttctacagtgctcaattgccgcagcaccatttattaaaacatctatctttcctccattgtttttatgtctttgtcactaattagttggcaaaatatgtcttttcctctaccaactccaccaataccacacaatcttcgttactctagctacacagaaatccttagtatcaaacaggatcattccttccactttattctttatttttccaaaattcttttggctatttcagctacagtgcctttctatatgaattttagaatatgtttatgtcaacaaaaagtttacctggggtttcttataggaattgcattatatctacagatcagtttggggagwattaactttttttttttttctgtaaggaggtttcaaaacaatgaacatggaatgcctctttacttgtttaagccttgtttaatttttttcatcagcattttggaatttttaccatatattgtaaattttttagatttgtatttaggaatttcattttctctggagctaatgtaaatggttttgtatttttatttcagt

SEQ ID NO: 773073 - DNA, 456 bp, Homo sapiens
tgatgcttttacttttgtgcttcactgatcctcattttccccagtttatctctctcccaacccttacatatactatagggggtccttggggagtggtgaaatttccagaacaattattttactgagaaagcacacataactttgaggctgtttggtgaatattggcttatcacactttgaacaggtgggctggtgcaggaaatagaatccagactttgacatcaaacttagtttcagattataacttgaccacttcctagtttggtgttctcagggcatgttagacaatctgtatttytgaatctgcaaaatgggcataataaaacttggcagggtgttgtaaggagtcagtgtagttaggtgggtatagaatctggcacggaacagggattcagtttgttagcagcttcttctcatctctgtgccattgctgttagagagaagttggttactagg

SEQ ID NO: 773074 - DNA, 541 bp, Homo sapiens
attgcttttttttttttttttttttttgcagattgttgcttactttcttgttccctgatgatatctcttagatgtaatgttgttcaattgatgcacatccttcatactttacataatatagtgctttacctaatgttaaatttagtactttacataatattaaaagagcagaactgccttggaggtagatagagtctagatatcaggtcatttttgtcctagtttgtgaatttagggtttctactttcatccagtttcttgcctgtttttgtgactgtccccttaacctctgttatcagagcatctagaaatagtgaagaattcactaaattagtagtctggagttcaaagggcaattgttttatgtaartgttttaaaagcttatcctccgaaacgtaagcaatccagtaaatctatccagtgtaagtgtgttatgattgggatggattaacctcattccactaaaagagaaatgcagaactctatgttgcagccaaggtgcactggttaatgtccatatggattgacaaagtggttgtt

SEQ ID NO: 773075 - DNA, 626 bp, Homo sapiens
acacatctgtcagtgaggacacaaagaccaaatataaagaccaaattttatcttcataaagactctatggttttcatgcattgtaaatgagaaaagtagaagcacagagaggttatttgcccaagatgacacagctagtaactgccagaactggaatttgaacacaggcagtctggctgtagatcagcattgtcaaatagaaatacaatgcaatggatgcacctggaggcgawaaacgtaagcgaattaatgcaggaacagaaaaccaaatattgctgggtgtggtggctcatgcctgtaatcccaacactttgggaggtcgaggcgggcagatcacttgagatggtcaggagtttgagaccagcctggccaacatggtgaaacctcatctccactaaaaatacaaaaatcagctgggcattgtggtgcatgcctgtaatcccagctactcgggaggctaaggcaggagaatcacttaaacctgggaggtggaagttgcagtgagctgagatcgcaccacttcactccagcctaggagacagagcgagactgcatctccaaaaacaaacaaacaaaaacaaaaatccaagtatttcatgttctcgcttataagtgggagctaaaca

SEQ ID NO: 773076 - DNA, 520 bp, Homo sapiens
caattcctgccactactccttcactccccgggaggttttttgatgcacgtttctcttgcacaataggctggtttatgcctctgtgcctctgctcatgctgatccttctgtctcatactcctttcctctctccttgactcatttttttttttttttttgagatggagtctcacactctgtcacccaggctggagtgcagtggtgataccatggtgcactgcagcttctacctcctaggctcaagtgatcctctcgcctcarcctccctagtagctgagactacaggtgtgcaccaccacgcccactaatttttctattttttgcagagacagggtttcaccatgttgttcaggctggtcttgaactattgggttcaagtgatctgcccaccttggcctcccaaagtgctggaattacaggtgtgagccaccgtgcccagttgcctcatctaattcttgtttttcaaaataaagctgcagaaacccttgtcttatctttaggctaggttagaaatcagtgtg

SEQ ID NO: 773077 - DNA, 547 bp, Homo sapiens
gaaagaagctttatttcatttttctaaaaacacttgcaggtaaactttattatctccccattatacagaaaagtaaatggaggttcagggaggagtgtctcaagccacataactagcaagcggcaggtccgagtgtcacacccaggtttgtctacctccaaagcctttgctttgctggtgttttctttgctaaaactggagctttcttctatagcaaaaacttcttccaggacagcactggggaatggagggccttgagctcctgaaactgccaagctaggaaaccattcctggcttcattaataattaacagygggttcttttccaatgaggaatattcacaaagcaactgccttctttcaggttctttggacattggttctttccctgctcagtacttggccctggacctgaagatagccagttcacattttttgggagggaattgcctggtaccttatccttggagaggcagcttgggagcccctggtccttgaacacagtgttactacacccacaaatattcttcaagtgttcgtaaatgaaa

SEQ ID NO: 773078 - DNA, 590 bp, Homo sapiens
cattttactgacttcgtaaggtgatttccatctgtagtgtttaagctgatttttgtttgtttatttgttgctattgcttttaatgagggcattactttgggtcatttttactgctgaagcaaaatatgtctgtttctgtcaaaatcacttcagaagctatgtagtattacaggggaattcttttaaaaatcaaatacagagmtgctatttggggaagatgatatcgatgattgaagggaataggacctttgtgcagtatttattctggaagtcccattatctgaatttcaggatttctgattcagcctttaaagccggttgaggcattgaggcagtcctgacagggtgtgtaggcacatacacacacacacgcacacacacacacacacacaccctctaaaagagagaaagataagaaaataccatggataagcttcgctagcattgcctttcctttctaatttggtggttggaaagaggcaaagaggagacaagatggtgatagaccggttgcaaggtttcagcagaggggaccttggcaggctgcctacgagcagggagtgtgcagtttccaggcatggccacaggat

SEQ ID NO: 773079 - DNA, 650 bp, Homo sapiens
aaaaagcagaagaagagagaaagaaacattggataggagccattcaaatgtacatgaagtgttcagggagggccttatagagaaggcaacatttaaggaaattctgaaggatgtggctgtgagggggataagtggagagaagaaaaaatgcaaaggcctcagttaagtagcctgtcagccttgcctgaggatccagcgtggctggagcgagtgagggacaggtggggtcgcaggagatgggttcattcaggcaagtgaacaggagtgaggccactgaaggaaactggtttatactggatgtgataaatgtatcattttaatatttgcttttagtaktaatgagcctattgagtgaatagtgaatggaattcaaatgtatttgacactagagtcttttatgcaggacacaagctaagaaaaagacattttaaagaagacataaagacaaccagagtgtgaaaagtctccaaagtccttctactactttctatgactcagagtacagcataccttttattgttacactggattttacttaacaaaaggaccatatctcttatgtaacctgtttcctctctaaacagaaacaggttttaaaatcattatcattagtatcaaaacactgttaagcaaattgtgattttaaatat

SEQ ID NO: 773080 - DNA, 566 bp, Homo sapiens
gcattctggcataaagaatcctatacaaatagagcaaacccttaggaatcttggaaattccagataatctaactcatttgtaggccctttctttgtttctctgcttaggaatctgatagtcaaattatttttgagtttctctctcaactctaggaaaaggtgcaggaggtatcaacttaaaggtawaaagcaaatgttccaaaaaagtacagataaagcaaatctgcacaaggaaagaaaggtcagtttcagcaaaatctattcaatgttaaattctaacaatgctattgctattataaacaataaatataacaggtaaatcatatcgcatgtaaaaatggcaaatatatagaaaaaaaggcagagcaggctaaaggaaattagagaaagtcaggctgagtatgaaataaactaggcaggcacacctcatgaaaaggccaggtgtgagcaaagacccgaaacagggtaaggagagcggcaagcgcagtgtgggagaagagcacgcagggcaggggagcagtaacaacataaacttgaaggcgagtgtgccctgagactcggaggat

SEQ ID NO: 773081 - DNA, 530 bp, Homo sapiens
caagatagctaatttccctattaagtcaattttaccaggtaaaactaaaaacactcgagtatttttttaaatgcaacaaagtgttacaaggatattacttttacatcattaaattaatacattgttatttaaaataaaatcttgtagaaaactctcattcttacaaaataataaattcctttgctctaatctggkttgactctatttatccagctggaatctacaatatataagactcttttcactcaaataaggctggtttcactagactctcaaatatgttttgctcactattaactcaaaatccttttatcttcaaatatttactgagcacctactaagtgcctgtcagagttctttatgcttacaatatcttggagaataaaaaagatacaataatccttgtcttcatgaagctgtattctaaatgcaggtgactgtcaataaacttgataaataactatatcatacagcgagttggaaatgcttggttgggagaatgcagaccaggataaggggaattggaaggc

SEQ ID NO: 773082 - DNA, 593 bp, Homo sapiens
aagttagacctgagctgaagctccattaattacctgacctccataagctcctactttaactggagaaccacaatgatgtttgagtcccctggaatcaacatcagctcagagccagtgtccactagtacccaaaaggtctgatcatttcctttccccagtacacagttaccttggtaaaaggccggaggtctccttggggaaggatgagagaaagattcaccgcataaactgttggtaatatagtggggtccttcttcaaggggacccgtcctccccttcattcaaggggttctgggtctgtaaactggctaaagtctggaaattaattgaggggccataattgtctgtttttataatttaaattactcttttgtccatttgacctagaagttttctccttagaaaaattaagtaggaatacagtagacttcctatcartttcacttctaggaacaccatgattagttagccaatgccagagctctacacgagtaagaatattctgattgctgttttgtctctgctgtccattatagtatctacacccactttgcctttgaccgttgagtaccaccacttggcccctgccacct

SEQ ID NO: 773083 - DNA, 607 bp, Homo sapiens
aaacttgtgaaggacaaggatgtctatgctatttaaaagtctttgcaggcagggtgcggtggctcatgcctgtaatcccagcactttgggaggctgaggcaggcagatcacctgaggccaggagttcaagaccaacctggccaacgtggcaaaaccccatctctactaaaaatacaaaaaattagccaggtgtggtggtgggcacctgtaatccyaactacatggaaggctgaggcaggagaatggcgtgaacccaggaggcaggcagaggttacagtgagctgagattgtgccactgcactccagcctggattacaagagtgaaactccatctcaaaaaaaaaaaaaaaaactcttcacagattactaaagcctgtcatataggatatgtcagataattttgcaataaggcagacaggtaaaatggagtaataattttatctccttttacatctgagaaaattggggcccagaagagctatgggaattgcccaaggccacacgtttacgaagtagtggatctgggactaatacccagatttcctgattacaactctcaggttgttctttagatcatcctaaaggatatgtcagaaatcaggtccat

SEQ ID NO: 773084 - DNA, 558 bp, Homo sapiens
agagatgactatttgagtacccttggtgatgccacaaaaccctgcctaggctggccaaccccaccacaggtcacagggtgctgagagcagcactgattttgtgcagaaagggctcagctgtcacagtttcaactccacaggtgggtcccagccaaggaagtctgagaaagagcgaggtggcaagaagcccacacttataccctccgggctcaggttagacatttctgggttctataytcagcatcccaaccaccagcacattggagtgacacacacagtaggcgttcaacaatactttagttgtccctggacacacacttctcttcctagaaagggggcaggaatgttaacaacagggaattgactgagtcccaagtataagctgggtgtttgttttatttttccattttcctcactcactactttcatatgtagtaaagagagtacactgatgtatgaaggctttcagctgtatgtgcgaggaggtgagcttgtcttgccatcagctgttcaatgtaccaccatggccaagatttaggaggtttttctgaagccctt

SEQ ID NO: 773085 - DNA, 612 bp, Homo sapiens
acctataagaaactcattttgtgggatgtttcacattccagcccatggtttattcccccatatatcccttccagtaatatcaaccagatgtggcaaagaagtctgtgcagaattgtaaaaattacaagcatattctgtaattccaaagcattgtaaagtcacagcttggttttctttccttcttaaaaaaaattyaaaaacaatttccaagctggcagaatgtacttctcagtacaagtattgcccgatcactttagaaaactcttctgctggcccacagggctgaagagactaaaatgtaaaacccaactctacctttgataaattgtagggaatttagaaaggtctacttgctagcatgtatttaggtctataaatctttttctttcaatgtttcaagtattaatatcctagatctcagataagagcatgtgcttatatatactcatatgcgcttataagttcaaaatactgaaccatgaaagcttcataaatttatgattgttatccctctcccattcaagatgtgtttctgcatagaaagcacatcataaggtagggaaaaaactcacaggagtaagagggtgagaaagtcagagagacctgggttca

SEQ ID NO: 773086 - DNA, 612 bp, Homo sapiens
acctataagaaactcattttgtgggatgtttcacattccagcccatggtttattcccccatatatcccttccagtaatatcaaccagatgtggcaaagaagtctgtgcagaattgtaaaaattacaagcatattctgtaattccaaagcattgtaaagtcacagcttggttttctttccttcttaaaaaaaatttaaaaacaatttccaagctggcagaatgtacttctcagtacaagtattgcccgatcactttagaaaactcttctgctggcccacagggctgaagagactaaaatgtaaaacccaactctacctttgataaattgtagggaatttagaaaggtctacttgctagcatgtatttaggtctataaatctttttctttcaatgtttcaagtattaatatcctagatctcagataagagcaygtgcttatatatactcatatgcgcttataagttcaaaatactgaaccatgaaagcttcataaatttatgattgttatccctctcccattcaagatgtgtttctgcatagaaagcacatcataaggtagggaaaaaactcacaggagtaagagggtgagaaagtcagagagacctgggttca

SEQ ID NO: 773087 - DNA, 458 bp, Homo sapiens
agtgcattttccagtccgtttcatgccaactgaaaagctgagacctgccaaggcctgagcttttaaaaatataagtagggaacccccagggagcctgaagcaggggctattcaaaatgttcttttaaaaaatttttaaaatatacttgacaagtgctttttccccatttggggaaaacctgtcagaaaggatgcccagagcaaagagaaactctgaccccaggcaagctgcctgggccttcccaatgggtatccctgggcccyggcttgattttttttggaaagcaggcttcttctcacacatggggtttcatgccttagagttaattattcagtcacgaattactccaggaagaacttccctttctatggagccaaatgaccaagtgtctttctataaaaagaacgtcatcccttttaacgaggacaccccacacccaaatcacacacgtgtgtgta

SEQ ID NO: 773088 - DNA, 644 bp, Homo sapiens
attagcctgtttctccctcagacctcaaccttttgttgaggggaagaaacacttgtggtagaaggaaacataattaatggaaggatcatgtgcatggactatcatcttatcagtgatgataataggcctggttgcctagatctttccagtcagccgccatgttctgtcagcatagctttcataatgtcctcttcctgtcattaacaatgtctttgggtttctgggttttctgtcctcaaattcatcctgaacaccataactaggtcgttcatcctggagagatatcttggtactttgcctcccaatgtttaaaggctccctattgccaatgatgaagtcctaacaytgtatcctgacatctgcatccctacacagtatgatctccgctcatgtttatgatcttctgtcccactcttcttccgtgggaaccagaccattgagctcttgggccttcagacacctgtctgctcacctctctgctcagagttctttgcccggactgccctgcagtaatgatttttttgccctgcaataattattgcaataataaatacaataataaatgcaaaaataataaaaataatccaaacaataattattgccctgcaataattatctctccatatcctcatctctcacagaga

SEQ ID NO: 773089 - DNA, 626 bp, Homo sapiens
attattcagtcatagaaaggaagaattcggacacaggcaacaacatggatagaccttgaagacattatgctgagtgaaataagctagtcacaaaaatacaaatactatatgattccgtttatgtgaggtacctagagtagaaaattcataggagcagaaagtggaataatggttgctagaggggaaggtagggaagsgcaaatgaggagctgctattgaatgggtccagagtctcagtttttcaggatgagaagggttctagggacggctgatagtgatggctgcacaacaaggcgaatgtacttaacgccacagagctgtacacttgaacgccattaagatgttaaatttgatgctatgtacacttcaccacaatgaaaaataattttaaaagagggtttcaggaaggaaatttttacaaatagatgggtgataggtgctgatgagtgatggttaaacatgaggaagtagcaactgtaggaagctgcatctacccctaggcctgaggggtgcatggaaggagagttactgggacaagtcgagagcagtagccatgggagaagggccgcccaacagaagctgtggcttttgggaactaagcacttccaaaccacagcccagcagag

SEQ ID NO: 773090 - DNA, 598 bp, Homo sapiens
acttgaacctgattccaacacagagtaaatatctcaataacagacaggagggagaagaaaatggctctgatgatcattaaaaaaggggctgggcacggtggctcatgcttgtaatcccagcactttgggaggtcgaggtgggtggatcatgaggtcaggtgttcgagaccagcccggccaacatagtgaaaccccgcctctactaaaaatacaaaaattagctgggcatggtggtgtgtgcctgtaatcccagctactcaggaggctgaggcaggagaatcgcttgaacctgggaggcggaggttgcagtgagccaagattgtgccattgcattccagcccaggccaccgtgcraggaaaaaaaaggaaatgaaaaggtgtgccaggctgatagtcaaattcatctgatttacatgactttcactttgaacgtgcagactccaatgcatgaagcccaggttgaactgggaaatccaaattgcacttaagatacatgagtaccttaatcccgacacaggctttctgagccaggctctgtttaatcaatgggtgtttggaatgagggctgtggacatcatagcggctcccttttccctag

SEQ ID NO: 773091 - DNA, 516 bp, Homo sapiens
caaaacacatggatagattttctatcactgatggtactggatacactgggcaggcctgctgtcttccacttttctgataaggatcttgacgttcaccatgtgccacgcccacacagctctagagtagactctcagcccatatactcacctgtaagccaaaaaaggtacacgtggtcaaaattaccccgcaaaatgctgcaagtcatccccacgaggyggtgcccagacactttgcccccgaagagctggaagagattagttccttcagtggactaccagccaaattcaggtgacttacatttagaggtcaagtttcttaatactcagcctgctgagatgcatgcacgcgggacacctgcagaagctgagggatcagcaggttcgagtctccccttccacgctcactgcaggtatttgctttctgagtgatgtggcaggtgaccatttcagttgttgactttctctttcttctttgtgagaaatgcacatagttgaatttgctcaatttaaatttgt

SEQ ID NO: 773092 - DNA, 623 bp, Homo sapiens
cagaccacactgtgagataggcacaatcactatctccatgctacagatgaggaaacttaaggcacatagaagctaagcaacttgtccaagttcacacagctagtaagtggcagctccagcattctgctgcataaaaagataatgggttggtaccctgcatttaaaaatgtacttgtaaatatcagctaggcaaatatatgtgcaaggtgaggcctaaaagccctcaggattatattggtttgaaggaagaaggggggctctgtgagctgggtgtttggcacaggtgtcaactgggggtgtgacttgggtttggaagagcttagagaagcagggagagcatcctggtgggtgagaggtgtgcaggtagcagtggaggcaggaggagccgggtgatctgagcaggtggataacagagaagrgggtgtggaggtcagaagggatggctagagccagctggcttgtgaagggccttgaacttcaagccattgtcatcaaaccagaaccaggggaaatgaagtgatgaaagccctgcagctgatggaatcccgggaggcatcaggctccgtcagggcagtagattccctcgtttgaaagagaaaaccgccattggttagcaggaacat

SEQ ID NO: 773093 - DNA, 522 bp, Homo sapiens
aagcgctggctgtgggaagcacaaattccccaaggcgaccactgggagtgatgataagcagggtcacttgcacctgttagttcttgggcccaagtattataagtatataaggcaaagcgtcattttatggctgtggattcaaaaaatatgctgcatcctgagggatttagctccattttcccagggtgccttttccaagctgatgcctctcaagcatcttcaaaaggctatcgaattgttgtatcaggccggcagcatctggctggtaggctatgtgstaatcccagtaaatgtcatgatcatatattcactgccacaccattttttgctataaggtgaatccctgggttagagaccatgttaggcagaatcctgccccatgttagtaggtcagatactgagacttcagatgttggtgatggatgacagcatgagaaaattctgccacataatggtgacaggagaaatacatatgtccctcaagtgatatactaggacatctctttccctcgcactagtgtg

SEQ ID NO: 773094 - DNA, 597 bp, Homo sapiens
aacaataactccccatcccccactgccctccagtctctgggaactattattttctctatatataaatttggtgactctaggtaccctatgtaagtaaaatcatagacttatatgtgactttttgtgaatggcttattttgtttagcataatgtcttgaagtttcaacaatgttgttgcatgtaacaagatttctattctaagactaataaatattctattgtgtgtgtatagataatatagatatacgtatacataccttattttgtttatccattcatccatcgatggacaatgggttgctttcaccttttggctattgcgaatgacatttcaatgaatgtgaatgtacaaatatctattagagatcctgcttttgatccttttggatagatacccgggagtggaattactcagaaggggaattattttcctttcttgtgttgctatatakaaatatctgaggctgggtaatttaaaaaaaagtaatttgattgactcttggttctccagattgtagaggaagcacagcaccagcatgtgctcagcttctggcgagggcctcaggaaactttcaatcatagcattaggcaaagcag

SEQ ID NO: 773095 - DNA, 553 bp, Homo sapiens
agataacaattataggttaaacattataaacatttatgtgaactcatgaagtgcagaagtcaacaaacaagaaaatgagtacttcacctacttttgaaatgttacttgatcgacttgcagatcgccctggggatttttcattctgaaaaataaaatgggaaacattaattaaaagaaggtatggtactttcaccatactgtaccactgagaagagaaaccacagcacaaggaaatctgtgaatgctctctatattgttttgactaatacacatattaattgcttacacagaatgcttttttcttttatgaaatcatatttctctaatatatattastgtactttaaaaatgcttcaattaatatctgagtattaatcaggttacaagtatttgtttccaggaaataattatttctccagaaaaatttttgaaattcttcggcactaaaattagacagtaaaactgtagtctaccatttcccctcttgcccttgcaactaggaaagtttgagtcaattctggttttcaatatcattaaatattctgtgctgggt

SEQ ID NO: 773096 - DNA, 553 bp, Homo sapiens
agataacaattataggttaaacattataaacatttatgtgaactcatgaagtgcagaagtcaacaaacaagaaaatgagtacttcacctacttttgaaatgttacttgatcgacttgcagatcgccctggggatttttcattctgaaaaataaaatgggaaacattaattaaaagaaggtatggtactttcaccatactgtaccactgagaagagaaaccacagcacaaggaaatctgtgaatgctctctatattgttttgactaatacacatattaattgcttacacagaatgcttttttcttttatgaaatcatatttctctaatatatattagtgtactttaaaaatgcttcaattaatatctgagtattaatcaggttacaagtatttgtttccaggaaataattayttctccagaaaaatttttgaaattcttcggcactaaaattagacagtaaaactgtagtctaccatttcccctcttgcccttgcaactaggaaagtttgagtcaattctggttttcaatatcattaaatattctgtgctgggt

SEQ ID NO: 773097 - DNA, 568 bp, Homo sapiens
gctaacacctaatttatgttattttcttaagtgctgtttaatgagtatctgctatatgactgatatttgcactaaaggcagagatttcattcatcaagagagattttgctttttgtttcacagaatagacccaacaattaaataagcaattgcaataaatgtctatcatgactacraaactcttgttttagtaaatggaacagagtaggcactcattaattccagtaatatcctttcaaatattaaagctgaggagtctatttcataaagtccaaagagtaaatgtgttagtaggacataaccatgttaaacaattgtagattaattttaccaaagcttgttggtaaaggaagaaccattagaataatctcctccatgaagtaatgatttgttcaagtataacttataaagtccttcagagttaaaaatgaaaggaaaaaatacattttctctagttagcacaattggtaaaattaaacatccctgtattttgatagctacaagtagattatagaaatagaccatctgggatcgatgattaacctcccccccccaaaaaaaaaagttg

SEQ ID NO: 773098 - DNA, 613 bp, Homo sapiens
ataagaaactcatgaaataatgggaatttgtaaagaagctaaatctagtattgtttttgaaatcattttatctgacgaagttttgaagtataataaaatctttcatgttcaaaatgtcttcaattaaaactaatgatattacttagaaaaaagtgtcctagtaattacaacttgattttgaaaactcacaacctcacggggggtcataagcagttaaacgtctacactkaaaagtatcatcgactcatttaatgttgtatgactgatattcatgaaataagccactttcttcttatttcttctctatcagacaagctggtggtaaattttgtgtctctggtcagcctctgtctgcaaactcttctcaggagtggaggctgcactacctgccttacttcctacatccctcacttccgtatcattccgaccctcacgtagaaaaccacctacaacatctgccaaaatacactgcttttcagaaaacaaaaatagtaaagccagaagaatagaaaaacactcaccctgattcgctctggtttacttacaagaaatgacatgggttcctactgtgtaggcctacttcagtttcaaaaacttaaacctaaaaggaaaa

SEQ ID NO: 773099 - DNA, 613 bp, Homo sapiens
ataagaaactcatgaaataatgggaatttgtaaagaagctaaatctagtattgtttttgaaatcattttatctgacgaagttttgaagtataataaaatctttcatgttcaaaatgtcttcaattaaaactaatgatattacttagaaaaaagtgtcctagtaattacaacttgattttgaaaactcacaacctcacggggggtcataagcagttaaacgtctacacttaaaagtatcatcgactcatttaatgttgtatgactgatattcatgaaataagccactttcttcttatttcttctctatcagacaagctggtggtaaattttgtgtctctggtcagcctctgtctgcaaactcttctcaggagtggaggctgcactacctgccttacttcctacatccctcacttccgtatcattccgaccctcacrtagaaaaccacctacaacatctgccaaaatacactgcttttcagaaaacaaaaatagtaaagccagaagaatagaaaaacactcaccctgattcgctctggtttacttacaagaaatgacatgggttcctactgtgtaggcctacttcagtttcaaaaacttaaacctaaaaggaaaa

SEQ ID NO: 773100 - DNA, 618 bp, Homo sapiens
gataacataaaattaaccctttgaaagtgtacaactccgtggtttttagtatatccacctgattgcacaacgatcaccactgtctagttccagaacatttttatcaccacaaaagaaaggctgtatccaggccgggcacggtggctcacgcctgtaatcccagcactttgggaggccgaggcgggcggatcacggggtcaggagattgaaaccatcctgggtaacacggtgaagccctatctgtactaaagatacaaaaaaattagctgggcatgrtggcagatgcctgtagtcccagctactcaggaggctgaggcaggagaatggcctgaacccaggaagcggagcttgcagtgagccaagattgcgccactgcactccagcctgggcgacagagcaagactccatctcacaaaaaaataataaaaataaaataaaaaaaaaaaagaaaggctgtctttctcctttcccattggccgtctttctccattccctactcctccaatcccctggcaaccactaaatctactttccatgtctgtggacttgactcttcgggacattttacataaatggaatcatgcaatgcagcacattttgcatctggcttttttcacc

SEQ ID NO: 773101 - DNA, 623 bp, Homo sapiens
aagtagcaatccaacttaattcttgcatgtgggtattcagttattccattgtcttgaaacccttttcaaaatcaattgtctataaatgtaagagtttatttttggaccatcagttctatcctgttgacctatatatgcctatcctaatgccagttacacacagtyttgattaccataactttgcagtaagttttgaactcagacagtctgagtgcttttattttgtcctttttcaagattaatttggttattccggatcttttgcatttccatatgaattttaggatggttgtcaatttctgcaatagaaaagcagcaggattttgatagagagtgcattgaatctgtagaccaatgagtatcaatggaattatgtgttatcaaatttagtaaactacataaacgatatgtacacaactaaaacaaaactaagatataagatcatattaatgtaatgataataaaagtggattgtctcctgttctaattttaataggcacaaggcatttttgttaatcacttcttattaaagaattttttataatattcaggaaaatacaacaaaaaaacccttacattcctaaggcctcagagtcagagtaatataaaggaaatgtaaacac

SEQ ID NO: 773102 - DNA, 556 bp, Homo sapiens
tctcggacatccaactcttctgccctcagacattgaagggcctggtgtttgggtctttagactccaggactccaccctcgaattctcaagtctttgaccttggactgggggaagtcacgccatcgtcaccccattgacccccctggttctsagatcttcacactcgggctggatcacaccactggctttcctggttcttcagctcgcagatggcagatgatgcgacttcttagcctctgtgattgcgtgagcctgttcccctaataaatctcctggtgtatgtctctgtatcttattggttctgtttctctggagaaccccaatacagggggaggaagagacacttgctctttataaatgggcggtgtgtcacaattctgtggtgattttgagctaattttctgctttggaaccactgaagaggcttattgaagactggaatggaatggaattttgtaatggtagagctgtcgcgtatgccaattacaagtgttgcgggcaggacagttacttcacaggcagaagtagtgtctgtgtgattctctgagaagccctg

SEQ ID NO: 773103 - DNA, 636 bp, Homo sapiens
atggataaattgctgtgattttaatttgcattttcctgataactgatggtgttgagcagcttttaatctgcttgtgggtcatgtattttctattttcaaatgtatctcaatcttttccatatttgcaatttttctttatattgttattatttaattgcaaaaattatttataccttttggatacaagttctttgtcagacatatattttacaaataatgtctcccagttggtggtttgaattttcttatgaatgtgaactttaaatatttatataagaacataaagaatatgtcatatttagagataaatttaagaaaatagrtggaaaatgtccacactgaaaactaaaacattgctgagaaaattaaatttctaataaatggtaaggtatactttgtgattggattggaaaactcactatttttaaatattaattttccccaaattaatgcaatagattcaatgcaattccaatcaaaatatcagcaggatttttgtgtggaatttggcaaggtgattctaatatttaaatggaaacacaaacaatgatagaatagctagaatcttattttttaagtaacacatttccatctttattaattttatttataaaaattccattcagtgtattaact

SEQ ID NO: 773104 - DNA, 637 bp, Homo sapiens
caaaacatagtgttgtaaggctacacgtggaaatgcgcttaaactagaagcaataacagacataggttagtgtaagttatattttttctgtgagttttgaattttgttttcacttttatatttctgcaaatggaagatggcaaaagggctgtaaagaagtgaagatcagtaactgcctcaaatttcaaggcaagaaaaggcagattgttagaaatatccatctgattgaggaaaagtgacatgtttgcttgaggtatgtgtgtaatagattccactgaccactgcacggaatatgtgcagacacagctgatgctgcaaccttatcttaaaaactcatcctttaaaaaataatttccgcatcacaaatatgctttttctttatttcttctcataccattttaccgcctagttaccaatttgctgaaaaygtagtttcacaagaatcctgatttgcagagcacaggtttccttagctcgaggctgtatatatgttctgaaatggaaataaagtctctttcaatgattggattcagtggagctgggtttactgtaaagggaactttaatagctatttttcaatgaacacagaccatctccttttgattaagtttaactattaatgtaatttgacaaggag

SEQ ID NO: 773105 - DNA, 556 bp, Homo sapiens
gaacgataatgataattcaacaactacatgatttattatctgatctgaggtttaactttaaatgccaacatcatttttaaggtattttaaaatagactttatttttaaagcagttttgtgttcatagcaaaattgagcagaaaatagagttccaatatatccccacctccaaacattcatagcctcccaactgawagcattttccttgaaagtttaatgattgagggttgcctgcttttacataatttactacgtattttttaaaaattataggccaggcgtggtggctcacgcctgcaatcccagcactttgggaggctgaggcgggtggatcacctaaggtcaggagttcaagaccagcctgggcaacacagtgaaaccccgtctctactaaaaacacaaaaattagccaggcatggtggcgctgcctgtaatcccagctactcgggggactgaggcaggggaatcgcttgaaccttggaggcggaggttgcagtgagccgagaatgcgccagcctgggtgacagagcaagactccatctcaaaagtaaataaa

SEQ ID NO: 773106 - DNA, 470 bp, Homo sapiens
gatttcctccatggcttttgcttttccccattcacctgtgcttatgtaatcacagcctggagttttcaggaataaagcgactagttatcactgctggttacacgggttggtcccaacctgaattctgtactaccctttcaatgagagacgcaggtatgggagaagggacttgacaggagacggaggtttacttttctcctaggaccttttgtttgttttcagaaattaaaaaaaaaaaaaacacaataaccacaatcatataagatgtttaaatycaatatatgagcatgccattattttcattgatctttgaaacggattcagtacattcctatgaagcaatggaacacaatttgggatgagaatttctccaagtgagattcacattatcattatggctgtcaaggatttagaaattaggttgtttgctgattactcttcaatcattcaatcaacaagaaggtatgctg

SEQ ID NO: 773107 - DNA, 548 bp, Homo sapiens
gatgggaagactaagcctagtgatgaatgaggcacacatagaaagggacaggtgcaccaggacatgggtggggatggtccctgctccatagaaagggacaggtgcaccaggacacgggtggggatggtccctgctcctcatgtctgtgcgaggctttcatttgcaggcttcacagtgctttagaataatgtgttcatggaataaagagaaaggtagcatgggaggaaaatgttttcatacaaagcgaggaaattaaatatcacttgattcaactgggtattttaaggggaaaattacatgattaaatcacacccatggaagtttggtttagaattccattatctaagatggatkaacatttccaaggccctaaactgtgtattagaaagaaatcctaattgcatcaaaataaatgaaatgttatatttttgttattagtttttgagtgcctttcaacccagaagaaaactaaacttgatttaaaaaaaaaaaagctttataacaagatgttagaggtgataaatttaaagtttgaataggaagagcat

SEQ ID NO: 773108 - DNA, 612 bp, Homo sapiens
caaaagctacattatacttttaaagactaaagattgaaaaaagagtgccaaaagtgattagttatatacgtacatacacacatacataccatgcataccaatatacatatacactagatactctgctaaataatttttatatattattgcatctaattttaacattgattttatagtacaagtactattattatccctattatcttagatgaggaaatcaagacttgatatgctagattagtcttgtctgaaatatttgccaatatactatttgattatgaaataattgatatatgcaaaagaaacttaccaaagatgtaaagaataaagcttaataaaaggcataataaaaacaaacacccatgcrtatcgtgaacattggaactagacttttaccaatattattgaatcttatgtgcttttccactattctgtccctctgcctccaaccagagttaattacaatcctaaattttgatatattctttgagtaagaagtgtagctattttctaaaaccatcctaattattgatttatttgtggcacttatttagcattcataaaactacatggatgttttggcagtcatagatttaatacaaatactgttaa

SEQ ID NO: 773109 - DNA, 672 bp, Homo sapiens
tttttatttacttcaagatatttttattttccttcttttcattcttttacccatttattattcaaggctttgttgcttaatttttacatacttgtgaatttttaaaatcttcttcacgttactgatttctagtttcattccactatggtcagaaaatagacttaatagtatttcaatatttttaaacttgttaaaactttgtgtgtgtgtgtgttttataatgctctggtctgctggatagtgcccataagtcccatagtctttcttattatttatttatttgtttgtttgtttgtttattgttcttttggctgggtaatttcaaatgatctgtttttgagttaacygattctttcttctgctttatacagtctgctattgaaactctctatgatacttttcactttagtcatacttcagctccagagtttctgtttggctctttgtggggggttctttctccttgttgagcttctaattttgttcaaatattgctttcctgattatttttagttgtctgtctgtgttttattggaactcattgagctagtataagatggttattttgaattctttgttagacaatttatagatctccatattttagaaccagttacttgtttttctattttgttcctttgatgctgttgtgtttccctgattctagcacaa

SEQ ID NO: 773110 - DNA, 604 bp, Homo sapiens
gtattacctacatgtttcagacaagagtgcagcaatacaaaattcagatcctagtgaatgacgacaacaccaagtcaggctagttcaacaatggcatgtctaaacacccagctgaccttcctgggtaagtgtaactttcaggtcttctgtttaaataagttcttcctagttgtccatcttcctttccttcctgctggttggacatagtggcgatggagctactgtagaagccgcagtgaagaatggcagaaccaccattgtagcctgggactctggatgactttacagagcaaaacctgactacctactctggactgttaagtgaaagagaaataaacttatgtcttgtttagtcactraactttagagtctatttgttaaccatcatcccaaccaatataccctgaaacatttctaccagtagtaaatcttgctagaactgtatttcaggactcagcttaaacattccatcctcctaccctctagatcaaaacaattttccttgatacatcctatcttaggacccagctcttttctcttttaaagtttaatcctcacaatactctctagggagtgtctctctccctctctagattggaagctc

SEQ ID NO: 773111 - DNA, 604 bp, Homo sapiens
gtattacctacatgtttcagacaagagtgcagcaatacaaaattcagatcctagtgaatgacgacaacaccaagtcaggctagttcaacaatggcatgtctaaacacccagctgaccttcctgggtaagtgtaactttcaggtcttctgtttaaataagttcttcctagttgtccatcttcctttccttcctgctggttggacatagtggcgatggagctactgtagaagccgcagtgaagaatggcagaaccaccattgtagcctgggactctggatgactttacagagcaaaacctgactacctactctggactgttaagtgaaagagaaataaacttatgtcttgtttagtcactgaactttagagtctatttrttaaccatcatcccaaccaatataccctgaaacatttctaccagtagtaaatcttgctagaactgtatttcaggactcagcttaaacattccatcctcctaccctctagatcaaaacaattttccttgatacatcctatcttaggacccagctcttttctcttttaaagtttaatcctcacaatactctctagggagtgtctctctccctctctagattggaagctc

SEQ ID NO: 773112 - DNA, 604 bp, Homo sapiens
gtattacctacatgtttcagacaagagtgcagcaatacaaaattcagatcctagtgaatgacgacaacaccaagtcaggctagttcaacaatggcatgtctaaacacccagctgaccttcctgggtaagtgtaactttcaggtcttctgtttaaataagttcttcctagttgtccatcttcctttccttcctgctggttggacatagtggcgatggagctactgtagaagccgcagtgaagaatggcagaaccaccattgtagcctgggactctggatgactttacagagcaaaacctgactacctactctggactgttaagtgaaagagaaataaacttatgtcttgtttagtcactgaactttagagtctatttgttaaccatcatcccaaccaatataccctgaaacatttctacyagtagtaaatcttgctagaactgtatttcaggactcagcttaaacattccatcctcctaccctctagatcaaaacaattttccttgatacatcctatcttaggacccagctcttttctcttttaaagtttaatcctcacaatactctctagggagtgtctctctccctctctagattggaagctc

SEQ ID NO: 773113 - DNA, 630 bp, Homo sapiens
gggagcaagaaagagagcaagtgagaagataccacacacttttaaacagcaaaatctcaggacaactcactcacttttgtgagaaaagcaccaagccatgaagaatctaccccaatgacccaaactactactcccaccaggccccacctccaacactggggattgcatttcaacatgagatctggggggacaagtatccaaactattaacatatcagtgtcctaaagctggcttcataaatcttgattgattgagatatttgcctcagtcactcattttggttatcagtacctgtcagaataagtaattatttttgagaagggagatacaaggtagttctaacggagtatttaatgtgatttaaaaatttgtattgtccttagagcagctggaagattatggttatgcagtaagttatttgaaacaaacctgagaatctgataatcttggaatttaaagagtctagaattmattacaaattaaatctattaaatctattatcaatctggtattgggtcaacattcttaaaatagatacctgtatttgaaaacctaatcacaatctttttgacaaattcaacaataactgccattaactcctaaatcagcctgtggatgccaccaaagaag

SEQ ID NO: 773114 - DNA, 657 bp, Homo sapiens
tctggacctgccctgtgtcagaagggaacctagtgccctaaagggtgagttccaggcctggcaacattcaccacaagctgatcaaagagcccttggctttaagtgaacatcagtggtggcctggcagaaaccccatggactagtggtggtggtagccacagggagaagctcctctgcctttggaaaggggaggaaagaatgggacagactttgtattgtggtttgagtcagcttagccgcagtagaawagaacataaggtaaactcctaaggtatttgactccaatccctggctcctggacagcatgtccagacatgcacagggcctaggggatcttatcaccctgaagggaaggaccttggacaagactcagggcagtgctgacttcaggtctgacccatcacattcccagtggtggcagccacaggagtgcttgcataaccacacccccagttccacgtggctcagcacagagagagagagagagactccatatgtttgagagaaaggtaagggaaaagaacaagagtgtctgcctggtaatccagagaattcttccagatcttatccaagaccaccaaggcagtatccctatgagtctgcaaaaaccatagcattattgggcttggggttttgaatacctggaaagccttcccg

SEQ ID NO: 773115 - DNA, 613 bp, Homo sapiens
agtcagcttagccgcagtagaaaagaacataaggtaaactcctaaggtatttgactccaatccctggctcctggacagcatgtccrgacatgcacagggcctaggggatcttatcaccctgaagggaaggaccttggacaagactcagggcagtgctgacttcaggtctgacccatcacattcccagtggtggcagccacaggagtgcttgcataaccacacccccagttccacgtggctcagcacagagagagagagagagactccatatgtttgagagaaaggtaagggaaaagaacaagagtgtctgcctggtaatccagagaattcttccagatcttatccaagaccaccaaggcagtatccctatgagtctgcaaaaaccatagcattattgggcttggggttttgaatacctggaaagccttcccgagaagaacaggcacaaataagctcaactgtgaagactaccacaaataactaacttcaatgcccagacaccaaagtacatctacaagcatcaacaccatccaggaaaacatgacctcactaaatgaactaagtaaggtaccagggaccaattatgaaaaaacagagatatatgacttttcag

SEQ ID NO: 773116 - DNA, 613 bp, Homo sapiens
agtcagcttagccgcagtagaaaagaacataaggtaaactcctaaggtatttgactccaatccctggctcctggacagcatgtccagacatgcacagggcctaggggatcttatcaccctgaagggaaggaccttggacaagactcagggcagtgctgacttcaggtctgacccatcacattcccagtggtggcagccacaggagtgcttgcataaccacacccccagttccacgtggctcagcacagagagagagagagagactccatatgtttgagagaaaggtaagggaaaagaacaagagtgtctgcctggtaatccagagaattcttccagatcttatccaagaccaccaaggcagtatccctatgagtctgcaaaaaccatagcrttattgggcttggggttttgaatacctggaaagccttcccgagaagaacaggcacaaataagctcaactgtgaagactaccacaaataactaacttcaatgcccagacaccaaagtacatctacaagcatcaacaccatccaggaaaacatgacctcactaaatgaactaagtaaggtaccagggaccaattatgaaaaaacagagatatatgacttttcag

SEQ ID NO: 773117 - DNA, 613 bp, Homo sapiens
agtcagcttagccgcagtagaaaagaacataaggtaaactcctaaggtatttgactccaatccctggctcctggacagcatgtccagacatgcacagggcctaggggatcttatcaccctgaagggaaggaccttggacaagactcagggcagtgctgacttcaggtctgacccatcacattcccagtggtggcagccacaggagtgcttgcataaccacacccccagttccacgtggctcagcacagagagagagagagagactccatatgtttgagagaaaggtaagggaaaagaacaagagtgtctgcctggtaatccagagaattcttccagatcttatccaagaccaccaaggcagtatccctatgagtctgcaaaaaccatagcattattgggcttggggttttgaatacctggaaagccttcccragaagaacaggcacaaataagctcaactgtgaagactaccacaaataactaacttcaatgcccagacaccaaagtacatctacaagcatcaacaccatccaggaaaacatgacctcactaaatgaactaagtaaggtaccagggaccaattatgaaaaaacagagatatatgacttttcag

SEQ ID NO: 773118 - DNA, 604 bp, Homo sapiens
aatgcaagaaatattagtttccttcacttactcccccagcagagaagcaaaatactattttattagtattttactttctcataagcctatattttcattgcatcttcagcccaaacctaaacttattgcttccttattttttatttttgctaaaatgtaaaattaaacatgtacaaaaaagggattcctttatggctcttaggatttggtttttgtcgttgttcttggtaattttgtttagtctgagtattttttgccaggtttctattgatttgggrcttagacttattgctactattacaaggtaaatgttttaaattctcccatgattaaatgcattattacattgaacaaaaggctaaagaatccagaaaacagcagggcccctacttctgcatcaggttaaaacgtattacagagttggcagtgacttgttacctgaggcgtacagacactgctcttagttcctgaggaagtctatctacaaggcagaagacatttggttcatacaacagtttctgcaaccaatctatctcagtaataacaataaaatcttactatgtcttgaaaattcacagggcaagttagaaaagaatataaaaga

SEQ ID NO: 773119 - DNA, 604 bp, Homo sapiens
aatgcaagaaatattagtttccttcacttactcccccagcagagaagcaaaatactattttattagtattttactttctcataagcctatattttcattgcatcttcagcccaaacctaaacttattgcttccttattttttatttttgctaaaatgtaaaattaaacatgtacaaaaaagggattcctttatggctcttaggatttggtttttgtcgttgttcttggtaattttgtttagtctgagtattttttgccaggtttctattgatttgggacttagacttattgctactattacaaggtaaatgttttaaattctcccatgattaaatgcattattacattgaacaaaaggctaaagaatcyagaaaacagcagggcccctacttctgcatcaggttaaaacgtattacagagttggcagtgacttgttacctgaggcgtacagacactgctcttagttcctgaggaagtctatctacaaggcagaagacatttggttcatacaacagtttctgcaaccaatctatctcagtaataacaataaaatcttactatgtcttgaaaattcacagggcaagttagaaaagaatataaaaga

SEQ ID NO: 773120 - DNA, 589 bp, Homo sapiens
gtctctgaaataatggcctgagctgtaccctgaccccatttagccttggctggagctggagcagccacagtgcaaggtgccaggtcccaaggcttcaaagagcagtggggctttggacctggcccatgaaaccattttctccttctaggactctaggcctgtgataagaagggctgatacaaaggtctctcaaatgtcttggagacattttccccattgtcttggctattaacattgggctcctccttacttatgcaaatttccatagctggcttgaattccttcccagaaaatgggtttttcttttctaccacatgatcaggttgcaaattttccaatcttttatgctctgyttccattttaaatataagttctaatttcagaccatctctgtgaacacatatgagcctaagctgttagaagcagccaggccacttcctgaatgctttgctgcttagaaatttcttcaccagataccctaaatcatttctctcaagttaagagttccacagatctctagagcaggggcacaatgccaccagcctctttgctaaagcatcacaagagtgacctttacttcagttcccaa

SEQ ID NO: 773121 - DNA, 575 bp, Homo sapiens
tctacatattagggagagtaggtgggtaacatatatgaggtgtctgtcctcgattagctgatttcaattgctgaaatacaattcaactgaggcaggagaatagggtctggaggcagggaacctaaggctgtttcacgccaacttcctaggactaaattgaaaggaaaaccctaacttttcatgcctaagtaataaaaggaccagargcagccgggtgcggtggctcacacctgtaatcccagcactttgacaggccgagacaggcagatcacgaggtcaggagattgagaccatcctggctaacatggtgaaaactcccgtctctactaaaaaaaagaaaaaaaaatacaaaaagaccagaagctactccctttgcaaaccccctgccttttctgcatgtcagatgggaaactggctgtccacaacaaatcagactgattgccggtcaagtcttcatttgtaattttgtaactccactccagcctctgaatggttgctgtccacaaccagtcagactgattgccggctaagtcttccttttcatagaagtataactttgtaacttcactctagcc

SEQ ID NO: 773122 - DNA, 575 bp, Homo sapiens
tctacatattagggagagtaggtgggtaacatatatgaggtgtctgtcctcgattagctgatttcaattgctgaaatacaattcaactgaggcaggagaatagggtctggaggcagggaacctaaggctgtttcacgccaacttcctaggactaaattgaaaggaaaaccctaacttttcatgcctaagtaataaaaggaccagaagcagccgggtgcggtggctcacacctgtaatcccagcactttgacaggcygagacaggcagatcacgaggtcaggagattgagaccatcctggctaacatggtgaaaactcccgtctctactaaaaaaaagaaaaaaaaatacaaaaagaccagaagctactccctttgcaaaccccctgccttttctgcatgtcagatgggaaactggctgtccacaacaaatcagactgattgccggtcaagtcttcatttgtaattttgtaactccactccagcctctgaatggttgctgtccacaaccagtcagactgattgccggctaagtcttccttttcatagaagtataactttgtaacttcactctagcc

SEQ ID NO: 773123 - DNA, 575 bp, Homo sapiens
tctacatattagggagagtaggtgggtaacatatatgaggtgtctgtcctcgattagctgatttcaattgctgaaatacaattcaactgaggcaggagaatagggtctggaggcagggaacctaaggctgtttcacgccaacttcctaggactaaattgaaaggaaaaccctaacttttcatgcctaagtaataaaaggaccagaagcagccgggtgcggtggctcacacctgtaatcccagcactttgacaggccgagacaggcagatcacgaggtcaggagattgagaccatcctggctaacatggtgaaaactcccgtctctactaaaaaaaagaaaaaaaaatacaaaaagaccagaagctactccctttgcaaaccccctgccttttctgcatgtcagatgggaaactgsctgtccacaacaaatcagactgattgccggtcaagtcttcatttgtaattttgtaactccactccagcctctgaatggttgctgtccacaaccagtcagactgattgccggctaagtcttccttttcatagaagtataactttgtaacttcactctagcc

SEQ ID NO: 773124 - DNA, 638 bp, Homo sapiens
  misc_feature 194: n = A,T,C or G
gctgggcatggcagctcatgcctgtaatcccagcataattgcaacactttgggaggccgaggcaggaggatcacttgaggccaggagtttgagaccaacctgaacaacatagggagaccttatctgtacaaaaaaaaaaaaattagycgggcatggtggcacacgcctgtggtcccagctacttgggaggctgnaagtgggaggattgcttgggcctgggaggttgaggctgcagtgagccacaatcattccactgcactccagcctggccaacagagtgagaccttgtctgaaaaaagaaaaaaaaattatgagaagaatagcattgttttacatttttgcaaatcaatttcataactggcttaatggaagagagctggattcctatagctacttctgcattgaatctgttgtgatacattgtcctgattgaagcacatgaagaaaatttgacctcaaggaggactttatggtcctctggatagggccttggggaccccccagagtacttagactgcaatttgagaactgctaatctagagagatgctacagtgtatgaagagacgagagctgggctcaagcctcaaggagcacccacgtttaatagtcaggaaggagaggataaacaaacaggtca

SEQ ID NO: 773125 - DNA, 638 bp, Homo sapiens
  misc_feature 194: n = A,T,C or G
gctgggcatggcagctcatgcctgtaatcccagcataattgcaacactttgggaggccgaggcaggaggatcacttgaggccaggagtttgagaccaacctgaacaacatagggagaccttatctgtacaaaaaaaaaaaaattagccgggcatggtggcacacgcctgtggtcccagctacttgggaggctgnaagtgggaggattgcttgggcctgggaggttgaggctgcagtgagccacaatcattccactgcactccagcctggccaacagagtgagaccttgtctgaaaaaagaaaaaaaaattatgagaagaatagcattgttttacatttttgcaaatcaatttcataactggcttaatggaagagagctggattcctatagctacttctgcattgaatctgttgtgatacattgtcctgattgaagcacatgaagaaaatytgacctcaaggaggactttatggtcctctggatagggccttggggaccccccagagtacttagactgcaatttgagaactgctaatctagagagatgctacagtgtatgaagagacgagagctgggctcaagcctcaaggagcacccacgtttaatagtcaggaaggagaggataaacaaacaggtca

SEQ ID NO: 773126 - DNA, 605 bp, Homo sapiens
cttgaagctctcatggctaattagaaaaaggaaattaccatccttggatttcatcactgatttgttgagcatctgttgctctgtgcatgaagcacttcacgcttaactctttcattagctggtgttctgaaacagaagacaagactgttaacaaggccgtcaccaaataatatttaccatacccaccacgtgcctggcaggactagcataactggagcctgaagggagataaggaaaatattagaatttaaaccctaaagcaagagtagayattaacaggttggggtaaatgcagaaaacagcaacaacaacaacaaaacactaggtccacagaagacacactacctctgatgtaccaagttagcagcagacaaaaacaaagaggtgaagatttgaaacattaacatatgaatgcatttttaaaaatctttttagtttgtctgggggcagtggactatgcaagactgtgtattggcagtaggaatccttgtccactctgtatctcaatgtggaaaggcttcctggaggaggtggtacttcaggaaaccttcaaagcagaaatgatagcagctttggaactggatgttgtttttggcccttggaag

SEQ ID NO: 773127 - DNA, 514 bp, Homo sapiens
tgttgcccaggctggagtgcagtggcatgatcttggctcactacaacctctgcctcctggcctcaggcgatcctcccacctcagcctcccgagtagctgggattacaggcacatgccaccatgcctggctaatttttgtacttttttggtagagacagggttttaccatgttgcccaggctggcctcaaactcctgggctcaagcaatcagacagcctcagcctctcaaagtgctgacattacaaacatgagccactgtgcccastcagcagtaaagtttaaattaggtcatatgggggaggcagccccggtccaagaggacaccagagagtcacctcccattcccatgcacacgaagagctcatataagcacacagcaagaagggagctgtctgcaacccaaggggagaaccctcaaccaaataccaaccctgctggcaccttgatcttgcacttaagagtctccagaactggaagataaatttctgttgtgtaaagtcacgtagtctatgca

SEQ ID NO: 773128 - DNA, 515 bp, Homo sapiens
caggcacacgctaccacacctggttaatttttgtattttttgtagagaccaggttttgccatgttgctctggctggtctcgaactcatgagcttaagcagtctgcctgcctcagcctcccaaagtgctgggattactggtgtgagccactgcacctggcccaaaacttcttgacaaaatattagcaagttgaatccagcagtataaatataatgatgatacatcatgaccaggtagagtttaccccaagtatgcaagtttgatttagtagtaaaaaaatcartatacagtccatccttattattcgcagattttgtattggcaaatttgcccactagctaaaagttatttgtaactccaaactcaatactttcttgcttttttgtggtcatttgtggacatgtgtgcagtggaacatttgaattgtccaatatatacattcccaattgagtcaagcaacgttctctccctttttcttcagctctcgtgttataaacaaatgtccttttcgtgatc

SEQ ID NO: 773129 - DNA, 670 bp, Homo sapiens
aatgatccatgtgctgaggaaagaatgtgtattctacagctgttggttgaaatgttctgcaaatatctattaggtccatttgatttatagtatagattgagtctgatttttttgttgttgattttatgtataaatgaactgttcagtactgaaagtggggtggtgaagtctccagctgttattgtattggggtccatctctatttagatctaataatatttgctttatatatttgtgtgctccagtgttgggtgcatatatatttacagttgttatatctttttttttyctttttttttttttttttattgatcattcttgggtgtttctcgcagagggggatttggcagggtcataggacaatagtggagggaaggtcagcagataaacaagtgaacaaaggtctctggttttcctaggcagaggaccctgcggccttccgcagtgtttgtgtccctgggtacttgagattagggagtggtgatgactctttaactagcatgctgccttcaagcatctgtttaacaaagcacatcttgcaccgcccttaatccatttaaccctgagtggacacagcacatgtttcagagagcacagggttgggggtaaggtcatagatcaacaggatcccaaggcagaagaatttttcttagtacagaacaaaatgaaa

SEQ ID NO: 773130 - DNA, 616 bp, Homo sapiens
accgctgctcacccgaagtgtatttaaggggtcccaacagcaacttatcaacattttttgttgtaaagcacacagagagcagtgaattctgtccattttgtgagcagcacatctggataaggcaggtgccccactgcattcagagcagctctgggaatgaggaaggaagagacaacaaaaggaacaggagccttccaataagcccagacattagacctgagccttgtccctgtcataggctagtcattattgattaaaaggtggacatcagataaacccaagagggacagccccgccaacgtccagagcaatgaggccctcactctgccctcacctctgccagtgtaaattctggggaatttctgaaacaccgtgaatacagaggtgtgactcagygggaatcacaggaatgtcagaggacaaagcagttggtattaataaattgctttgagtctggaaacaaagaagtggccttctttgtttccaggctgaagtacagtgctgtgatcatagctcactgtaacctcgaactcctggcctaaaatgatcctcctgcctcagcctcccaaagcactgggaatacaggcatgagacaccatgcctggcctggccttca

SEQ ID NO: 773131 - DNA, 605 bp, Homo sapiens
accatattctacatttctgctcacctctgtggtggggctgatgtgcatggttttcatggcttaaaagcacactccatctcactgggggtttcccaaatggtcatatgaagagaggaattgctccccagaaccgctggggcacctcatttcrttgatgctttttcttcctctccacggagatgctctgggtagaaggaatgaagccttcaaggtggactctggagggctctcccagaggcttctgtctgaaccagtgggcttaaaaatgagcaagggagaaccttcatgaaaatcactgtcaagtactgtctcagtttgctccagctgctgtaacagaataccatagactgggtggcttgtgagcaatagaaattaatttcttgcagttctggagtctgggaagtccaaattgaggtgctggcagattctgtgtctggtgagggcccacttcctggttcatagacagcctactcctcgctgtgtcctcacctgaaggaaggggcaaggcagctctttagtgtctcttttatgatagtactaatcttatttgtgagggctccactgtcatgacccgagcacctcccaaaggtcccacctccaggtat

SEQ ID NO: 773132 - DNA, 519 bp, Homo sapiens
cttgggtcaggctcaggtctggcgcttggcaatcagctgatgatggcagggaggctctgcttcctgtcccaggcagaggggatggcacggcctgtgagtaatgcaggtttgagtggtgagccagttcagagcaaggctgggaggacctttgggcacagtcaggctccagggatgcaaggcgtggctccttcaacttgtctccagcacagccacasacgccaccagtgtggggagggagcccctggtcattttctgctggggagcagaatcgctgatgaagggcccagcgccaatggggaagaggcctccccaacaaccctgggcctcctgcccgctcaagccacttaaaaatccgtaccgtgcccacaaggctttccagtctccatgtctcaggaaggtccaagacagtaggtggaggtgggcacatgacagggctttctcattgcctccaaacaatgccatgtgctgggccatattttctgctcttctagaagcttctgtgtcccgggccaggtgggt

SEQ ID NO: 773133 - DNA, 519 bp, Homo sapiens
cttgggtcaggctcaggtctggcgcttggcaatcagctgatgatggcagggaggctctgcttcctgtcccaggcagaggggatggcacggcctgtgagtaatgcaggtttgagtggtgagccagttcagagcaaggctgggaggacctttgggcacagtcaggctccagggatgcaaggcgtggctccttcaacttgtctccagcacagccacagacgccaccagtgtggggagggagcccctggtcattttctgctggggagcagaatcgctgatgaagggcccagcgccartggggaagaggcctccccaacaaccctgggcctcctgcccgctcaagccacttaaaaatccgtaccgtgcccacaaggctttccagtctccatgtctcaggaaggtccaagacagtaggtggaggtgggcacatgacagggctttctcattgcctccaaacaatgccatgtgctgggccatattttctgctcttctagaagcttctgtgtcccgggccaggtgggt

SEQ ID NO: 773134 - DNA, 588 bp, Homo sapiens
gaggtggtatggggataggattctggaggaccctgctggaacaggtagaaggacaagaataactccccactgggactggaggagaggaaggcacatgggggcccttggcagggtggagtagggccataggtaaaaggaaagaggagaaaaggacagatactggggagagtgagagggaagggaggggaggagaagggaggcggasacctccagatctggcatggcagaagtctccttggaaaagatgagtgcaagatgtgggaggaagagtaggacgtgagggtctccaaagtctgctcgaattttcaggtacaaatgacctcccatcagaatagccccaatctgagttctgcagaggctgagagccaactcaagggcatggagtttctgaagccagaagggaccttgataaacaagaaagcctgaggcccaaggaagttaaagtgatgtgctgaagataacccagccaaaagggggcgcagcctggatccacacacttcatggtgctctacccactacaccataaaaggagagtccaaacatggtaaagatgaatggcagactggcagccagtgctgtctccatgac

SEQ ID NO: 773135 - DNA, 588 bp, Homo sapiens
gaggtggtatggggataggattctggaggaccctgctggaacaggtagaaggacaagaataactccccactgggactggaggagaggaaggcacatgggggcccttggcagggtggagtagggccataggtaaaaggaaagaggagaaaaggacagatactggggagagtgagagggaagggaggggaggagaagggaggcggacacctccagatctggcatggcagaagtctcctyggaaaagatgagtgcaagatgtgggaggaagagtaggacgtgagggtctccaaagtctgctcgaattttcaggtacaaatgacctcccatcagaatagccccaatctgagttctgcagaggctgagagccaactcaagggcatggagtttctgaagccagaagggaccttgataaacaagaaagcctgaggcccaaggaagttaaagtgatgtgctgaagataacccagccaaaagggggcgcagcctggatccacacacttcatggtgctctacccactacaccataaaaggagagtccaaacatggtaaagatgaatggcagactggcagccagtgctgtctccatgac

SEQ ID NO: 773136 - DNA, 669 bp, Homo sapiens
aaagattctcttgtgaggtgacttctacttaagcttggtcacagcctcctgctgtcctcaaagagtgggcaggagatttcttcccttggacgctgccagtgctggaatatgaaacttaccaagtgtcagcagttggggtctgtccttcacgttgacccagccccctcattggtgtcctgatgattgtggacacccagtcagccccattttctggccacaccaagcatggcaatgacaccaggttggcacaaaacaactctgcctrgattgattacttagcccatcatagcgtacactttcttcattttagtaagttgtggttttattttgaataagtctctttcaacctattaatattagtctacactaaaattaaccttcccctaaattattctcacacagaggcagcaaagtaattttgaaagttaaatcaaaacaaagcaatcttgtgtgtaaaacagataaaaatcacagactgtggttacagagtgcctctacaggaatcgcttacataaagctgatttcctccaatcttgttatggaaggaaaaggggaaatgccctggccttatcacaatcccattctgtcaaacaagcgcggcagagcttgtgtaaacagtggagctgcagctgcggctggtgtctgtgggggccattcggggtctgaggg

SEQ ID NO: 773137 - DNA, 523 bp, Homo sapiens
cctgttgcctcaacctggtccaactcacagaactgacctacctagtggggctgggaaggtttaggcagacagacagacagacagactgcctgaggtgtgagggagtacacttaccccctgtgaccaaaaccccatgtgtggccagcgtggccgattactcatggtctggggagggaggacagccggatccagaggtaaagtctaacccatggagtcctaagcaatgggaaaggagccccatgtggattaaataaacatattcctgcctgcagatccccttttctaaatgcataaggcagatgyactatctgaaggactttggactcagtgagttgtgacttatgtaaacaataccacactgacttaaaaataatccacaaggcaggaaaaaaaacctctttcattgttataaaactgaaccaagattacatttttttctcctgtaattgcttctcagggtccgtaaatagaccttattataaagagctggggaggggaacagcaaatcaagataaagtacaac

SEQ ID NO: 773138 - DNA, 601 bp, Homo sapiens
tgctgtacctcgcttgcatgtccctgcttccaagctttggggatttctaggattgttttctcctagtttccttgtgtcacgtgggctcctttataaaatatccccatataatagtgcatgatgtgctctattacaaaacacaratgtgtctgtccaagacagcctgggggcagcgagctggggcgtggcaaggagacgaactggaatgacgggagagccctagtggatgcacagtgcaccgctcttacaccacaagcctcccgccccagcatgatttaacccgtgaagaaagcagagcatttaatatgttctacagatgttttaaaaaaagaataacggcgcttgtcccaagtgtgggatggaggcacacactcttctgagatgtgaagcaaatttcatatctcaaaagagaaaaaggacaacagttcctgctcagtcaccaagtctgattctcaaccctggaacgcctcagcctgcctgagcccagaaatgaggctccttgtgaacactatggaaatgcaatggctgttttgattttccataacggacagcacactggtccgggaggcatatccaatctaaatgaactagcatctgtgaa

SEQ ID NO: 773139 - DNA, 601 bp, Homo sapiens
tgctgtacctcgcttgcatgtccctgcttccaagctttggggatttctaggattgttttctcctagtttccttgtgtcacgtgggctcctttataaaatatccccatataatagtgcatgatgtgctctattacaaaacacagatgtgtctgtccaagacagcctgggggcagcgagctggggcgtggcaaggagacsaactggaatgacgggagagccctagtggatgcacagtgcaccgctcttacaccacaagcctcccgccccagcatgatttaacccgtgaagaaagcagagcatttaatatgttctacagatgttttaaaaaaagaataacggcgcttgtcccaagtgtgggatggaggcacacactcttctgagatgtgaagcaaatttcatatctcaaaagagaaaaaggacaacagttcctgctcagtcaccaagtctgattctcaaccctggaacgcctcagcctgcctgagcccagaaatgaggctccttgtgaacactatggaaatgcaatggctgttttgattttccataacggacagcacactggtccgggaggcatatccaatctaaatgaactagcatctgtgaa

SEQ ID NO: 773140 - DNA, 586 bp, Homo sapiens
taatttgaatttaatatctgatgtgcagatttccacgactcttttcacagccagtaacagaaagcaacttcttttactaaactccaacattcaattaatgaagacctccaaagtacgctgagaacacacatgtttgggtttgtgttcagtttgtgcaattaccaagcaggctaaactttagtccktgcctttgtacattattcacagaagagtgactaccatttataaaaacaagaatgagatagcactggggatttcacttctcaagaaggagagcatataagtatttcaaattcatacagagcacaggaaaatgctaatgtaatgacacgttaaattctttccatcaaaatcagtctgcaagtcaccttctcaactctactttgtctcattcagggctagattttggtctacatgcacttcaatcaattcctgtctgcacatgccctggacagagtaggaagtaggcagtgtaaacaaaagatcactgtttcttgtgatcaaacaatgaaagggtttttattcactgctggcctcatctggagagcagcttcatgtgctgctgtccactgcagcccaccaccag

SEQ ID NO: 773141 - DNA, 524 bp, Homo sapiens
gtcaacttcattgaccttttcaaggactagcttttgtttcatggattttctctattgtttctttgttttcatttttactgttttctgggcaatctttttttttccttctgcttgcattgggtttattttgctcttctttttctagtatcttgaggcgagagcttagcttattgatttgaagaatttcctctttaaaccatgggttacttagaaatgtgttgtttaatttgtaagttatttgagattctcctgctatatttctgttactgatttcttgtttgattcgattgtggtccaagaacacactctgtataatttcrattattttacatttgccaaggcttgttttacagcccaagatgtcatgtatcctggtatatggtctttgggcacatgaaaagaatgtgtattctgcaggttttgggtacagcgttctagaaatgtcaattagaccctgttaattgaagatgttgttgaggtcttctgcatccttgctgattttctgcttggttttatatcagttg

SEQ ID NO: 773142 - DNA, 595 bp, Homo sapiens
atctgaatggatccctcctctctgtcaagggcattccaaagtttacctgaaaaagaagttcaggccatgatgggaaggcagagctggacaaacctggtaataccctcctcctttttggagttactaacagaacagactctaaatctgataagaaacatttacaatctagtctgtctgaagcctgctacctggaggcttcatttgcatgacaaaatcttggtttccacaacctsttatcataacccagatattcctttctattgatagtaactctttcaaccaattaccaatcagaaaacctttgaatccgcctatgatatggaaacccccacttccacttgtcccaccttcctggactgaaccaatatacatcttccatgtattgattgatgccttatgtctccctaaaatatgtcacaccaagttgttacccaaccactttgggcccatgttctcaggatctcctaaatgctgtgtcatgggccattggccactcatatttggctcagaataaatctcttcaaatattttacatagtataactctttttcattgacagagacttactagttcctgatccttaaagaaatttctc

SEQ ID NO: 773143 - DNA, 496 bp, Homo sapiens
gtggactaatgaagaaaatatagaaggggaaaaagtagaacatataatgtaagctaaacctagctgtaaaagggaaagctgtttgctgccttggggtcatcccagcactttgctgcgttgaactatgctagttgaaaaccttattcttcaatagttgcaatgcctcctgtgagtctgtacatgatctggtctatggcaacacaatcattaatagcaaattgattctgactatcaaatcttaagaattaattacttagatcaccttttgaggtatacarttttgaatgtgatgtgatagattgctatgaagttagtatttagttctcttcaatctagttatagatttcctgtggcatattgccttttcaaaccattatacagaaatttcataaatcatggagaatatttagtaagaatgtaagttataacaatttggtttgttgtgtttgctcctatgtcctcctgcctttactctttgctgcctttttcaggggct

SEQ ID NO: 773144 - DNA, 589 bp, Homo sapiens
agacacaatcaatccaaagacatattttactgggtattataaaaactttttgtgtttctgaggcagtccccaaattacagatagtgctatattttaatcctgttgatcacagagattgcagccagttatgttgtttcagcttcaatgtgaatgatgtatgtgtgtatgtgtttattatacagttacggagttatctgcaaaactgtactgctaatttgtttaaaaacatgatttgggwccatatatatttatttcacactagaaatcaaatcatgtgtgagatttatatatacacatataattttatagtgtatgtgtgggggtgtgtgggtgacgttgcaatagtcccccctcttccacagttttgctctacatggtttccgttacccatggtcaacctcagtctgaaaatattaatgtattttgagagagaccacattcacataacatttattatagtatattgtaataattgttgtattttattattattgttaatctctttaaacttgatcacaggcatataggaaaaaaagtgtatatagggttcagtacaatctgtggtttcagacattcagggggtcttgga

SEQ ID NO: 773145 - DNA, 635 bp, Homo sapiens
tactggagctttccaagggctgctatttgcacagacagttcagaacaaaaagatttcagtggcggcatagaggcgagaatggcttatgacattcgtaagcagatgagtgtgtttgtgagggcacttcagtgagtgtgtccaggktatcatagacccttcaggaaacttctcatcacctaccccagctactgtccatcccttctacatatattcttctaatctttttaacaggcaactggattacaaccagatcagctgtattgaagatggggcattcagggctctccgggacctggaagtgctgtaagtactgctatttctcttgctcttttaacgggggctttgtgtctggacaggactaatgtggaagcttatctgctagcttaaaaccttgttgtcaaaatagtctctcaagagataccttaaataactcatggtgaatacagagaagagtctaaatgtgtgtgtgcaaaaccttgcgtaccatatctgtatatttaggtaaaattgtgtaaggtcactcaaatgttctccttataaatgtttttatgagattcatagaatttgtcattgctaaatattgagataaaatcaactttataggaaaaataacataaaaaaaaacctcttagtag

SEQ ID NO: 773146 - DNA, 542 bp, Homo sapiens
acagctgtcatgtgacaggattaagtcaaaatcaaagtttctatcactggattccttaagctttacatagataagaaagtgtgataacgaagattatctgtggagaggatatgagaagaaaaagctgaagccatcaccagagacaatgctgtggccagtgggtctgtcctgctgaggcacgggtggctaatctggagccctcccccaggtcagggccatcacggcaagccagaacctgaagtagagcacggccctctagcgccctctagcgccctcctcgacctctgcctccagctgggcacttccctgaaacttccctaggcctccttccaaaatacacaggtctcctgtgttttcaagactttactgctttttcaatgagaaagcagtcaacaaaaamtaaaaagcatgaggaagttacaaactttacataggttttatagttgctgtctttggtttacaatatactagtattcattgaatatagtaagatattcaattataggatgtgttagtagtattcaaagtaaaaatatttaaag

SEQ ID NO: 773147 - DNA, 521 bp, Homo sapiens
atggtatttgaaggcagagtccttggaggtaattatgtttagatgaagccgtgagggcagggcactcatgagccctctttatttctctttctgccatgtgaggatactttcactcgcgtccctgtgaagagaccaccaaacaggctttgtgtgagcaataaagctgtttatttcacctgggtgcaggsgggctgagtccgaaaagagagtcagcaaagggagatcgggtggggccgttttataggatttgggtagttaaaggaaaaaggggggttgttctctggtgggcaggagtaggggtcacaaggtgctccataggggagcttttgagccaggatgagccaggagaaggaacttcacaagataatgtcatcagttaaggcaggaacaggccattttcccttcttttgtggtggaatgtcatcaattaaggcagaaaccggccatctggatgtgtacctgcaggtcacaggggatatgatggcttagcttgggctcagaggcctgacattcctgtattc

SEQ ID NO: 773148 - DNA, 576 bp, Homo sapiens
atcatttttatccattatcgagtgtgatttattgacttaaatcctcaaattatcctctgcaacaccatcttgagaaacagttgtgaaatttctgattgtaaagctttttcccaggggctagcatttggtcaaaaaaaaaggtttgaaaacacaacttaaacctaaaattattttaggtctataagttaaaaaaattttaggtctataagtttaaaaaaataaagggtggggccaggtgcagtggctcacgcctgtaatcccarcactttgagaggctgaggtgagcagatctcctgaggtcaggagttcgagaccagcctggccaacatggttaaacccagtttctactaaaaataacaaaaattagccaggcgtggtagggcaggtgcctgcaatcccagctactgtggaggctgaggcaggaggattgcttgaacctgggaggcagaggttgcagtgagctgagattgtgccattgcactacagcctgggtgataagagcaaggcttcatctcaaaaaaaataaaaaaataaaataaataaagggtgtaacttgaatgagagaaagaaaaataa

SEQ ID NO: 773149 - DNA, 576 bp, Homo sapiens
atcatttttatccattatcgagtgtgatttattgacttaaatcctcaaattatcctctgcaacaccatcttgagaaacagttgtgaaatttctgattgtaaagctttttcccaggggctagcatttggtcaaaaaaaaaggtttgaaaacacaacttaaacctaaaattattttaggtctataagttaaaaaaattttaggtctataagtttaaaaaaataaagggtggggccaggtgcagtggctcacgcctgtaatcccagcactttgagaggctgaggtgagcagatctcctgaggtcaggagttcgagaccagcctggccaacatggttaaacccagtttctactaaaaataacaaaaattagccaggcrtggtagggcaggtgcctgcaatcccagctactgtggaggctgaggcaggaggattgcttgaacctgggaggcagaggttgcagtgagctgagattgtgccattgcactacagcctgggtgataagagcaaggcttcatctcaaaaaaaataaaaaaataaaataaataaagggtgtaacttgaatgagagaaagaaaaataa

SEQ ID NO: 773150 - DNA, 617 bp, Homo sapiens
aaatataaaataaccatcattttattcaccttgccatttatattagtccattctcacactgctataaagaactgcctgagactgggtaacttataaaggaaagaggtttaattgactcatagttctgcattgctagggaggcctaaggaaacttacgattgtggcagaaggggaagcaggcaccttcacaasgtggcaggagagagtgtgagcaagagcaggaaaaactgccttataaaaccaccagaacttgtggttttatattcacttactatcagaagaacagcataggagaaccgtcccatgatccaatcaccttccaccaggtctcttcctagacatgtgggaattatgcagattacaattcaagatgagatttgggtggggacacagccaacccatatcattctgcacctggtccctcccaaatctcatattctcacatttcaaaatacaatcatgcttttccaacagtcccccaaagtcttaatgcattccaatattaacccaaaagtccaagtccaaagtaccatctgaaacaaggtaagtcccttctgcctaggagcctataaaatcaaaagcaagttagttacttccaagatacaatggaggtacag

SEQ ID NO: 773151 - DNA, 631 bp, Homo sapiens
aaccttttctaattataatagccctgactaattattataaaatactaatgagaaacctgtacatttttaacaatgctaatagatcatctatatataatcatgataggattatatgctaggtatcacatgctatataaatgttacaatgcacctaaattctggaaaattctactttgtgtaaaattaaaatctttatttaagtcaactaccaaaggtttgtmtttcatatcaagtaaattttttaaatgttagaggcctctgcctaagatttgagtcaatgtggaccatgtcacaatgtccaggcttcaaagaagaatccaagttagtgataaaaatgataacatatagcaaatttacctaagccttagagactatgaatgttacaaggcatgatataatgaataacaaaaaagttaatattttaaaaacattagtattgatacaatagcattaataatatttaaatatacaaataatctgttttatgatgtctgaaaagtccatgtgcattgccattcctactattcctaatatactattcaagtatatcaaatttatttatcaatttataattaatggctaagagttcaagaaaggcagttgtcaattgtttaattagacagttttgagg

SEQ ID NO: 773152 - DNA, 627 bp, Homo sapiens
taaacaacatgcccttgaatgaccaatggattaataaagaagttaagaaagtaataaaaaaatttttgaaacaaatgaaaataaaaacacagcatactacaaccgataggatacagcaaaagcagtactaaggggtaagtttacagcaataaatacctccatcagaaaagcagaaatatttcaaataaataacctaaccctgcaactccaggaactcaaaaagcaagagcaaatgaaatgaggaagatggagcaagctggctagatataaccatcgagtgacagttccaaccaccagaagaacacaaattgaacaactatctatgcaagaaagcacctccatgagggccaaaatatcagttctctcaagaaagatggatacaaacaaggycagacggcgaagactggtataaaatgcccagacattgatgaatgtccataaactttaagaatatccagtaaaacatgacctcaccaaacagactaaataaggcatcagtgaccaattctggagtgatagagatttatgacttctcagctagggaattcaaaataactgtcttgaggaagctcaatgagcttcaagaaaacacagagaaaaattcagaattctatcagagaactttaa

SEQ ID NO: 773153 - DNA, 615 bp, Homo sapiens
atgagttatgtttcctcaagaattaagtgcccatttcttaacattttgtaaaatgttctggtttcacttactacctttctcggcaaggctttacttctctgtccatcctttgaaataattggtgaggtaaatctataattattgggagcagaattgattatcaaaagtaggaaaattattatgccaagtttttaagttgccrtgtgaaaatatcctatatagaaacatattcaatttgggtttaatattgtcaaaagcagtgaactataatattgaagcattttgttaaagctatgatcttgtttttccaaagtggaatatttaatggtcattgcagattttttcaatatgcattcatttatgtgaccattacaaaatacttctctaaaatttaaaagtccaactagcaaattatcctcttttgactttcttattacatccactataaccagattaaaaacatgtgaatcacaccatacattatcttgactctgtgtttttttttaaaacaaagtcaacccactaaaatatcctttgatgctcattcagctaaaattttacttttttttaaaggtgcattatttgatctgaaaatatctttaagtgcctagaata

SEQ ID NO: 773154 - DNA, 576 bp, Homo sapiens
ttacattacaggattgctgaatcttaggttatgacggagaatatctttcatgtcttcaggatagctctgtcaggtgaatagtcaacaacaatgtaaaacacttgatttccttttaactgctccagtgaccttagaactcagcttatcaacctctcaaaaatgagaaaggactaaatagctttttttccttgctattgaaaaagtcagccttctcaacgggaacagactacaaaataggggtcaaaggctaacagtagatactcttagactcctctgtgctagaaaacacaatgaatagatatgattttcttagtacacatactaaagtaataaaatcaatacaagaayggtctctttagaaactataagaactaatgtaactaataagcaagtgaaaagttgtgtaaatctgagtacatacacgatgaagtcagaatcaaacgcttagaattatatgctggttttgtcataatctcagtctttctccaagctccatttagttgtgaaggcaaagaattttcaggagaaatatgaacattcaattacatgtttgaaaatcagacatttacacatcca

SEQ ID NO: 773155 - DNA, 609 bp, Homo sapiens
tctctcaggaaacagaacctggaaagtttacatagatagatagatagatagatagatagatagatagatagatagatagatcgatctaaactatgtctacacatatctatatttacttccaaatctatctgtatgcacattaaaaaaccatgagtttatactgatacctccaattctaatccaataccacagtaatcattctagcctcttcctctttcattatttgtaacttctttctcatgcagtaagaaagctrtctctgactatctgcaatataattatttgttcaaccctcatatattaataaattttttttcagaattgctaatccataccctagtactaagcagagtgcagtacttgtgtacatttctttttgcctttagctttgtggtattttctcaaaatacggttttctaatgatacttagttattttctttctcaagcccttcagtgtggttatgttagttatttgtaataacattagcttcacttgttatagtttgtatatctgtttgggttccctccataccttggttgattgttttaatgtacatacggtgaaattcactctgttgtatacagttctatgggttttacaagtgcaa

SEQ ID NO: 773156 - DNA, 609 bp, Homo sapiens
tctctcaggaaacagaacctggaaagtttacatagatagatagatagatagatagatagatagatagatagatagatagatcgatctaaactatgtctacacatatctatatttacttccaaatctatctgtatgcacattaaaaaaccatgagtttatactgatacctccaattctaatccaataccacagtaatcattctagcctcttcctctttcattatttgtaacttctttctcatgcagtaagaaagctatctctgactatctgcaatataattatttgttcaaccctcatatattmataaattttttttcagaattgctaatccataccctagtactaagcagagtgcagtacttgtgtacatttctttttgcctttagctttgtggtattttctcaaaatacggttttctaatgatacttagttattttctttctcaagcccttcagtgtggttatgttagttatttgtaataacattagcttcacttgttatagtttgtatatctgtttgggttccctccataccttggttgattgttttaatgtacatacggtgaaattcactctgttgtatacagttctatgggttttacaagtgcaa

SEQ ID NO: 773157 - DNA, 593 bp, Homo sapiens
gccactactgataattaagttgtcttattgcaaaatgaaaaagaattcagtgtgttaataaataaaatgcaattaacttctctgggtctcaatttcctcatcttaacaatgcgggagtttttgtttttgtttttaagattattgttttataatgcttttyttgggcctacccaaactttacaaaataaggtaatttgtaatcattttctctggctaataaaataaatttcacatgtatttctgcccttcttattggaaacttgaatcgaggatcatgaactttaaatcaaagcatttataatatttgtagaattgcttgatttgactgttattggcagttcttgctaagaagaaaatactttgcagaatttactttcaactaacatgttttttttcttaccaaacatattccactgtgagggaaggataatgagctattgctgaactgcagtacaagtcaaacattttagctaccagaaacaaaaataatttattgggtgtggtaataaacatcaaggtaggctaggaaatggttagttttacccttcaaaaacaagactgcttttacctcagaaatcccaaaagctgcaaat

SEQ ID NO: 773158 - DNA, 598 bp, Homo sapiens
gtttaatcttatgtaggatatgtacaattcattcttttcctggttttattgactttttaaagtcagcctgatacaaaaaatataatttatttaaattttccatgtgcgtgtactatttttcgaattacgcagagttcattgctttgagtttttcatttggattgaataaatattatgtagtgataaactattatgtgccatagcaagaggactctacagctataaaatgaagtgaagatatgtgtacatgtataaataattgaagcaaagaaattattacacttttttatgttcactctgtatcttggggaatactgagaatactctgagggaatactctgtagagtatatgtagctatattccartgtagaaaggtaaatatttctcaatattccccaagatataaagacttgaaaatatatatatatgtcagacttgaaaatatacatatatgtgtacttaattatacacattatgcatatatcagccatgttccccctttcccattaggcccttgaaccaagggcacaatcttggtttacttacaggatttgtggctactaaggcctggttgttggccactgcagtgaggtgaat

SEQ ID NO: 773159 - DNA, 618 bp, Homo sapiens
agagcctggaggcatatttgatccaaatcaatattataaattgtcaatatattccttctacaagacttctatgaagggattcatgggcaagatggctcttggaatgattgctgagtgtgtgtaagacattcatatgccaacaaatawgtgaaatccagctggaatccatcaaaatagaaacaactggaaccagctagtattttcatattaaagagtggtttactttggcttgactttgtagtgtataggagtagtgacgcagacagtaatcagggcttatctacaggttattgattatattctatagaaaaaaagaatctttgaaacttttgaacaaaggagtggcatgattcctgctattacttagagaaattcaacactaagagaaagacaatcgtatttttgataaaatgccacagcagtgacataattactttctgttcattgagcatgaagagagttaatgaatatcagaaaaagtctagtaaataatgttcttttcaaatcagttatattatgtgtggtttatttctgtcattcatcagtgttccattatgaaagttatagacatataacatttgttcatatggtcttattttaaaatgcctgctttgagct

SEQ ID NO: 773160 - DNA, 497 bp, Homo sapiens
ttattttgtctggtgggtgacagaagaaggaattgcatgaaataaaaatcaacttcaattactcatgaaagctttaatagttggaaaccttgctaaacaaattttctcttttaaatggtaccctttttacttcttgaattcagatctccctaraaatactgaaagaaatgtactgaaagcacatggagaaaaaagacagttgaggtaatcttaaaaaaattaatataaactctatcaaaagttgtaataacttaacattatgtaatatctctatataactataaataagactactgtaaatactactaaattgattcttgttcatgagtgtatgtactaaccatgctgataacattatctgctacacctaaagagtttttaggtgaaacagcctcacacattgctatagttgtttagtcaagcagatcccgtatccaacagcagcaatatataaggtagcaaatgacccatggtatgatttagtgttacaaggatga

SEQ ID NO: 773161 - DNA, 594 bp, Homo sapiens
ttcatacctgttacttcatgtttaaattcatcacaccaaggctgagccttatttccatatttattgctacccagatatttatactatatgtttgtttaaaaaacagcaatgggtgtaatcttgaatgggcaaagcaaataaartacgattgcaaaagttctaatgagttttttcccctttcagggacaagaaaatagctagcatagttgagaggcacatttgcatttgagtctctttaatgtatactctggaaaatcaatacaatagatatctgacctttctcctgtacttttgaataagcaagaacagacagaaatcaaaacgtgtaaaatctttaggaatgtaatgagctggtttatatcagaggacacatttctaacttacatttacctggtagccaaacaagaaaattaacttgcctatgtcttcctgttacatttttttgcagaacccaataaacctgtcaccttcttgcatttttatttttgttttattcattttacctttactatgcaaaagagacagtgggaagaaattgaattgggagtcaaaattccccagtgtacatctgccctctgttgttaattaactatg

SEQ ID NO: 773162 - DNA, 536 bp, Homo sapiens
taggattgtttttagcacagaggagccaaaaatctttgttgaacgaattaatggttacttcgtgagttgtgtgatcactggaaaagatgcttgaccttcctaaacatctagaaagtaggaaaactaacgtatccatagcatagagttgctaagaagagtaaataagataacgaagagtttgacacccagtgaaagttcaataactgttgtaaaagatttagggcaaacctaagatgtctttctgaacactaagatttttttcagrtagttatggactgcatgtttatgtccccttgaaattcacatgtgaaagccctaatcaccaatctggcagcatttggagtaagcaagtaattaaggttaaaaaaaaaaaagatcatatgggtggggccctgatctgacaggataagtgtccttataagaaaacacatcagaaaactcctcttccaccttactgcatacgccaaggaaaggccatgtgaagccatagtgagaagatggacatctgcaagccaagaagagagccctcatcataa

SEQ ID NO: 773163 - DNA, 627 bp, Homo sapiens
tacataatgtctcaaaattggatcctatccttaaatatgtgctcatagaaaagcgaagtttgaaataactgcagggaaggttatccaatgcctttaatttcctgtttgctttgataaagacaataacacactgggagtcactacaggtcttttgaagaaaagagttgtaacagctgttccaacaaccagtgcaaaaagggaggctggagatctgtcccatccttacagtggagttctagccattgctttaaattgcatgacaggttgcacaaaagtaagtctggagatttgtcttgattgakgtacttataacctacttctgggaacatgaatacaatcatatgttcaaccatttaatttatgctcaaactctcataagtcatagaagcaagctgagagtttggcatatcgaagaataatgttttactctcacttagtgaagaattgcctttttggtttggcatgattttattctttagagtaataaaattgatgatgccaatgaagataatgatagctaatatttattgaagatttactgaatgcccagtactctgctaagtacttcaaatgtactttctcatgtaatcctcacaaccctttgatataggcactattttttttctc

SEQ ID NO: 773164 - DNA, 670 bp, Homo sapiens
tggtttggctaaaggataccaaaagttgttccccagtgagacatgcaaggagggtagcaaggcctacccttttacccagaaagatcagcgttaacgagaatcagttgtaaatgtgaataaattaggaaaacagccaggatattgtggtagatagttgccaagatggccttccagaagaygctgtttctaatattgagtagttgactgtaattcctctccccttcaacctgggctgtcctgagtgcttccttgaccaataaaatgatagagaagtctgaacttccaagactaggtcgtatgaaatcttgcagcttcctttagtatcttgcaatggtccctatgggctgtttcttgtcaaaagctagtctcaatgctctgagaagcccaagccacctggagaggttacgtgtaggttctccatttaacagacttaatgggctttcaggcaacagcagcatcaactgccagtcctacaagtaagccatcttagatgtgtccatccagcccagttgaacctttagatgaccaaagatgaaatcaagatactgtgttgttttgagccacctaatttgagtgaaagataactggaacagatgttgtcaagcacagtggttaagaatatgggacccaagtgtcaagactgggttgatgtgagtcctggctctgccgt

SEQ ID NO: 773165 - DNA, 587 bp, Homo sapiens
tggatccctacatgaataagtcctgtaaatacaatgtcttaaggctttgtatagctgtcctagactgcagaaatgtcctctgattaaatccaaagtctggcatcgttaactacatagtgctgtagcaacaagtcttatcatggcatctctttctatgtttggtttgctttttccaagagtattcaggtctcctcttgtgagataggaaggccatgaaaacaattagatttcaagatgatctatgtgaccaaatgttggacagccctattaaagtggtaaacaacttctttctaaacctacttgtcttctttattttgccatttatttttactgaatcaaccttaaccaaatccagagaatgcactgctcagatactcatagtcagccagagcttctcccataaggtctttgyttccattgtggctactatttacaatgttaatattttgaaaatcagaactccattactataactgcagtgtcctcagtcagcaagccgaaatgtcagatgccattattgggctttcgtagttgttactggaataatagatatggggctaaccccaccaaaaaatgatcttcttttt

SEQ ID NO: 773166 - DNA, 707 bp, Homo sapiens
cagcctagatccctcacatgcacagttcacagtaaggtttgtgaaccactactgtccatggcccgggagttggggaatccctgggataaggtatccatttggtccctggttggtgttctcatgtctcaaacaaaacaaaagaaaacctccaaaaatttacaatgttatctctcagttgaaaaaaaaagtatatatattatataattgtatggtggcattttgcattttcctttagccctaactccctaaaagcagaggtctttataactagtcagctgtgaggcctggctgctgtaaagtagggggttaaatgactaaaaagccccaatatcgaacagacaaagggtagtttggaaacttttcccaggcgtgattcactacaaatgatccagcatcagcggctgactcctcwtggaacaaagcccactcttgtcacttccctgacccttgtttcctacccagacagatggcttcatcttccacttctgccattgcactgccttcctcaccaatgggattcaatcaatgagcctaaccagagtaaatgtgatgtaggccggcttggctgtctcatctcagtgcagtaaatgccaccgtcgatcattgtttgggcttttcccggaaaggccacaggttccgggagagtctgtcattttctgaaaggcacattctgttcttcaaggtaagaagagacatttgtttaaact

SEQ ID NO: 773167 - DNA, 573 bp, Homo sapiens
ccactttactggaatttttctcccacagtcgtatccacataatcagaaaacttagtcagttgatattgtcaaataaacaagtagaatctgatcatttctcatcactcttattgctattaccttgctgaaatcaccattatcttttgcctgcaatattgaaataggtacttgctgktttttctgcctctgccttagtactcatgccacagtgatatagttaacatgtaaagcagattatgtcatttcactgctcaaaacccttcaatagctcccaatcctgtgcaaaatgtgatgcttaattttatgtgtcaagatagacaaatgggattacattagactaaaaagctgcacagcaaaggaaatagcgacaagtgaagagacaacctgtggattgggaagcatatatttgtaaaatgtacatctgataaggggttaacatcctatatctatatctatacatttatttttattttaagttccaggatacatgtgcaggatgtgcagatttgctacataggtaaacatgtgccatgatgtcccatgaaggtttgcagcacctatcaactcatcacc

SEQ ID NO: 773168 - DNA, 595 bp, Homo sapiens
gatacaccacttaggcagcttgacattattccctgcagttaggaggacccagaaggctggtgctggactcctgcccatgaaacctcgaaggcaggagggcttggcagaccagctgcttcagttgagaagttaaggaaagctgctgctgaattgacactggcctatactcctgggatttgtcagaacaaaagargcaggagtgctttttatggaccatataggcaccggtgggagagagaactgacctaaatccagaaggatcgcagtggaaatccaacagagagaacccatgtggagtagactgtcagaaaaccgaggcattgaaaggggggtgaccaacaggaaggcaataccgagtcagggtcgtgggaaatgctgttagttttccagcagggcctctgacagccatgagagtgtcatgagaggcaagacaactttagatacctgccaggcccagagctcttgaagttgatttactgcaatacctatcaagagaaaacttacctgttcttttaacctcttctccctcccaaggctccaactccagagagatcagaaacagttgagcagaagggaggtgtctgagaaagcaaga

SEQ ID NO: 773169 - DNA, 625 bp, Homo sapiens
aattcaaatgagatcccatggtgaaattggaggggtagtttctagtagttaaaaacagatttccagagaataaaaggagagacagttcaacttgttttaggagactagtataatcttggtatctaaacagataaacactgtatagaraaagaaaattatagatcagtcttattgaaagcatgcatataaagcatgcatggaagcattctaaataaaatgttaactacttaaattcagcagttttaaataatataaactaatcaaatacagcttatccctgaaattcaaagttgttgttagaaaatctatcaataaaatttgcattaaaaaaggagcaaaatcataatcattttaataagcacaaaaatactaaacgttcaaaagaaatcattatgttataaaaacttagcaaactagaaatgaaatgggacttctgtttgcaaacttttgatgcaatgaagggtatctaataaaaacttaaaacaaatgtccactattcagtgatatgctgatggtcttaatgcaataagacaagaaaatgaaactagatatatggtttggagatgatgagagaaaatgtcatcatttacagataatgtgatcttttatatagaaaatccataag

SEQ ID NO: 773170 - DNA, 625 bp, Homo sapiens
aattcaaatgagatcccatggtgaaattggaggggtagtttctagtagttaaaaacagatttccagagaataaaaggagagacagttcaacttgttttaggagactagtataatcttggtatctaaacagataaacactgtatagagaaagaaaattatagatcagtcttattgaaagcatgcatataaagcatgcatggaagcattctaaataaaatgttaactacttarattcagcagttttaaataatataaactaatcaaatacagcttatccctgaaattcaaagttgttgttagaaaatctatcaataaaatttgcattaaaaaaggagcaaaatcataatcattttaataagcacaaaaatactaaacgttcaaaagaaatcattatgttataaaaacttagcaaactagaaatgaaatgggacttctgtttgcaaacttttgatgcaatgaagggtatctaataaaaacttaaaacaaatgtccactattcagtgatatgctgatggtcttaatgcaataagacaagaaaatgaaactagatatatggtttggagatgatgagagaaaatgtcatcatttacagataatgtgatcttttatatagaaaatccataag

SEQ ID NO: 773171 - DNA, 625 bp, Homo sapiens
aattcaaatgagatcccatggtgaaattggaggggtagtttctagtagttaaaaacagatttccagagaataaaaggagagacagttcaacttgttttaggagactagtataatcttggtatctaaacagataaacactgtatagagaaagaaaattatagatcagtcttattgaaagcatgcatataaagcatgcatggaagcattctaaataaaatgttaactacttaaattcagcagttttaaataatataaactaatcaaatacagcttatccctgaaattcaaagttgttgttagaaaatctatcaataaaatttgcattaaaaaaggagcaaaatcataatcattttaataagcacaaaaatactaaacgttcaaaagaaatcattatkttataaaaacttagcaaactagaaatgaaatgggacttctgtttgcaaacttttgatgcaatgaagggtatctaataaaaacttaaaacaaatgtccactattcagtgatatgctgatggtcttaatgcaataagacaagaaaatgaaactagatatatggtttggagatgatgagagaaaatgtcatcatttacagataatgtgatcttttatatagaaaatccataag

SEQ ID NO: 773172 - DNA, 625 bp, Homo sapiens
aattcaaatgagatcccatggtgaaattggaggggtagtttctagtagttaaaaacagatttccagagaataaaaggagagacagttcaacttgttttaggagactagtataatcttggtatctaaacagataaacactgtatagagaaagaaaattatagatcagtcttattgaaagcatgcatataaagcatgcatggaagcattctaaataaaatgttaactacttaaattcagcagttttaaataatataaactaatcaaatacagcttatccctgaaattcaaagttgttgttagaaaatctatcaataaaatttgcattaaaaaaggagcaaaatcataatcattttaataagcacaaaaatactaaacgttcaaaagaaatcattatgttataaaaacttagcaaactagaaatraaatgggacttctgtttgcaaacttttgatgcaatgaagggtatctaataaaaacttaaaacaaatgtccactattcagtgatatgctgatggtcttaatgcaataagacaagaaaatgaaactagatatatggtttggagatgatgagagaaaatgtcatcatttacagataatgtgatcttttatatagaaaatccataag

SEQ ID NO: 773173 - DNA, 591 bp, Homo sapiens
atacttcatttaacaattagcaggatcttcctttttagacggtattagaactgatttgcagggttataccataatcaggaatgttcccaccctttggaaagctctaatcttatcttgaccagcctgccctctgcctccatggaataaaaacaataatgtctgcaatacagactaaatgtataaccctcaaagaaaactagaacaaacccagaaactgtataaagcatacagaaaaaatgtttccatgccccaccgttgtttgaacagaggtaagtattgctgtgatcaactgatcaggaacgaatgtccaacgtgaaatgaactcaagcccagggcgcctcagcggtggccagagagcggcacagacaaacagwgtgccgaggtaattccttcagcagaagacagacaactcaggaagagcctttcctaccaattaaaggtagtcaatattgattatctgagggatttccatgctcaggaagcaaattagaaactcaatacctgaactattcctaaatgcagttatcaacttcagagttttatctcataaaaccaattcagcttagagtttaattctattaaattagggct

SEQ ID NO: 773174 - DNA, 650 bp, Homo sapiens
actgcactcagccttcacttttccacataacatttcttcagcctggaagctcttcagtgcaagggatccaggacatgttacagccccaacaaggaaggggttaatgttgttttaccccaggatttcatgaacaagctgtgagccagttttgggtcccctttgccatctctttatgtcgttgtccccactctctccccgaagcatgcattatctggaccattaaggaacccatcagcagaggtgccatgacctctggctgaccttgacctgctgctgtcctgccttgcactccaattactgcgatatgtggaggcaaccacaggctcggagcccctctaacgctcatagctttgtcaggtcctcacctcctctcactggcatcgggtgacttctagatcctgccagggtttctcttctgacatgacatgtgtactcattctgaaatgaaaactacaaagctgcagttgstctctcttattggaaaactgtaattttccactgcctgggctgttttccttggatgatgggctgcaagaagaaacagtgagaatatgacaagattggttcatttctttgctaccagcaacattattttttcttactgttcaggcatctagagttttgttgacttgatactccccagtctcttt

SEQ ID NO: 773175 - DNA, 585 bp, Homo sapiens
aggataaatggaatagagtataaaagccaacataggaaaaatgtaaataaaatgtcataaaagcagaaaaaagaaacatagaaagttgaaagtattacaaattaaaataaatctaaatatatcatttattacaatatataaaaatggacataacttargtcaaatcaaagattgcctaattatataaaaaatatagctaactatatattctttacaagataactaattaagatataaatacccagaaaagaggaaacagattgaaaaagatatatcagtaaaatatcaaccaaaagtcagctgatttggctatataaacacaatgtaaaatataatgttgcagagataaagtgtgccactatatcaggatttcaatttgttagagtgatataacaattctaaatttgtatgcccgtaactttatagatataaaacatatgaaataaaaatttacagaactgttaaaagagatgaataaatctaccatcaaaatttaggagttaacatattaacaatcatagatcaagaagaaagaatgagcagtcagaatacagatatatgaacaacaccgcttaaaagttgact

SEQ ID NO: 773176 - DNA, 530 bp, Homo sapiens
ttctatataaatatatttctaaaaatgggtttcagattgctcattgctaaagaaaataattagaaatatggaaaagttaagtctggaatgaactctcttgttggattgaaattggaagaattggcgtgaattcatgtttttaaatatgtaattgtacatgtacttatatacatttctgaagcttgtatttacttttacatactcacatacatacacgtgaatctatttatatctacgtgcgcacacacacacacatatataggtacaaatatagatatatagacgtatgagttatatggatatataaagaaatatatatatatakagagagagatagaaacatgtgggtatatatatgtgtgtgtttaagagtttatgtgtatatacacacatacatttcctagctctcttcattgaggaggcctagaagcataacatctcagtacctatgggcattcctagtactgtgatcttaagaagagccaaggttccttgaaataataaggagctgaagtgggagtttcttctgt

SEQ ID NO: 773177 - DNA, 569 bp, Homo sapiens
atgtactgcaagtaagagataaagcatacgcataaaatatttggaaccattggccatgtattcagtcacaaaaaggctcaacatcttttaaaaaatcaataatatacaagttacaacctccatccaaaaggcaatgtaattataaataaacaaaaagtgcactttggacaaagtatgtatttggatacttaagaatgaaatactaaataacttagataaaaagaaaatgaaaattacaaaatgcttaggactgaatgacagtgtaagttcaacatgtcatctaaatgagagagtgtaaataaatctcttaagcatttagcttatttaaggacataaagaaggcaaacytaagtgagctagatagaaaaaaaattaaatgggaattaagaaatgatcaagagtatcaataaaatgcaaagcttttgccttacaaaattaaaagtaaaaatacacaaacctttagcaagagtggtcaagtgggtaaaaaggagaacaaaggtacaagtaaacaatattgaccaggaattgggtcataattacatagaacatataaaacaaaaaaaaattaa

SEQ ID NO: 773178 - DNA, 574 bp, Homo sapiens
actaataccacctgtctttattaccatacaccatgtcttttcatacttttttcctggcatatctaggcatttttcatttttcatataaattttaaaatcaatctctcaagttctgaaaataaaatgtcatattggaactttggagatttcatttgttttgaaaaaaactagcatctagacagcattatgcttccaattcatgatgacatcatatttctatatttttcaatttctctcacttgaatattttccttagtagtaatgagcatatttttgacttattcctagatattcaaaatgtttagatctataaaaatgacatatatatgtacaaatagatgatgtttatttaatttttaattkttttatatttagacataaagttgattttttgtattttgagtttatatcagcaaccataccatgttattatattaattccactagtttagattcttttggattttctatacatgatatcatatgagctatgaatatcatttgtgaataatttttcattcccccaaaatcaaaattttataacatctacctattatctatctatctatccatc

SEQ ID NO: 773179 - DNA, 612 bp, Homo sapiens
acacccaggatcaatactttggatccttcaatccaatcaagttgacactcagtattaactatcacaagtctaccccttgtcaacttgaacccatacacatctcctgaattcagacataatcttcaaataaagacaacgtaaggtcacaattatgcctaacataatacaactatccttcatacacccgtraaagcagcaatccccaacccaaatactattacataaagttaacaatacttaaatgcccatgtgaagtcaataaatcttatgtcacatgataaaggaaaaaggaaataaaatgaagatatcttctcagtacaagtttatatatgaacaaacatgtttttaacagaaggaggaaatactcatgacaattacagtcctcgtttctgcagctggtcacatggtcatagctggtattaatgactaccttcttctactacccattttgtactccctttgccttcagcaagtacctcagcaggtcatgtttattttcctggtggagtgacccaaaccttcattcctgaagggcctgggccatttgtactcctgcctggattggtctgttgtagtttcccattgaccttaatcacagggcatggtgatatt

SEQ ID NO: 773180 - DNA, 622 bp, Homo sapiens
ctcttgctgggccttccactggacctggcctcacagagccttagtttcctatctgaagaagggggatgaagttgcccacctagtacattattgtaaatatctagttaaatgggattacagctctcgtcatagcccttgttattactgytaggtccactaaactcacatctgcttcccaaaagggaaggacttcacacagcttaccggctgtggttccaaatcgtcacacttggcttcaggccactacctgcacattttttaccagctaaaaaaatcaagcctagacttctcaaaacagagaattgagatcttctaatagtccttccagggcgactacactgcacaaagaagatgacacccatcttatttcaagggtaagtcaggtttcttggttggctaatttattaaaatcttagccccatttcccagtcaagggtggtgtggtaaaccgatggcatctaagaaaaacattcttctaaaacagccaaacagcatgcttcaacatgctgaactgcaaaatttccattactttaaaaatagttgacttttagccatatgctccaattaccaattttaaaagaaggaaaaaagaaatataacaattgtatcacacatatgcaag

SEQ ID NO: 773181 - DNA, 568 bp, Homo sapiens
atctgatgaattgagattcactctctaattaaaaggaatgaaggggatttgcagtggtgtgggagagagggtcttaccctttcatctgttcacaagccagattctcctgccccatccctcaccttggttgcttcttccacactctccctcagggcctgcaactcagcatcatattgctccttcagcttgtccatctcctgatcatggctggaaacctcttctttcagggctcccttcagggcggtgagttcacgctctcgctttctcaagaggtcttcttgctcctctttggcaatcagcagatcttgaagatcctgttttgcctgtaagagctcctagagagaggaaacaygaagggagaaggtgacaatgaaacatcttgttgagaggccctgtatctcccctccagttcagtccccatgtgcacagccatctcacctggccttgccactctctccttctacatcccgcacacctgtttagaccatttcttcctctccccctgcatttctcagaggccatcattcccttggattcctctgcctctgcttcttggagatttgattga

SEQ ID NO: 773182 - DNA, 606 bp, Homo sapiens
actcacacatgctttaaaaataatggaagcaggggctcttggccaatgttaactctggggaggggaggtgtttttatttgtaacttctaaaggactaccacattgcatggaagaactcaaggtgatggcggactccattcaaacctgaagagtagaaactcctcctatctttgaatttgcttttgaaatagtaaagggtcactttaaaaatgtattcattttmatttttaaagtatggtgtcctttcctacacacccctcccaaagcccccaccccataccacacaagacaaatgccgtcacgaaaaccccagccattgagttttaaccctccaacggctggcacagggcaagaaaggaaggtaaccattaaggcctcggaaaaggaaattaagagtcccaccagaaacaacaatactttgctctttcagagggaaaatcactaacccttctttgaggtaattgtagagaatctgcttagctgtctcctcattggtttgctgagtgagctcttgctggccctttaagagatccggtgtggcctggaacataaggcctgttgttagaccatgaggatgaagttcccagaggcttccaaacaccaaac

SEQ ID NO: 773183 - DNA, 653 bp, Homo sapiens
actgttggatcctgagaaggcagcaagatctgagagagaggagggttgtacagtgtgtctaggcagaacaggctcattccctgctgttttgagagtagaaatatacaatccctggtgtgtctgccatttagaaaatacaaacagcttaaaattcatttttgcaaattatagaaagatattaataaawttaaaatttagagagaaggaaaggagattgattttgaggaaaacaaaaaagaaaactttgtcgtgctgggtgcacctgtggtcccagctactcaggaccccaggagtttgagtccagcctgagcagcatagcaagaccccatttcttaaaacaaacaaattttattagagagtaaaagaaaagtaggcaaaagaataatttcttgagttcgtcttggaaactttaatatgtatatatacgtgtatatatggtgtgtgtgtgtgtgtgtgtgtgtatacatatacgaacacactagtttgtgtttttaaaattgaggtataagtcacatacagtaaaatttacaaatcttaagcttgatgaattctcacatatgcatacaccaagacacagaacatttctatcatgtgagaatgttccttcatgcccctttccaggcaatcctcctagtccaggggtaaccaccatt

SEQ ID NO: 773184 - DNA, 608 bp, Homo sapiens
ccacggaagagtataagaatgaagacaacatccttgacattattttcctttgtaaaaatatactttgtattctaaaagatggaaaaataataatacaaaaaggaaggggcttatctttacagggatttgatatttgtgaattcaggttatgagctattatgagacagcctgtactcaaataagagatctgaccactgctcaaaacagaatgaacttctgcttctggaaagatgaagtagaagtacttttccctacttctcccwtgaaataccctggacattatatataaaataaacatttaaaaattctgaccagcctggccaacatggcgaaaccccgtctctactaaaaatacaaaaattagccgggcgtggtggcacacacctgtaatcccagctactcaggaggctgaggcacgagaatcgcttgaatccgggagggagaggttacagtgagctgagattgtgtcactgcactccaacctaggtgacagagtgagaccctgtctcaaaaataaaaataaaaattctgaaaggtggagaaggaagaagactggctagggaccttggggtctgaggaatgacacagctgtgagtctgctgagtttg

SEQ ID NO: 773185 - DNA, 492 bp, Homo sapiens
ggcgatggtccacaccatggtgaatgtgctgggtacccctgtcaggcccagggagagtgaaagagcagagagggcacaggaagcaggggtagagggcatgagggagagattttggagaaaagcagggagagggagggagagagaaaagggtgggttgtcagtctgctgtctttggttgcataggttgttcaccacggagggatgctccactgagggggtgaagctgtatgcctgaagggctgtgtctacctagacggacattctctttytaattgtgacagaggccctttatagattagcagtggccctgtgtatttcgggaactaaagggaaatggaaagatgttcacaaaatctgtcccacaggtcagccctaggtgcagctgcaacctgagggacttgtcctgggatcagacattttgaggactttcttgacccttggctgatatccttgcaggcaggacctgcagctaagcaagacgtaggactgcaa

SEQ ID NO: 773186 - DNA, 633 bp, Homo sapiens
atgcaggagtcttgtagaattttaccttcctcctcccaggatgatgccaagaatgacaattccctggccttggctagcaagactgaactagaatcctggagaactgcacagttaagaaaatgaaagagaaagggaggccatagaagatggtttctctcccaatgcttacttttatggactaaatgttaagcaatgaagaaagtaaaaaagaaagaaaatattttgcatcacatcagtaatccgtggattctctgttttactaatgcacttgtgcttcaattcttattttggctcttcaggctctcctggttttgagtcccattttaggttgtatgctttcccttttgtcttaacaacctrttcttttctccggttgtactcttagtggtccctgtattcatcttctatatctttctattcattccaaaattatgtaaacacccaacctgaccaagacacaccctagcactagcccaccaggccagaacccctactaagtagccactgactctctatgaaaggaagttagaaaatgaacctgctgagagtaaagggggaaaaaggtggataggaggcaggactaacttgcagctgccactcagatggacagagcagcatgtggagacccacatc

SEQ ID NO: 773187 - DNA, 633 bp, Homo sapiens
atgcaggagtcttgtagaattttaccttcctcctcccaggatgatgccaagaatgacaattccctggccttggctagcaagactgaactagaatcctggagaactgcacagttaagaaaatgaaagagaaagggaggccatagaagatggtttctctcccaatgcttacttttatggactaaatgttaagcaatgaagaaagtaaaaaagaaagaaaatattttgcatcacatcagtaatccgtggattctctgttttactaatgcacttgtgcttcaattcttattttggctcttcaggctctcctggttttgagtcccattttaggttgtatgctttcccttttgtcttaacaacctattcttttctccggttktactcttagtggtccctgtattcatcttctatatctttctattcattccaaaattatgtaaacacccaacctgaccaagacacaccctagcactagcccaccaggccagaacccctactaagtagccactgactctctatgaaaggaagttagaaaatgaacctgctgagagtaaagggggaaaaaggtggataggaggcaggactaacttgcagctgccactcagatggacagagcagcatgtggagacccacatc

SEQ ID NO: 773188 - DNA, 594 bp, Homo sapiens
gactaaatgttaagcaatgaagaaagtaaaaaagaaagaaaatattttgcatcacatcagtaatccgtggattctctgttttactaatgcacttgtgcttcaattcttattttggctcttcaggctctcctggttttgagtcccattttaggttgtatgctttcccttttgtcttaacaacctattcttttctccggttgtactcttagtggtccctgtattcatcttctatatctttctattcattccaaaattatgtaaacacccaacctgaccaagacacaccctagcactagcccaccaggccagaacccctactaagtagccactgactctctatgaaaggaagttagaaaatgaacctgctgagagtaaagggggaaaaaggkggataggaggcaggactaacttgcagctgccactcagatggacagagcagcatgtggagacccacatcatgaacttttgctccaagaactaccataggaacataccaggaaagcagagaaaaccacagaccctttgaaggagtagattgccactgcaggctctgtgagtcagcttgctttctcagcagggaggtttgtagcctgg

SEQ ID NO: 773189 - DNA, 669 bp, Homo sapiens
agaacggatcatataattaaaatgtcctgtgcaattaatcatatcttagaattatatcaatagctctatcaattaaggtaaccttccttttcacttccagtaagttcgaccaatgataaatgaagccacataaccaaagagacagtcagataatgtagccagggctcacagatgagttttaagaataatccaataattagacagtgttttgcagtggaagagttaaaacagcaggcayttttagccagaagaagaaaacactgagggttttataaatagtatttgtgaaaactatgtaagactttatacagaagaaaggttatcagcatgggaccaggtgctggagggttgttgggaggtgagtctcagacctatatgcatttaaaaagcttcacagatgttccacatgcacagctaaggttgggaacaattgctcttgtcacttgttctgtcatcctgaatgactaaataatgtaggtgtttgtagactccttatattccagggtctcttgtcatgaaatgcttagttcagctcataggcagggcaatgaagctgtcctaaaagaaagctcatactggttctggaagtggtattagatcttttacacaggacattttgtttcgttcttgaaacaaacttttgagaaacatattatcattctgatttta

SEQ ID NO: 773190 - DNA, 588 bp, Homo sapiens
agagacagtgacattaatctgcatgtgtgatgctgaaacctagtttaacatggacgtgggacaacaagagtggaccaatcatgggacttggtgatggactggatcttagaagccaggaaaccagaggagtttcaaaacacacaaatattgctgatctgctttgcagggatgctggtagagtaatggtaacaagaatagtggaaaagcagatatgtgactaattcttattttgtcttctyaaagaattccttcatttagctaaaagtttcttaagctttttgcaggtacacaatcatattaaataactagtggttggttattaaagccagaattttatgccatcaaaagctgaatatcttcaagtggcctcctaaatcacgttaattttttaaaaagggccgggcgcggtggctcatgcctgtaatcccagcactttgggaggccgaggtggtcagatcacgaggtcaggagatcgagaccatcctggctaacatggtgaaaccccgtctctactaaaaatagaaaaaatcagccgggtgtggtggcaggtgcctgtagtcccagctactcgggaggctgaggcaggag

SEQ ID NO: 773191 - DNA, 588 bp, Homo sapiens
agagacagtgacattaatctgcatgtgtgatgctgaaacctagtttaacatggacgtgggacaacaagagtggaccaatcatgggacttggtgatggactggatcttagaagccaggaaaccagaggagtttcaaaacacacaaatattgctgatctgctttgcagggatgctggtagagtaatggtaacaagaatagtggaaaagcagatatgtgactaattcttattttgtcttcttaaagaattccttcatttagctaaaagtttcttaagctttttgcaggtayacaatcatattaaataactagtggttggttattaaagccagaattttatgccatcaaaagctgaatatcttcaagtggcctcctaaatcacgttaattttttaaaaagggccgggcgcggtggctcatgcctgtaatcccagcactttgggaggccgaggtggtcagatcacgaggtcaggagatcgagaccatcctggctaacatggtgaaaccccgtctctactaaaaatagaaaaaatcagccgggtgtggtggcaggtgcctgtagtcccagctactcgggaggctgaggcaggag

SEQ ID NO: 773192 - DNA, 588 bp, Homo sapiens
agagacagtgacattaatctgcatgtgtgatgctgaaacctagtttaacatggacgtgggacaacaagagtggaccaatcatgggacttggtgatggactggatcttagaagccaggaaaccagaggagtttcaaaacacacaaatattgctgatctgctttgcagggatgctggtagagtaatggtaacaagaatagtggaaaagcagatatgtgactaattcttattttgtcttcttaaagaattccttcatttagctaaaagtttcttaagctttttgcaggtacacaatcatattaaataactagtggttggttattaaagccagaattttatgccatcaaaagctgaatatcttcaagtggcctcctaaatcacgttaattttttaaaaagggccgggcgcggtggctcatgcctgtaatsccagcactttgggaggccgaggtggtcagatcacgaggtcaggagatcgagaccatcctggctaacatggtgaaaccccgtctctactaaaaatagaaaaaatcagccgggtgtggtggcaggtgcctgtagtcccagctactcgggaggctgaggcaggag

SEQ ID NO: 773193 - DNA, 567 bp, Homo sapiens
ctaattaagtgctgccgtcttttggacaagatgtggtctttactggatccaccgcttagtaagcagatgaaggcaatgtagttttagtcaattaaacattccaatagggagaatgacgtggaggctataattatagatggattcttggaaggggaagaatttcagcatcccagcttgggcaacattgcgaggcagtgtcgctacaaaaaaatagaaaaattagccgagggtggtggcgtgcgcctctggtcccagctacttgggaggctgagcccgggaggtcgaggctgmggtgaaccgtaatcgccctgctgtgctccagcctgggcgacagagtgagcccctacctcacacacacacacacacacacacacacacacacacaagaatttcagcattatttgattatactacgatttcctaggtggccccaaagttttccgacagcctttaaagcatgcttagtaagagaataataataaccatcatttgagccacggtgtgaaccaggcactgtatactacgtcatttacgcagatttttatatacgtaatcctcaaaacaact

SEQ ID NO: 773194 - DNA, 559 bp, Homo sapiens
gcaacctctgcctcccaggttcaaatgacactcttggctcagcctcccgagtagctggaattacaggtgcctgccactatgctcggctaatttttgtatttttagtagagacggggtttcaccatgttggtcaggctggtctcaaattcctgacctcaggtgatctgctggccttggcctcccaaagtgctgggattacaagcgtgagccacygcgcccagccacctggctaatttttgtatttttagtagagacggggtttctctatgttggccaggctggtctcgaacccctgatctcaggtgatccacccacctcggactcccaaagtgctgggattgcaggtgtgagccactgtgcccagcctgtatttccatttttaacataacaaatgtttcctgagcacctttctgagaagagtgtttgaaaaaggtatgttaatgattcctggaaatatggggacagagattaccataatttaacatctcttttcaggaacacttatttcattttcctcatttttaaatgtgagtactttaaaacttacagaaaagtttac

SEQ ID NO: 773195 - DNA, 613 bp, Homo sapiens
cttcaggatgggtagtggatagagataccttccttgtcatgttggatttcctaacatgtctgtttactccatcaagccactaaggagtgtccctagagccagtctgaaagcaagatggagtattatatgatatatccataggagtgacatcccttcactttcctttgccaaattctatgtattagaagcaagttacacctcctgtccacaatcaaaaggagattattacacaaaggtgtgaacctcaggaagacccgagcttgttgggtgtatgtattcattaaaaacaggttttatcagccctagatgaaaacagcagaaataaaactttctctgaagttttaacatcactagcaaatgatgactccggtatttaaaaataaatcactcttgttcccagaattaaaacctctatatgatgaaaagtttatatccggctccttttcttggctctttgacttctattacacagcttagcagcatgagtcagttcagccctggcttcaagycccttcccagcttcatccctggccttcaatcagtattcaccactgtagctagttggcagatgatgtgtttcagatgcctgcactccacacctgcttctgaaatt

SEQ ID NO: 773196 - DNA, 539 bp, Homo sapiens
tgcagccacccagctgtcgctgtggatccatgcatccctgcactctcagaggcctgggaatccagctgcccccgcaggctcagaagttcctactcccactgcctggcctctcctcactttcggtgcccgatccaatttcagaccaaagttgaggcccctcctggatgatgtcacaacccggacaggtgtgcatgcacttgaggcagtgctggcacaccagccccctgctgcctcagccccatccggactttcggtgtggagcacaggagagaggctgagtaggrgctgaggctgactcagcgcaggcctgtaggcacctcctcaacagcatggacaacatgattgatggcagctggaggcagacaggttcctttgtgaaaaagagtggatctcctgttaagcctaaccttcaagccaggtaaagcatagggcctgggctgtcagttccctgtggagtcagcagcctggagtgataatttatggtgccttatatgggcccacccatggctgtcgatggaccaatcagcatgcacttcctt

SEQ ID NO: 773197 - DNA, 539 bp, Homo sapiens
tgcagccacccagctgtcgctgtggatccatgcatccctgcactctcagaggcctgggaatccagctgcccccgcaggctcagaagttcctactcccactgcctggcctctcctcactttcggtgcccgatccaatttcagaccaaagttgaggcccctcctggatgatgtcacaacccggacaggtgtgcatgcacttgaggcagtgctggcacaccagccccctgctgcctcagccccatccggactttcggtgtggagcacaggagagaggctgagtaggggctgaggctgactcagcrcaggcctgtaggcacctcctcaacagcatggacaacatgattgatggcagctggaggcagacaggttcctttgtgaaaaagagtggatctcctgttaagcctaaccttcaagccaggtaaagcatagggcctgggctgtcagttccctgtggagtcagcagcctggagtgataatttatggtgccttatatgggcccacccatggctgtcgatggaccaatcagcatgcacttcctt

SEQ ID NO: 773198 - DNA, 644 bp, Homo sapiens
ctttctttatccttggccttcggaagtttgattattaaatgccttgaggtagacttctttgggttaaatctgcttggtgttctaaagtcttcttgtacttggattttgctatctttttctaggtttgggaagttctctgttattatccctttgaataaactttctgcttctatctctttctttagtttctctttaaggacaataagtcttagatttgcccctttgaggctattttctaggttctgtaggcatggtttattgctttcttctttttccttttgtttcctctgactgtgtattttaaaataatctgtctttaagctcactaatttcttgttctgctattaaaagactctggtgtattttytttttttttttggacagagtctcactctgttgcctaggctggagtgcggtggcacgaactcggctcattgcaacctgtgccacccgggttcaagcgattctcctgcctcagcctcctcagtagctgggattacaggtgcctgccactgcacccagctaatttttgtatttttagtagagatgaggtttcactgccttggccaggctggtcttgaactcctgaactcgtgatccacccacctcggcttcccaaagtactgggattacaggcgtgagcc

SEQ ID NO: 773199 - DNA, 610 bp, Homo sapiens
gaataaatacaggatatattataatacttcaacaatagactagatgaaacagaggaaagaatcttggaacttatacataggtcttttgaaataacccagtcagaaaatgatacaaattaaaaattaaaaaggaacaaacagtctttgagatatatggaacaccataaagagactaaatatataaattatctgtttcatttaaggcaaagagaggatgaaagaatttgaaaacctatttaacaaaataatagaygaaaagttcccaagtctagcatgagatttagacattagatacagtaggcccagcgattcctggattcaattcaaaaattttttctctacagcatattgtagtcaaactgtctatggtcaatagcaaactaaaaaattctaaaaacagcaaaagaaaagtgtctagttacctataaaagggtctccatcagactaacagaggatttctcagcagaaattttacagaccagaagagaattggatgatacgttcaaagtgccaaaaaaaaaaaaccccgaaaatcctgccattcatggatacttgatccacagaaaccttcctttggaaaagaagaaataaattatttcccagacaagca

SEQ ID NO: 773200 - DNA, 583 bp, Homo sapiens
aaaaaaaaaaaaaaaaaaaaaaaggagagaaggaggttgttatgcaattaaggtagttctttattatttcaaaataaatgtgttatccattactaatgaggtcaatttaaaataatgcttaaattaagtatttcttagtaacagtgttaataataaatataaatttgcttttttatgttatctgtcactttgagaggtgacagcgtgctggcagtcctcacagccctcactcgctctcggcacctcctctgcctgggctcccactttggtggcacttagaggagcccttcagcccaccgctgcactrtgggagcccctttgtgggctggccaaggccggagcccactccctcagcttgcagggaggtgtggagggagaggcgcgagcaggaactggggctgcgtgcggcgcttgcgggccagctggagttctgggtgggcgtgggcttggcgggccctgccctcgggagcagccggctggccctgccggccccgggcaatgaggggcttagcacctgggccagcagctgcggagggtgtactgggtcccccccagcagtgccagcccacgggccgctgcgctc

SEQ ID NO: 773201 - DNA, 583 bp, Homo sapiens
aaaaaaaaaaaaaaaaaaaaaaaggagagaaggaggttgttatgcaattaaggtagttctttattatttcaaaataaatgtgttatccattactaatgaggtcaatttaaaataatgcttaaattaagtatttcttagtaacagtgttaataataaatataaatttgcttttttatgttatctgtcactttgagaggtgacagcgtgctggcagtcctcacagccctcactcgctctcggcacctcctctgcctgggctcccactttggtggcacttagaggagcccttcagcccaccgctgcactgtgggagcccctttgtgggctggccaaggccggagcccactccctcagcttgcagggaggtgtggagggagaggcgcgagcaggaactggggctgcgtgcggcgcttgsgggccagctggagttctgggtgggcgtgggcttggcgggccctgccctcgggagcagccggctggccctgccggccccgggcaatgaggggcttagcacctgggccagcagctgcggagggtgtactgggtcccccccagcagtgccagcccacgggccgctgcgctc

SEQ ID NO: 773202 - DNA, 593 bp, Homo sapiens
taaaggcctagaatttgaagcaaaggaagatactcttaaaaccacagaatttcggccctgaaaggaacccaaggctcttccttcatccaaattctcaatgcagtacaagtatccgtaatggaaacagaaggcacacaccttcataaggacttaaaatcaactcagccgtaggggcagcctccactgagaaagggctctgagcttcacgggacaatggctctttgtctggtctcgggggtattaaaacaccaacttctgatccaagatcatcactccagatgacgataattgaaaagatttatgctaagagcttttcttttgctcttgaggtgcttttcttttttctttttaaggtaaaaattctttagaagtttattttttattttaacagtgwtaaatatacttcaagttacaaattcaagacctcagttcccaaacttctgaattaggcttcgaaattttattttccaatttataacctagcaaatttttgccatcacttttaagagggctttgaataatgtttgatcttgcttataaacccagtaattaaacaacttcatcatttcacgtaggcattatacatttaatac

SEQ ID NO: 773203 - DNA, 588 bp, Homo sapiens
caagtccttttgccatagctgccaaaaaaaaatcagacccaaattcaagccccgattttatgtttctcagactgagaaaacacaaaagccattgctcagatggtttggaaaacatttgcaaggtcagctcatttcatgatgtttgattccagtactggcacttggattacttgtgcatctttgagatgtcactgaataattatcaccacacttttaggatttattgagaatcaggctaggacgtatttcctcacctcacaaaagaaagctaggagaaaagcactatagacatctccattttacaagtaagaaaatagagtctgcaggagagtcagctgttcagcatcactcaggtagaaagtggcacagctggatgtagaagctaggctgccagattccasagcctgcactcttaatcctgtgctgcccagataacgctgactgctttgtattaagaacttacattctcccacttaattgggagcaaggcagattagaaaccctataaggtagatgctattcatgtgaccactttacagacatgaagactgaaacctgagaggctaataaatgtgtctgagatcataa

SEQ ID NO: 773204 - DNA, 513 bp, Homo sapiens
tattgagtgtgctcatgtgctttgcactgtgctagaagccaggggcatagaaccctgtcctgtgagtttacattctggccagagacaaagcagccaacaaaacagataaaggagtgcatcgtacaggtgacaattgcttcgtggtgaagttttcatgttccaccctatttaaatattgcccccgcctgcttcctggtacttccaaatgccattttctgctttctttttctccatagcaaaaatcagatttgtgatrtacgtaggggatttgaaagatccggtgacaagacggacatgtggcaaagagaggcaaataagaatgatgtctgggtggctggcagttcctttaactaagccggggaagccttagaggaacagatgtgagggagaagagatcaagctgaggtttggacacatttgatctcagactcctggagaggagacgttccagtggaaatgtcaaggaggcaaaccaaagccttcatctctgcctcccagacagcccaatttcta

SEQ ID NO: 773205 - DNA, 513 bp, Homo sapiens
tattgagtgtgctcatgtgctttgcactgtgctagaagccaggggcatagaaccctgtcctgtgagtttacattctggccagagacaaagcagccaacaaaacagataaaggagtgcatcgtacaggtgacaattgcttcgtggtgaagttttcatgttccaccctatttaaatattgcccccgcctgcttcctggtacttccaaatgccattttctgctttctttttctccatagcaaaaatcagatttgtgatatacgtaggggatttgaaagatccggtgacaagayggacatgtggcaaagagaggcaaataagaatgatgtctgggtggctggcagttcctttaactaagccggggaagccttagaggaacagatgtgagggagaagagatcaagctgaggtttggacacatttgatctcagactcctggagaggagacgttccagtggaaatgtcaaggaggcaaaccaaagccttcatctctgcctcccagacagcccaatttcta

SEQ ID NO: 773206 - DNA, 587 bp, Homo sapiens
catgcgcctgtaatcccagctactcaggaggctgaggcaggggaattgcttaaatccaggggcggaggttgcagtgagccgagatcacaccactgcactccggcctgggcaagacagcaagacctcatctcgggggaaaaaaaataaatagttgagttggtcaaartctaacaaattttcttactgcagagcttctcgaagactttgtaacagaacaccctttggaaaatactgccttagaatacctagccaaatgttgcaatccagttttcatgatctaaggaaaagtccttctcccaaactgtggaaaggggaagataaagtgatgctggttcctgaattgaacagggtgattaaaatgtacagcataaagccagatggattttcaatgtgttttgtaaaataaaccaaagaaggttaattgtgatgcttcaaaagtatgaccatatattttccagtgttattgtttatatcataatccaaataacttatttgctatatcatttcacagcataggtgagaatcttttttttttttttttttttggaggcagggagctttaaactttcttctaaaattgattttag

SEQ ID NO: 773207 - DNA, 624 bp, Homo sapiens
aacaactgaaaagtagtgttgtctcttaaatttgcttcttgatcacctatgtcagcgcgacaacttttattttaaataaaacaaactaactttactaagtctgtaaggtacaagtacagagttcaccaataaaaacaggtgataaaacaatttgatgtcgaatgattttgacataaaatgtaaatttgtaactgccagaattgctctgaaatggtattggtaacaggagatgctgytttacaaagtgaggaaaagacatgcaggaataacaacttgtcaaagatcataggttgtaaccaggtcagttaaaaagcaaaaggatcccttttttgtttgatttcacttcattgttttcgaaaattctgtcaaacatcaatttcttgttcatcgacccctataatttggcaatgttagctatacaggtttagatagatctctatagaactattaactgaaaaattcaggttacatgctttggagagtactgttttttccacagaagcaacagcatactttttctagagcagtggttctcaaacttgaatgagcctcagcatcacctggtgacaacctggattggttggtcccctaaagttgctgattcagtagagctggggggtaggg

SEQ ID NO: 773208 - DNA, 624 bp, Homo sapiens
aacaactgaaaagtagtgttgtctcttaaatttgcttcttgatcacctatgtcagcgcgacaacttttattttaaataaaacaaactaactttactaagtctgtaaggtacaagtacagagttcaccaataaaaacaggtgataaaacaatttgatgtcgaatgattttgacataaaatgtaaatttgtaactgccagaattgctctgaaatggtattggtaacaggagatgctgctttacaaagtgaggaaaagacatgcaggaataacaacttgtcaaagatcatmggttgtaaccaggtcagttaaaaagcaaaaggatcccttttttgtttgatttcacttcattgttttcgaaaattctgtcaaacatcaatttcttgttcatcgacccctataatttggcaatgttagctatacaggtttagatagatctctatagaactattaactgaaaaattcaggttacatgctttggagagtactgttttttccacagaagcaacagcatactttttctagagcagtggttctcaaacttgaatgagcctcagcatcacctggtgacaacctggattggttggtcccctaaagttgctgattcagtagagctggggggtaggg

SEQ ID NO: 773209 - DNA, 621 bp, Homo sapiens
accccattcatgagggcagcacaatcctgactcagtcacctccccaaggcttcacctcccaataaggttgccttggggatgaagtttccaaaatgtgaattttggtagacacattcagcccatatcaccattcctaaacattccagcttcatttgacccatgtgcctaagcaagcacttttaattttttcagacagggtctcactttggtgcccaggctggagtacagtggcaccatcatagctcactgcagcctcaacctcctgggctcaagtgatcctctggcctcagccacccaagtagctgggactacagatatataccgccacacccggctaatttaattttttgtagagatagggtctcaccatrttgactgggctggtcttgaatgcctacgcttaaatgatccaccttggcctcccaaagtcctgggattacaggcaacaagcatttttttttaaaaggcagcatgaaccagagcttcaataaagggagttggtaaactttttttttttttttttccaaaagcaagaaaagcccaggttggccatttatccagcagaagcagagtatttgtaaaataatggttcctctcagtacttggaagtgaattcatggc

SEQ ID NO: 773210 - DNA, 621 bp, Homo sapiens
accccattcatgagggcagcacaatcctgactcagtcacctccccaaggcttcacctcccaataaggttgccttggggatgaagtttccaaaatgtgaattttggtagacacattcagcccatatcaccattcctaaacattccagcttcatttgacccatgtgcctaagcaagcacttttaattttttcagacagggtctcactttggtgcccaggctggagtacagtggcaccatcatagctcactgcagcctcaacctcctgggctcaagtgatcctctggcctcagccacccaagtagctgggactacagatatataccgccacacccggctaatttaattttttgtagagatagggtctcaccatattgactgggctggtcttgaatgcctacgcttaartgatccaccttggcctcccaaagtcctgggattacaggcaacaagcatttttttttaaaaggcagcatgaaccagagcttcaataaagggagttggtaaactttttttttttttttttccaaaagcaagaaaagcccaggttggccatttatccagcagaagcagagtatttgtaaaataatggttcctctcagtacttggaagtgaattcatggc

SEQ ID NO: 773211 - DNA, 618 bp, Homo sapiens; identical to SEQ ID NO: 742248

SEQ ID NO: 773212 - DNA, 646 bp, Homo sapiens
ggtgaaaccccatctctactaaaaatacaaaatttagccgggcatggaggtgggcacctgtacacctgtagtcccagctactaggaaggctgaggcaggagaatcgcttgaacccaggaggtggaggttgcagtgagctaagataacgccactgcactacagcctgggctacagagtgagactctgtctcaaaaaaaaaaaaagaatcctaagtcagggccgtctgtattttggaggtgttattggcgagacttgctaataggctgaacgtgggaagagagggaaaggaagaggctagggtgaagtctgagtttctggctggaacatttggggagacgtcaatgccatttatcaggatgcagagtgtttgcrgatgagcaagttttgggcacagagatggaaagtaaggttagttagaggtagagggacttgagaaagagaaaacttgtgaatagagaggaatgagtcaatgaaaaaggagaaaaatgcaagggacagaagagataactgacaagagaaagccccagggggcagcaaagggaatgtccaggaaaagacaaaacctctgcagatgtgagatttggccactgtttctgtgaagtttgcccttccctaaagggctctgcatgggaggtcgcttctgcct

SEQ ID NO: 773213 - DNA, 610 bp, Homo sapiens
tatccatggtaataatggtatccaaaggcatagttgaaatgtattagcctttactgttattcctgtgaaggcttatagtgttggcatccattccctctggatttcgagtctgtgttcacagttgataatctcacattgagccatgataytctttgtatcattatcattacctgatataaagaaaccagacagaccattacctgatacaaagaaacttcacagtgaattcatagaaaagacagaaaaaagttttgctgaatatgtcgtatatacatatatataatattttattttaaaatgtcattgaacatatacatttctttagctttttccaggggacattgcacctaagtttcaaaacacacaaaatagatcccctttactaaacagttttcattttggggttacaaaaaagtcaatgtttcacaatcacaaagcataaaggtacatggttctgaaacaatttccaggcagatttctctcattcactgtactagggtagttttggaaacccagaccatgatccattccttacaaatgatctccaccatgggcctccctgggtctccagaaaaaaaacaaagaaaactgggggcaaaacaggagtaaa

SEQ ID NO: 773214 - DNA, 631 bp, Homo sapiens
ggggatccttttttttcccaccctcatgctttcacggagactgtggagcagcttggcaggctcaaattgttttgaggacaaaaggttattgtcaccaggaccttcataatgcagttggcctcttccctggctcccccacctccccttccccctctcctcagatagtttgcacagtggctagatttacaaagccattctcttcgcagtgcccccagtgctgagttcattcctgatggagtcttcccttgctctccctatcacccccttggctctcacctyctgcgcatggtgtcattggtcccggtgccagaatccccaagctggggcccatcctccccatccctttgtgttgagctgctgttgcaggatgcacactgtagctggcattgtgttgccttgagagcagtgtatcccgacccgcagccctctgagatgtctcaggccataatttactggcaagtgtctatgttaccgagttgaaacagcagtttctcacagctcgctttgtggcaccaagtctctgctcctgtgaccactggctattccgctttctcaagtaggatcagcgtacttcgtgccatgtccagccacatggggtggcaagcaagccagggacccagagggacatgtg

SEQ ID NO: 773215 - DNA, 631 bp, Homo sapiens
ggggatccttttttttcccaccctcatgctttcacggagactgtggagcagcttggcaggctcaaattgttttgaggacaaaaggttattgtcaccaggaccttcataatgcagttggcctcttccctggctcccccacctccccttccccctctcctcagatagtttgcacagtggctagatttacaaagccattctcttcgcagtgcccccagtgctgagttcattcctgatggagtcttcccttgctctccctatcacccccttggctctcacctcctgcgcatggtgtcattggtcccggtgccagaatccccaagctggggcccatcctccccatccctttgtgttgagctgctgttgcaggatgcacactgtagctggcattgtgttgccttgagagcagtgtatcccgacccgcagccctctgagatgtctcaggccataatttactggcaagtgtctatgttacygagttgaaacagcagtttctcacagctcgctttgtggcaccaagtctctgctcctgtgaccactggctattccgctttctcaagtaggatcagcgtacttcgtgccatgtccagccacatggggtggcaagcaagccagggacccagagggacatgtg

SEQ ID NO: 773216 - DNA, 449 bp, Homo sapiens
acaacagggataacctttgtaaaagataaaccctcctctcaaagcccttcagagatgactactgagctcatctgaacttttttgatgacctgcaaggtccttctgactggccccagcccatccctcgagcctcccctgagcctgtcctcttcctaactaagcggcacgcgtggctttgtccagctcctcacacaggccgagcatccgccaccatgcggccttcacacatgcagttgcttctacctgaacttctctccctccatccttctccatggccccccgtgccagtcctttcagcctcagcctcactgtmccctcctggacctccctgactgaggcatctcccaccttcacagatggatcacggctcctccctatattgtgagctctgtgcagcagaaactgccctctctgcttccccatctgagcccagtgcctagtacagtgcc

SEQ ID NO: 773217 - DNA, 606 bp, Homo sapiens
atggttctgcaaactatacaagaaggatactgctggcatctgcttctgcaaaggcatcaagaagtctacgatcacagcgtaaggcaaagagggagcaggtatgttacacagcaggagagggagcaaaaaaaaaatggacaggttctttttttttctttcttttttttttttttctttttgccagacggastctcgctctgttgcccaggttggagtgcagtggtgcaatcttggctcactgcaagctccacctcccgggttcactccattctcctgcctcagcctcccaagtagctgggactacaggtgcccgccaccacggccggctagttttttgtatttttagtagagacagggtttcaccatgttagccaggatggtcttgatctcctgacctcgtgatctgcccgcctcggcctcccaaagtgctgggattacaggcgtgagccactgcggccggccaaaaacagacaggttcttaaacaaccagctctcacatgaactaatacagtgagaactcacttattactgtggggaaggcaccaaggcattcatgagggatccaccctcatgaccaaaacacttccccccacctccaacatgggg

SEQ ID NO: 773218 - DNA, 606 bp, Homo sapiens
atggttctgcaaactatacaagaaggatactgctggcatctgcttctgcaaaggcatcaagaagtctacgatcacagcgtaaggcaaagagggagcaggtatgttacacagcaggagagggagcaaaaaaaaaatggacaggttctttttttttctttcttttttttttttttctttttgccagacggagtctygctctgttgcccaggttggagtgcagtggtgcaatcttggctcactgcaagctccacctcccgggttcactccattctcctgcctcagcctcccaagtagctgggactacaggtgcccgccaccacggccggctagttttttgtatttttagtagagacagggtttcaccatgttagccaggatggtcttgatctcctgacctcgtgatctgcccgcctcggcctcccaaagtgctgggattacaggcgtgagccactgcggccggccaaaaacagacaggttcttaaacaaccagctctcacatgaactaatacagtgagaactcacttattactgtggggaaggcaccaaggcattcatgagggatccaccctcatgaccaaaacacttccccccacctccaacatgggg

SEQ ID NO: 773219 - DNA, 606 bp, Homo sapiens
atggttctgcaaactatacaagaaggatactgctggcatctgcttctgcaaaggcatcaagaagtctacgatcacagcgtaaggcaaagagggagcaggtatgttacacagcaggagagggagcaaaaaaaaaatggacaggttctttttttttctttcttttttttttttttctttttgccagacggagtctcgctctgttgcccaggttggagtgcagtggtgcaatcttggctcactgcaagctccacctcccgggttcactccattctcctgcctcagcctcccaagtagctgggactacaggtgcccgccaccacggccggctagttttttgtatttttagtagagacagggtttcaccatgttagccaggatggtcttgatctcctgacctcgtgatctgcccgcctcggcctcccaaagtgctgggattacaggcrtgagccactgcggccggccaaaaacagacaggttcttaaacaaccagctctcacatgaactaatacagtgagaactcacttattactgtggggaaggcaccaaggcattcatgagggatccaccctcatgaccaaaacacttccccccacctccaacatgggg

SEQ ID NO: 773220 - DNA, 617 bp, Homo sapiens
  misc_feature 104, 105, 186: n = A,T,C or G
tcttcagcacatgtgaacagctctgagaaagtttagcaagagtggaatgaatagaattgagtaacaaaaacattaaaggttcgtgataaagcatgtagggctgnnatggaagggctagaagacagtagggagctggtaaactgggagaaaacaagagttaaaaggaatagaaatctctgtgcaagncaagaagagataagaatgaatttccaggagaagcaagaagtagtggttagacagtaacccgagtttaagatactaaaagtggggccgggtgcagtggctcagtcctgtaatcccagcattttgggagactgaggcagaaggtcacttgaatccaggattttgagaccattctgggcaacataatgagaccttgtctctaaaaaataaaaattagccagtcatggtgtcacacgcatgtagtcctagctaygcaagaggctgaattcggaagatggcttgagcccgggaggttgaggctgcggtgagccaagatcatgccactgcactccagcctgggcaacagagtgagtgagagcctgtctctaaacaacaaacaaaaaaagatagcaaaagtgggagcagtttcaagtaatgacaggatctaataagtt

SEQ ID NO: 773221 - DNA, 596 bp, Homo sapiens
ctgctttctaaaatgtatttgtaaccccaaaatcaattcatggtcatttgtagatattttcagagtggcaaaaaatttgagtcacctgatatgcatgttaccagctggggttgaacaaggtgatgctttggcttgttgtttcagctctgaatctataaacaagtgycctttgtagtttatttagtgttatgttttttcacatttttgtttgttttgttgttaatttcagtgtttaaaatggtcactaaatgaagtacaaacatgccagctagtgttcctaaatgcaagaaagctgtgatgtgctttatggagaaaaagtatgtgttagatatgcttcattaagacatgagttatagcactgtttgctgtgagttcaatgttaaggactcaacaatatatattaaacaagttgtttttaaacagaaacacatgcaaaacaaagttatacattgtctggttgacgaaaatgttgtgaacaaaggcttggaggaatcaaaccctatagtttccctaggagtaatggttcagtagttgttatttcagtgtttgtggcagcttcattgaacataactcctgtgaataataaaaattgtata

SEQ ID NO: 773222 - DNA, 584 bp, Homo sapiens
aaccaaagggagaggccgccaaagaaaccaaccctgtctgcatcctgatcttggatttccatattatggaagcttccatgttatgagaaaataaatttctatttttttagacacccagtctgtgttcttttgttatgacagcactaacaaactaatacagcaccattttttccctttccttttggagaagcaccacaccatattcagcctrtgccgtcaggtggagctgactcccaccctggctgtggggtgagctaatgatccaggatggccaatcagagccttcccaccctactgtcaacaatgagtgctttgggaatgagccagcaatgacatccaagttaataagaactggtgagcactgcatggaagacttcatgttttaaatgttggaattaagaaacggtatctcctgcagagataaccaaactcatggaatatgtccaatatcaccaagacaaaaccttcttgggattgaggcaaattataaagaaagaacagaacaaaagagcaaggatacaaagaagaaaacaattgctgaccgaagtgtttcaattcctggatcccttcctgactgaaccctc

SEQ ID NO: 773223 - DNA, 584 bp, Homo sapiens
aaccaaagggagaggccgccaaagaaaccaaccctgtctgcatcctgatcttggatttccatattatggaagcttccatgttatgagaaaataaatttctatttttttagacacccagtctgtgttcttttgttatgacagcactaacaaactaatacagcaccattttttccctttccttttggagaagcaccacaccatattcagcctatgccgtcaggtggagctgactcccaccctggctrtggggtgagctaatgatccaggatggccaatcagagccttcccaccctactgtcaacaatgagtgctttgggaatgagccagcaatgacatccaagttaataagaactggtgagcactgcatggaagacttcatgttttaaatgttggaattaagaaacggtatctcctgcagagataaccaaactcatggaatatgtccaatatcaccaagacaaaaccttcttgggattgaggcaaattataaagaaagaacagaacaaaagagcaaggatacaaagaagaaaacaattgctgaccgaagtgtttcaattcctggatcccttcctgactgaaccctc

SEQ ID NO: 773224 - DNA, 467 bp, Homo sapiens
ataaaacggtcagatctcatgacacttactcactatcaggagaacagcatgggaaaaatttccccccatgattcaattatctcccactgcatctctcccacaacacatgggaattcaagatgagatttgggtgggaacacagccaaaccatatmaccatatattattacttctgtttgtaaattacttctgtgagtaactcatttggactctcactcactgagaggggaagtagacttaacatgataagggagggtttgttaaagaaaaatttgtggacatattttaaaggcacctacctaacaaacaacctcagaacctcagtggtttcaaacaataaggtttatttctcactcatgctataggttcttcagtgatcagtagagaggttctgttcattatgatcagatgcacaggacaaatgaaaaccactgtattgaatactatagatcactctggaagaaggaa

SEQ ID NO: 773225 - DNA, 560 bp, Homo sapiens
ctctactgaagttcacttcctgaaatttacaggtgccacccccttttacatactaaatcttagaacctagccgggcgtggtggtgcgtgcctgtaatcccagcactttgggaggccaaggcaggcggatcacaaggtcaggagatcgagaccatcctggctaacacggtgaaaccccgtctctactaaaatamaaaaaattagccagacgtggtggcaggcgtctgtagtcccagttactcgggaggataaggcaggagaatggcgtgaacctgggaggcggagcttgcagtgaggcgagatagcgccactaaactccagcctgagcgacagagtgagactccgtctcaaaaaaaaaaaaaaaaaaaaaaaatcttaggacccagtcacagagccacaccctgctgcagaagaggctgccaaaggcagtccttattctgggtgatcaagtgcccaggaaaacatcaggagtttgctcctgaggaagagaaaggagagtggatgccagggccagctccaatctgagacacacgtggcctgcctggaccacatggtcagctt

SEQ ID NO: 773226 - DNA, 534 bp, Homo sapiens
acctgcctggaaaccacatcctcatcaaaagatagaaagaagaaaaactcgaggcagcctaagaaccctaccttgtgctgctaaccaccgagactgccgttcgcacagcagaaaaggatagacacatcatacccaagtcaaaaaagcgtcatcaccatcaaagtyataggtcattgttccagggtcaagccctaccaagttaaagctaagaaaactttatctatcttttctttcctttaactactccccatcttattaatgtaactaaatctaactcacctcaaattattacttttaatgcctgttcagttatcactcctctcataccaaatgacaaaaccaaagtctttgtagtaaaagtaaaaaaatctaaagcaaaccacagcaattaaaacaagatatcaagatgtaaatgactagctaaaatacattaaatattctgtccgcactctaaataaaagcaattgttatgcttgtgcacacagtaggctagaagtccaagttatcccctttccactcagatagtcctctaat

SEQ ID NO: 773227 - DNA, 584 bp, Homo sapiens
gagcccttttagtcacagctagagttggagcagctgggatgcaggaagccatgtcctaaggctgcacagggcagtggggcccaaggcctggcccataaaaccattcttccctcctaggcctctgggcctgtgatgagagtggctgctgtgaaggtctctgaaatgcctttgaggtctcccctctgttttggctattaaaatttggcttctttttacttatgcaaatttcttcagcctgcttgaattcttcttcagaaaataagtttttcttttctaccacatgacagggygcaaattttccaaacatttatactctgcttccctttgaaatataagttccagtttcaggtcatttttttgcttagaaatttcttctgtcagatactctaaatcatcactctcaaagttcaaagttccacagatccctggaacaggggcacaatgcagccagtctctttgctaaagcataacaaaagtgacgtttgctccagttcccaataagttcctcatctccctctgatacctctttagcttggacttcattgtctatatcactatcagcatttttgtcacaacaatttaac

SEQ ID NO: 773228 - DNA, 627 bp, Homo sapiens
taatataacctacttcatagtaatatcatggggattaaatgaattaatatatgtaaagtgtttagaacagcaacagcattgatacatgataagtgctattttattctctgttattcttatatttagtattatttttattactactatatagcaagttaagtcttatttcccttttatacaacttacattgattaagattggacaagtttctaagggatcctaactttgaacacaaagaagttcaggcttacagggtccctgaatcaaacatttatttcccttttgacttggttcattaagagtccaagcatgtaggcctttagggttcacagaagaagattcatttattgactcaagcttgtgcctgagaaagggcgacaggggttagytgtggagcctggtttttgccaatctgttgtttttgtaagtgctgctttgtacttctgcccagaggtgctggtgatgagtgtgttgctataaaactagacataaaacatgtgaaatggagcctaaatcataaagacaaaaattgtaacagcaggttagattttatggcttgaatttgtcttaaattggcatatatagcattgctgctgggatccccttgaatggcatatgcaaatcaaa

SEQ ID NO: 773229 - DNA, 565 bp, Homo sapiens
tccatggcatccaaatcatccatgcagaattttgtccaacataacctcagatgacaggaaataatttcaaatgttgagttttctcatcaaaggttttttagaactatattctagggaatttttagtattaacaatcaatcttgtgtaatatttggaatatgtctccaagttacaaaggttatagttaattcacaaatggccaatactattggctctattcttttcatggtgtcmcagatcacaagcagtcttcagggtggcaattttcaaaattccatagttactccacttcagcctaagaaacttcaatattatgtttataaacttgttctggtcatcaattgttatttaacaactcaaaaactaaatgagatttttttaaagaaaacacccattttattacgctcacagcttctgtgagaatcaggaattaagacagcacatatcagggatggcttttctctgtgttatgatgcttggggcctcagatgaaaagactcatacagttgggggtgactcaaatggatgtggaaggaaccccagagtctgggttgaaaaggtttga

SEQ ID NO: 773230 - DNA, 578 bp, Homo sapiens; identical to SEQ ID NO: 750629

SEQ ID NO: 773231 - DNA, 591 bp, Homo sapiens
taatacatgtgaaatccttgaatcctgactacacaaatactatgtgttcaataaattgaataaaatattacatgctcaattctatagctcaataaacattaggtattgttctagttatgtactgctttgtaacaaggcactctgaaatcctgtgacttagaacaggagcaaccattttattctctctcatgctttttgtgggtcaggagtttgggaagggcttgactggatgattctggtttgaggagctgtagctggaacaatgaggggctggagtagctgggagctgactggacatttctcttcatgatgtttctgggcttttcatttgttctcatgtgtgggctgttttggacttcttcacagcattgctgctttggggccaatatcttgcatatgtagaggctcagggttcaaatcgtsattgtccagccgccaggcagaacctagcctcagaagtcgtgcagcatctcttccactgtaccctatttcttggaccagccacaaaagtccagccagtttcaagaagagggaatgtagatctcatgttttaatggatggagttgcatcataaggggattatgtgaggta

SEQ ID NO: 773232 - DNA, 621 bp, Homo sapiens
atttcacttttgcaaaggtggaaggctctctcttaaggccttcagttgccatgtaagaagcctgattgcaaattgccttgaggctgccactttctgaggaagccctgctgctcctgtgccctgctgcttcaatttcagccactatctgacctcaacttcaagggaagccctaagccaaagtctttgagctgaggcctttctgagtgcctggccctaagacattatgagagacaaccaaatgatcattgtttttgtaaaccactaaatctgggggtgatttactacaaaacaatagataacttgagcaaatttattcctaaattttaaccttttctattgctattgtgataatttttaaaaaattgtctctgtaatcattktcaacttttgtgactttgtctcatgcaacttgcacatttgtatatcatatagtgtaatgctacctctaaactgattttcatttgccaaatttaagttttcatctctcagctaatgaacacacaacttaggctattttaaatgctaacctgcctccttaacagctggtagttgaattttgccgtctggatatttttgggtctatgtttgtggaaatacttgactacatgttgcattttttct

SEQ ID NO: 773233 - DNA, 639 bp, Homo sapiens
tcttttttggctccatatgaattttaaaatactttcttcaaattccatgaagaatgtcaatagtagtttcatgggaatagcattgaatctataaattactttgggcagtgtgaccattttcacaacattgattcttcctattcatgatcatggagtgcttctccatttgcttgtgtcctctctgactttcttgagcagtggtttgtagttctccttgaagaggtctttcacttcccttgttagctgtattcttaggtattttattctcttygtagcaattgtgaatgggagttccttaatgatttggctctctgcttgtctgttcttggtgtataggaatgctagtgatttttgcacattgattttgtatcctgagactttgctgaagttgcttatcagcttaagaagcttttgggctaaggtgatgggattttctagatataggatcatgtcatctgcaagcaaagataacttgacttcctctctttctatttgaatacgtttcatttctttctcttgcctgatttcctgggccaaacttccaatacaatgttgaatagaagtgatgagagagggcatccttgtcttgtggcagttttcaaggggaatgcgtccagcttttacccattcagtatgata

SEQ ID NO: 773234 - DNA, 661 bp, Homo sapiens
atgactttaaatatgtctaggatccttatgagaagaattataagtaaaagtgacaggaattatgagacaaaataatgcataaattaaaatcacagtcagctattgaaatatatttaattttcaagatttctgattctgttcattatctttttatattttttctattttaagcattttaaagatgctttggccagtatcaaattgatactcctaagggtgtatcaatttgacttgactaaaagtcccagaaatattaaagatgacaagatagaaaaatatgcctcaaagaatgtagaaattacataaagaactaaattgtctaattttatgtttaacagtttcccaaatgtgacaacaactctattgtcccaaatgtgacatttatggaaataaagtgtacaactgaaaaacaatttccaaaactattgatgacaaaaagcaaatttggatcaaccacactagaagatwgattgatttactatttaattctctctataaacaatgacattgccaaattattgacatgtgagaaggcaatccaaagaagcagccaaaaatgtactgagaggagctaatccaggaaactctatttattagatgatgctgaaggccagtgtcataactccacatcccagcactagctgcatctccagcccctcag

SEQ ID NO: 773235 - DNA, 544 bp, Homo sapiens; identical to SEQ ID NO: 738294

SEQ ID NO: 773236 - DNA, 588 bp, Homo sapiens
tattttatttgtttatatttttgttatcatttactttctttttttctgatgttccaagagtctttaaaaagttatttcttttctgtttagagaactttcttagccattctgctattataaattttctgctgacaaattatcttaatttttttgcatctgaaaatgtcttgatttcctttcattcctaaataatattttcactggctaatagattaccacttgacaattttttttttgtaaagcacatggaaaaatgttatgtcactttcttctggccttaatgatttctgatgagaaatccactgttatttgattttttttcttatgtaggtatcgttttactggttcttcatcactttcaatttttatttcttttsagaactttgactataatgtgtcttggtatgaatttctttgtttttttttttctctttgagattcatccagcctttggatctgcagatttatggaaatttcttggccaaatttggggagtttgagttattccattaagaacattttcagctcctcagttttcctcctttaattctggcatttcaatgaccccaatgttatgtcttttgttat

SEQ ID NO: 773237 - DNA, 574 bp, Homo sapiens
aatatttgtgcataaagcagcccactccaagttctttaatcacatttcttgagaaagagtggcaaaatggaaagccacgtgtcaggctacttccattagtgtgttctaaatcagtataaagaggaataagcagatacgaagaaaaagaacactgaaraagactgcagatcagaaacagcttctggctgtttgaattcagcaaattgggacatcttctccatgtgactaggacagagtattggaaaataattttatcctaaagtaatctgatatttaggattgttgaaaaatatcttagtttacaattcttctttgattcctaaaagagagaatggctcacccagaccccattttttcttacttcatacctagactttggcacttttttagtattgtggatagtgaatggaaacatgtcgtaaagttctagaagatggaattcatacttttccgtaagtttttttttttaaagaccaacaatcttatcttcttccaagacgatcccaaaaagatttaaaaggaaatttaatcatattacaaggtatctcctaatagaaaatgaaatttggaaaca

SEQ ID NO: 773238 - DNA, 530 bp, Homo sapiens
gcacgtgcccagatgtcacatttcttaacttattttctatttcttgaggataatttagtcacttttttctctacagtaagcagagaaggtagagctggaaaatggggtcttcatcagagtttaactagactatgaatagaattctgtaaggcacggaccaatgagctgtcttttaggtcagtccagaaggactcagattcacaccaaacttaagtggctggtgaatgaggctcasattgtcctcccagtttcccactgccatccccaatcctgctccaagagcgccctctgctggaatggagcaggagccaacatcctcagccatcttggaagtggggccaactggaactctgaaaggatgaaaagtacctctgtttaaatacaagctccaaataagacagatcaagtctacaatgtcttcttgacttttatttctcattccttctatttccatttctttgacaacttttcttaagaggatcacgatgtggtgaaaaaatagaatttaaagaggggaaatgtaatccagt

SEQ ID NO: 773239 - DNA, 604 bp, Homo sapiens
cattgactttctttacagaattagaaaaaaaaaaactactttaaatttcatatggaattaaaaaagaccctgtagccaagacaatcctaagcaaaaagaacaaagctggagggatcaggctatctgacttcaaactatactacaaggctacaataaccaaaacagcatggtactggtaccaaaacagatatatagaacaacgaaacagaacagagccctcagaaataacaccacacatctayaagcatttgatctttgacaaacctgacaaaaacaagcaatggggaaaggattccctgtttaataaatggtgatgggaaaactggctagccgtatgcagaaaactgaaactggaccccttctttacaccttatacaaaaatcaactcaagatggattaaagatttaaacataagacctaagaccataaaaaccctagaagaaaacctaggcaatacccttcaggacacaggcatgtgcaaagacttcatgacttcatcaccaaaagcaattgcagcaaaagccaaaattgtcaaatgggatctaattaaagagcttccgcacagcaaaagaaactatcatcagagtgaacaggcaacctacag

SEQ ID NO: 773240 - DNA, 621 bp, Homo sapiens
ttagatatgatgtttcacatgtctttgtttcctagtgcctagcacaacactggcagagcaggtgaaaaagaaagaaaaaaagagaagaaaaaacggaggaccacaggtttagacttagggaaatgtccaaagttataaggtagagaaggaaaaagctacgaagtttttagagaaggccaggatgcaggtataggagaaccagagtaacgttaaatttcaagaggtactagaggtaaaattgtcaaaaatatgcaatgctgcagagcggtacaagacaatgggactgaagaaaaggtcacgtagtgaataactatgctgtttttgcaatctgctggtaatttctcagaggaaattatcaggggtttgaattattgagagaaatgtttttctctgaaggcaatctgaaggatctatgaagttgagcaatggygtaattaaactgcaatgtctagtttgcctaaatagcctacgttgaaaaaaccttcagggcttccggtttccatgctcagagcagggactggttgtatcggctaagctttcaccggggaaaacccagagcaatgaaggtgacgcacatttcatatgccaaggaaaataggattcaaaaccaaggtataggct

SEQ ID NO: 773241 - DNA, 655 bp, Homo sapiens
ttccagtatgatcctggacccagcccttgcataataaccaaaatgctgataaatgtgtttttcaaacaaaggagcagctttctctcgaataattctacctatttctcctggcagagaaaatatttgcagccagcataaaaaagtaaatamataaaaaataaagtaaatggatgaaaggaaacttgttcttattcagaagcttgtaagattatccatcttcagaagagaaaactcttaatattgcaatcagcagccctgtctaaaacagagctttctgaaacatgggactctcaatgagttcagtcaaaaatcaatacaggttgagtatttcttatctgaaatgcttgggaccagaagtatctcagattttgaaatatcttggggttttgaaatgtttcatataggcaataagatatcatgggggataggacctaagtctaaacacaaaattcagttatgttttatatacaacttatacacatagcctgaaggtaatttatgtgtgtgtgtgtgtgtgtgtgtgtgtgtgtatgtgtatgtatatttagtgttgtacattaaacaaagttttgactgctttttgactgagccccatcacatgagttcaggtgtggaatttctcacttgtggcattatgtcagctctcaaaaagttt

SEQ ID NO: 773242 - DNA, 596 bp, Homo sapiens
tttccctattttatgtatatagaattataaagtttttaaaaatgtaatcatcattatttatagtttaataatcagtttcatcttgcagtgtatcattttcctcgtcattaaatattttacgtatcatttttaatggttgcaccgtatttcattgcctgtttctacctacatgtcatgtcaaaataaggtacctatatttttgataaatatgaggttagaatatgagatgcaaagatcctagtctaccttcaacaagacagttaaaatgctctattgctgcaatttgtagcacgcctgaaggaaatatagtcccagagarcaaagtaaggttaaataatgcagttcctgcctgggccttggttctcaataccagtgcagaattctagtgagccatgttagaacaagaaaggactcctagcctgggcaacatagggagaccccatctctacaaaaataaaaaaattagcccagcatggtggcgcatgcctgtggttccagctgcctgggaggctgaggtgggaggattgcttggaaccagggggtcaaggatgcagtgagctatgatcctgccactgcattccagcctggatcacaga

SEQ ID NO: 773243 - DNA, 628 bp, Homo sapiens
gaagcctcttcctttcaacaaactgctctgctcttatttatttagatttgaagaaagggtgttcccatttttaaataaaagtttgaaaactacaaactcttatgtaaaaaagaaaagctaagcataggctgggcatagtggctcacaccagaactttgagaggccaaggcaggagtatggtttgaggccatacttgggcaacacagaaagactccatctctaaataaaaagttttttaaattagctgggcatactggcacacacctgtagtcctagatacttgagaggctgcggcaggaggatggcttgagggtcaggagctatgatcatgccattgcactccagcctgggcaacagagcaagactgtctcaaatgtctctaatttaccaaaaaaaaaaaaaaaaaaaagaccaagcagagagctgtctagctgacctggragtggaatctcagagttctagaataaactctctgaagacaatcctgatcatgacaaggcacgcacctgtaaaccaccattttaactgtcctcatttcacagaggagaaaccaaaaccagaggttaagaggtctgccctaatcatgaggcaggctgacaggatggggctgggactacaccttggggta

SEQ ID NO: 773244 - DNA, 629 bp, Homo sapiens
tccacaagttgtggggacactataatgctgcatcatctcattttagtagctggagtaattatttatgttaaataaccacaaagcgattattgccaacataatgattaaggtttatggtgcaatgtagaaggccaaacttgttatataaatggtaaacctcaataattcagtttttaaataacactttgagatttaatcaacacagagtaattgcattaaatctgaattaagttcacatcggagacatgataatatcaagcaaagcatctcattcttttttctaatatataaaacagatctcgtgatctcacgaatcaatgcagttcagttcaagttcactgcaaaagcagttttctactaaaggccatggattgtatarccccatcaatcttgacatatggagcttaccagtaaggcagagatatgtcttgggacattactcaaagcatgagttttctctatacattttattcaaatacattaaaattgtttttagcactatcaggtgttatttttctaatctaggccaatgcagctcaaattttagcacaaaaaattactgatcacataaaagaaatatactgtttccccaggaatttggatatacagctcaccaaaactttacctgt

SEQ ID NO: 773245 - DNA, 629 bp, Homo sapiens
tccacaagttgtggggacactataatgctgcatcatctcattttagtagctggagtaattatttatgttaaataaccacaaagcgattattgccaacataatgattaaggtttatggtgcaatgtagaaggccaaacttgttatataaatggtaaacctcaataattcagtttttaaataacactttgagatttaatcaacacagagtaattgcattaaatctgaattaagttcacatcggagacatgataatatcaagcaaagcatctcattcttttttctaatatataaaacagatctcgtgatctcacgaatcaatgcagttcagttcaagttcactgcaaaagcagttttctactaaaggccatggattgtatagccccatcaatcttgacatatggagcttacyagtaaggcagagatatgtcttgggacattactcaaagcatgagttttctctatacattttattcaaatacattaaaattgtttttagcactatcaggtgttatttttctaatctaggccaatgcagctcaaattttagcacaaaaaattactgatcacataaaagaaatatactgtttccccaggaatttggatatacagctcaccaaaactttacctgt

SEQ ID NO: 773246 - DNA, 578 bp, Homo sapiens
aaatttaaaattttcaggaaattttaaaagccattattaaaaatcaaaatacatagacatacaattagacaaattatgctaaaagcgaaagaataaatggtcaaaactcattatcttttatttttctatatttactactgtctgtgatctggaggttatttaaacccattatattttatgttgcaaataccatataatgatgtgccgctgtgcatcttttcacaacttcatcttcactgatttcacattcaatgatttcatgataatacatggaaagtagccatggtgggaatattcataccacagaaatcagcaaatayaagcatacttctttttactgtactccacaaagattgcattttttacaaattgaaggtttgtggcaatcctgagtcaagcaagtctatcagcgccatttctccaacaacatgcgctcacttcatgtctctatgtcacatttgggtaattctcacaatattttaaactttttcattattgtcatatgtgttatggtgatctgtgatcagtgacagcgatctttgatgtgactgttgtaattgtttttgggtgccactacc

SEQ ID NO: 773247 - DNA, 563 bp, Homo sapiens
acatattctataggtaggagctatgttttattatcagttgcaatcccacaagcatcagcataccttatccatagtaggctttccacaattatatgacaggcacaatgggacaattttatttcttgatctagtaaactttatgctctcctacacagtctttgaatttcttatagagattgtcacaatgccaagcatataatagacaacccatttggtagacttagtgaattattatatcagtgtattccaagaagataatagtgttttttttttaatgrtaatacagcactattatttccttttgtcatgtagtcaacaaaatcagccattttttttcaaagaaaatatattaaatcaagtttttccccattctataagttaaatctaaaaacttaatgcaagattttacattaatccatacttaatcacgtcatactaatttgaacccatttgccaggctgtcaaaaattttttgaatcctctatgatggtttttgcctcctactttatcatctgtaaatgtcatctgtcctttttctgtacactggcctaaaatgttaatca

SEQ ID NO: 773248 - DNA, 582 bp, Homo sapiens
gtctcttctaccgattcacttgcctctatgctgccaccaggttttctgtaacattgactgtggggtaaggcctaagcccctgaacatggccttcaaggctattcaccatatggctacaaggagccctttctgcctgagcttcttccatgccctgctaaacttcttaacttttagccttgttgaacccctcgccagtccctgaacaggtcacatacttccagacctcagggcctttgcccactcaccatatccctcatgccttctctctcctcacctggtgaactcctatccaacctttgaggccaggcatgcatgcccagtgaaacctccctggcccttttagttcctaccatctcccctacttcctgagttcctttccttcttgatrttcttcttttgtgtgtacccctgttttagctcattgtaatgttgtgattttttgtatttgttagtgtctgccgaattcctcaagggaagctcctgagtctctcccagggttgtacattcttttcctagcacagagcctggcagatgctaataaatgttgtatgaatctgtaaatgaatgattgaatatggaaat

SEQ ID NO: 773249 - DNA, 587 bp, Homo sapiens
caaaaattggtgaaatatagttcccattcttatctttgataagacttaagtttcataaaactatgaaactatttttgtgtccccatctcagacacatactaggaactcaattaatagaatatatgccagattccctgcagtattcctgcaatcggccacctgttcacttcacttccttctaagtcatccattgggtggctctgcatggatacaattatcccatctctggatttttcatcttcctgcattacgtctcaatcagggtttggggaaagactggatctgcttcagtatgcaccccaaaacrtaatatctatgtgttcttgtatgcaaagtccatcacaagaacacctataatcattcattcgttcaacaaaaattgtgaccattggcacctagaacacccattgcccccaggggacatttggctatgtctggagacatttttgattgtcacaactgggagcggggatgctactggcatctagtgagtacaggtcaggaatgctgctaaacatcctacactgtgttctaggtgccaaaaaacactaatgaacaagagaaatcaaagctcttattgagtttca

SEQ ID NO: 773250 - DNA, 517 bp, Homo sapiens
atcaataattatgatggtgattaacacacagaattttaaaagaaaagattccagagggtttcagggacagccatatcctgacctgaccttgtgggtgtcaattctaaaggaataagatgtaactcctttagccagaatgcaaggaaatttagtatttggaagagacaagatcatytggacacatttcctgatgaatgcctggtaattggtgtatttctgataaaactcagggtactcgctgcttagttgttaaaataaaagatgaaaggtaaaaagcaaaaggatcagccaagggcaattaatgcctaactggccctgaagaaaagttcactggcccagtagtagcaatccttccaaaatgagataagcacatttcctaccaagaaaatatcataaaacctgaactgtccaaaactcaacatccccttctctctcaaggcattttcatggcaaccttaatttttataaaataataataattggccaaattcattttataaaacataaactccctaaa

SEQ ID NO: 773251 - DNA, 634 bp, Homo sapiens
gctcttgctacatcagggtccccatttgggatctagagattgcttggtttcatctccccttccacctattctctgtcttgctcagtctcagttctctttcttctgggtggaatgggttgtaagcccctttgcaactcaggcctttgtaactgttgaataggcaaatgaaggaggaaggctccgaggatggaagccagctgtgcacttcgctgatgatctgggatgcacagaggtgggatggggcgggtgagcaatggaaggctgctaatgagcgtttcccagtgttgcctccgagggyggctgcagcctctgcgctgctgtttggggttgttggagccatcacagcacagccaggatttgcccttaggcttggtgacaggttggatcaccttcactcagaaggcctggccactctttgccatgtctgatctgtggtgtggatgacggcagctgacatggactcctcgccacctggaaatgcataaagtgcagcttagccccaggccaaggggagacgttctgtgcagcccccagagcctttgtttctcatgatttccttcaaccctgcccccaactccaacccagtgtcacagggatcttagtcccacctccccagggtctgggccagatcccc

SEQ ID NO: 773252 - DNA, 625 bp, Homo sapiens
tgggagggaggaaggagggaagaagacaggaaggaaggaagggagaggattgacttggtctatctagtccactttggctgagagatttgcctcagagatggaactgatttgcccaagattttacagtaaattaggagcagaactgggatggrgactcagttcccttggctccgagtctattgctcctccttgtgctccatgggccgtgtctccctaaggccccagccattccctccccacctgggcaattgaagaatgtgctgctgcccaggaatacgcactgtgctgtgttcagggctagactcacctgggctgagttccctgtgacacgtgatccaaagaaaggcccacgtgatggttctgaaggtttccctgggacaggttaacatttagagaaaaatatcatcatatttcttttctacaacacatatccaattctaacaaacctctttcaaagcactctgacatccttgctctcttataaacctgatgacaacccagggaagtggagagggaatcagtggttttatgtcaagcaaactgagcaacagaaaagctgagctgcttactttaacgaggacccaatgagctgtcgagcatgaaaacccagggttcttgacttcca

SEQ ID NO: 773253 - DNA, 617 bp, Homo sapiens
tttttagaactgtattaaaagacaaataaataattgtataataataaacagatcaatacaggaagaggctataacaattttaaatatatatttactcaacactgaaatacccagatgtataaagcaaatattattagatataaagtgagaggtagacttcagtacagtaataagtggagatttcaacacctcgctctcagcattggacagattatctagacagagatcaacaaagaaactttcaatttgtactgcagattagaycaaataaacctaacaggaatttacaaacataatatgtgatagccgtagaatacatgttcatctcatcagcacataaaacattctccaggatacccatatgttagagaacaaaataaatttctactagttttttttttctttttaatgaattcgtagcaaatgacaatggaataaaactagagattggtaacaagagaaactctggaaatgtacaagtacatgaaaataaaaaaatgctactgaattatcattgagttaataaactaagaatgaaatttaagaaaattttaagacaaatggaaatgaaaacacatctaaccaaaacccatgcaatatagcaaaagcagtgctaa

SEQ ID NO: 773254 - DNA, 626 bp, Homo sapiens
ctctgttttcttcttttgccccactctagtcggtacaggaggttcgtatttctttttcttgtccttatcatccttcttgacctctcaggaccatgaccaccactctgactttgacccatcttgccttggcaccagacatttttaaaggaaataattaaaatagaacagtcgatgataatcactaaaagcatactgatagatacccttaaagctatatacacctgtatgatacatacacatacatttctgcatttcatttataatatcttcatttggcatttaaaaaatttcaaaaatgtattttgcatctcaaaaagtattgtataaaaatattatattcactcctttggggtatttagactgttttatcttttaataatcataagtaaggcagaaatcaccatcactattacctgaataatcttctcaaaataatatttaattacattttcttcatcacagttacaatagcttttttaaactgytaaatatctaatccttatggaatatattttcttctgtaatatgagaccctaacatcactcatttacaaatgatgaagtgaaactatataaagactgttgaatagttcacatttttgtgctaattttgaattgttccctcac

SEQ ID NO: 773255 - DNA, 621 bp, Homo sapiens
taaacataggagatatttatcagatatactgatagagactggcacattaggttcagactacacagtatggcaattaaggttgaaaataaggaatggggtaatttgtggtaggaaaacaaaatagtctacatgcgtatatggcataatgagaaaaatagaaaacaaataaagacaatacatgatctttagtactttgagtgatccatacagtaaaatgggaaagttgtattagaatgggtgaatgaatctcggtgatttcctttaggaaccctttcaggacttgactttcgcctttcctgctgcaatagctgctattctctaggtcaaggaaccaatatgatggattttgaaaacttttaagcatgcttttctgaatataattttggggaatgaattgaatgtattgataggttcaatagattcattgtgaaaaagacctagcctaccaytggacttactacctgatcgttaggggtccataccataatggggggtgaaagatgaaaattcaggtcccagatttcagcacaaactccatccttctatcaaataaccctcaatagatgtcatttcgctaatgtttggccaacaaagtaaatggacttgtgtctctttagggaa

SEQ ID NO: 773256 - DNA, 591 bp, Homo sapiens
tttcaaaaaaaaaagaattagaagaaaacacaaaagaaatcacccatagattaccttgaggcaatttataccagtcattcctcaagattcacaggggattggttccaagacaccgcctacctacatcacaaaattagaaaatgttcaggtcccatagttggcctaaggagggccaactgtacatggcaatcttcttttttcctgactctttttttgtgaatttatgtacttactaaatttaatttttaaccctcaaattaatatttgcagcacagtcatccaagggcatgtgcagactggtgagaaatatgagttacctgacttgtacatcaccagctgagatctaacaagacracactttgcttcttgtttcagctatctatcatactataaataggtgtcctgttttgcaatatatttaatgtcaatatttttgcacttttatggcttttattagtgatttagacgtttataacagacccccaagcacagtgatgaagtgttgtctaatgttcctaaacacaagaaggctatgtacgttttgttatacatgattcctgttgtccatgaattcaatggtaatgaatcaac

SEQ ID NO: 773257 - DNA, 635 bp, Homo sapiens
gaggttaaatgattattctgaggagacagagcaagaataagcaaaagagtaaggattagaatccagttgttgtgactccacattcattgcaaagtgattcaaaggttccaaatcccttcagggatgactccagaatgagaaaactagtgtgagaacataattctaatctcaccctcctactcccacaagactcagttaaaaactcaagattcaagtggctcctttgtatgatagggaaagacatgttagacctgtagagggttattctttttctttcactcatttattttcattaaaaacatcagcctttattttagtttctgggggtacatatgtgggtttgttgcatagctatattgcatgatactgagatttggggtactaatgatcccatcacccaggtattgagcaaaatatccaacaggctgtttttttcagtcctttctcccatccttctctctagactcaagtagttctcattgyctattgtttctattttcatgatcatgcatacccccacatttagctcacacttctaagccagaacatgcaatatttggttttcttttcctgcattaatttgcttaggataaatagacaggttctcaacaaatatcagggaaaggagatcaaaa

SEQ ID NO: 773258 - DNA, 622 bp, Homo sapiens
gcccaaggccttctgagcccatcccttacaccactgttccctttatgtgagacatggaatcagtggagattattttggagctttaagatttaatgagtgccctgctgggtttaggagttgcatagagactgtatcccccttcttttggccaatttctcccttttggaatgggagtatttacccaatgcctgtacctccactgtgtcttgggaataactaacttgttttttgttttttgttttcttttgtttttttttttatttatgttacaggctcataggtggaagagacctgcattgcctccagtgagactttggattttggacatttgagttaatgctggagtgagttaagattttggggattgttgggaaggcatgactgtattctgcagtttgagaaggacatgagatttggaaagggctggggtggaaggatatggtttgaatctgtgtccccasccaattttttttttttttttttttgagacagagtcttgctctgtcgcccaggctggagtgcagtggtgccatttcacgccattctcctgcctcagcctcccaaatagctgggactacaggtaccccccaccacgcttggctaattttttgtatttttagta

SEQ ID NO: 773259 - DNA, 592 bp, Homo sapiens
catctaatttctttgtcatacacccttaaaatataagtgtttcctgacttatattgaaaatatcttctaaataaattctaagcattaatctataatttttgaaaaaataacgctctttcaagattaaaggtagtacagttatctaatttaggacygaaacatccattttgctttcccattgtaaacgaaatttccttgaagttaaatttgtcagtagcagcaattcttttttaaaaattgtttttgttgctaatttgtatcatacagctaaaagtattcatggatatatagttaaaaaacaagaaaacctcaaaagatctctatttttagaaaattcagtttaaataatgttgggcaaatttggaggatcatatattactgttatgaatgaagcaatatgaaaggtaaaaacaaagttggcaccttgtttctgagtccatttactaggcaaacccttgaaatatgtactgttttgtaaaaaatgtacattttactacatcaactaacacatgtgggctaaagtggaattaacatgccactgatgtacacacaaattcaagccctctgtgtgacataaattcaaataaatacc

SEQ ID NO: 773260 - DNA, 633 bp, Homo sapiens
atagcagattgtagggaaattgtagaaagatgctgggttagagaacatcttttgttctgctttagtaatgattggagacagggagttatggcttggttatgcacatctaagcctgaagtattatctcagcaatagtaagacaatgacattgagagatgccatccggagtgacacagaaaatgggcctgccatgattaacccacatctaggaatatgtattagtaccctaactcctagtttttaattgattccaagacaaaagatataatgtttgtctttattctataatggaaactaaaattatgtctccatttctttctcatgtcctttaaaaaattattgagatataattcacataccacacaaataatctattgaaagcatatgattcaatgattttcatatattcattcagtgtacaactatcactacgytgaattccagaacatctttatcatccctaagaaaccatgtaccattaacagtcacttccattcccaccatccccaacctaatttttgtctctatagatttggttattctggacattttatgtaaatggaatcatgtcatatgtcatcttttgtgattggcttcttccatttagcataatgtttgcagggattattcata

SEQ ID NO: 773261 - DNA, 604 bp, Homo sapiens
cccatatgctacagggatatagtaaccgaaacagcatggtactgacttaaaaccagacacatagattaatggaacagaatagagatcccagaaagaaatccatacatctacattaaactcatttttgacaaaggtgtcaagaacatacatttgggatgtatgtatgttttcaataaacagtgctgggaaaactaaatattcatatgcagaagaattaaactagaccccctacctctcacaatatacaaaaatcaaatcaaaatggattaaagacttaaatctaatacctcaaactatgaaactacttaaagaaaacattggggaaactcttcagtacattggtctgggaaaatatttctttaaaaatacctcacaaacacagacaaccaaagcaaaaatggacaaatgggatmacataaagttaaaaagcttccacatggcaaaggatgcaatcaacacagttaggagactacccacagaatgggagaaaacatttgcaaactatccatttgacaacggattaataaccagagtacataaggagctcaaacaactctgtaggaaaaaattctcaaaatctgagtaaaaaatgggcaaaagagct

SEQ ID NO: 773262 - DNA, 569 bp, Homo sapiens
taaatgcctacatttaattcacttatgtgtaactagaagttagaagccagttttaaaaaatatgcaagtttacttataagtaaattatgagattttttcgatgatattacctgtattatttttattatgagtacattaatttaaataacatattacacaggaaaatgcaagtttctccatcatgctgccttacccctcctactcacccaagtgctgctctttagattggcataccttttgttggattgattaatttttgcattgttatacatttttattcacttgatatatattaacctatatcaatttcctcaattgctgcatattattctattggtcagatgtatcgtaacttactaattcatgatttatggccaattagttgctaattttttwaaaataattttacatgggcatcttttaaaaaagttgaagtttagataaaaatggaagtggtgaaagctaaacttgtaattgttactcataggcatgtagatttttaaaagaagttaatcacattctgttagctaatgtagtacaatgacatttaatgagaaatgttttcctaa

SEQ ID NO: 773263 - DNA, 591 bp, Homo sapiens
attttttgtattttcttttagtagagatggggtttcaccgtgttagccatgatggtctcgatctcctgacctcgtgatctgcccgcctgggcctcccaaagtgctgggattacaggcgtgagccaccgcgyccggcccacttcttgtttttattgcaattgcttttggcatcttcatcatgaaatctttgccagttgctatgttcagaatggtatttttaagcttatcttctatggtttttatacttttaggttgcacatttatctaatcggtcgagtggattttagtatttggtgtaaggaaggggtcgagtttcaatcttttgcatatgcctaaccagttactttggcacaatttattgaataggaagtattttcttcattggttgtttttgttgatgctattgaagatcagatggttgaaggtgtgcaccattatttctgggctctgtattctgttccattgttctttgggtctgtttttgtaccagtatcatgtcgttttggatactgtagacttgtagtatagtttggagtcaggtaatatgatgcttctggcttcgttctttttacttaggattgccttggttat

SEQ ID NO: 773264 - DNA, 674 bp, Homo sapiens
gttcacgccattctcctgcctcagcctcacgagtagctgggactacaggcgaccgccaccaggcggggctaattttttgtattttcttttagtagagatggggtttcaccgtgttagccatgatggtctcgatctcctgacctcgtgatctgcccgcctgggcctcccaaagtgctgggattacaggcgtgagccaccgcgtccggcccacttcttgtttttattgcaattgcttttggcatcttcatcatgaaatctttgccagttgctatgttcagaatggtatttttaagcttatcttctatggtttttatacttttaggttgcacatttatctaatcggtcgagtggattttagtatttggtgtaaggaaggggtcgagtttcaatcttttgcatatgcctaaccagttactttggcacaatttattgaataggaagtattttcttcattgsttgtttttgttgatgctattgaagatcagatggttgaaggtgtgcaccattatttctgggctctgtattctgttccattgttctttgggtctgtttttgtaccagtatcatgtcgttttggatactgtagacttgtagtatagtttggagtcaggtaatatgatgcttctggcttcgttctttttacttaggattgccttggttatttgggctctttt

SEQ ID NO: 773265 - DNA, 598 bp, Homo sapiens
attgttttatatccaattgtgtgtttggttttagagtatgtgtcatgtagtgataagaagaatttatattctgtcatttttgggtagagggatctgtagatgtctattaagtccatttggtcaagtgttgaattcaggtcctgaatatatatttgttaattttctgccttgataatctaatactctcagtgggatgttgaagtctcccatttttattgtgtgattatcaaagtctctttgtaggtctctaagaatttgtgttatgaatctgtatgctctagtgttgggtgcatatatattaaggatagttagatcttcttgttgaattaaaccgtttatcattatgtagtgcccttctttgtcttttttgatctttgttgttttaatgtctgcttcttctgaaattaacacagaaactcctgctttttwctgttttcaattttcttggtagaattttctccataattttacttttagcatatttgtgtcattgcatgtaagatgtgtctcttgaagacagcttaccattgctgggtcttgcctctttatccagctgtcactctgtgccttttaattggggcatttagctcatttacat

SEQ ID NO: 773266 - DNA, 481 bp, Homo sapiens
gtatttggtgatcagtgctcagttttctcagttcaatctattcaggcatctagggaccatacatgaaaatttcaaccacttaattaatgtaccaatacactaacagataattaggaaaaggggaggatgtggattgactgggagagagaaattaaccrtgccttccaaaatattttgcagaagaaaactgtgatggtagattggaattttaagattagaaaagtctctaatatcctataacataattagttaggatggataaatcaaaaccaaaaccaaaagcaaaaagaacatgaagaaaaatcaaagcaatctgacaggtttaagcgtctatttacttatctccaccttgaagaataaataccagggttttgtgtctaaagttccacttaaaggaaattatgaaggatggcccttcaggagggtttgggacagataaatctggggggaaaaggtgggtcgaagaactttgaaatcaagg

SEQ ID NO: 773267 - DNA, 670 bp, Homo sapiens
cttttctcttgctgcttttaggatccattctttatctatgatctttgggaatttgattattaaatgccttgaggtagtcttatttgggttaaatctgcttagtgttctataactctcttgtatttcmatattgatatctttctctagatttgggaattttttggttattattcctttgaataaactttctacctctatatttctctgtacctcctctttaaggccaataattcttagatttgctttttgggcattgttttctagatctcataggtgtgctccattcttctttactctttttttcttttgtccctctgaccatgtttattcaaatagcctgtcttcaagctcactaattctttcctttgcctgatcaatcctgccgctaatagactctgatgctttcttcagtataactagtgtattttttaactccagaatttctgcttgattatttttaattatttcaatctctttgttaactttatctaataggattctgaattcctactctgagttatcttgaatttcattgggtttccccaaggcagctagtttgaattctgtatgaaagggtgcgtgtctctttctttccaggatttgtctctggtgccttatttggttcatttggggaggtcactttttcctgaaaggttttggtgcttgtgga

SEQ ID NO: 773268 - DNA, 472 bp, Homo sapiens
tgacaggatatatccagagctgataatcaaattaatcagtctattggcacatatgaaaaaataactgggtgtcaacgtgattagatttaaaggtactgcaaaatgttttctctggccacaaagccctaccgtcatgcccttttaaaaaaaacaaattgctaaggtcttttattgcaacctaaccatttcacattacagtataggaagggtgggccctctgttatgaagtttcatagatgacggatttaatttctgattrtgataggtatttatggatacttatatggaacctagaaaccattttttccagagattaccaaaatagaattggatatgtaaattatatgctgaagtaaatgggaacagatataggttcatgacacacaggaaaacaaagctgcattagtttttaggcttaaaagtgggacacttcttaacttaaaaatggcttggtttaattttttccagtgcg

SEQ ID NO: 773269 - DNA, 539 bp, Homo sapiens
gggcagcaggcaccaagatattgctattcctacagtctcatttgattatctttacaacaaaggcacagaagaaagcatccaaaactaaatgaggaatatttgtttcttcttctattgccttaggtcacccaactgtaaatgcagatagtctcacaaacccatacctaggaggcagactaggcagtttatgaatggaccattattaagcatttcatgagatttayagagaaagaaaccagaagatattttaaaaagaaagaacaagccagagaattaaagagagagcaagaaagagagagatgatgatggtgctcaaaaggaaaaaagtaagcagaacaattcattttggatataacatatcaagtttaattaataccaagacaaagcattaactggtgaattcaggcaagtatgtatttagggaatcagccaagaaaacatggataagccttcatagtgtttatattcatgcaaccacagaagttagatgagccaagaacccagttgaaatttagtcaaatgaagtgaagaatataact

SEQ ID NO: 773270 - DNA, 579 bp, Homo sapiens
tgatcagggtcactactaattgcaaatagctcagtaagatgatcagggtcactactaattgcaaatagaaaaagtaaccaagaggagttgaagaccttatgttgctaaatgaatgtgtaaagctgctgctttaagaatcagccacactctattgatgaacagatgttaggcttcatgtttactgtgctcatttcttcctgcctctaaarcaaaggcaccgcactacactttagcaaatctaaattctgcttgaccctcactaagtcatttcattcctctgctctttcttttccgcatctgtgaaagttaaatgatgggtggatagaaggtgtaagtgtaagggggcattgaccagataatatataagatcctttttaatctaagagctaatgattatataatttgtaaataaatcaaattacacaaaataattctcttttaatttctggagaacagtgttttctgtttgaaccactgaaaaaatgattgctgtaaaaaaagtaactgcctgtttaataatgtcaatttccacctgattcaaatactgctgaacactactaaattatatatactttccag

SEQ ID NO: 773271 - DNA, 579 bp, Homo sapiens
tgatcagggtcactactaattgcaaatagctcagtaagatgatcagggtcactactaattgcaaatagaaaaagtaaccaagaggagttgaagaccttatgttgctaaatgaatgtgtaaagctgctgctttaagaatcagccacactctattgatgaacagatgttaggcttcatgtttactgtgctcatttcttcctgcctctaaaacaaaggcaccgcactacactttagcaaatctarattctgcttgaccctcactaagtcatttcattcctctgctctttcttttccgcatctgtgaaagttaaatgatgggtggatagaaggtgtaagtgtaagggggcattgaccagataatatataagatcctttttaatctaagagctaatgattatataatttgtaaataaatcaaattacacaaaataattctcttttaatttctggagaacagtgttttctgtttgaaccactgaaaaaatgattgctgtaaaaaaagtaactgcctgtttaataatgtcaatttccacctgattcaaatactgctgaacactactaaattatatatactttccag

SEQ ID NO: 773272 - DNA, 579 bp, Homo sapiens
tgatcagggtcactactaattgcaaatagctcagtaagatgatcagggtcactactaattgcaaatagaaaaagtaaccaagaggagttgaagaccttatgttgctaaatgaatgtgtaaagctgctgctttaagaatcagccacactctattgatgaacagatgttaggcttcatgtttactgtgctcatttcttcctgcctctaaaacaaaggcaccgcactacactttagcaaatctaaattctgcttgaccctcactaagtcatttcattcctctgctctttcttttcckcatctgtgaaagttaaatgatgggtggatagaaggtgtaagtgtaagggggcattgaccagataatatataagatcctttttaatctaagagctaatgattatataatttgtaaataaatcaaattacacaaaataattctcttttaatttctggagaacagtgttttctgtttgaaccactgaaaaaatgattgctgtaaaaaaagtaactgcctgtttaataatgtcaatttccacctgattcaaatactgctgaacactactaaattatatatactttccag

SEQ ID NO: 773273 - DNA, 540 bp, Homo sapiens
tccttctgtccctggcttacttcactcagcataatgtcccctagtttcatccatgttgtcacaaataatagaatttccttatcttttaagggtgaatggtattccattgtgtgtgtgtttgtgtgtgtgtgtgtggtgtgtgtcacattttytttatccattcatccttcagtggacacttcatttgattccttatcttgtctactgtgaataatgcttcaataacaaggaagtgcagatatgtctttgacatactggttttacctcccttggacatatgcccagaaatagaattattgggtcatatttaaaaaaacaacaacaacaaaaaaaaaccctacattttaaaacaaagatatatataaggaaaactacaaaactctgatgaaaaaaagcggttctaaaaaattgagaaatattccatgttcacggatagaagactcaatatcatcaagatattagttcttcccaatgtaatatatagattcaatacaaacccaatcaaaatcccaacaagttacttgtggatatgaacaaact

SEQ ID NO: 773274 - DNA, 540 bp, Homo sapiens
tccttctgtccctggcttacttcactcagcataatgtcccctagtttcatccatgttgtcacaaataatagaatttccttatcttttaagggtgaatggtattccattgtgtgtgtgtttgtgtgtgtgtgtgtggtgtgtgtcacattttctttatccattcatccttcagtggacacttcatttgattccttatcttgtctactgtgaataatgcttcaataacaaggaagtgcagatatgtctttgacatactggttttacctcccttggacatatgcccagaaatagaattattgggtcatatttaaaaaaacaacaacaacaaaaaaaamccctacattttaaaacaaagatatatataaggaaaactacaaaactctgatgaaaaaaagcggttctaaaaaattgagaaatattccatgttcacggatagaagactcaatatcatcaagatattagttcttcccaatgtaatatatagattcaatacaaacccaatcaaaatcccaacaagttacttgtggatatgaacaaact

SEQ ID NO: 773275 - DNA, 510 bp, Homo sapiens
aaaacttctctgtggaagacactgttaagagaatgaaaagacaacccaccgtctgggagaaaatacttgcaaaacacgtatctgataaaagactgttatctaaaatataaaaagaactcttaaaattcaacaacaagaaaacaacccaattaaacaagtggccaaaaaaatgtgaagcsatgaaagaagataatacagttgacaatcagcatacgagaagatgctcaacagcatcttaggaaattgtaaattaaaacaatgattagataccactgcccaccttgtagaatggccaaaatttaaaccactgacaacaccaagtgctgccaaagatatggagcaacagaaattcagtgctggtaggaatgcaaaatagaacaactccttggaagacagtttgacagtttcttacaaaactaaacataatcttaactgtaagatccagcaatgacactccttagtactttcccaagtgaaatgaaaacttaagtctacaccaaaaccttcaca

SEQ ID NO: 773276 - DNA, 552 bp, Homo sapiens
gaccttagggcacagattatttgacaagaatatttattgtctacttgaattcagagattttggcactgtgcaaggcacacatggggagtctatagatatgtgaataaatagcatcccaccagacagctaaggacagaatcattgcctggaattctttcctccgggtattgtcaatgcgatgtaagaatataaaacaaataatgagagaattctaaagcgagaggaaatagaaaacgctaacccaaggggtttggccgctttacctcatcctgactctagatggcagcatccgctcacttcccccagctgggagactagctccagaagcagcctgaatccgagcgaaattggaagttttccatgtaggagaatcagccgggcacgggcatctgctcaagccccacktgcagttaggaggattctccccacttgaacgaactcacagaagcagatatctgaccccactttggtccgtttactccatacatacaagccaaggcatttgtttcttttttttttcttttttttttttttttttttgtggtggagggg

SEQ ID NO: 773277 - DNA, 494 bp, Homo sapiens; identical to SEQ ID NO: 771691

SEQ ID NO: 773278 - DNA, 521 bp, Homo sapiens
ttagcccttcctggccagtacttctcagcttcctgttctccatgcatttcttgctcattggctgcagctttcatcagagcctgctcatttcctaccaagtgcccgcttcaggggatttcccagatactttgccgtaactcagtggacttaatgtgttcccaagaacttacattcctaagtccaacctgttccgccatccaccaagccctcggttctgatatcacacttattttttaccagaactaaggcaattttcaattatctggatttgcctatgggtatctaaagtttttatgcagcagcaataagtatttgcaaaggcattaactgaatatgctataatgtacgaggggaggattttcaggctcattgccagtcatctgrtactaaaaactagtttgttaaaattgagatggtgcctactccataccacatgactttacctgctattagcaattgactgtgcttagacaaatgtttttcattttccttaatcattctcacaaaggaaatgataagtg

SEQ ID NO: 773279 - DNA, 499 bp, Homo sapiens
aaaaattagctgggcgtggtggtggatgcctgtagtcccagctacttaggaggcttaggcaggagaatggtgtgaacctgggaggtggagcttgcagtgagccaagatcatgccactgcactccagcctgggtgacacagcgagacttcatttcaaaaaaaaaaaaaaaaaaaaaaaaaaaagtcactgtctagtattccggaggagtcttccatatattatccaagactaccaaggtggtatctctacaattatgcaaaaaccacagtgttacacagtgttatcagcctcggagcccaagtccgtttagttacctgtaaaaccttcccargaaagacaggcagaaagaagcccgggctgtgaagactacaataaatatctaactgcaatacacagacactgagaaacatctacaagcatcaacaacatccaggaacacattactccaacaactgaactaagtaaggcaccaggtgctaatcttggagaaacagagaca

SEQ ID NO: 773280 - DNA, 601 bp, Homo sapiens
tattttaacaatattgattcttccaatccatgcacatataacaagtttccatttcttgtctcctcttcaatctcttccataaatgttcagtagtttttattttaaagatcttttacttatttggttaattcccaggtatttaatttatttggagctattgtaaatgggattatgttcttgatttctttcagaytgtttattgtcagcacataaaaattctatgaatttttgtacgttgattttacattctgcaactttacagaatttatccattatagtactgttttttgatggagtctttagattttttttccaaatataagatcatatcatctacaaatagggataatttgatttttgacttcttcttttccaatttagatgccctttatttcttcattttttttctgattgctctagctaggacttccagtattatgtcgaataacagtggtgaaagtgggcatccttgttgtcttccatatcttagaggaaaagctttcaggttttccccattcagtaggatgctagctgtgggtctgtcatatttggcctttattatgttggggcatgtttcttgtatacccactttttaaggatt

SEQ ID NO: 773281 - DNA, 530 bp, Homo sapiens
ataggaagctccatgaggccaggaaggatgtcgctcttattcttagattcatttgcaatgcccagcacataattggttctagagataaagggagaagagagagactgagagagagagaaagtaaagaatgaataatgtccaactggagactctggcagataatttgagctataaatttggggcctttaacattaaaaaggtatatgaagacatggaagtaaacgaatttgygtattttcagaaaagatgaaaccttggggaacaacgacattctaggtggtcacatgaatgaggaaggataagcaaccctaaatgaggctgcctgagaacaagctgctaaagacacaggcggggaactggccaagaacacagggcaataggaaggagtgcagtgtgggaaggactgacaggaggccacatgagatagaagaacaaggccaatgacaccaaaagaaaatggtcaaacaacttcagagcacgggacactctacaaaacaatcaggatgatctctttatttatgtatttgaga

SEQ ID NO: 773282 - DNA, 630 bp, Homo sapiens
catcagggatttatccatgtatgactggatgtgtctggtaaaggggaggtgaacatccaggagtggatttgcagggaggtatgatggtggaaggtggatgtgggaatggtttggtcagatgctaccagatgggggaatggggagtcagccttgtacagtgctcctcgacctggtctcagagatagtgtctgaggaggggctgaatgaattatttttataaaggactgttataaagagaatggcagggyggaaaaggcatctctccacttctgagtgggctagtgaggttcagtctcaaggaggatgtgggagtgttcagtaccacattgacacatcagtgttttcagcctcagggtggcagaagacagcagcctgggcagagcagcattctcaggctgggagacgccccttctcaatggcttttggatgtcaacctcaaagtttttcttatgctcataagaaatacccacagagatgcacagaaattacagtgggactgtgtggggaggaaagagtcttacttgataaagcaggggtaatatttgggttattactgtgaatgtgctccatgggctggtcctgggcctctccgccccagatccattccttgaattgctcctactgtctatt

SEQ ID NO: 773283 - DNA, 617 bp, Homo sapiens
cactgagtgagacacccacattgccaataagcaagagctaccatcatcaatataaggttcaaatagcaggcaggctgatagaggaaactcaaaactcctagacaagaaaagaagaatagacagaaaaagagggaaagagagaagagtgtaaaggatcaagctttaagtgaacctgaaaattagaagtccaaaacataaaaagaaatctatctccaagggataatagctaacaaatcaatattgatagatttttttgcttcaastgaaactaaaatagtaaaacaatctgaaaaagaatttaaaaatacatgtgttccagatatttaaaacagaaagtgaaggaataagatgaaataaataagaatataaaatgtgaaacaaaaatagacagaaatgaactttcttttctttttcttgagaaggagtctcgctctgtcacccaggctggagtgcagtggcacaatctcggctcactgcaagctctgcctccagggttcacaccattcttctgcctcaacctcccaagtagctgggactacaggtgcccgccaccacgcccagctaatttttttttttttgtatttttagtagagatggggtttcaccatgttagccaa

SEQ ID NO: 773284 - DNA, 691 bp, Homo sapiens
catctttacactgggctcaatactccatggacaatgcaccctcattgccactcccactgtcccctccgccttcctgactgcaccaccaggaccaagaacagctggtggccctttcacagggcttgcctttcccaacagcctggtggtgtggcaaggacttggaaccatccctcttatactgttaaatcccctgttgaggtcagactgtgcctcagtttcctcacttgtaaagtgaagayaacaaagctgtacctttcctagagggctgtagtgagggctagtgcttctgcaattgtgagagggcacaaaacctggcatataggaagaactgttaaatgtcaattttcccttaagttaccagctgaactgggctgcccctacctgagttttaagatcattacaataataataataaccaattgtaatataccacataggattgtctggtttagaaaaacagacaggatactcagtcaaatttgaatttcagataagaaatgagtaatttttagtatgagtatttcccaaacattgcatggaacatagttatactaaaaatttatttatttttaatctgaaattcaagtttaactgagtgtcctatattttatctggcaacactaacatcaaatcttaaggtgtgtggaataaacaaaggcataactctttggaaataaaaatgtcacactga

SEQ ID NO: 773285 - DNA, 691 bp, Homo sapiens
catctttacactgggctcaatactccatggacaatgcaccctcattgccactcccactgtcccctccgccttcctgactgcaccaccaggaccaagaacagctggtggccctttcacagggcttgcctttcccaacagcctggtggtgtggcaaggacttggaaccatccctcttatactgttaaatcccctgttgaggtcagactgtgcctcagtttcctcacttgtaaagtgaagataacaaagctgtacctttcctagagggctgtagtgagggctagtgcttctgcaattgtgagagggcacaraacctggcatataggaagaactgttaaatgtcaattttcccttaagttaccagctgaactgggctgcccctacctgagttttaagatcattacaataataataataaccaattgtaatataccacataggattgtctggtttagaaaaacagacaggatactcagtcaaatttgaatttcagataagaaatgagtaatttttagtatgagtatttcccaaacattgcatggaacatagttatactaaaaatttatttatttttaatctgaaattcaagtttaactgagtgtcctatattttatctggcaacactaacatcaaatcttaaggtgtgtggaataaacaaaggcataactctttggaaataaaaatgtcacactga

SEQ ID NO: 773286 - DNA, 691 bp, Homo sapiens
catctttacactgggctcaatactccatggacaatgcaccctcattgccactcccactgtcccctccgccttcctgactgcaccaccaggaccaagaacagctggtggccctttcacagggcttgcctttcccaacagcctggtggtgtggcaaggacttggaaccatccctcttatactgttaaatcccctgttgaggtcagactgtgcctcagtttcctcacttgtaaagtgaagataacaaagctgtacctttcctagagggctgtagtgagggctagtgcttctgcaattgtgagagggcacaaaacctggcatataggaagaactgttaaatgtcaattttcccttaagttaccagctgaactgggctgcccctacctgagttttaagatcattacaataataataataaccaattgtaatataccacataggattgtctggtttagaaamacagacaggatactcagtcaaatttgaatttcagataagaaatgagtaatttttagtatgagtatttcccaaacattgcatggaacatagttatactaaaaatttatttatttttaatctgaaattcaagtttaactgagtgtcctatattttatctggcaacactaacatcaaatcttaaggtgtgtggaataaacaaaggcataactctttggaaataaaaatgtcacactga

SEQ ID NO: 773287 - DNA, 485 bp, Homo sapiens
acaatgggaagaggatagtctctccattaaattttgctaagagaactggatatctacatgcaaaacaaaaaatctggacccttatcttataccatataaaaaaatcaactcaaaatgaataaaaactctaaatgtaaagcctgacatcaatactctacaatgaaatatatggtgaggccttacacttaatgtttttattcattttgtatatcttatttgaacaaaaagtatatttttcctttggttgtctgacacttgacaatggcattggcaaygattgcttcaatatgacacaaaacaatcagacaatcaaaggaaaaataaaactaaatataatatcaaaccaaaaaacaagtgagaatattaaatccaaaaacttatgcacagcaaaagaaacagcaaaatgaaaaagtcaggatgtgtattggaagaaaatatttgcaaaccatgtatcttgcaaggagttaatatctaaaaatacatta

SEQ ID NO: 773288 - DNA, 623 bp, Homo sapiens
catctagccaaagactaccaggaatacacccatagatgatgaaaattggatttactatttgtttcaatgaagaagaacatgcaccatgaggaactgtgaggctttgtagtcagagggcgttagacaaaacttaaagcatttagacttgtgtaaagtggctttgtggaggaagtagtcttctactctggcttgcaactgtgaaaaagccagggtaaatctgtgaataagcaccttaataaatgtcggctagaaggtgagaggagtgaaccaggctaaagttgcaattactaatgaaaaagcatatacaatacaatacaatacagtaatatttaaaataagatataactataygcaacattgcaaaagcacatagtaatacgcagcaatgattatcagaattttttttccaaaagtaagcaatcttttcaaagttatttgatagcacgccaaaaaacgtggagagttaacagaagaattctatgtcaaaaggaaccgctcctaatctgggaataaaataattttataaattacttaaatttaaaataattttaaaatcaaaatagagaaaaattttaatttcactcctttcctactttatgcatatatcaacataaaattatttg

SEQ ID NO: 773289 - DNA, 645 bp, Homo sapiens
atagaatagaccaggcagaagagactctatgaccttgaagacaagtcttttgaattaagctagtcagaaaaaaataaagagaataagaaaaaagcattctagaaatatgagaatacataaagcaactaaatttataaataattgatatttcttagggagaagaaaaagcaaaaatttaggaaacatatttaaggaaataattgatgagaatttctttaggcaaaagatttatgcatccagatacaagaggcccatactttgcaagatgatcatcactatgacatataattttcagactatctaaagtcaacatgaagaaaaagaatacaaaatcamcaagagaaaagtgctactcaccaataaagaaaaccacgtgagactaacagcacacttctcagcagaaaccttataagccagaatcgactgggatattattttcaggttgcttaaagagaaaaaaaaatcaaccacaaattttatattctgtcataataagcttcataagtaaagaagaaataaagtcttttccacacaagcaaacattgagagggttcttcaccactagatagtttctaccagaaattctcaaaggagatctaaacataaaaatgaaagatcaatagttgtcatcataaaaacatgata

SEQ ID NO: 773290 - DNA, 645 bp, Homo sapiens
atagaatagaccaggcagaagagactctatgaccttgaagacaagtcttttgaattaagctagtcagaaaaaaataaagagaataagaaaaaagcattctagaaatatgagaatacataaagcaactaaatttataaataattgatatttcttagggagaagaaaaagcaaaaatttaggaaacatatttaaggaaataattgatgagaatttctttaggcaaaagatttatgcatccagatacaagaggcccatactttgcaagatgatcatcactatgacatataattttcagactatctaaagtcaacatgaagaaaaagaatacaaaatcaacaagagaaaagtgctactcaccaataaagaaaaccacgtgagactaacagcacacttctcagcagaaaccttataagccagaatcgactgggatattattttcaggttgcttaaagagaaaaaaaaatcaaccmcaaattttatattctgtcataataagcttcataagtaaagaagaaataaagtcttttccacacaagcaaacattgagagggttcttcaccactagatagtttctaccagaaattctcaaaggagatctaaacataaaaatgaaagatcaatagttgtcatcataaaaacatgata

SEQ ID NO: 773291 - DNA, 599 bp, Homo sapiens
tatcaaactcagaataacaggacatagtctgaagtctcctaactttaaagatagcctctttgatccaattcgtcattaataaacagaattcagatatttttagacatatttatttgtccactatgcttatgaaatcatataattttatataacttatttttataatattcataatgtgtttttcatttgttcaaatattctctataaatttgytatttcacaataactctatgaattattaatatagtaacatcttagtggcacaaaacaatgaccattttattttgttcgtgaaatctgtgggtcacttaggaagaaatgaatggctccgggctgaaatcattgatactagaggatccactttaaacacaggtctttcaattatgtgtctgtcatctgggctgagaaggctggaaaattggtttatctgggactcctagactgaaaggaacatgtagccaatccatttaggttggatgtcgcacaacatgcgttctgagttttaaaatggcatagccagcaaaggagcctggagatagtgagaatatcaagacaaccaggtgaaagctacatgccatttgtgagagcctcagaagcca

SEQ ID NO: 773292 - DNA, 559 bp, Homo sapiens
tgaattttctgaggtaaaaacaaattaaaaggtctttaaacatgtgggttttgtgtaataaacaagctgtgctgctgatttgcaatttcccacttactccaagccataagcctagctgccataaacataaatcctagttagcctattttcctttttagaatgaaggyctaacggcaattttcttaaacaatctggcttccttcatacacaaacttttatgccatacaattccattaactaagtattttttttcaagccacttgagtttactttgttgtacacaaacaattgcaatgaatattagctttggacttcagtcttatcagccacaaaatttgtgttaagatgactctgactggctgttcttgcatcaccagacatttttatctttatgtgttattgatattgtcagtgcatagctctctttggagcatctaggacttgtatgtatacaagcacaaaagaaaattgatagcaaaattatttttcttatcgttgctactgttcaacttttatttttacttgataaggagtaaacactcactggactattttttgt

SEQ ID NO: 773293 - DNA, 668 bp, Homo sapiens
tcttttagtttatcatccataggcagcttgtgttagtcagctcaattacaccgggtcacaaggactaaggggtttctgtatcccatgttcttgccttgttgtaccggaagaatcgggtcacacgtgggcttggagaatgagtgcaaagttttattgagtggaagtagctctcagccaactggggagccagaagggagayggtttgccactggagttgggtagctcagaggcctggctctcctccgtctcccctgccaaactccacctcctctcacaggtggatggcctgagggcgtacaggtgcctgtcagtgtgctcttctgctgatgtgcctctctggacatccagcagcttctgtctttgccttgctaggatctcgggtttttataggcccagatggggccctggcaggccaaggtggtcttgaaaaatgcaacagttggctttgaaagcaggagtgcctgtcctcacctaggtccctggggatggaaccctagccaaggaccacacccttctctatccagagcttcccttttctctttcgtgttatttaaagggaccgctcgcttcccttcccagctttcctgcatcagtagtactgggtactctgttaggcattggaatgaaaaagcccctcagatatattttagtgaacactaaattataag

SEQ ID NO: 773294 - DNA, 574 bp, Homo sapiens
cataaataactacattattcatctgctcacttaaaatcaatctgagaaagttgggtcattacatctgctgtttttctttagttatctctgaaaacataattgatataccgtttaatattttggtaataacattgatctaactactaagtaatatttttattacatgtgggctttttgttttattttttcactttcaaatatatgtttgcttttatttatttatttatttattcatttttctcaacttttaggttcaggaggtacatgtacaggtttgttacatgggttaattatgtgttgctgaggtttgctgggcttagtttaaacaattggtacagtttctaaaaytcttcaactgaagtctaaccagtgcatagaatggtgtacaaaggaatgaattacagaatgtgaacagactgatatcatcaccactcagaatttttttttaaaggctgtaacagacaaaacatgaagtagccacctctataagggcacataaagcactggattgtgattgttaatctgtatcatacaaagcagggattctcaactctccgggccaaagagtggtaca

SEQ ID NO: 773295 - DNA, 535 bp, Homo sapiens
gtctgtaccaaaaatacaaaaattagtgggatgtggtggctgcgcgcttatggtcccagccacttggtaggctgagatgagacgattgcttgagctcagggggcagaggttgcagtgagctgagattttaccactgcactcagcctatatgacagagtgagaccctgycccaaagaaagtaataataaaataaataaaaataaaataaaaaatattctcgaaggaatgtgaaccctattgtgaactgcacatgtgaaggatctagattgtgtgctctttaggagaatctaatgtctgatgatctgaggtggaacaattcatccctaaaccaccacctccttgctggcctgtgaaaaaattgtctgccatgaaacggatccctggtgccaaaaaggttaaggactgtgaaattatcctgtctagtcatatgtctcatacaactctctactaccactgcttagcatagtaattggcatttgttattactatatgccaggaataaaaaataaggctgggctttcaaagatgggctaaa

SEQ ID NO: 773296 - DNA, 535 bp, Homo sapiens
gtctgtaccaaaaatacaaaaattagtgggatgtggtggctgcgcgcttatggtcccagccacttggtaggctgagatgagacgattgcttgagctcagggggcagaggttgcagtgagctgagattttaccactgcactcagcctatatgacagagtgagaccctgtcccaaagaaagtaataataaaataaataaaaataaaataaaaaatattctcgaaggaatgtgaaccctattgtgaactgcacatgtgaaggatctagattgtgtgctctttaggagaatctaatgtctgatgatctgaggtggaacaattcatccctaaaccaccacctccttgctggcctgtgaaaaaattgtctgccatgaaacggatccctggtgccaaaaagkttaaggactgtgaaattatcctgtctagtcatatgtctcatacaactctctactaccactgcttagcatagtaattggcatttgttattactatatgccaggaataaaaaataaggctgggctttcaaagatgggctaaa

SEQ ID NO: 773297 - DNA, 536 bp, Homo sapiens
atgaaataactgttgaaatgaaaacacccatctgcctgcccctaaaatgctgctgcgtgtggcctcagtgacaccccccacatgacaaacgagcatgttaggacttctttttttttttttttttttttttgggaaacggagtctcgctctgtcgcccaagctaaagtgcagtggcacaatctcaactcactgcaagctctgcctcccarattcaagtgattctcctgcctcaacctcccgagtagctgggactacaggcgcccaccaccacgcccaactaatttttgtatttttagtaaagacggggtttcaccatgttggccaggctggtctcgatctcttgatctcgtgatgcacccgccttggcctcccaaagtgctgggattacaggcgtgagccacccgtgcgcggccgctcgttaggactttctattctttcatcagcacccgcctcccacctgctattgagcagctcgtgttagttatgaattaactgttttctccattattctcatgcccacctaattcccattttac

SEQ ID NO: 773298 - DNA, 625 bp, Homo sapiens
cacaggcttaggcaaaagtctttctatgtaaatccaaacagtaactgttgaattactcatttaaacttacgtgtttcacagcacaagttgttagtgaaaggtttcaacttcttattttagacattaaacagatacctcaaatgtttgggaattcttcttttacatctcagcaatggaaatatttagcattttttttttttttttttttttttwaactagccaaaagtccctgtacagggagcaatcttttggggtcttatcttctcatcactgaaaaatttctatgtggacactaaagtaatattaaaaccactcactctcacaggtaatttacagaatacagttttaattaacagcattatcgacaacaatagcaatgatgaaacctctgaggggagagagaatgttaattttagcaaagagtgtcttgtcgtgtggacaaggcttaccagttcctagcctctagtttgtatacacttatgcaatcattttgaatatttactccctgtatgctggtagaaaaataagtgtcaggacattacatgtgaaggaataattcaacatttaagtttttaagagtatattcttttcagatcttgttccccaaagttaaacattgtggtag

SEQ ID NO: 773299 - DNA, 567 bp, Homo sapiens
gctatatcaagacccccatacatgctttgaagttcatcctaagtgttatggattatgaaaaatttgctgtaataaatgttcagtggatgaacatctagtaccttttacccaagtgtgattatatttggcctcagaataaataatacagtcttttccaacctctcaacagttgccaaagtgcaggaaaggataagattatggcgtgaaataattcacgtgaagcagttcattaggaaatacatactgagcttcaaaaacactttgtgtrtgcgtgtgtttgtgtgtgaaaaagaaaaataagacaagaataaaattgtgtaaggtgattgaagaaaaagcacactaatgttcctttaggtatcgtgcatatatacacaagatatagagaaaagggagggttagaagcattatggcatttttcaaagaactagatatcagtttctttgaaatttttattacattttactctgctctcttgtctagaatacattcaagtgcacgtgtttgctgctgctagaagtttgcctatgaaattcagatttatggttaccctggaataaattataa

SEQ ID NO: 773300 - DNA, 600 bp, Homo sapiens
gggtcaggtttgttcaccccacttctcagccatatctaaataatcttcaatagtgttttgatttcctttattcacatttaccaactactgaatttaattgaatagataagcaaaaggtacttctgttctcaggccaggaatgtagaaaaattttacagtgacttagaaaaaccactgaacaataagacatgggactyaggtccttattgtggttctgcagctgacacattggggtcttgttttcttacggtttaaatgggaagtcaatcttgaaggtctccaatgatctttattctgcaggggttacatgaatgtggattgattactggagttgatctaagaatgtttacaggtgtgcaatctgtcctgatgagagtggaattagaaaggctaaggccaaatgtgtgtacatgcgtgtaggtttatatttgagaaataggcaaaccagtggcataaactacattacaatcagaaggcattgctgggagatgtaagaatcatttttatcagataaggcagctcaggaaagtgaaaaagaatgtgttttcccctggggaataaggctgagatgattccactagtgggccctgctcttgcctc

SEQ ID NO: 773301 - DNA, 637 bp, Homo sapiens
atgtactctgttcatttcatatactctgagttccaaacagaatgaagctcacagaagtggaaaggagcaaaagagaaaagaattaaccagcatgtgataatatagagattagaaatgtagatttagaaacctaggaatctaaatctgagccacattacctttagaaaagtgaatgctgataggaggagaaacaattatccagtacttagggagtaagaaaatagtgtgamggtattccattacaaaaacatggatttaaaaaaagatacaaattgcaatgccaccccactcctgccccagaggatcccttagctaatacctggatctgttctacgaggaatgcagagagaaaaaaatcagtaaaatatatatgcctggtgttctattttctaaatatgaaaatgaacaaaaagcataaacaagatgcagttactaaaactacatcacaagtagaattaccaaagtaatcagagaacaaattgaagttaccttaatctcaatttagaaattgaagtgaacaactaaggaattatgtaagaaagaaatacataggcactatacatcagcaattacatccagaaaaatagtgaatatctagaagaaaccacacaaaagtaaattatatgaaaagacaaag

SEQ ID NO: 773302 - DNA, 575 bp, Homo sapiens
tttttattttttttccttggggtataatgcacataaaataaaatttgatatcttaattattttacatatatcgtttagtggtgtcggttacatttgcaatgctatgcaaccatcatcattatttgcaaaactttttatcatcccrgggagaaattccaaactcagatagaaactcattaagcaaggtgagtgcccttgttaaaaatcgattttccatagatgtataggtttatttctgaactctcaattttattccattggcctgtatgtttatccatgtgccaggatcatactgatttgattacctggctttgtagcaattgggtagtgtgagttctttcaattttttcttttatttttcaacgtttcccttcatttgccttcaccccagcctatggtagcctctcctctattttatgtccctataatatatattttatataggtggaatcatacaatattaatacttttgtgtctggctcatttcactcagcataatgttttcaaggttaatccaagttttagcatgcatcagaacttcatttctttctattgctgaataatattttattgca

SEQ ID NO: 773303 - DNA, 590 bp, Homo sapiens
gtagtagcatcccgggcaatatattttgctaatgcagcaaaatacaattgttagttgactcactctagctctaagtctatctatctatctatataatatacatggttttttttggtctctttcaattttcttatgctgatcaagacgatcagaagactggttttyagactattggtaactactacaagtttgaaatatttaatttgagttaattcatataccattatgagaaagtttgagagaaacctaatgctcaattaacaaataatttaaatattatttccaatttattacttgattccccaagtctttcagtggctgccttggataataggtatgctttggaatgtacatgtgagctttcaaaagcaaaacaaaatgaattatgacattcttttatgaagtagaatttctgagagtaattcagtgtaagtaaaatcaatataaacatctatattatccctgattgatgggaaaaggataatatactatcaaaactaccttgaaagtaatcgtaaagtggattttccactcaggataccttttcacagttttattccctaggagagaatgttaggtgctattaaacc

SEQ ID NO: 773304 - DNA, 677 bp, Homo sapiens
caggggatccacccacctgggcttcctaaagtgctgggattacaggcgtgagccaccacacccagcctgaattcaaatttgcagggtcacataaagattagaattaaaaaaaattgaatatcataaagttaaagttactctgttcttctgcttgtaattaaagtatgtactctgattgttcttccttaaagccagttccggtagaatataaaaaaagtggttaggtggctgcccatgaagttttcccaggacttctcatatttcaattataatctattcttaataactctagaatactaataaagataaatagagaagaataatagcaggcaaaggtaccatactggatagtttttctcattggmtctagcaacaatgaaacttctaagattttcatttattcagttgagccaaatcaagctgtaagtattcccaaatcgattttgaagaggacactattcttaaatgaagtattatagcatatgagttaatatatctcatgtaattatgtaatacattcagagaaagaataagcatgtaaaatttatcaaattataaattgtatagatacactttatatattaaatatcagaaatttgcatttttgtgctttgatttcacaaacattgatatgtttgatatggcttagaaaactttgtgagtagtattctgctaat

SEQ ID NO: 773305 - DNA, 709 bp, Homo sapiens
gggatccacccacctgggcttcctaaagtgctgggattacaggcgtgagccaccacacccagcctgaattcaaatttgcagggtcacataaagattagaattaaaaaaaattgaatatcataaagttaaagttactctgttcttctgcttgtaattaaagtatgtactctgattgttcttccttaaagccagttccggtagaatataaaaaaagtggttaggtggctgcccatgaagttttcccaggacttctcatatttcaattataatctattcttaataactctagaatactaataaagataaatagagaagaataatagcaggcaaaggtaccatactggatagtttttctcattggctctagcaacaatgaaacttctaagattttcatttattcagttgagccaaatcaagctgtaagtattcccaaatcgattttgaagaggacactattcttaaatgaagtattatagcatatgagttaatayatctcatgtaattatgtaatacattcagagaaagaataagcatgtaaaatttatcaaattataaattgtatagatacactttatatattaaatatcagaaatttgcatttttgtgctttgatttcacaaacattgatatgtttgatatggcttagaaaactttgtgagtagtattctgctaatattgcctggaaaaatataggagataaaaaaagaca

SEQ ID NO: 773306 - DNA, 549 bp, Homo sapiens
gaaaaagaagagggaggggagcttcagggccatagcctttttcgtcacagctggaagaagggcttttcacagctgcgctcatctggaccagaatgggctgaaatgtgagtagctgagaatccccagagaggagagagtaatggtttgtaccagatctgtatgatggayagagtgagctgacggaggatagcaatcatcgggtccacccttctgagatatcccaaccctcaggctactcggctgcagatcacagtgcctatggtgctggccctgtctgcagagcacacagcccctgctggagtcctggagcccctggctctagagagattttcctcctggtttgtttttgcaccctgatggatatgcagactgtcaggcaatgccttggtgactgtgaataaagcctttactggcctgggctctcaacaagcagtcccaggtagctctccctcaacctcaggaagaggagacacacttggcatccatttctgaagagctcttgcggttgaattccttaaacataaaagatggaggtggagagaagcccct

SEQ ID NO: 773307 - DNA, 617 bp, Homo sapiens
tccaattttgaaacctaaatcatctaaggctatggaagtgttactggtggcaaatctgtagcaacctcaattcttaacacctcaaaagaaagaatttttaaccaagggtcataaggcagggtgagaggccaaggcaagtttttgagcaggagtgaaaagtgtattaaaaagctttagagcaggaacaaaaggaagtacacttagaagagggccaagcgggtgacttgagatcagcygggtggtttgacctttgacttggtgtttcatatgttggcatgcttccaggggggttgcatctcttctcccctgattcttcccttggagtgggctgtccgcatccacagtggcattcaggcacttggggggtgagcgtgcgcagtgtgtttactgaagttgtgtacgtgctcacttgagggctttttctccttatcagttgaggattcatataccagttaaactctgccattttgcctcttagtgcgcatgcttgagtccactcacccaactcctgagatcttactaggaagctgatcaccagtttcaggtgttttctatttattgggaaactgcctggccctggcttcaaccaatgattattttagagagacaattaacaa

SEQ ID NO: 773308 - DNA, 617 bp, Homo sapiens
tccaattttgaaacctaaatcatctaaggctatggaagtgttactggtggcaaatctgtagcaacctcaattcttaacacctcaaaagaaagaatttttaaccaagggtcataaggcagggtgagaggccaaggcaagtttttgagcaggagtgaaaagtgtattaaaaagctttagagcaggaacaaaaggaagtacacttagaagagggccaagcgggtgacttgagatcagccgggtggtttgacctttgacttggtgtttcatatgttggcatgcttccaggggggttgcatctcttctcccctgattcttcccttggagtgggctgtccgcatccacagtggcattcaggcacttggggggtgagcgtgcgcagtgtgtttactgaagttgtgtacgtgctcacttgagggctttttctccttatcagytgaggattcatataccagttaaactctgccattttgcctcttagtgcgcatgcttgagtccactcacccaactcctgagatcttactaggaagctgatcaccagtttcaggtgttttctatttattgggaaactgcctggccctggcttcaaccaatgattattttagagagacaattaacaa

SEQ ID NO: 773309 - DNA, 586 bp, Homo sapiens
tagattgtttcaaatttgaactactgtatcaattgggctattagtatccacaatatgcaattttgtgcacttgtttaataactcttagcataaatatttacaagggaaatttctgggtcaaaggtttgggactttttttaggggtggagaggtggttgtttttgttttgagacggcatcccactgtctcgcccaagctggagtgcagtggccyagtctcggctcactgcaacctctgcctctcgggttcaagggattctcatgccccagcctcccgagtaggtgggattacgggtgtgtgccatcacacccagctaatttttgtatttttattagagacagggtttcaccatgttaggtaggctagtctcaaactcctggtgtcatgtgatctgcctgccttggcctcccaaagtgctgggagtacaggtgtgagccactgtacctggtcaaagggttttaagtttacaaattttgacacatcatgcccacttaacctccagaaatgtaccaattcacaattccaccaaaatttatgaaaaggtgctcatttccccaccccattctctttactgaatgtatgcttt

SEQ ID NO: 773310 - DNA, 532 bp, Homo sapiens
ctaaggtacatatgctactcctttcctaagaatgacaactacaaattacttacattggatattcattgttttggtgtgacccaatatgtacacccaatctgtattctttaccggtcaaagccattagcccagtctctcttcacatagccatgtttcaaggccatatcccacacttttagtcatacattcaagcatatagtgataagagggccaaaccatggtggttctgcccatttttcctggcttggctataccaagaaaagttttgtcactcttaattgagtattgtctgagttgtgatttccttcacttactactctaacatatctgtcttcatggatatcaacaaaytttggtccaagaaatctggtaataaattccaagtgttaatggggaatgccttttcaccctgctctcatattcctattactgaagagcaatctggtttcagggtaggagaagataaaaagagcctgaggggaaataaactcaccatgatagaggaaagaaaccagctgtatttcaaggactt

SEQ ID NO: 773311 - DNA, 609 bp, Homo sapiens
ctataaggcacttaaacaaatttacaagaaaaaaccaagccctttaaaaattgggcaaagaacataaacagacacttttcaaagaagacatacatgtggtcaataagcatatgaaaaaaatgcaatatcaccaagcattagagatatgcaaatcaaaaccacaatgacataccatctcacaccagtcagaatggctattggtaaaaagtcaaaaaataacagatgctggtgaggttgcagagaaaatggaatgtttatacactgttagttggagtgtaaattagtttgaccattgtggaaagcagtgtggcaattcctcaaagagctaaaaacagaactaccattcaacccagcaatcccaatgctgagtatatacccaaaggaacgtaaataattctaccatgaagacacgtggacacacatgttcaytacagcactatttgcaatagcaaaaacatggaatcaacctaaatgcccatcagtggtagaatgggtaaagaaaatgtggtacacatatgctatggaatactacacaaccatgaaaaataacaagatcatgttctttgcaggaacgtcgatggaactggaggccatcatccttaacaaact

SEQ ID NO: 773312 - DNA, 609 bp, Homo sapiens
ctataaggcacttaaacaaatttacaagaaaaaaccaagccctttaaaaattgggcaaagaacataaacagacacttttcaaagaagacatacatgtggtcaataagcatatgaaaaaaatgcaatatcaccaagcattagagatatgcaaatcaaaaccacaatgacataccatctcacaccagtcagaatggctattggtaaaaagtcaaaaaataacagatgctggtgaggttgcagagaaaatggaatgtttatacactgttagttggagtgtaaattagtttgaccattgtggaaagcagtgtggcaattcctcaaagagctaaaaacagaactaccattcaacccagcaatcccaatgctgagtatatacccaaaggaacgtaaataattctaccatgaagacacgtggacacacatgttcactacagcactatttrcaatagcaaaaacatggaatcaacctaaatgcccatcagtggtagaatgggtaaagaaaatgtggtacacatatgctatggaatactacacaaccatgaaaaataacaagatcatgttctttgcaggaacgtcgatggaactggaggccatcatccttaacaaact

SEQ ID NO: 773313 - DNA, 591 bp, Homo sapiens
ctattacgtatttattgaactcttcttatatactgtggttcatactagaaattacatataaaacataacatgttttatgttacctatagtatatgtagtaataatatctagtggcttcccttgagaaaaatagtttcctggyatggggagtggacaatatataaatatcagtattcatcaagactggagacaaaattggtttaatgtacttaacaattttatgtacgtatcttcatttccctattagaagacttatggactgatgaaaaatcacctgtcttggttgtcatgttggttttatttattcattaaatatgtattgagcatctactatatgttggtactggggacaggggtgaaaagccctgcctttgtggggctggcattttagtgagggtgagaaggcagacagcagccatgtaaacaaatgactaaggaggaaataaaacctagaatgtgactgagagaaaatgagagactactcagatgtattggctatgaaaaattttcttctgataactattgccaaagaatctcttcagttggagggctgacttcttgcttgccgtagggaagggaacagggatgagt

SEQ ID NO: 773314 - DNA, 591 bp, Homo sapiens
ctattacgtatttattgaactcttcttatatactgtggttcatactagaaattacatataaaacataacatgttttatgttacctatagtatatgtagtaataatatctagtggcttcccttgagaaaaatagtttcctggtatggggagtggacaatatataaatatcagtattcatcaagactggagacaaaattggtttaatgtacttaacaattttatgtacgtatcttcatttccctattagaagacttatggactgatgaaaaatcacctgtcttggttgtcatgttggttttatttattcattaaatatgtattgagcatctactatatgttggtactggggacaggggtgaaaagccctgcctttgtggggctggcattttagtgagggtgagaaggcagacagcagccatgtaaacaaatgactaaggaggaaataaaacctagaakgtgactgagagaaaatgagagactactcagatgtattggctatgaaaaattttcttctgataactattgccaaagaatctcttcagttggagggctgacttcttgcttgccgtagggaagggaacagggatgagt

SEQ ID NO: 773315 - DNA, 564 bp, Homo sapiens
tcactcatttagtaacttgaacaaattagtaaaataaatattttcccttaccttgtatttaatatggatctccctgtcattattgccctatttttcaaagttgtccccaataaaattgaaaccagtgaattcagatttgatgtataaacaattgttttttctttgtctttcctcatccttatccttttgaaggtcatttaaatcagcaaatgttgagcttaccccaaggtttatatattcttgaaataaaccctttctcaatgaactcctttttaaagaactttaataaatttggcccaaaatttcttatctgaaacccttgggggcasatgtgtttcagggttagagattgtttagactttagaaaggtactactttgctgcacatattcagtatattactgaacaccttcagtgagttgtttaataacacacaaaataatgattatataatagtgtatacataatgtacttcattctgaagcatgttagtatttcgactgcaaacttaaatagttgtacaaaatggactaagttatataaattatgtgtaagttctgatcaa

SEQ ID NO: 773316 - DNA, 528 bp, Homo sapiens
taaattaaacattggcaaaaggaaatggaatagtataaacactgatcaatagagtaaaatatctgctgcataaaaaactaagacaaagaccagaggaaatatcttccctttcttatgttggctaaacagtacttaacagttgacttgaaattttgttctctgagccaaagtttaactcattgtatgaattctttttcatggtagttcattcagttatgtgtttatttactacatagttattcagagccyactgtgttccaggaactatgctagaaactgtctctctaggaaagctcttgcacctttatctacaatattacttaaaaagtagaacagtcaatgcatgccaaagaaccataaactagcagaggacattgcattctttagtgaaggacatttatttagagtctgacaacatattcaaaatatttttcagcctctactgatagtggataacaaatatatttgttcacataaccactttgatgtcagtacaacttcagcaattggttttcaaaatagatgaga

SEQ ID NO: 773317 - DNA, 568 bp, Homo sapiens
ccatgtgagtcagattatggatggctgtttaatatcatcggttcaaccaaaagttgtgctcagttaagctgggatgcagcttagggataatccactgctggttcttcctcgtgccagatgtgtggccttctcatggattcgatggaaagtttggtggtcccctaccgtcttagccccagaagcctgtgacaaatttagtgctccccccggggtgttttcatcttatctctttatctttcttgcatcccgtcttttcaatattcagcaaatgatttgaggggaaactggccacatttttgagacatgccccagtattccatcaggactttgtttcataagtcacgagattggttcattttaattctccacttagaaaatctccatctccattgcagctcagaacgaagcaaatwctccatggacacaactctttgtttcgggattctctagtttcaacctatcatttgagaattcacctccactccaccaccaatcttctgctgatttctatttctgtcttagggttttcctgggtcagttctggtacccagtctccatacaaaaatca

SEQ ID NO: 773318 - DNA, 511 bp, Homo sapiens
tgttcatctttttgataatagtcattctaacagatgtgaagtgatatcttactgtgattttaatttgcattttccttatagttagagacattgaggatatttttcatgtatctcttagtcacttgtatatcttattttgagaaatatatattaaggtctttgctaatttttacattggattatttgagtttctgctgttgagttgtttaagttctgyatgtattctggatgttgactatttgtcagaggtaaagtttacaaatgttttctctcattctgtacgttgtctcttcactctcttagtaacttcctttgctgtacaaaagcttttctttttgatgtaatctcatttgcctagttttgcttttgttgcctgtgcttttgaggttttattaaaaaaaaatccttgctcaacccgatgtcatggtgttatccagatgttttcttccagtagttttatagttttatgtcttatgtttgtttttaatctatcttgatctgaattttgttt

SEQ ID NO: 773319 - DNA, 511 bp, Homo sapiens
tgttcatctttttgataatagtcattctaacagatgtgaagtgatatcttactgtgattttaatttgcattttccttatagttagagacattgaggatatttttcatgtatctcttagtcacttgtatatcttattttgagaaatatatattaaggtctttgctaatttttacattggattatttgagtttctgctgttgagttgtttaagttctgtatgtattctggatgttgactatttgtcagaggtaaagtttacaaatgttttctctcattctgtacgttgtctcttcactctcttagtaacttcytttgctgtacaaaagcttttctttttgatgtaatctcatttgcctagttttgcttttgttgcctgtgcttttgaggttttattaaaaaaaaatccttgctcaacccgatgtcatggtgttatccagatgttttcttccagtagttttatagttttatgtcttatgtttgtttttaatctatcttgatctgaattttgttt

SEQ ID NO: 773320 - DNA, 606 bp, Homo sapiens
gctctgtttctctggagaacatggactaaaacagccatttatccatccaacactattttaagtgctattaggtatcctagaagattggtcagggagagacttgagaagcaacatcctgcctatgctttgaatatggcayacactgttgtgattttttaatgaaagaaaaattttggtgctagattcagacacaaagaaagaatctgagaaactattagaaatatatggcaacacagtcagccctgtttttttttttttctttttttgtatctacaaccattgttaacagtgagtagaatattctctcccacactccaccactttgctcctttagatatgattcctgtgagccctccagggcttctgggtcagtagaactctgctaatcaaagagctactgaagcctccagtgtgaagatgagcacaaaattaaagcagaaacccatctctctattactcttgaatgtggcagctccggaatcccagtgcccagggctcatatttggagtacctttggacatattttagttcatcagaagtcttcgtttgtagtgttagtttagatgaattggtaaaattgaaagtgtatgaaatagtaatattttg

SEQ ID NO: 773321 - DNA, 606 bp, Homo sapiens
gctctgtttctctggagaacatggactaaaacagccatttatccatccaacactattttaagtgctattaggtatcctagaagattggtcagggagagacttgagaagcaacatcctgcctatgctttgaatatggcatacactgttgtgattttttaatgaaagaaaaattttggtgctagattcagacacaaagaaagaatctgagaaactattagaaatatatggcaacacartcagccctgtttttttttttttctttttttgtatctacaaccattgttaacagtgagtagaatattctctcccacactccaccactttgctcctttagatatgattcctgtgagccctccagggcttctgggtcagtagaactctgctaatcaaagagctactgaagcctccagtgtgaagatgagcacaaaattaaagcagaaacccatctctctattactcttgaatgtggcagctccggaatcccagtgcccagggctcatatttggagtacctttggacatattttagttcatcagaagtcttcgtttgtagtgttagtttagatgaattggtaaaattgaaagtgtatgaaatagtaatattttg

SEQ ID NO: 773322 - DNA, 576 bp, Homo sapiens
tcctggtttagtcttcggagggtgtatgtgtccaggaatttttccatttcttctagattttctagttgacttgcatacaggtgtttatagtattctctgatggtagtttgtatttttgtgggctcaggggtgatatcccctttaccattttttattgtgtctatttgattcttgtctcttttcttctttattagtctagctagcattctacctattttgctacttttttcaaaaaaccagctcctggattcattgattgtttgaaggatttttagtgtctctttctccttcatttctgctctgattttagttatttcttgtgttctgctagcttttggatttgtttgctcttgcttctctagttcttttaattgtgatgtcagggtgttgatttsagatctttccagctttctgatgtgggcatttagtgctataaatttgcctcttaacactgctttagctgtgtcccagacattctggtacattgtgtctttgttctcattggttccaaagaacttctttatttctgccttaatttcattatttactcatgagtcattcaggagccagttgttc

SEQ ID NO: 773323 - DNA, 632 bp, Homo sapiens
tagagaaaaaagaatgaaaagaaacaaaacctctaagaattatggaactatgtaaaaagactgaacctatgactgattggagtagctgaaagagatgggagaaaggaaccaagttggaaaacacacttcaggatatcatccaggataacttcttcaacttagcaagacaagccaatattcaaattcaagaaatccagagaatcccaataagacacttcataaaaagatctaccccaagacacataaacatcttattctctaaggtcgaaatgagggaaaaaatgttaagggtagcaagagagaaaggccaggtcacctacaaaaggaagtccatcagactaayggcagacatctctgtggaaaccctgcaatctaggagattgggggccaatattcaacattcttaaagaaaaagaaattccaacccagaatttcatatccagccaaactaagcttcataagcaaaggagaaataaaatctttttcagagaagcaaatgctgaggaattttgtgaccaccaggcctgccttgcaagagctcctgaaggaagcactaaacatggataggaaaacctgttaccagccactgcagaaacacaatgaagtacacagaccaatgacactatgaagcg

SEQ ID NO: 773324 - DNA, 630 bp, Homo sapiens
atgtactgccttaatgatcaatggtttctcttttcatgtgcttgttggccatctgtatatcttctttggagaagtgcttattcaattcgattgcccattgggttgtttgtcttttgttgtttaaatgtaagagctctttctatatgctggatactaaacccttaccagatatctgatttacagatattttatccattcctgtatgtttccttttcacaatcttgctaatggcttttattgaccgaaagctttgagatttttaaagtgcaatttatttttatttcctttttggcatgtgyttttggtgttaaagctaagaatcaactgccaaatccaaggttagggaaaacaccttatgttttcttctaacagttttatagttttagcatctatatatgtttttgatcaattttgagattctttttgtatattgtgtgctatggtctgaatatgtatgttgccctaaaattcataggctgaaatccttatcctcagggtgatggtattaggaggtggtggctttgggagattaatagaccatgggggcagagctctcataagtgctattcattctcttattaaaaatgtctgtgagaaacttcttacccctttagttatgtgacattagag

SEQ ID NO: 773325 - DNA, 628 bp, Homo sapiens
tttattctttaaaaaatgttacttgagcattttcatgtacacctcattgtgctttatatcatagacaaatgtactaacatggaggagatataagtaaaataataaagtggccttctttgtaataagccttcagcaatacacaccattctttaaagtatgtgcttatagtcatatttttcctgcctatgtttcttttttttttttttttttttttttttgaaacggagtctcgctctgtcscccaagctggagtgcaatggcgggatctcggctcactgcaagctcctcctcccgggttcacgccattctcctgcctcagcctcccaagtagctgggactacaggcgcccgccactacgcccggctaattttttgtatttttagtagagacggggtttcaccgttttagccgggatggtctcgatctcctgacctcgtgatccgcccgcctcggcctcccaaagtgctgggattacaggcgtgagccaccgcgcccggcctcctgcctatgtttctacttcagatttctccttcatagactctgaggtggaaagaagcaagctacaccaaaatcagctcatttgaattgcaaacatgctaagggagtaaaagtctggtcaaaaaaaatt

SEQ ID NO: 773326 - DNA, 628 bp, Homo sapiens
tttattctttaaaaaatgttacttgagcattttcatgtacacctcattgtgctttatatcatagacaaatgtactaacatggaggagatataagtaaaataataaagtggccttctttgtaataagccttcagcaatacacaccattctttaaagtatgtgcttatagtcatatttttcctgcctatgtttcttttttttttttttttttttttttttgaaacggagtctcgctctgtcccccargctggagtgcaatggcgggatctcggctcactgcaagctcctcctcccgggttcacgccattctcctgcctcagcctcccaagtagctgggactacaggcgcccgccactacgcccggctaattttttgtatttttagtagagacggggtttcaccgttttagccgggatggtctcgatctcctgacctcgtgatccgcccgcctcggcctcccaaagtgctgggattacaggcgtgagccaccgcgcccggcctcctgcctatgtttctacttcagatttctccttcatagactctgaggtggaaagaagcaagctacaccaaaatcagctcatttgaattgcaaacatgctaagggagtaaaagtctggtcaaaaaaaatt

SEQ ID NO: 773327 - DNA, 628 bp, Homo sapiens
tttattctttaaaaaatgttacttgagcattttcatgtacacctcattgtgctttatatcatagacaaatgtactaacatggaggagatataagtaaaataataaagtggccttctttgtaataagccttcagcaatacacaccattctttaaagtatgtgcttatagtcatatttttcctgcctatgtttcttttttttttttttttttttttttttgaaacggagtctcgctctgtcccccaagctggagtgcaatggcgggatctcggctcactgcaagctcckcctcccgggttcacgccattctcctgcctcagcctcccaagtagctgggactacaggcgcccgccactacgcccggctaattttttgtatttttagtagagacggggtttcaccgttttagccgggatggtctcgatctcctgacctcgtgatccgcccgcctcggcctcccaaagtgctgggattacaggcgtgagccaccgcgcccggcctcctgcctatgtttctacttcagatttctccttcatagactctgaggtggaaagaagcaagctacaccaaaatcagctcatttgaattgcaaacatgctaagggagtaaaagtctggtcaaaaaaaatt

SEQ ID NO: 773328 - DNA, 610 bp, Homo sapiens
aaactgataaaacatttctcgatttttgatttaattagatacagaggaataaactttgatgtttaacatttctttggattgtcagccaatttaaccctctactctgagctagatatctgttatactagtggctatatcagctgctcttggcagactctttattccataaagaagaaaattattgcatgatgtgtgggacttctagctttgattgtttactgcaaagtaacttatacggattagaattagaaacatggttctaatctctgaagctggttcttgatgccccagatcagcaaaatatccagtaagttttacattcagacttattttttcagacttaattaatgcccttttccttcttaacattagttttaacaaatagaatatttaagtaagaaactgtgagttccgagtgtttttgaaaatctcaaaattccwctccaaaattcagtgtttttgaaatggttgaaagaattaaccaatattccagattagtctttcaggaatgaagattctgaaaatatggctacttcttttgggattgactggtggggaggttacaaacatagaaaataattcaggaataaggtatcaaacgtatagaatt

SEQ ID NO: 773329 - DNA, 645 bp, Homo sapiens
gaaaattcctcaggtattttgggcaattgagtctcagggctgtatcagctcttcccataacagttctctcacttgtcactctagaccaatgtcctgaaattttagtgtactcaaatttgctgaacttctacagtgtatgtttaaaatgtaggcttccaggcccactccaaagaataacattcactcattctggagtggggacacatgaatctgaaacatacatattctatttatgtgtaatatatcccaggtgattctgatgcaggtggtctgtaaaacacactgtgagagagaaaagaaattgttctgatttatttttttttaattttagtttaagcatattcattccaggaccatttgccatgaacattaaaaaacagctgattaatagtttttcttaataattgcatttccttacatayatatttttagcctcatgtatattaagagctctctatgttaagttgaactcgatgttcaacacattcattgagcacctatgtgccaggcatcatagctatcaagatgaatgagttaggtactaaggtagattgatcctcattcttaggaagctcatagtttagtgggaaagtgaaaaactgtgataatggtggtgatgacctattacctttcatccaaagtttg

SEQ ID NO: 773330 - DNA, 546 bp, Homo sapiens
ataggttttctattgtttgaattatatgtggtcagaatttcagaaactggcttctttttctttacctcttatattggtgagtttggaatacttgtgtttttgcagactttttggtttaatttaaatattagtctgaaacataagcaaaagaagactaccctatcactgtattatatctgacttcaaaatcagctgtgtcgattttctgattatctgttgctttggcttgtatatcttataactcttcttagctatcatgaaaattcgttctagctgtagccttaamatcattggatatgagaaatttgaagcacttttaatttattatttagcaaagacagatgccaaattgcagcttactcttgctgagcactcccacgatcacttttgcttttggctgttgcctctctcatcttactcagacctcttttagctggatcagtggttgaaatggtatgaaaagagaatgactgtagtacctggttacagatgtgcttctctgtcagggaaatgtcaaatcaagttttcactgacactcttcctctt

SEQ ID NO: 773331 - DNA, 605 bp, Homo sapiens
gaggaatagtttttggagtgtggtctttaaatactacagtaggctgaataacttttaaaaaaagaattgttggaaaaattttagtaatctgaaatgcagagaacctgagaattaaataatgtgaaaaagaggtcgggcagagcaactttaaatgcggtttagataaggggamagatgctagaagacttggagtaggtttattcagcattattaaattaattgtataccatttgtagttaattatttaataatgttatacaagggatatttcgtatttttttctagactagtgagtgctatctaacttgaactataaacttgaagtttatgtatatgtacactgggcattttaatttgaagttcatgttagtatctaaagtgtaacaggatttatgtagatgtacactgggcattttcaaatttcatgttagtatctgaagtacaacaagatttgtattaacagctgtgagagaatgtgtaatacactgatatctctattgtgattctagttctagtatgtagatatccttatttaataggtctgctttctactgtttaagatacggaggcataacaatgccttgggcatagaagatattcagtaa

SEQ ID NO: 773332 - DNA, 605 bp, Homo sapiens
gaggaatagtttttggagtgtggtctttaaatactacagtaggctgaataacttttaaaaaaagaattgttggaaaaattttagtaatctgaaatgcagagaacctgagaattaaataatgtgaaaaagaggtcgggcagagcaactttaaatgcggtttagataaggggaaagatgctagaagacttggagtaggtttattcagcattattaaattaattgtataccatttgtagttaattatttaataatgttatacaagggatatttcrtatttttttctagactagtgagtgctatctaacttgaactataaacttgaagtttatgtatatgtacactgggcattttaatttgaagttcatgttagtatctaaagtgtaacaggatttatgtagatgtacactgggcattttcaaatttcatgttagtatctgaagtacaacaagatttgtattaacagctgtgagagaatgtgtaatacactgatatctctattgtgattctagttctagtatgtagatatccttatttaataggtctgctttctactgtttaagatacggaggcataacaatgccttgggcatagaagatattcagtaa

SEQ ID NO: 773333 - DNA, 568 bp, Homo sapiens
tctagttctagtatgtagatatccttatttaataggtctgctttctactgtttaagatacggaggcataacaatgccttgggcatagaagatattcagtaaatacttgttgaaagaataacactgacaggtctaggttgcttcaatgtagtagattagattggttaacaaatctgttttcagtaataatctggtgacattatttaatatattttgaacatattgaatgaaatgattgttagcaatggagcagaacatgttttatagaaattttttgttctaatatttagaagtcttcattgtaataataaaatgttagtatttatttacttatttacatcctgattagtctgttttkatttaaccctgactaggagctgatgaatggacattttttcatttattccatattaatattttagatggtctagtatttatcttttgaattttatttgtaaaaaattaaacagtatatgtaaagcaatactttaatgaagaagaatatttgaaacaattttatcttcatccataccgtcatccttaatatcagagcattttttcattttcat

SEQ ID NO: 773334 - DNA, 605 bp, Homo sapiens
gaaaaaattgcaaatcacatatctgacaaagactcgtttccagagtgtatatataatatgtctctctctatataatgacatgttaaaactcagtaataagaaacaacccaatcttacaaacgggcaaaatatctgaacagatatttctttaagaagatatcaatagcaaataaatataaaagaggtgttcagcatcatttgttatcagaaaaatgtaaatgaaaaccataatgtgatagcactacayacctatcagaatttctggaatagagaaaaacgtggcagtatggtgagatgcaaagcaacaggaactctcattcattgctgttgagcatactaaatagcacaaccaggttggaggacaatttggaaatttcttataaagttaaacatatacttaccacatgatccagaaatcccaatccaaggcatttatccaaatgagttgaaaactaatgttcatacaaaaattcatataaaaatgtgtataacaactttattcacagtcattccaaacgagaaacagctgcaatgtccttcagtaggtaatggaataaggaactgtgatatatccgtacagtaggctattgctcaacaataaaaat

SEQ ID NO: 773335 - DNA, 453 bp, Homo sapiens
cacacacatacaataaagatcaaactaggaatgaaaattaaagcactggtattttggatttatgaaatttttaatccacagcattgaaaacataaaaaataaatatatattgaaaaatgcaacataattatcaatagaaataaaaaaaaattacagggagggaagtgtaaaatccattttagaaaatatttcacccaaaatactaaaaataagtagttctgatgtttaaaaaaataaacttcatgggttgtaaasttcacttatatgttgtttcattacctagttatgccagataatgctttgctaccgaattatttgcttaccagtcttctggtttgatggcagaaggatcaggaatttttgctctttcatcccattcctcaggttttttatcattgggatcttcaatttctttgggaggtttgataggaggaaccacatcctctaggaggc

SEQ ID NO: 773336 - DNA, 614 bp, Homo sapiens
acccaaatgtgagagcccagagaaaggaggtaatgggtgggtatgggctttagattggttggtttgcatagaaaggcacattcacagatcagttggttactatctctaggagttggctagttttgggagcagcaatctctccagggtcagcaaggtcccacacatcaaagaattagaataaaaagacctgcttgatacagatagatacaattaccctatatttcagatggcaaagttgaaatcctgagaagtaagtcatatcttcaccaaggggagsacctagatttaaacctgagtctgctggaccccccaaaccatgctcttaccaatgtgctattctgttcttcatcgagctaattaagcatacatgtgggcatctataattgtataaaaagataatttacagagcaaatgaggatgctgagtaatttctatagaaaataattgcatgaagcaatgagaaggaggagggattgcttgtagtggtcacagaagacttgtggaaaagggtcattcagactgctgctgcccccactcagagacgatggatgatgggcattgtgtttgctgggtgggtcttgaaagttggatagaatgggtctgggcaaaactgg

SEQ ID NO: 773337 - DNA, 621 bp, Homo sapiens
ggcccactggaagtctaagggtttggcttcagggtgccgcagccagaagatgagctggaaaggctgaaagggcattggaatagagggtgatagaggctccatcctaggccctgctgcaggcagagatccgtcccctgcactggccactgggtctcctcatctgaaacagccaagttctcaggctggaaaagagaacacccagcgttggccctcctccagacaagagggctggagctgcatgccagcacacaggctgcttcctcagcccattctgcccagacaactgctatccacstgtgttaggccattctcacattgctataaaggaatacctgaggctgggtaatttataaagaaaaaaggcttcattggttcatggttctgcaggctgtacaagcattgcaccagcatctacttggctgctggggaggcttcagggagctttcactcatggcagaaggcaaagtgaaagcaggcacgtcacatggccagggcaggagcaaggcaggggtggggcggggggagggtaccacacacttttaaaccaggtctcacgtgaactcagggagagagttcgcttatcaccaaggggatggcaccaagccattcatgaaggatcca

SEQ ID NO: 773338 - DNA, 595 bp, Homo sapiens
atttattacattgttaagcacttaaatgatttaagactaaatttaaaacttgtgatttcctttaattatgatgaagtaagattataatctgaaagaatattttatttaaaattatgatggatatctatataaatgtaagatttactgaccaaaaatggaattcattttcaatgtggatgttatttccctatttgttaatctgcagtgtgatgataagtttcccattggcttttatatttctttattttttcctttaattgtatttatatgagaaagataactagggacttcaattaggacacattggaggggtcagaamccacataatggaattaagtcatgaagtttggagatagaggcattccaagagtggagtgacctttgagaattttgtggtggaagtgaaatttatataggtctctattttgattttagagtagaaatagtgtcgtgatagtatgatttataataagaaatatgtatttgatcttcaaactgttttctggcacccagcttcttaaaagtcttgaaatctccaaagtgttaagtatcttttttatatgctaattagaggactgatggctgagagcttctg

SEQ ID NO: 773339 - DNA, 606 bp, Homo sapiens
tcagtttatgttgtacaatgtagatggcctcttactaatgtaaaatgatttgtagtggaaacatttatatttttataataaacataatgaaaatattttttacagattggaatacagaagtggtctttgaagttttttaaaaatatataaaactatgtgcttatttaaacagcaaaataatgaaatttacataagtcacaaaaatatgcttctgggcttttattctccattagtgaggagggatttacattgtataatccacatgtttttggtctacatctcattatgaataagccagaaaaataatcagtaaatgttatttcaaagttaataaacacaactgtaatagrcagttctcttttgattgcaaataacagaaaacaaataaattggattaattttctaaaaaagaaaatgtttagaataagtgacagaattatctggggataaactccctagctaagagatcagacacagattgaaccaggaattcaaacaatgtcaacagggttaattctctcattctttgtcttcttcccttggccctattttttttccaactgggttgatttgcaagctatacctttctacaaggtaaaaaatact

SEQ ID NO: 773340 - DNA, 582 bp, Homo sapiens
gctaacacttgcgatttttactagagttaactttgtaatgtatgtctctgactctagaatttcaagagaagttccacttagtgactcctaagtggaagttctaagatggcttcccagtgaggtgatgaagaggtttgagctttagagtgcrgttgcaaagctcttctctgacctgaacaatggctgtagctgtggaccaacaaatccagactccttcagtacaagatctccaaatagttaaactggaagaagattcccactgggagcaggaaatttcccttcaagggaattaccctggaccagagacatcctgccagagcttttggcatttccgttaccaagaagcatcacgaccccgagaggccctcctccagctccagaagctctgttgtcagtggctaaggccagagaagtgtacaaaagagcagatcctggagttgctggtcctagaacagttcccgactgtccttctccaggagatccagatctgggtcagacagcagcatccggagagtggagaggaggcagtggccctggtggaagacttgcagaaagaacctggaagacagaggctggaggtga

SEQ ID NO: 773341 - DNA, 541 bp, Homo sapiens
gcctgtagtcccacctacttgggaggctgaggcaggggaatcgcttgaacccgggagtcagaggttgcagtgagctgagatgacgccactgcactccagactggcgacagagcaagactctgtctcaaaaaaaaaaaaaaaaaaaaaagtagcaagccagctaggtcagcaggcccctggttctggtctggtggtagctagttgcttgcggcacttaatgtgggtatctaaaagccaacaggaaggatccgtcgaggcaggtgggggttgaaaaaaatcattaagagagcaagaaaggatgattggaaatgccaggatccagaaagaacagaagagccaagctcaggtagaggggctggctcttcagtaccaggaagatggcaggatggaatgagtgtgygtgcagctagatcgtgcagggacgtgaaggtatttctctccaaaggcttctgtttcccccatcgagtaggagacaaggccatctgctgaaagggacccagaggtaggggactggactctggggcaacttgaaaaggtttga

SEQ ID NO: 773342 - DNA, 571 bp, Homo sapiens
acacatcaggactctccagttgccccagtccccaccactccctgttacttactccagcctgctccacactttcactcctgaaggcatgtgagtttgccacccttgctacacaatattagttaccaaggtgcctgctcttctgtcaactgcctgccttgaagaggcagccagcaggggagagaggaggtgtgactctttgaatgcctggggccactctgctccacctgtcttggcactccactgaggtccaggccaaagccccatcagtctcagccccagtagttttccatgagctgagaagtygccaaacctgcatgctgccaaaaaaacatgccttcctttagcctctaggtacggagaataaatctgcagtctcctaaactgccaaattcctggtctgctggagtctgggaggctaaatggtgcttactagtctggctcccagatgccccaaattccaccattatcaacacattcctccatgttaagcattgcgctgtaaagttcaacgatctagtgggaggggcaggagagtgagtccaaactaggctggagcagatctttaaggata

SEQ ID NO: 773343 - DNA, 594 bp, Homo sapiens
ctctccttcatttcctgcccttgtagatcattgcattggcagcccacaagcctagatgagggggcccgagccttcaagtacaatttggccgaggggcttgtgggagaggagctgtgttttccagccaggactttaggtctgctctgaagcagctggagcatcagcaaaatcacatctcctgcccttatccctttccggaactccagccacatgtggaccgctgctccctaacatccgcgcctcagtttcccctggggcttaagtggactttgacctcgtcactcacttctccaactactcctttctgtgtgtcttcccattgtgctctcagcagctggaagagtgaggaactgttctgtgaaagatgagatatgagagagaagcgtctggtctctggagggggtgagctcaattttattcatgttgaktttgagatgtagatctgtattcagtagacatttggatccagtggtctgcagttcaggagtgaggcctgtgggtggcttggatagagacctgagagtgttccaaccgaagaaactaacagaaggcatggatgggggtcaggtaataccccaggaagaggacatgagc

SEQ ID NO: 773344 - DNA, 620 bp, Homo sapiens
aaagttattttttccttttcgtctctgttagttaaatgcaatagcaacttcatccaaagtggaaatggccacaaatatccactaactgttgaatggataaacaaatttagtacattcatatgattaaatactttccagtgataaagaagaacagactaatgttacatgcaacaacatgaatgacttttgaaagcattatgctaagtgcaagagkccagactcaaaatactacgtgttgagtgattccatttatatgacattctggtaaaggcaaaactatggggacagaaatcaaatcaatggtttctatggtcagggtgtgggagagggagattgaatataaagaagcaaattttttgggctgatggaaatgttctatatcttaactgtatcatatatataatcatgtttatattatatgtgattgccaaaattataacactggacatattacaatagaagtaaatgttactacatgtaaaatatacctcaacaaacccgtctttaaaaaatgtagtgccacaacaggctgctacagactaggctgatagttgccattaattgcccacaaagaaatactgagtttctactataagcaggtgaatctcagaacagagtat

SEQ ID NO: 773345 - DNA, 607 bp, Homo sapiens
tatgtgtattaatttaatcccacagaatctctaaaagctaattactactatctcatttagtagtaagaaaattgaggcatagacagtctaagaaacattaccaaggtgacatagctagtaattgacgaagctgaaattttaactaaggcagactgattcaagagtgtgtgatcttaactgcaactccacagtatggcatatgtatgacattagtgagataaaagactaattaattattggacaaaaagaagcctcagtcctgtctcttacacttattaattacatatacttggagaaggtcatttarcctctgtgaatttcatttatattctttgcaacacaaggaaacacaaaagactgtgtgcattcaaatgtcaactgtatatgaaagtgcccagcattgtgtataagacctaatagactcactttaaatggtctattttagataaaagttaaaaacatttagataaaaagttatcagcatggtttggaccttttcctaaagctaaattataccaatgaaaacagaatatttaaggttgaaggaaaatatatctggaaagaattccgttttcaatgtcttccagacaagttagagacaaaaagg

SEQ ID NO: 773346 - DNA, 621 bp, Homo sapiens
ccttaaaatgttccagctgtatatgatcttagggcaatcacacagctgttttggctgcggcttcttcatttctgaaatggcattaatagtaacattcctatggccgaggtgttaaagattaaaactatagaggtaaagcagtcttgaaaatttcaatgtaatatctaaatttaagctrttatagggatgccctaagttgcttttaaaaaatgctatgttattacatgctactctttgataaccttttatttatgataattaatgtaattagtgtgctaattttctacagttgcaccctggggcaatcgtgcaacagttgtaattttaaaaattgggcaaataagtaaatgtcaatctgtaataaaacccaaatgagtccgtgatgaatgttgatggtgactggtaatttacctgataaaatattgtaactgcccagttaccttggaatagctgattccataaagtaattaccatgttctgcatagtgaagtgtcatcagagaaaattttaacgcacagtgatcatttttaatttggtgatttaaatatcatattgattgatgaaatagtagtattttaattcagactgttaagtcaaaagagagagagacgtttatcacat

SEQ ID NO: 773347 - DNA, 548 bp, Homo sapiens
tgctggaactgagaaatgacttcagtaaagtttcaggttaaagaaaaaatgcaaaaaatcagtaacattttcatacaccaataatattctagctgagagccaaattaagccacaatcccatttacaatagacacacacaaaaatgaaatacctaagaatacatctaagcaaggaggtaaaatatctgtrcaaggagaactataaaacactactgaaataaatcatatataacaaatagaaaaacattccatgctgatggatgggaagttaatatagttaaaatggtcatacttccaaaaacaatttacagattccatgctatgtctatcaaaataccaagatcattttagacagaagtagaaaaaactactctgaaatgcacacagaactaaaaaaataaaaaagagcccaaatagacaaagcaattctaaacaaaaagaacaaagccagaggcatcacattactcaacttcaaactatgctataaggcttcagtaatcaaaacagcatggtactgggacaaaagcagacacagagactaatggaatg

SEQ ID NO: 773348 - DNA, 573 bp, Homo sapiens
agtatgattgtgcggttgctcagatgtcttcatagatctctaagaacttgtttgatgaattttggtgctccaatgttgaatgagtatatgtttaggatcaagtctttttgtttaattgagacttttatgattatttaatrctcctctttgtcccttttgattattgttgctttaaagtctgttttatcttacataacaatcgttatgcacactcttttttgttttctgtttgcatgatagacctttctccatcccattattttgaacctataggtgttcttaattgtgagatgggaagatagcagacgttgcatcttgctttgatgtccagcttgccactctatgcctaaatggggcatttagttcatttacactcagggtcagttttgatatgtgaacatttgatcctgccattgtgctgttggctggttgttatgtagacctgactgtatggttattttttcatgtcaatggtgtgtataattaattgcgttttcatagtggcatctcccttcaattctgtcagtttttgcttcatgtattttgggactctattgttaggtgcatatttgt

SEQ ID NO: 773349 - DNA, 611 bp, Homo sapiens
ctaaaaattaaaacaattgaactcatggacagagagaatagaatgatggttaccagaggctaggaaggggcgggggtggaatggttactaggtacaaaaatagagttagatagaatgaataggatctggtatttgacagcacaacagggttattacagtcagcaaaacatattgtacattttaaaataactgaaagagtacaattggattgtttgtaacaaaaggaaatgctaaatgcttgaggtgccagataccccatttaccctaatgtgattattacacattgcatgcctgtatcaaaatatctcgtgtaccccataaatatatacacccactatgttcccataaaattaaaaattttwaaaaattaagaagaaatcataaagcacaaattttgaccttcccctctccttaatgtatttgtcaccatatggaaaagacatcacttggcagctaaattttcttaactaggtaaaatatttattattaatgtttctaaaatgaaagagcttttataaatcaataagtacaagacctataacccaattcaaaaatggcaaaggacaaaatgggctgaattttttaagagagaattataaaagcgtctttta

SEQ ID NO: 773350 - DNA, 607 bp, Homo sapiens
caaagggatatcaagaattcgccgtttacttcggttgaaaaatcaagtcccgggctcagagtccccctgccctagataattcctcttgataaaagaaccatagattatcagaagggaacttacagattacccggttccttcttcttcttcttttttttttttttttaacaaacaaaagggaaaggaaaagcaacaggatggtggggatgtttaccacttcttgtgctgtgttctctctatatataagtaatagacaaaggaggtaacgtctccggagaccctatctggaaggtagcagggtagttccctctgtaggggggctctgccactgctgcgatcacctccaagccccctttcagatcagcyaggagaggcaccatagacaggccagagttgtctctgaggaaatgagggatgggccagcacaggccgtgcagtacggaacccgagtcccaagtgaaaaagctgagggaaaggttctgcagggaacctgcaggaaatatgggagaaccctgtgaggtcaagtggacacacttctgcacatgcctcccgaccacctggcttggtggtccacttttggggtggctggcactcttcctgcagtaca

SEQ ID NO: 773351 - DNA, 588 bp, Homo sapiens
ttcatgtattttcgactgtgcaaggggttggcacccttaaccccttcattgttcacagatggactgtattacgaatctggcagcctgggatggtttaaggaaagttattcccagagggagaagcattacctaaaagactcttgttacagggtgaattgtatcctctctgaattcacatgttaatatcctagcctccactccttcagaatgcaactttatttagaaagaaggtcttgacccaggtgtcaaattaaaacgagaccattagggtgggctgtaatctaaaatgactcatgttcttataaaaatggaaatctggacacagtgacagacacgcatagagggaagatgcgrtgaagacccacagggaggagatggccgtctacaagccaagaacagtggtcaggggcagatccttccctcacagccctcagaagaacccagccctgcaggcaccttgaccttgaacttccagccttcagaactggagacaataaatttctgttgttgaaacaccctggtatgcggtacttcattacgactgcactagtaactaatacaatagttaacgatcctctgtgtggctgt

SEQ ID NO: 773352 - DNA, 588 bp, Homo sapiens
ttcatgtattttcgactgtgcaaggggttggcacccttaaccccttcattgttcacagatggactgtattacgaatctggcagcctgggatggtttaaggaaagttattcccagagggagaagcattacctaaaagactcttgttacagggtgaattgtatcctctctgaattcacatgttaatatcctagcctccactccttcagaatgcaactttatttagaaagaaggtcttgacccaggtgtcaaattaaaacgagaccattagggtgggctgtaatctaaaatgactcatgttcttataaaaatggaaatctggacacagtgacagacacgcatagagggaagatgcgatgaagacccacagggaggagatggccgtctacaagccaagaacmgtggtcaggggcagatccttccctcacagccctcagaagaacccagccctgcaggcaccttgaccttgaacttccagccttcagaactggagacaataaatttctgttgttgaaacaccctggtatgcggtacttcattacgactgcactagtaactaatacaatagttaacgatcctctgtgtggctgt

SEQ ID NO: 773353 - DNA, 588 bp, Homo sapiens
ttcatgtattttcgactgtgcaaggggttggcacccttaaccccttcattgttcacagatggactgtattacgaatctggcagcctgggatggtttaaggaaagttattcccagagggagaagcattacctaaaagactcttgttacagggtgaattgtatcctctctgaattcacatgttaatatcctagcctccactccttcagaatgcaactttatttagaaagaaggtcttgacccaggtgtcaaattaaaacgagaccattagggtgggctgtaatctaaaatgactcatgttcttataaaaatggaaatctggacacagtgacagacacgcatagagggaagatgcgatgaagacccacagggaggagatggccgtctacaagccaagaacagtggtcaggggcagatccttccctcacagccctcagaagracccagccctgcaggcaccttgaccttgaacttccagccttcagaactggagacaataaatttctgttgttgaaacaccctggtatgcggtacttcattacgactgcactagtaactaatacaatagttaacgatcctctgtgtggctgt

SEQ ID NO: 773354 - DNA, 658 bp, Homo sapiens
gaagcattgctatgtgaagagtagtaagtctttcaatccatgaacacacaatgtcttttcatgtatttaagtttaatttctttcaataatgttttgtagtttgcacttccttggttaaatttattcctaagtttttttttggtgccattacaaatggaattgttttattaatttcatttttggattgttcatttctggtgtatagaaattcaactgagccaggtgtagtggtgcaccacctgtagtaccagctacttgggaggctgagtcaggaggattgcttgcggccatgtttgaggctatagtgcattataattgtgccygtaaatgatcactgcattctagcctcggcaacatagtgcggtcttgtctcttttttttttttttttttaagtacaatttccattttatttttctccagagaatagcctgtcttcagtctttaagaactcagctccttacatgggctttggtgggggacctggggcagcacccgcaggtctaaatcggggtgggggtgttcggtccttgcgggcttcacgagatcgattcctgactactttgctgtgaattgcacaactcacacagtaatgtagcttcacatacagtttgggaagcacataggcatcgaagacgctcacttcagaaatgtccctga

SEQ ID NO: 773355 - DNA, 658 bp, Homo sapiens
gaagcattgctatgtgaagagtagtaagtctttcaatccatgaacacacaatgtcttttcatgtatttaagtttaatttctttcaataatgttttgtagtttgcacttccttggttaaatttattcctaagtttttttttggtgccattacaaatggaattgttttattaatttcatttttggattgttcatttctggtgtatagaaattcaactgagccaggtgtagtggtgcaccacctgtagtaccagctacttgggaggctgagtcaggaggattgcttgcggccatgtttgaggctatagtgcattataattgtgcccktaaatgatcactgcattctagcctcggcaacatagtgcggtcttgtctcttttttttttttttttttaagtacaatttccattttatttttctccagagaatagcctgtcttcagtctttaagaactcagctccttacatgggctttggtgggggacctggggcagcacccgcaggtctaaatcggggtgggggtgttcggtccttgcgggcttcacgagatcgattcctgactactttgctgtgaattgcacaactcacacagtaatgtagcttcacatacagtttgggaagcacataggcatcgaagacgctcacttcagaaatgtccctga

SEQ ID NO: 773356 - DNA, 520 bp, Homo sapiens
gacagggtgggaggcaaggatcatcccttcctggggatatagaaaattcattcattcactcaatatatagcaaacttgtgagttaggagcaatcctttctgagaatcagtgatgtctgcagatgtaaattcctttgacacccacataaagctayagcatagaggagcttcaaaacacacaggcttaagcttccacacacacccctttgccctccttccctggccctctcttgatctttacttcaatcctctccaggcaaccagatctctcagacccttctcctccactaacctcaaccaaatttgaaatcaacctctttaaggtttaatgaccaaaatggcttggaatgttatcctttgccagaagtatttgtatgatacaggaactagagccttggactaaaaggacaatgtctcctagtgaaatttcaggcatcagccggtcaataaagaaaatttgtgtttgatttgcttcaattttcatctatttgtttgtttttaccaatgaggatttccctggg

SEQ ID NO: 773357 - DNA, 615 bp, Homo sapiens
tatttactgaataaatgaataagtgaattgttcttcataacttagttatatcttctcaaatagattctcatagctgtgagggtaatttcccttgttcccccggtgtacctggcatggtacactggtgctgaagaacctgaatattagtgatgcaatttatgtgtaattgactcacccaggcacatggaaatgtgttttgaatcagtagatagagccattttagggccaaacgcactcttacttttgaaatcctaatctcatattatattaatttttaaaacgcatttacatttcgccctatatgtgggtgtgcatgcasatatttctgctgtaaaataatttttataatttgctttgttaattatcacttcaattattattttgatttcacagtttctgttttgtaatttagagcccttttttttttcatctcaaacttgttttggcccttgacaaccccacatcccctaggcactgtgcctacagcgcctgatgcataaaatggctttgcctgtgggcgcttccaggacaagagtgacctaaaaggaacaagaggatgcatcaaaatcaaattccgcatcccagtgaaactgttctccatcccctttcatcctg

SEQ ID NO: 773358 - DNA, 560 bp, Homo sapiens
gaggccaccctggtcccaggtgggcaggggtcacccaggtgaccagactgcaccggaggcccagagagtgtgcaggagcatgaactgttgggctcccctgcaggagagaagctgcaagcactgatgggaatccactgcagaccctggccagggggccagcrttgttccaggtgcctctgtcccttcaggaagtttggggtcttcattaagcttgtgcttctgcagcccaaacacaggggtatccaggctgtgctggccgggtggcctttctctgttgatagttttgtcatctggaggagtgcttcaggaagaggcggttcattggatcaagtcctctctctggttttggagacagtaaagcgtaacgattaagaatgaaccttctgaagccagactatgttcaaattctgctcagccactgagtagcttggcaacagagggcatgtgcctcagtttgttcacctataaaataggcctaatgagagtatgtacttattttgtaggattgtcatgggtttgagttgatgcacgtaacacacttagagcagtgcctgttaaac

SEQ ID NO: 773359 - DNA, 560 bp, Homo sapiens
gaggccaccctggtcccaggtgggcaggggtcacccaggtgaccagactgcaccggaggcccagagagtgtgcaggagcatgaactgttgggctcccctgcaggagagaagctgcaagcactgatgggaatccactgcagaccctggccagggggccagcattgttccaggtgcctctgtcccttcaggaagtttggggtcttcattaagcttgtgcttctgcagcccraacacaggggtatccaggctgtgctggccgggtggcctttctctgttgatagttttgtcatctggaggagtgcttcaggaagaggcggttcattggatcaagtcctctctctggttttggagacagtaaagcgtaacgattaagaatgaaccttctgaagccagactatgttcaaattctgctcagccactgagtagcttggcaacagagggcatgtgcctcagtttgttcacctataaaataggcctaatgagagtatgtacttattttgtaggattgtcatgggtttgagttgatgcacgtaacacacttagagcagtgcctgttaaac

SEQ ID NO: 773360 - DNA, 586 bp, Homo sapiens
ttgttttgttttcttttttaagttgttgttaaaaatatttttctcagatatacttactggcaggggagataccatgaccgcaaaggtggttttccgaggatgaggcttatccatttcacactggatgtgctgaccccctgcaatttccccaaatgtgggaaacctgactgcataatttgtggtagtggggaactgcattcatgctttaaaaataataataataaaaatttgttttagaaagtgcccaaaccttcatcctttcctatcaagaaggagaggacttccctgccagagttccaaggcagggtcatgagattyctaattcaaagtctcgtcagggtggtcatctgctctgctcgttgcctagtactcagagagaaacatactccagggccaggtggtgccacgcagatgacaaaataacaagtgattgggctaattagcctatttacaatcataaaattgtgaaagaacctttcgcaaaactacagatgtttttagtgttcagaaagtctgaaaaagaacacagaattgggataggatttgggtcctaccagatgttcacagagggaaagtcctgctaaat

SEQ ID NO: 773361 - DNA, 586 bp, Homo sapiens
ttgttttgttttcttttttaagttgttgttaaaaatatttttctcagatatacttactggcaggggagataccatgaccgcaaaggtggttttccgaggatgaggcttatccatttcacactggatgtgctgaccccctgcaatttccccaaatgtgggaaacctgactgcataatttgtggtagtggggaactgcattcatgctttaaaaataataataataaaaatttgttttagaaagtgcccaaaccttcatcctttcctatcaagaaggagaggacttccctgccagagttccaaggcagggtcatgagatttctaattcaaagtctcgtcagggtggtcatctgctctgctcgttgcctagtactcagagagawacatactccagggccaggtggtgccacgcagatgacaaaataacaagtgattgggctaattagcctatttacaatcataaaattgtgaaagaacctttcgcaaaactacagatgtttttagtgttcagaaagtctgaaaaagaacacagaattgggataggatttgggtcctaccagatgttcacagagggaaagtcctgctaaat

SEQ ID NO: 773362 - DNA, 617 bp, Homo sapiens
tgattattaagatcatcacatatttcttgcataattgaaaactaaaaacctggggccacaggccagctgttgaatcttaggcacatccacatctcttggcatgagtgtcctcaatagtaaaatgagcaaattagatagatgaccttaaaggcccgtccccattctgtgatgacataattcaacagggatgcttctaytgggccctgaatgtagcacagaggtgaaagggaacactacatagcaggcttacagagggggctggtgggaagagaacgagatggggcctgtgggatagatcagagccccgcaagctttgtggagtgcgggggaaggaagactgcaagaaagccagccaaggcggctgcctctccactcaactatgtgattaagtgactggcttctgtttttcacaaagccagtctccagctcaaagaacctcagggactattttaaagacaagttattcctttgtttttaattgtaattaagtaggtattttataatatttaaatggtgcaatttacatgtcacttccatgatgcgctgggtacccttcaccagaaggagagaacgtaagtttaagaggactgctgtgtattattttgtgactagggaag

SEQ ID NO: 773363 - DNA, 671 bp, Homo sapiens
ttcagaaagtctgaaaaagaacacagaattgggataggatttgggtcctaccagatgttcacagagggaaagtcctgctaaatggaaaattccaaatgtggccagttagaaactctgtgggctgaaagcccctctacaatcctggatagttcctagtgacatcacttgaggtctccaagcctgagcaaaggacaggatctgagcctagatgccctaagatgggatggggcaccctggaaagaacaaggagtggaactgttcagmagttcaccagagacttatgtcagcaccttgactcaggccaggtgtatgatatcccagacaaagaagggaggtatagaagaaaagcaatagaaaatgtcctagacatttaccaaactgtctacaagaagagcagcctcctctttcgtgggcatcttgccccctaactctgattttgcagttctagcacaaaaaaaatcatagttacccatccttctgccagagaaaagggctcatgaactgaactggacagtttccccctccctctgattggcccaaggattggcatgagactgaacagggaaactaggattttccccaacaggaaaaaaaaaaaaaaaaaaaaaaagcattttatgctctgatcacatgaaccaataaacacccagccctccttttttcttaagctg

SEQ ID NO: 773364 - DNA, 515 bp, Homo sapiens
agaaacaagcctgatgggacgttggcagacttccctgctgccaaccgagaactattgcgggcagccgcgggcttctcaggacttaagcgcatgatggaatggtaaacgagggagcagactgtttattccagcagccagattgtttctggccataaagttctgtgtttggaaagttgtttttttttttctccccggtatattaccaaaaaaaaaaagggggggaraagagggtggagaaagaggtactgagcaaagattatgttttattttttattcaagctgttccaaaaaaagcatcgaccttcctgggtttaaatggactctgctaataaatacataagcccatttcagtattgcagaaaagggaaaggaagaaggaagcgagtccaagctggagcaaggaggagcggtgttattaaaacaaattctaaggaatgaggtttcaactagtttggaatttgagttgcaaaattaggcacatttcaagttttgatcaaatatttatgtttctttac

SEQ ID NO: 773365 - DNA, 515 bp, Homo sapiens
agaaacaagcctgatgggacgttggcagacttccctgctgccaaccgagaactattgcgggcagccgcgggcttctcaggacttaagcgcatgatggaatggtaaacgagggagcagactgtttattccagcagccagattgtttctggccataaagttctgtgtttggaaagttgtttttttttttctccccggtatattaccaaaaaaaaaaagggggggagaaragggtggagaaagaggtactgagcaaagattatgttttattttttattcaagctgttccaaaaaaagcatcgaccttcctgggtttaaatggactctgctaataaatacataagcccatttcagtattgcagaaaagggaaaggaagaaggaagcgagtccaagctggagcaaggaggagcggtgttattaaaacaaattctaaggaatgaggtttcaactagtttggaatttgagttgcaaaattaggcacatttcaagttttgatcaaatatttatgtttctttac

SEQ ID NO: 773366 - DNA, 515 bp, Homo sapiens
agaaacaagcctgatgggacgttggcagacttccctgctgccaaccgagaactattgcgggcagccgcgggcttctcaggacttaagcgcatgatggaatggtaaacgagggagcagactgtttattccagcagccagattgtttctggccataaagttctgtgtttggaaagttgtttttttttttctccccggtatattaccaaaaaaaaaaagggggggagaagagggtggaraaagaggtactgagcaaagattatgttttattttttattcaagctgttccaaaaaaagcatcgaccttcctgggtttaaatggactctgctaataaatacataagcccatttcagtattgcagaaaagggaaaggaagaaggaagcgagtccaagctggagcaaggaggagcggtgttattaaaacaaattctaaggaatgaggtttcaactagtttggaatttgagttgcaaaattaggcacatttcaagttttgatcaaatatttatgtttctttac

SEQ ID NO: 773367 - DNA, 607 bp, Homo sapiens
aacacctaaaatcataacaaccactatcttgcaccacagcacaatcaagttagaaatcaagacaaagatatttcctgaaaaccatacaataacgtggaaatgcaataacctgattctaagtgacttctgggtaaataataaagtcagaaatcaagaagttctttaaaaccaatcagaacaagtatacaacacaccagaatctccaggacacagctaaggcagtgttaagagggaaatttatagtactaaatgctcacatcaaaaagttggaaagatctcattttawctacctaacatcatgacgaaaagaaccaaaatcaaactgcaaagctaaggacaagaaattaccaaaattggaactgaactgaaggactctgagatagattaaaaaaaaaatttaaaaaatctcaacaaatccaggagttgttattttcttgtaaatttaataaagtagatatactactatctagaataataaaaaagtaaacagatccaaataaatgcaattagaaacaacaatgggatattaccagagacctcaaagaattacagataaccattggagaatattattaacacatctgtgcacataaactagaaaatctag

SEQ ID NO: 773368 - DNA, 620 bp, Homo sapiens
gtgaaattaaaaactgttgcttgaatgaataaatcaatgaatgaatatatagatagatgaatggataaataaatatattgtgcagactaaggtatactatgcaactcaatagacaatcagcatctactatggggtaggcattgtgtgaagactggggaaatcaagttgaaggggaaaatcttgaccattagacctatacgttagcagagggactgacactaacacaagctcattaccatgtgctatgtgggaggtaaagggtgctctgggaaaacggaaggcagagactggagatgtgatctgaatttgccaggcaaaggaggaagtatatgaacaaaattattctaggcagatggaacaaaaaagaggaaggtgcaaatcagtgtggtgtgttgggaaaattgcaaatggttgactactgtaatgacaaggcagaggtasagaaggtaaagagaaaatgatgcaagatgaggctggatcatggagggcttcataaattatgctgagaaatctgcactctatctaatgaggaggtgggaaacaaccaaaagataaaatattctggtagtgaaagtgaagatagatttaagagtcaaaagccagggcaaattatgtctcct

SEQ ID NO: 773369 - DNA, 486 bp, Homo sapiens; identical to SEQ ID NO: 759021

SEQ ID NO: 773370 - DNA, 641 bp, Homo sapiens
ttctccatgcacactcttattctattctggcaggaaatttaattggtgcattttgattaaacttccaaattgatggctctcttatgctctgacttgtaataattgaaatgattaaagatgtagtttcttctttccaaagcttttcacttatcagttgctcctgttttattgagaaaggtgcttgtagtgatgttatattaagccaaactactttctgatttggttcaaacagactaacacacaaatgctaattaatatttagcatttagatatctgtatccaaattaaattggcacccagaggatgaaagattgaattattcagctgctgttgaaagctatatgtcataccgtgtttacaattgtagttatcagaagtcggctttcattattctaccaaatgtgtttaytttctcatagagcattcaaatcttcatggttggctatctatatagaagataatattaaaggttttaaacttgaacaatttatataaaataaaaaaattaaaatctctagtcagataatgtcatttaagggccatttttggatgccttcccatatgcaaagatactaccaatgtagtatcttttgcatgtgttcccatatgcaaagatcaaccatttctgaagcagaatgctt

SEQ ID NO: 773371 - DNA, 634 bp, Homo sapiens
tctctctctttcaagtggagtgggtagtacagattggaatgtagaatttataataaatggaataatgcaactggttaagtgttaatgccctaaatataagaggaaagacagtcaggatccacttcagcatatagaaaagtatagaggttttagtaacccttcctagataccatagataacttctcaattaaatattagttcaatctcagaattgtccttaatattgaaaagccaaatggaaacctaaaacatcatttttatgagacaacttgcctatcaacattagggtatttgtgaccaaaacatagcctcattaaacatttgtgaatgagcaaaaacaatatatcttcaagataagagtgacttcaacttctggttctgtagaacaytgaggaaggactgcaaatcacactggcaggcaagctggcatgcaggaatggtgtcctatggcacaatctgaacatcatttacaatacaaagagctatagagaagagctcagtttttcctggataagatgtctgagtagtgatggtgatgccatatttctggaaaacttaacatgtatcattttaaatggaagggtagacaacagaagatatgttaagtttgatgaaatgataggtcggattagaa

SEQ ID NO: 773372 - DNA, 669 bp, Homo sapiens
ccagagtatgctacaaaaagaaagaagaaggaaggaaggaagggaaccactgaacataaaatgaattcaataatggccacagatgaaagatgcagacaaccatattcagggagatgagatgtagtttgtttttaataacaaggactcttaacagtaatttggaagagcaattttttataagaatctaaaatgatgacattttagatgaaatctaacatttttcataaagccccattcattagtgctttcctgtaataaccaactggcctttccactcagttcttgtaagtgccatgaatttgtcactagatctgcaaatctaaggattcaactcatgagccctggatactcacctttatacaagtcttcagtgatccaattccatcctccattgtcagttttaatctctttgggtataaccccaatgttcctatcaatcatttattgagagtatgctacrtacccacaatatgccaggtgctgcaggtggcaacagaagaacattctgggtagctcttccctgaatctatttacaatgtgggttgggggagtggagagtaacacgagtgaaacagaggaggagtcaacacagaaaactcatggtactagaaatgaacacaacaggacttcagaaaatcgtgcctactgcaagagtggaaaggcttcttg

SEQ ID NO: 773373 - DNA, 669 bp, Homo sapiens
ccagagtatgctacaaaaagaaagaagaaggaaggaaggaagggaaccactgaacataaaatgaattcaataatggccacagatgaaagatgcagacaaccatattcagggagatgagatgtagtttgtttttaataacaaggactcttaacagtaatttggaagagcaattttttataagaatctaaaatgatgacattttagatgaaatctaacatttttcataaagccccattcattagtgctttcctgtaataaccaactggcctttccactcagttcttgtaagtgccatgaatttgtcactagatctgcaaatctaaggattcaactcatgagccctggatactcacctttatacaagtcttcagtgatccaattccatcctccattgtcagttttaatctctttgggtataaccccaatgttcctatcaatcatttattgagagtatgctacatacccacaatatgccaggtgctgcaggtggcaacagaagaacattctgggtagctcttccctgaatctatttacaatgtgggttgggggagtggagagtaacacgagtgaaacagaggaggagtcaacacagaaaactcatggtactagaaatgaacacaacaggacttcagaaaatcgtgcctrctgcaagagtggaaaggcttcttg

SEQ ID NO: 773374 - DNA, 614 bp, Homo sapiens
ggtgctgcaggtggcaacagaagaacattctgggtagctcttccctgaatctatttacaatgtgggttgggggagtggagagtaacacgagtgaaacagaggaggagtcaacacagaaaactcatggtactagaaatgaacacaacaggacttcagaaaatcgtgcctactgcaagagtggaaaggcttcttggatgtggcaaaactttagctgtgctccagataagaaggaggacttggatgaggggaggcrctctggactagaggaacacggtgtgcagaggtggagggagaggggtgagagtggtctgccaggtaactggagctgagccgggggagaagcagaaataagggtggagaggttgggggaggggcacacaattatgacaggttttgagagtcagttaacttagatataccatgatacacagtgcaaatcgttctagcttcttgaggtgaagattttgtgccaaatctagagttttaggaagacagggctaagagcagcaggcagaaagggctggagtggagaagggaggtgaggatgcaggccaccctgctggtgacggccttctccattcattgccacctttagcaggtcccaggtttggggc

SEQ ID NO: 773375 - DNA, 653 bp, Homo sapiens
tagttttgccttaaacatgtggttgtttaatctccttggaaaagaaaattgttgtgtatagtgtgatgtgggagtccaatttcattttttctcatgtggatattccatggttccaacaccatattattgatcattttattttttctttactaatctgaaacactacttctatcatatatgaattttctacacatattgggayctttttctgtattttctgttccattgatcagttcgtctccatatgtactaataccacaccattttaattaattacaagacctcattaagtaagtctggatattaggtaaagcaacgcctactttcttgttcttctttggtcttggccgaagtgtcttggctatacttggccatttgtactggtgtaaacattttagtatcagcttatcaaattcacaagacactttttgggatattgattggagttgcattgaatctgagtctaaatgttgctcctttgaaagcaatttgtcttttcccttggctgctttcaagatcttctctttgccattggcgtatagcaagggtttagatgtggatttattttcatttatcttgcttagaattcgttgggccttctgaatttgcacactgatagtctttcatgtgttttctcctcatatttttgatct

SEQ ID NO: 773376 - DNA, 630 bp, Homo sapiens
ttcccagcaccatatattaaatagtgtaccctttccccagtatatgattttgttgacattgtcgaagatcaattagatgtagcttttattttggttttctctattatggttcattggtctatgcatctttatttatatactatataatagtataattttaagtcaggtagtttgatgtctcaaactttgttcttttgtggcaataatatatttgcctattaaggctcttttttggtgccatatgaatgtcagaattattttttctaatttctaattctgtgaaaaataacattggtattttgacaagaattacactgaatctgtagattgctgtgggcagtayggtcattttaataatattaattattctaatgtaggagcatgggatattttaccatttgtgtcatctataattcctttcagtgttttgtagtttttcttgtagaaatcgttcacctccttagttacattatttctaggcattttgttaacaattctaaatgggattttttcttaatctatatctaagcctgatcgttactggtgtgtagaaatgctactgatttttgtatgttgattttgtattctaaaactttaatggattcattggtaaaatctctctaggacttt

SEQ ID NO: 773377 - DNA, 603 bp, Homo sapiens
atcggcttgtcttctaattatttagacatagtcttttgcagatcagaagtttttaattttaacaaagtacagcttgtcattactttgttcatggatcatgtctttggtgtatctaaaaagtcactgccatattcaaggccatctgggtttgttatctatgttatctcctaggagttttacagttttattcattttacacttaggtaaaatctattacctataatttattttgagttaatttttgtgatgggtattagatccatgtctagatttttttggagggrcgactattcctttgttcctgtatcaaagaccattttactctatttgtatgtgtctatttcttggttctctatcctgttccattgatttgtttgtctctcattttgccactaccacattttgtttattactctaaacataatgctttacagtaaaccttgaaattgggtagtgtcagtccatcaactttattcttcttcaattttatattaactattttgggtcttttgctcttacacaaactttagaatcggtttgtcaatatttacaaaataacttgctggggtttttacaggccctctttaagtgccacatgaattt

SEQ ID NO: 773378 - DNA, 647 bp, Homo sapiens
catcatttttgctttcttcattttaagtttactaggacttaatattttgaatcatataagctttacgcttcatattctctcttggtttcacattggttctattttggtcattgagcctatctgtattttaacatctgcataaacagattgtccaaagtaaacaggttaagtgattctgaataatgattagcatggaaattatgtttaacaacaaattccaatagcacaatttggcctccacaacccttatctttttttattcatatgtcaaataactcttttggatagaaatatgacttattgtagaatattttaccaaaatgccctgaaataagggacaatattgtaacccttaataatcttaattttctaatagaaaaattctctcaatataaaatatatatacataaaactttgtttagagaaacratgaacaaaaataggctaatagtttgaaagaatagactctatatgtcaatttcacaataataatgtgtagattcaattcaatgtcaatcaaaacaacagtctattttgcagaaattgagaagtatttctaaactttattgttagaaatgcttgctccctctcattatttcactccttggattagaaaacaatgagaatctttgttaagtttatttgca

SEQ ID NO: 773379 - DNA, 641 bp, Homo sapiens
taaagtggagacataaaacagagaatagaaaaacaatacaatcaaggtacccaagagttgggtgtttgagaagatcaaccaaattggcaaactttttgctagtttgaccaggaaaaaaagtagtgcaagtaattaaraaccaaaataaaaatagagacataactactagctttatagaaagaggaaagaatgttaagagaatgctaagaacaattgtacagcaacaaatagttaacctagatgaaatttacaaaatcctaaaaatatacacattttccaaactgactcaaaaggaaataaaaaatttcatcagacctataacaattaaagatattcaataagtaatctaaaatctcctaaaaaagaaaagtccagaaccagatgtcttcagtagttaatcatgacaaatatcgaaaaaagaaaaaaaaacttatcaaactgttaccaaaaatacttgataataaagagatattttaaaattcagttcatgaggctaacaatgccaaaatcagataaaaacatcacaagaaaaggaaaacatggaacaatatcccttgtaaatacatatgcaaaaatccttaggaaaacattagcaaaccaaatcaaacaacatataagaactatacactatgaccaagcag

SEQ ID NO: 773380 - DNA, 495 bp, Homo sapiens
attcaagaggaaacttggctttttctgaaaacatgtggttatatgggttcacaaagagatttttctgaaactggatcttttctttaaaagggaagtagagcataaaagtttggataattttcagcctgaccatgaggtagaaaagaaaaaccaattttctggggagaaatacaggccagctgcagaaatttgcataagatgaggagtggaaatttaatagccaagacaatgggaaaaatgtctccgggrcatgtcagagatctttgtggcagcccctctcatcacagatctggaagcctaggagggaaaaatggcttcacaggccaggcctagggctccccctattctgtgcagccttgggacttggtgccctgcttcccagctgctccagcttcagccattgttaaaagggtgcaaggtacagcttgtgccattgcttcagagagtgcaagcccaaagtcatggtggttttcacctagtgttgagcctgtggat

SEQ ID NO: 773381 - DNA, 632 bp, Homo sapiens
taactttttttttttttttttttttttttacaggctgttaggcagaagaggctttccttttcttagatgaggctttggacttggacctttggttaatgctgaaatgagttaaatgagttaagattttgaaggactgttgggaaggcatgattggttttgaaatgtgaaaagtacattatgtttgggagagcccaggggtaaaatgatatggcttggctctgtgtccccaaccaaatgtcatctcaaagtgtaatctccatgtgttaaggcagggaccaggtaggaggtgattggattatgagggtggtatmccccctgctgttcttgtgatagtgtgggagttctcatgagatctgatggtttaaaagtttctcctgtgctttctccttttctcctgctgccatgtgagatgtgcattgcttcccctttgccttcagccatgattataagtttcctgaggcttctccagtcatgtgtaactgtgagtcaataaaatctcttttatatttataaattactcagtctcaggtagtatctttagagcagtgtcaaaatgaactaatacagggagatattgctacacaactatcagaagaactaaaatacaaaattctaacaatttaatgtgctga

SEQ ID NO: 773382 - DNA, 566 bp, Homo sapiens
ttttgaaattcatatgctaggcagacattccagatgaaatacagagaattgttaaaaacccaaattgttagatgatctctcacctttttgaggttagaaagggtacttcctattttgaattttattatgtagcattggggacatggataaattatttaattttattgagtctgaatttttcacgataaaatgaagatgtttcagtaatttctgtaatatcttgcaattctaraactccacacttttataatatatcacttgcataacttattttaattcacagtatgtaacggaagtaattgtttgtaaacatgcctattattatatttttagatcacaaagataaggacttgaaatttaccttaagtgatttcttgatttattatgaagaatcaaagtgcttattcactggaataaagagagacatgcaggttttctcaaacactttagacagattaaatatattaaacttaaatacttccttttatttaaaattttcttttaatccacttaattttgtgtttatctagtgtctagtgggagtcaaaataataataaactactaa

SEQ ID NO: 773383 - DNA, 611 bp, Homo sapiens
ctgcagttgaaaatgtaatggtgatattatactttggagctgtctttttggcagtttcttttgagtatatatttacacagtgattctgcaattaatctccacaccaaaaaataataaataaataaataaataaataaaacacttgtacaagtacacttatagcagctttgttcccaaaagctaacaaatgcaaaaccaataaaacaaaaaattttctatctatgagaatgaataaatgtgtgaataagtgtgtgatcatacaacaaaatactattcagcagcataaaataatgagctgctgatgactgaatcttgctacctaaagacacaatctgaatgaaaataagctaaacaggccaggcgtggtggctcacacctgtaatcccagcactttgggaggccgaggcgagtggwtcacttgagatcaggagttccaggccggactggccaacatggtgaaaccccgtctctactaaaaaaaaaaaaaaaaaaattagccaggcgtggtggcaggtgcctgtaatcccagctactcgggaggctgaggcaggagaatcacttgaggtaaaggttggagtgagccgagatagtgccactgcactccagcctga

SEQ ID NO: 773384 - DNA, 619 bp, Homo sapiens
gtgataacaactcactgaagcctcaacttcctgagctcaagtgatcctctcatctcagcctcccaagtagctgagaccataggcctgtgccaccatgcttaactaacaattttgtctgctttgtatagagacaaaatctcactatgttgtccaggcttgaacttataggctcaagtgatcctcctactttggccttcaaaacttctgggattgtaggcatgagccaccattctcaacccttttgtccattttcattgaaattttttttcttgttattgactagtttgagtttcttatatattttggatattagccccttatctgatgtatgatttgcaaacattttctctctacctgtagggtgtctctttactctgttaattgtttgatttgcagtgtagaaackttttagtttgatggaatcccatttatctatttctgcttttgccatctgtgctattagggttatatccaagaaatcactgactcgtctaatatcatgtagcttttctcctatattctctttaatagttttacagtctcaagtattacatttaagtctttaattcattttgaattgaattttgtatgagaagtgatataagggttcaattttatt

SEQ ID NO: 773385 - DNA, 550 bp, Homo sapiens
aagcgtgagccaccgcacctggccccatttctcagatattgtactgacccaacatctgcaaaaaaatttcataaagttctgaattttcaatcaagaatatctaaattttattttcattttggtgaaaaatgaatccaatcctctcctggatcctcaggagaagagactcctatccaaacactgctgtatgaaatcactgcccgcattcacgtttatccttgcgttgagctggtgctctgtgatcaacgcaaaaggacatttaactttttaataccgtgtttctcactttgtgggggcttgcayattttcccagttcttaagtttgggaaatggtggtagctacaacttccccactcagcacagtgacacccaaagtctgggcaatgcctggggccaccatctgtctcctgtgcttctgactctgctgaacagcttcagaacgtggagctggatccgaattgcagcgccggccctcgtgacagacccgggatgtctacgatcatttcctctgctgcctttcatatcactgaactgaaacgatcaggcctgt

SEQ ID NO: 773386 - DNA, 589 bp, Homo sapiens
ctttttttgagacgtcttgctctgtcgcccaagctggagtgcaatggcgccattttggctcactgcaatctacgcctcccgggttcatgccattctcctgcctcagcctcccgagtagctgggactacaggcacccgccaccacgcatctgtcatttctagtaaataatagagttaatggctgtacgtcattagttactcaggggcytgagaactctttgacatcccacagctagtgtccagatgacgaggggatcttccttgattgaaggaacaacttgcgacctgcatgttctggtttgataaattctacccaacagaatgaacaaatgtggatggtcaagcttggtctcgctatcaggggctgtgtacttggtgtggtttgagaatgtgggctcacaagcactctcatctatgtcctcatcagactttatacacatcctgctgcatgcacagtgctgcatgtacggtttccacaaccttctcaatttcaaatattttccagaacaagctctatttcaaatatttcctccttggatctttccagggacatctgaacttatgtatcacgggacctaattttcatctcg

SEQ ID NO: 773387 - DNA, 590 bp, Homo sapiens
acaccctccttgcaggtggagctctgagggcttcccagtgctgcaagcatgggtctcctttgcccctcaaacttacctgcggaatctttccatgccctccctaggtctagccccacctaggggtaggaggtcaaacttcaaagttctttccagagatttatcccagtatcttactctcttgtgctcctaagaggctctttttcctccccaaatcccgacattccttccctgctggtgctggggtcagggctaagtaaggttacaggctggctcaggaaatgttcctccgaatctgttgtgatttggccatgcccttggcctttgactctccaaaacccaaagttccrttcctctgccctcaggttcaggctcctccgtgactatctcccgtccaaacaaggaacggtcccagtggttaaaagaactggagaagggggaagaaatcaatgaagctgtcccaagattatcccaccatatgagccaatgcaacacagagtgaaaacagggacccaaagagagcacagagcagctgcaatgggaggtcagacaagaaatagaagcttcgggataatgacattcaaattgctctt

SEQ ID NO: 773388 - DNA, 635 bp, Homo sapiens
tattgttgagagaagtattctataaatgctaagttattgtcatagccttgtgttcatattttcaagactcttttagtttctgatacatagtatatacaatttaaaatttttatttagatagttctaatagcttaagtctacagtttttgcagttctgatctgccacctcattttttgtgtggtacatttctgactgagatattcatttttaatagaacttcatctttggaaatgctttargctttatatcctctttctttttttttaatgagtggaactactctcccaaatttctctgttttctttctatataaaagccaacttgtctttatatgaagttattggtacgcaacatttcttactctcaaaaactttgtaaatgttactttattatctttcatgctacttttgcaaaagacaagtttgaagttaaattgagttttgtttttttgtggtaactttagttttctgtctgtgtggattttaaaaattgctctcagttctaaatgttttctagaatatatttagatggagcctcttttattgattttgcacagcacatgattaaacctttcaatcccacatacaccagtttttttcccgtctctgtaaaagttctcttttctagcttttat

SEQ ID NO: 773389 - DNA, 533 bp, Homo sapiens
ccttcttttgctgaaactgccttacgtaatggttttactccttgaaagagatttgacggaatccattttatgccaagtgctgccctgcactgtttttgcaatatgtggtgtatgctgtggtgatcttgctgggaatgattataagtgtgtgtgtggtgggggagtgggtattacatgcattgctgaagagtcatcctggtgttcctcattcctcccaccttcccgtggtcattttaattacggggcagtgtccccgcaaagggaggaaactcaaagccgaaagcaaaattccaggcctgattttggcttttgaggttcctggtttttgaagccaggcctgacccgactttcagatggggtcagtcccgtcgctttgcagactgaccctggaaatytacaaaatgcagattttcctgatttcctcttctcttgcccagttttttttttttttttttttttttttttttaaagcctggattgtaaccagattttcttttttcccccttctcagctgtagatatgatatctccttt

SEQ ID NO: 773390 - DNA, 588 bp, Homo sapiens
gttgcccctttttttcctccttaaaacaacacatgttctgaaagaactattgacactggtctctacttcctcactgccacccctgcttcctggcttttgcactgcccagccgcagcctcacagagacttctggctacccatcatcttcctggcccaccctgctgcctctgttcctgccaggggcacctccgagagggggttggccctgcgatcctcagttttcctctttgggcatggcttctcctcaggaakgtgcccttccacctcattttccccagcacacatgcctcagtttcctcctgggacctgatggctcccagatcactatcttgggcccagactttctggagctgaatctccagttgcctcggagcctcctcagactcagtgtggccagaatggtggtcctggcttcccctcgggcctgcccttctgcctccttctgcaccctgggatggtcatcagcttttctcccactgctgccctgtatgcagggaaggcctgcctgtggctgtatctgtagtacttcttgaatgtgtttccttctctccctccccacagctacttactgccttggttcagggacct

SEQ ID NO: 773391 - DNA, 613 bp, Homo sapiens
atcatgacagtcctctgactttgttcttttccttcaatgttttgttttatttttaaatttaatttaatttactttttttgagacaaagtgtcactctgttgcccaagctggagtgcagtggtgcaatcttggctcactgcaacctccacctcccaggttcaagcgtttctcctgcctcagcctcccgagtagctggaactactggcacgcaccaccatgcccggctaatttttgtatttttagtacagacagggtttcaccatgttggccaggatggtcttgaactcctgacctcgtgatctgcctgccttggcctccctaagtgctaggattacaggcgtgagccactgagctcagcccttctccttcaatatttcaayattgagttggttattctggatctttattctctccacgtaaactttagaatcagtttgttgacatccacaaaataacttgctgagactttaattggaattgcattgaatttatagatcaatctggggagaactaacatcttgacagtataaaacattcctatccaaggacttgaaatatctcttcatttatatagttctttttaaatttctttcatcagagttttgtagttctc

SEQ ID NO: 773392 - DNA, 469 bp, Homo sapiens
atttaaagcttttgtgtgtcaaaggagttcatcaagaaagtgaaaagacaacacacaaaatgggagaaaatatttgcaaatcatatatctgataagggacttttttccagaatatataaagtactcttctaaatcaataataaaaagacaacataatttttaaaatgaccaaataacctacatagacatttctccaagaaagattgtatagttatcagggaaaggcaaatcaaattcacaataagatgctactttatctccaccaggatgaccagaatcaaaaagtcagagaatatgtctygatgtggatatagagaaatcagaaaaccctctgattgtatattaaatgtaaaatgatgcacactctgtggaaagcagtctgacagtttctcaaacaaatatagatagagttaccatatgaaccggcaattccactcctaggcaaatacccaagagaagtgaaaacata

SEQ ID NO: 773393 - DNA, 500 bp, Homo sapiens
gggcacctcgaaagtttaggataaatgccaaatgttagcctctgctgcccaatgtctgcttcagaattcaaaatcaaaccagtgttttctcttgtctgtcaactgtccccagctagcactgacattcactaaataaaccacagtaaaatgcggggccaagcccagccccctcyctgttttccaagcctcaccctgcagccccctggccagcagctctcccatgtccaccatgagcccatccagagctctatgctcctgcttcactggggtctgctgaggacactctcaagacaccaagaagccaactcccatccacaattgtccagaaaggatcagaccaaggagctggttcctgcagagccctccctcactgaaactccacgccacaaatcacagcaggaggcccaggaggaaaagcatttggcaccacgctttatggaaaggactgtcttcctaagtaaagccacaaaccccatctaggccttggaaagccctgtctc

SEQ ID NO: 773394 - DNA, 594 bp, Homo sapiens
ctttggtttttcaatagtaagacaattaatgacttaactttgatttatgcttaactttattttaaattttagcagtattcactgatcccttccagttgcagcaacagccctagagaaagaaaatgaactcttgtagtattttggcaataggagaggacatttgtgttacaacttaacatctctctctttttttttttttgagatggattctcactttgtctcccaggctggagtgcagtggtcctagctcagctcactgcaacttctgcctcctgggttcaagcaattctcctgcctcagcctccctagtagctgggattacaggtgtgtgccaacatgcctgggtaatttttgtatttttagtagasacagtgtttcaacatgatggccaggctggtcttgaactcctgaactcaggtgatccacccgcctcaacctccctaagtgctggaattacagacgtgagccacagggcttggcccaatctcttcttatttactaaatgcatactttaagtatatcatccccttgtgttgaggtatgtatagtgccatcttcttcttccatgaaagacgcatcctgtcagtggggagt

SEQ ID NO: 773395 - DNA, 594 bp, Homo sapiens
ctttggtttttcaatagtaagacaattaatgacttaactttgatttatgcttaactttattttaaattttagcagtattcactgatcccttccagttgcagcaacagccctagagaaagaaaatgaactcttgtagtattttggcaataggagaggacatttgtgttacaacttaacatctctctctttttttttttttgagatggattctcactttgtctcccaggctggagtgcagtggtcctagctcagctcactgcaacttctgcctcctgggttcaagcaattctcctgcctcagcctccctagtagctgggattacaggtgtgtgccaacatgcctgggtaatttttgtatttttagtagacacagtgtttcaacatgatggccaggctggtcttgaactcctgaactcaggtgatccacccgcctcarcctccctaagtgctggaattacagacgtgagccacagggcttggcccaatctcttcttatttactaaatgcatactttaagtatatcatccccttgtgttgaggtatgtatagtgccatcttcttcttccatgaaagacgcatcctgtcagtggggagt

SEQ ID NO: 773396 - DNA, 608 bp, Homo sapiens
tttacctatataacaaacctgcatatgtacccctgaacctaaaataaaggttaaaatacatatacatatataagaaatatatacatgtatatgtgtatatatgtgcatataagtatatatttttatatgtatatattaaaaacatacatatatgtatatatttttaactttttttacatatatatgtatataaaatcattggtgcctttgtgtgtggggatgggggattctttgtgaactcacaatgacatcacgattagaagcccatgtttttctcatatgaaattgtattttacataatacatactatawacttaaaaatatcaaaataattgtccaaaaaatcaaaagttagccaggcacagtggtgtacacttgtggtcccagccactctggaggctgaggtgggagaattacttgagcccaggaggtcaagtcattctgtgagctctgattgtaccaccgtactcagcctgggcaacagtgagaccttatctcaaaaaattaaattaaattaataaaataaaataacaacacatatgaaaataactatggattaaaaagctaactataattatgctaaacactttcaaaagataaagtaggct

SEQ ID NO: 773397 - DNA, 643 bp, Homo sapiens
tcactagggatttccctactatatatcttatggacattatcatcattacctaacttaatttctcttcatgaccctccttccttctggaaatacttttccttgcctttcatttttactctcttggtagcacttctccatctctaaccactccctctccatctcttttaaagtctctcttatttctcccagcctttaaatattgttatcccacaggaataggtataagccttcactcttttcccactggacacactctctacrtgaccactgccttttacataactttggttagcatctttatgctctggatttccgaatatatatccccagccctgattcctactcctgggatccaggccacattgttaactacctactggtcatctccacttgaattaataaaaataaatatgacaaaaataaaaatgattcatctttcttatatacatataaaacagctttattgagatgtaacctacatacaaatcagtggtttttaggatattcacacaattgtacaatcatcactgcattttctttaccccggaaaggaacccagtactcacttctccattttccctcaattctctcagccataggcaaccactaatctactttctctatgcatagatttgcctactcc

SEQ ID NO: 773398 - DNA, 643 bp, Homo sapiens
tcactagggatttccctactatatatcttatggacattatcatcattacctaacttaatttctcttcatgaccctccttccttctggaaatacttttccttgcctttcatttttactctcttggtagcacttctccatctctaaccactccctctccatctcttttaaagtctctcttatttctcccagcctttaaatattgttatcccacaggaataggtataagccttcactcttttcccactggacacactctctacatgaccactgccttttacataactttggttagcatctttatgctctggatttccgaatatatatccccagccctgattcctactcctgggatccaggccacattgttaactacctactggtcatctccacttgaattaataaaaataaatatgacaaaaataaaaatgaktcatctttcttatatacatataaaacagctttattgagatgtaacctacatacaaatcagtggtttttaggatattcacacaattgtacaatcatcactgcattttctttaccccggaaaggaacccagtactcacttctccattttccctcaattctctcagccataggcaaccactaatctactttctctatgcatagatttgcctactcc

SEQ ID NO: 773399 - DNA, 634 bp, Homo sapiens
atttttctacaatttattgaccaatatgtggataattcatagatgtactattctggcttcagttagatgggcccctatattttggagtagtgctaccagcaggcttctcactgctttgggtgtgccatttactccttgctcttttacaacctgtgtacccaaacttggataaagaaaagatatgccttttctggcacttgagcccatctttacatttccatctctaggattcttaggcatctccacagatattccgggattgcagggcagaataagacaagtgagacttcagttctgaacaaggcaggaacttgttcagacactttgtgctcarccagacctagtgttcattccctgtttaccacctttattctttgtttttttgggtgctccactttctgcttggccactgtttttttgcagccctgagtttctcaaatttcatttgagtaccactgtcaatattttgccatatccatatttttttttgtatgtatgtatgtatttatttatttttgtcttttttttttttttttttagtatttattgatcattcttgggtgtttctcagagagggggatgtggcagggtcataggataatagtggagagaaggtcagcagataaacacgaga

SEQ ID NO: 773400 - DNA, 595 bp, Homo sapiens
ccacagggctgggattacaggcatgagctactatgcctggtctttcttagtatcttgacaaaagagattccactgtcctcagcttctttttgatttttagggaattctttttcctttgatttaattttaatttaatagcatatgcagcatttacatggttcaaaattcaaactataaaacagtgttcatttaragaaattcagctttcttctctcttcttcctcttcttcccttgtgggtaacattaatttttttaaattgtgctaatacaaataacatgacatttaccatctgaaccatttttaagtatacagttcagtggtattaagtacattcatattgttgtgcagctatcactattattcatcttcagaactccttgtcttgaaatattgaaactctatacattaaacaataatttcccatttcccttcaccccctgctcctgtaccacttgctgtctctgtgattttgactactttatgtaccacatataagtgaaatcatccagtatttgtctttttgtgtttggcttatttcatttagcataatgtcttcaaggttcatccatgttgtagcatatgtcagatttccc

SEQ ID NO: 773401 - DNA, 654 bp, Homo sapiens
aagccactacactccagcctgggtgacagggcgagaccttctctcaaaacaaaacaaaacaccacagtggggccgggcacggtggctcacacccgtaatcaaagcactttgggaggctgaggtagcaggactgcttgagcccaggagcgagacttcatccctactaaaaaatttttaaaaattagtcaggcatggtgacgcatgactgtagtcccagctactcaggaggctgaggtgggagaatttcttgaacccaggaatttgaagccagcttgggcaacacagtaagacctcatctctaaaaaaaaaggtaagaaataaaagtagaggttacatactgtatgattccaactatacaacattctgaaaaaagcaaaactagagagagtaaaaagatcagtggctgctggggttaggggtsggggactggggaagaattaacaggcagagcacaggggatttttagggcaatgaaactactctgcatattattaaaatagcaaatacatgtcatcatacattggtccaaaatcatagaacgtataagaccaagagcaaacataaatgtaaactatggacttgggaatgataatgatttgtcaacacaggctcatcaattgtaacaaatataccactcaggtgtatgatattgat

SEQ ID NO: 773402 - DNA, 423 bp, Homo sapiens
aagctggaaaatagagacatgaaaggcaactgttaatagcagagtggaaaaatggaacctaaatacctacagagggacagttagaaatttgtatttccacccacacatatttcacacagtcaggtgttctcctctccctaactacttacaggagacaaaaaggttgtagagagaagaagggtgtgtgtgygtgtgtgtgtgtgtgtgtgtgtgtgtgtgtgtgtgtgcgcgcgcgcgcgcgcatgtgtaaaatataagataaagtgctgcttaagagcttttttttaagattatacaaagaaaaatcagaggctgtccactggagccattatgtttgaattacttttgtgtacccttggaattccgtggtctttctatcaactagacatcctccaagctgcagcagctgagtctgcctatgtt

SEQ ID NO: 773403 - DNA, 615 bp, Homo sapiens
aggtttttaacttctttgccatgggttcgaactttctcctttagctcagagtagtttgatcgtctgaagccttcttctctcaactcatcaaagtcattctccatccatctttgttctgttgctggtgaggagctgcattcctttggaggaggagaggtgctctgatttttagagtttccagtagctgaaactggatcccttccttacactttatacaaaaattaattcaagatggattaaagacttaaatgttagacctgaagccataaaaaccctagaagaagagttagrcaatactgttcagtacatacgtatgggcaaggacttcatgtctaaaacaccaaaagcaatggcagcaaaagcgaaaattgacaaatgggatctaattaaactaaagagcttctgcacagcaaaagaaactaccatcagagtgcacaggcgacctacagaatgggaaaaagttttggcaatctacccatctgaaaaagggctaatatccagaatctacaacgaactcaaatttacaagaaaaaaacaaacaaccccatcaacaagtgggcgaagaatatgaacaggcacttctcaaaagagacatttatgcagccaacagacaca

SEQ ID NO: 773404 - DNA, 622 bp, Homo sapiens
ggtgaggcagctcataagagacagccaaactggcttttatgcagattcatgctcaaaataattagcccactccttcaataactcattaatccatgaatggattcatccattcatgaatcagagccctcttgacccaatcaccttccaaagatcccacctctcaacaccgatgcactgggaccaagtttccagcacactttggggatgcattcaaaacacrgtacatatgatagaagtaaaatatgtgacaataattacacaaagggcaagagggaaataaatggagttcaagtatggtagtagtcttgcattatttaggatgcgattaagttactaattttagatagactgtattaaatcaaaaatgcatagtgtaatatttatgatagccactgaaaaattaataaaataatctgtaacaaataggccaataaagaaataaaaatggggtaaggaaaaatttttattaatctaaaagtagagaagaaaggaggaataaaggaataaagaaaagatggggcaaacaaaaaaaatagttaaatagatatctgaattctactgtgttattaatcacattaactgaacaacaaactgaaaaatctaggaagaatacaaaaactac

SEQ ID NO: 773405 - DNA, 626 bp, Homo sapiens
aaaatatataaagcaaaagttgacagtgttaaagagggatcaaacatatatatatttagcaactgatgaagtgctgagaatagaatgttggacagggaaacaaggcctagcactgaaggagtctactgtgtaacgtaataatgtattaacaggtaaacatttcctatcacatttgaataaaagtactgttctaaacactatcatcattctaattttaaacagaagttgaagaagtctaattgagacataatgtcacttgactaacaattggcaaagtcaggataagaagtaagatctttctgacttaagatragttttaatcattatatcaacattcaaattccagagacaattctcttttcaattgggaatgtatgtagaatggtcagcatttgatttatttaaataagggctttaaaaaagtaactactatctgttgtcaccatgattttggtataaaaaatatgaaggatataatttcaggtgaaaatatagcaatccttcgccccaaaatgatatttgtcaacattttacagacatgtataaataaataaataatttctctccttactttatcacagaccagtgaaaagtttatcacagatcaacactaattcattttctgg

SEQ ID NO: 773406 - DNA, 375 bp, Homo sapiens
atgtgtcccgaggcacaagcacacacagacggacagagatacaaagagagggcgacggaaagagcgggggggggggagagagagagagagacgtaagagatagaagtgggcacacagacgcgcgcacgcacgcacacaracacacacacacacacacacacacacacacaaacacacacaaccaagacgcacacagacatacagcaggtaacacccacccccaggctgcccctgaagctgccgggttctgctctccgagactacgaagccaccggtgagacagcagcccacggacaccctggtagacctgtcctccacatcacaagggcgccactattggggagactcacccgcacaccgtccccgcacgcctca

SEQ ID NO: 773407 - DNA, 374 bp, Homo sapiens
atcatgcgagaatgtcaattgcagtattgtgttgtaattttaaaaaaaaactctaaatattcatcagtatataactacaaataaaaatagttggactatcatgcagactacaatgcctctattgtggcataatagttaataatacaatctctgagagcagaatatctggatttgaataatttgctctccctstaaatgaccttgagcaaagtacttacaatcttttttctcttctgtaaagtggagataatagcattgccaatttattagcttgtcatgatgattaaatgagataatccatgtatcacaccaagtacccactacgtaataagcaactaattaaatttgactaatattaataatttcattattat

SEQ ID NO: 773408 - DNA, 547 bp, Homo sapiens
aatgaagtccaggctgaggaggtctcagttggagataaggaacttaatgggaactggagcaaaggtcactttagttaggcattagcaaaaaggttggatgcactgtgcacctgccctagggatctgtcgaattttgagcttgagagtatctcaagttctggtgggtatctggtggaaaaaatttctaagcagcaaagcattcaggaagtaatctcgctacttctaacaaactattttggtgtgtgtgagcaaagaaatgacctcaaactgaaacttatatttagaaggtaagcagagtgtagaaacttgaaaaatttgcagcctggccatgtggtagaacaaaaagtccattttcaggagagaarttcaagcaagctgcagaaacttggttaactaaaaggaaggcaaatgctgatagccaggaaaatgatgaataccttccagggcatttcagagacctttgtggaagctcctcccatcacaggctcagaggacaacgaaggaagaatggtttcgtggcccaggcctagggccccactgccctgtg

SEQ ID NO: 773409 - DNA, 569 bp, Homo sapiens
taaaaatgactagatgcattgcaattagctttaaaaagatggaacagcattgtaaggacagaccatgaatctaagcccttaggttgaatacttaggttgaataaaattgttggaggaagtggatatttgatgtacgtaatgaaagggattcttacttggcaggtattattagaagaaaaaaaaaagagagagagaaagttgaaggagaggggaaaactgccacagcaggttaagcaacttgctttaaaataattgggattagtaagtgtgcaaagatagaactggtgatgaaagagtgagactggaattaggaattaatctgtaacattaatgttgcaggttgggtcctggttatgagactragcggatgctcattctttggagctataactctgaccagtgccacattaacagatttggaaaatatgagattaactatgaaggtacagaaaataaaggtgttaaaattatttctatattttagatctaattgttaataatatagtatatacacatacatactatattatatatatattacatatatataataacatatatatgcaaaa

SEQ ID NO: 773410 - DNA, 591 bp, Homo sapiens
tttttcagcaaaaactattaatagtcatttttcaacataatgtaaaatatatttgagattgataaatattttagaactcaagtgtaagaaagccattaagggaatcccacaattttcattgtttctaaaacctaatataatttaagattatgaacagccttctttctcagcagaaaaacatatcaccaacccactacattaaaaaaatgcattattccaatcaatcttgttaatataccatagaatattgaattttttaagaaaattcagaactttaaaaataaatactaaccataatagctcaattaaaattatctctatattcttggaggttttcaaatgccatatctaaaaataggatatagtaaggtatatycagggataaactagctgttaaaaaataatttattgagacctgttattattggctgagtaaacttctcttatcttccaaaacatgttccattatttcataagatctagaaatgataccatgtttgaaattggttgaaaggtttccctattgacctacttataaatgggttatttacatattcagggtaattacttgtgcttaaaactgttttcaag

SEQ ID NO: 773411 - DNA, 585 bp, Homo sapiens
tccattagcttttccactgagtaaaataaaataaaagtccttcccattacatacgtgctgtgatccggccggagctccctgctgcaggtgcagctccacaaggacagaaacccctgcttctctccagccgtgccaggcctcctccttgacctggggacgctacactctgtcatgccttcctgcctttgcaaaagtggatctctttgcctggaaagcctgtctccctcttctctgcctagcaaatattatttctctctcagactggcctcaaacatccatcgctgcctctgagaaaccattttcatttccactcagaaaggtggtcactccctcttctgcacatggatggctgattacatggccagatcctcaggcttcaaaaccacatcttacttcacttattatccttttcgtttgcgtcagagcctcatctagtaarttctgattaccccgtgcaatagacgttgatgatcactttgttattgttattattaagtgctacactagatgttgacataggaatatgtaagaaccaaatttggaatcagaatgctgaagatagcatcctgcctttgtcaccgcaaa

SEQ ID NO: 773412 - DNA, 503 bp, Homo sapiens
gcagtgcttcccatgtaatttaatttatcaaatacttctgtctctctcttttttggatactataggggcccttagtagctctctccactgggaaaggctgttatcgtctttgttttaaactataaactaagtttctcccaaagttagttcagcctactcccaggaataagcaaggacaggaataagcaaggaggttagaagcaagatggargggccaggcacggtggcttacgcctgtaaccccatcactttgggaggccgaggtgagcagatcacaaggtcaggagttccagaccagcctggccaatatggtgaaacctcatctctactaaaaaaaatacaaaattagtcgggcgttgtggcagatgcctgtaatcccagttacttgggaggctgaggcaggagaatcgcttgaacccaggaggcagaggttgtggtgagccaagtttacgccattgcactccagcctgggcgacaagagcaaaacaccacctctaaaaaaa

SEQ ID NO: 773413 - DNA, 545 bp, Homo sapiens
ctgggtgatctcacctcccctgggtgatctcacctcccccaggtaatcttgcctcctctgggtgacctcccctcccctgggtgagctcactaaacatttgtccaacctgaggtccagccctggctaccatccctcctgcttactccagaatcctgtggtctctgcagctttgtggatgctggggatgtggggccaacaccatggtctctagtggacattccctgcttcctcctgggttgtgccgggggaggggagatgctgtgggctcctctctccaggactggccctgggacccagtctggtgtgtatgtagggagtggggacggacttcctgactcccrcagtctccatggggtagcccaccacctgagtcaccacagcccggtctatggtcccatgtggaattttccgactgttgccgccacccccggcgtgctgccctccgcggtgattcacccgcttgcccgtctgctcacagcctcacccttgcttccctcagtgttcccaaggtgctgcgcaaccccaactccctggcctggccaggg

SEQ ID NO: 773414 - DNA, 625 bp, Homo sapiens
gggctccctccctgggccacagcctcacagcacccagcgtcccagccaggtttggagcaggggcaggggtctgcagcccccagaggtgtcacacccctactgcctgcctctgtcccccacttctctggccttgggaccctgtcccaaggcgatgctgacacatctgacagccaggccgccatgtgtcccagcccgggcagccagtgggtgggtggccaaggcagcctgggcaggaaatggcaacgcggtggagggccctggaacattcctccagcctgcacactcgctggkccctctggcagctggtccaggacatgcctctgtcggggactgggctcccacaccccgacaccccctgctctccaggcccctgtgtgtacagggaaggctttgagcacacggctccaaactgtgggtccccattctcccctcgtgccccacctaggtcagtccctgcgtctgcccccactcggtgctgctagtgccagcagtatgagggtttgcattggcttttggccaaaccctggaatgtgcctgctggctgcacggcagctgttcttggaacagggcgacaatgcacagactgtctctgagacgtgggcggatggggtgcagactgcccgga

SEQ ID NO: 773415 - DNA, 600 bp, Homo sapiens
tactcagtgagattaacaaggttgtggaataacaagactgatatacaaagtccattgtgtttctataaaatggtaatcaactatcagatattgacattaaaaataccacttcctaactgtataaaaatagacaatacttagaggtcaatctgacaaaagatgtgaaagacctccaaattgaaagagtaaaaaatccttggaagaagtggaagaagacctgaataaatagggacatccaaggttcgtggattagtaagttcaatactgttaagatgtcaactctccctgcatttatagaaattcacaggtccattctaaaacacatatggaaaagcagaggaggagaagagctaaaacaatccggaaaaagaacacaattgaagagctaacattctaagaaytcatataagaccagtgtaagcaaaacttgagtgatactggtgtaaaaatattcaagtagatccaaaagaaaacggtccagaaatcagcttacacacacagactgatgactttttttcaggcagggtctcactctgttgcccaggctggagtgcagtggtgcaatctctgctcgctgcagcctcaaattcccaggctcta

SEQ ID NO: 773416 - DNA, 486 bp, Homo sapiens
taccttcagcctgcggcaggatgtggggcggggggtacggagcacggatggggctggggaggggttgcaggtgaggcctgcggacccctccttctcagctccagctcccttcagccgctgagctcagagctccgarcggccctgctgctcctgggccagccgctcccgccctcgtgcctgtgcccaggggcactctgtggccgctgctggcttgaggcggagctcctgggaaggtgggggcccttcctcgcttgccaacagggcagcggccactgggaagcccccggctgcaggcacgaggggagagcgggggcaggaggaaggctccaggccccctgccgccagcatcctgagcgatccaggtttttgccatgcgagaggttcacctcaccgtgcaacgcacacccacgggcctggcccagggcggacccggctacttacaacttggccagcatctgcactctggcccggacattcatgatctag

SEQ ID NO: 773417 - DNA, 618 bp, Homo sapiens
ctgcatttttaacaatttccacaggtgattctgatactcacccaaggatgagaaccactgatctattttttacgaactattttatgttatagatacttaaatggaacctcccattttcttcttagaatcccccttttctttgttgattgtccacattctttcttcttcttcttcttytttttttttttttttttttttttttgagacaaagtcttgctctgtcacccaagctggactgcagtggcatgatctgggtcactgcaacctccacctcccaggttcatgcaattctcacgcctcaaccaccggagcagctgaaactacaggcgtgcaccaccacaccctgctactttttttatttttggaaaaaatggggttttgccatgttggccaggctggtctaaagctcctgacctcaagtaattcacctgcctcagcctcccaaagtgctgggattacaggcatgagccaatgcgcctggccaagggtgaccatattcttgatgagccacctgtgtacaatctgaattcttttcttgtttaactcattggtctgtgcctctgacagtaaagttgagttatttcacttctgtgaaagccaggctgcagttatctttga

SEQ ID NO: 773418 - DNA, 591 bp, Homo sapiens
taacttgcatagatctgaaggacactatgcttagtgaaaaaaaagccaatatcaaaaggtcacataatatattatttcatgtatataactttaataaaataatgtacatatagaaaacaggttagcgatttccagaggttagtgatggtagggaaatatgagatgtatgtgactataaaatgtgaggaagatatttttagtgatggaagagttctgtaacttaattgcaataatggtcacattaaccaatacatgtgataaaattgacatagacctacacattcatattgtaccagtatcgatgcctggtcttgatattgtactaaattatacaagatgtaactattggaagaaactgtgtagaatggcacatgagacctctctgtwtttaaaacttcctatggatctatgatattttcaaaataaaaagctaaaaaatgttaggtgttcaataaataaaacagtagtaactatattttatctaattcttaccatataaagatgctttacacacattaactcatacaattcaatctatagtaggatcatattgatgccattattattactaacttatagcctagtagctcg

SEQ ID NO: 773419 - DNA, 635 bp, Homo sapiens
ctaacctcaagtgatccacccacttcagcctcccaaagttctgggattacaggtttgagccaccacgcctgcctgtaatagtcttctgacagtcactctatcatggtttttatttaactctgaattacagaaaattctactactatgacttatgctaattattaattataggttaacatttctcatataaagacattctgaaggagggaatccagagcaggtattttggcttaacatcrcattgataacttggcaatctttattttcctacttcactaattttagcctgtgattttggttgctatgatcacaggatgattgacctatattcagtaacatgtttcgattaatttaagaaggagggaaaacaccaaaagaagataggtcctccatggattgctttgcataactaatcatcttattggaagacatacataatatgggaaaatatatactttatctttactatctcgtaaaggaaaacaaggacattaatttgtaaatatcttgtgagaagtccattcaatgtgctctatagttattaatcaaaatgctatccttttaattagaaggagttgagtcactttgagattcaattgagcactagagtgaaatgaaagtcactccttagtaaa

SEQ ID NO: 773420 - DNA, 634 bp, Homo sapiens
atgagtactgacataaaaaaactaaaataaataatagtattattttatttcctctattgatgtaaataagtaataaaagactaaagcgaaacatgcaactcattaaagaagggcctggaataaggtttgtgagccaattaaagaagtgtttattctacaaataaacgttcaagagaacatgaactatagttgtggctgtatacataaaaagtagtagaccgattcaaggaattacatgaataacaagattattaatttaaaaattatatcaattaacaaggttyggaccttcatttatatggatagtgaaggagtgggctgattcaaattaggaatgctccaagttttgaacttgcattcctgagaagatgatgatctaatttctgaaatatcgatggcagaaaatatatgaaactgaatacaacacactttttttttacattctttatttcaagccttgacagatctgccatatatagataactagcaatgagttacagttattcatttagacctgtgtctgcttgcatgttattggatatagcattgccacattatgtaatggttgttcagttttcctcatgagtctgtgagtttgaaaattttgttcaacttcacaaaatctgaaccaagt

SEQ ID NO: 773421 - DNA, 634 bp, Homo sapiens
atgagtactgacataaaaaaactaaaataaataatagtattattttatttcctctattgatgtaaataagtaataaaagactaaagcgaaacatgcaactcattaaagaagggcctggaataaggtttgtgagccaattaaagaagtgtttattctacaaataaacgttcaagagaacatgaactatagttgtggctgtatacataaaaagtagtagaccgattcaaggaattacatgaataacaagattattaatttaaaaattatatcaattaacaaggttcggaccttcatttatatggatagtgaaggagtgggctgattcaaattaggaatgctccaagttttgaacttgcattcctgagaagatgatgatctaatttctgaaatatcgatggcagaaaatatatgaaactgaatacaacacactttttttttacattctttatttcaagycttgacagatctgccatatatagataactagcaatgagttacagttattcatttagacctgtgtctgcttgcatgttattggatatagcattgccacattatgtaatggttgttcagttttcctcatgagtctgtgagtttgaaaattttgttcaacttcacaaaatctgaaccaagt

SEQ ID NO: 773422 - DNA, 588 bp, Homo sapiens
tccttgatgctctatcaatttttgctttacttactgccttatctacagtacacagcccatgtagccagtctgctgaaagttagacttgcaggaagccagattactacgtccagtaacaatcgaggaagctaaacaataactttttttttttttttgagatgaaattgggcacgatcttggctcactgcaacctccgcctccccaggttcaactgattctcctgcctcagcgtcccgagtagctgggattataggcatgcaccaccacgcccagctaatttttgtatttttagtagagatgggatttcgccaggttagccaggctaactcctgacctcccaaatcctccctccttcctgatccacccacgttgaactctgaaagkgctaggattacaggcatgagccaccgcacctggtcaaaacaataacttctatcacaaccagtccactactgccagaacgtgatgaataactaacagcttccctaatttttgtccctgcttccaacttaggatcacccagggaaagccaaagatgcacccatagtcaaccacatagtaccccctatctctagttagcccaccttc

SEQ ID NO: 773423 - DNA, 588 bp, Homo sapiens
tccttgatgctctatcaatttttgctttacttactgccttatctacagtacacagcccatgtagccagtctgctgaaagttagacttgcaggaagccagattactacgtccagtaacaatcgaggaagctaaacaataactttttttttttttttgagatgaaattgggcacgatcttggctcactgcaacctccgcctccccaggttcaactgattctcctgcctcagcgtcccgagtagctgggattataggcatgcaccaccacgcccagctaatttttgtatttttagtagagatgggatttcgccaggttagccaggctaactcctgacctcccaaatcctccctccttcctgatccacccacgttgaactctgaaagtgctaggattacaggcatgagccaccgcacctggycaaaacaataacttctatcacaaccagtccactactgccagaacgtgatgaataactaacagcttccctaatttttgtccctgcttccaacttaggatcacccagggaaagccaaagatgcacccatagtcaaccacatagtaccccctatctctagttagcccaccttc

SEQ ID NO: 773424 - DNA, 517 bp, Homo sapiens
tacagtcacagctcactgcagcctcgacctcccagggctgaagggatcctcccacgtcagcctcccaagtagctgggactacaagagtgtgccaccatgcccagctaacttttttttaatttttattttttgtagaggtgggattttgccatgttgcccagggtggctcaagtgacccacccacctcagcctcccgaagtactggaattacaggtgcragccatcgtgcctggccatgttttgttgtttttaaatagacttaattttttcaaacagttgtaggttcacagcaaaattgatgagcagcaggtactgagttcctatacatccctgtcctcacacccacacagccttcccaactgtcagcatcctgtgcagggtggtacatttgttacaactgatgaaagctggctgacgcaccatcacccaaaatccacgtttacacgagggttcgcccttgatttgtacattcttggtttagacagatgagtaaggacatgcacccaccattccatgt

SEQ ID NO: 773425 - DNA, 517 bp, Homo sapiens
tacagtcacagctcactgcagcctcgacctcccagggctgaagggatcctcccacgtcagcctcccaagtagctgggactacaagagtgtgccaccatgcccagctaacttttttttaatttttattttttgtagaggtgggattttgccatgttgcccagggtggctcaagtgacccacccacctcagcctcccgaagtactggaattacaggtgcaagccatcgtgcctggccatgttttgttgtttttaaatagacttaattttttcaaacagttgtaggttcacagcawaattgatgagcagcaggtactgagttcctatacatccctgtcctcacacccacacagccttcccaactgtcagcatcctgtgcagggtggtacatttgttacaactgatgaaagctggctgacgcaccatcacccaaaatccacgtttacacgagggttcgcccttgatttgtacattcttggtttagacagatgagtaaggacatgcacccaccattccatgt

SEQ ID NO: 773426 - DNA, 605 bp, Homo sapiens
aaaaaaaaagagatctatgagaagtctagactttaatggttacgagtagtgctgtaatttcatgtaaaaaatcctgtccccgatgcctgtgactttgatacataaatatattttgaagtctgtgaagtgaataaatgactgaaaaatggaaggaaggtgtgttctgacaggtccaaattctgactagaaagaaaacaggactttgacttgggatatttaaaatctctctgcttttcagacaaygccaacagccctgaagagatcactaaaagcagaaaagaatacaaaagcaatatgttgtaggaaaagtaaatttgtactcttgattagcccctcatggtcactcagggcttcggcatctgtcatttcacgtattgtccttactcacaggaactctgaggtgtggtggtttaaagcagtgtcctctccactttatggatggagcacaggaaggcaaggcaacgttgtcacctttatagatgacactcactgctaggtcttctgattcaaaatctaaccacttttcaaccgcatcccgttgtagttgtgtagtatgggagaaagagaaatggaataaatgaaaagtgtttgaacggcatgtagaa

SEQ ID NO: 773427 - DNA, 597 bp, Homo sapiens
ggtttataaattatcagcttggaggtttctgtgagcctcttgaaatgacacgtaacattctgtatacatactacatgggagagtctgggtacacagcttgcacgtgtttctcaaaggggtctgggacaccataaaatatggagaaagtgggaggtgactcttagatttccacctgtaccaccatagccccttttttaaaagaacaaaactctttaaactctgatacttggacagcagtgaaagatgtactgatgactagtttattttggcacawataaaatttattgatattcatttgtttatcccttagtttcgtagatatatctgccatttgtgaatggtaaaaccaaaggtcactagaatcctttgttgtggggaaggtatagatcgtacatctaacccaagtggatgtgtatcacctatatgatgataaaaatcctaacttctatcaggaacatgtaagaactatgtggtctgatacattctaaaaattacatctaggttacaaaatgttcaaattattagctttcttttttttcccccctttaaaaacccatggtgagggcaaggtagaggaaataaacacatttggtcaaa

SEQ ID NO: 773428 - DNA, 619 bp, Homo sapiens
gtttgtggctgatagggctggtgggggaatgtaacttaaatccccaaccaagtgatttagacttaccaaaacagagtgtgacttgagaccgggctgctctgagatgagcattgcatgctccagtctctcaaattctccagagggaaggagagagagacaccaaccragagtgtccattcctcttctcttcagaaacacctggggtgggaagtaatgtaaaggagaagtgcatggtgctgggataatttataatcctgatcaaggtctttagaagctgtattctctttctttgccttgattttttcatctgtaaaataggcaaacaggggtggcctattgtaactcatgagtttgttgtgagcttcaaatgaagtaattggtgtgaagtgcttaaggatgtagtgattggaaattgtaagccatataaaccaccgctgctacagtggtgcagtggtggttggctggttattattattattactatgaaggaatggtatttatttttgtgtcatgaggttgtaagctcaaagagtgcaagaaatttggtttgttcactgctgtagccccatcggggcatgcgtaggtactcagtaaacatttgttgaataaacgctttggg

SEQ ID NO: 773429 - DNA, 602 bp, Homo sapiens
aacttgccaagtttatgtagctcccagtggagtttgaactccattcctgatgtttagcttcaacgctcatgcttttttcagccatcctgtctctatgttgtttagatttattatctttgtcgttacttataattccagtatttcactatgttagatayacttctaatcatgttttagttgacctgaatataaggaatacatttgagtattttcagaaagtttaaaaaactctagctattaatatttctgaaaatataaacctgcaaatggccatttatgttattttagagagaaagtgggtagaagtttctcttccttgttgtagttaagtcagtcctaaaaagacgaataaggactttggaaccattctttacattttgaataaaacatatgtctatcccccttcctctagatatagcttatgcggtagttgccatttagcaattaatttaaagctatgtcaggaattgtcaccaacattagtcctgcttattatcctcgagagtcaacaaacagtaatacaactggcctcagaatttttttcagttgaaccacaggccactctgcaacctgtctttctatgaagcagttgtaatttaacc

SEQ ID NO: 773430 - DNA, 602 bp, Homo sapiens
aacttgccaagtttatgtagctcccagtggagtttgaactccattcctgatgtttagcttcaacgctcatgcttttttcagccatcctgtctctatgttgtttagatttattatctttgtcgttacttataattccagtatttcactatgttagatatacttctaatcatgttttagttgacctgaatataaggaatacatttgagtattttcagaaagtttaaaaaactctagctattaatatttctgaaaatataaacctgcaaatggccatttatgttattttagagagaaagtgggtagaagtttctcttccttgttgtagttaagtcagtcctaaaaagacgaataaggactttrgaaccattctttacattttgaataaaacatatgtctatcccccttcctctagatatagcttatgcggtagttgccatttagcaattaatttaaagctatgtcaggaattgtcaccaacattagtcctgcttattatcctcgagagtcaacaaacagtaatacaactggcctcagaatttttttcagttgaaccacaggccactctgcaacctgtctttctatgaagcagttgtaatttaacc

SEQ ID NO: 773431 - DNA, 602 bp, Homo sapiens
aacttgccaagtttatgtagctcccagtggagtttgaactccattcctgatgtttagcttcaacgctcatgcttttttcagccatcctgtctctatgttgtttagatttattatctttgtcgttacttataattccagtatttcactatgttagatatacttctaatcatgttttagttgacctgaatataaggaatacatttgagtattttcagaaagtttaaaaaactctagctattaatatttctgaaaatataaacctgcaaatggccatttatgttattttagagagaaagtgggtagaagtttctcttccttgttgtagttaagtcagtcctaaaaagacgaataaggactttggaaccattctttacattttgaataaaacatatgtctatcccccttcctctagatatagcttatgcggtagttgccattyagcaattaatttaaagctatgtcaggaattgtcaccaacattagtcctgcttattatcctcgagagtcaacaaacagtaatacaactggcctcagaatttttttcagttgaaccacaggccactctgcaacctgtctttctatgaagcagttgtaatttaacc

SEQ ID NO: 773432 - DNA, 608 bp, Homo sapiens
cgggcgcggtggctcatgcctataatcccaacactttgtgggaggccgaggcaggtggattacaaggtcgggagatggagaccatcctggccaatacagtaaaaccccatctctactaaaaaaatacaaaaaattagccaggcatggtggcacgtgcctgtagctccagcaacttggaaggctgaggctggataatcgcttgaacctgggaggcagaggttgcagtgacccaagattgcgctactgtactccagcctgggtgacagagcgagactccatctaaaaaaaaaaaaaraaaaaaaaagtcatcctttagttcaagtcagcaaacctttgttgggaatccaaggtactctgcttgggagaagcatatacctacctggataacaagaatgtaaggcatgatacaggatagttggttgtaaatcagaaaaatctgagtgtgatgtagatggaacaatggatttcaataggtgagattgtgcaagactgcctaagaaggtagagttgagcaaggcttaaacaattggtaggattttaccagtgggagaaggcggggagagagagccaagagaggcttctaagtagaaggaagagtgccatcagca

SEQ ID NO: 773433 - DNA, 608 bp, Homo sapiens
cgggcgcggtggctcatgcctataatcccaacactttgtgggaggccgaggcaggtggattacaaggtcgggagatggagaccatcctggccaatacagtaaaaccccatctctactaaaaaaatacaaaaaattagccaggcatggtggcacgtgcctgtagctccagcaacttggaaggctgaggctggataatcgcttgaacctgggaggcagaggttgcagtgacccaagattgcgctactgtactccagcctgggtgacagagcgagactccatctaaaaaaaaaaaaagaaaaaaaaagtcatcctttagttcaagtcagcaaacctttgttgggaatccaaggtactctgcttgggagaagcatatacctacctggataacaagaatgtaaggcatgatacaggatagttggttgtaaatcaraaaaatctgagtgtgatgtagatggaacaatggatttcaataggtgagattgtgcaagactgcctaagaaggtagagttgagcaaggcttaaacaattggtaggattttaccagtgggagaaggcggggagagagagccaagagaggcttctaagtagaaggaagagtgccatcagca

SEQ ID NO: 773434 - DNA, 627 bp, Homo sapiens
gtgaggattaagtcaggtactgtttttattttatcaaaaatttaaggaaagtgtacagtgtaaatttggtatctatttcaaatttcgggtgcttttgaatatcttttcctcctttttttttctcttctagtgaattagacactacatttaaagggattgggtgcacacaaggtcactaggtataaaatttttcactttcaataacatgggatatggttatttaattaagtgttgtaatgtctctgagagcctcctctgtttctgtatttacagaattgtagaatcattaagtcatcaaaccccaagggggtctcaagcatttatctagctcattctgcagacaggactggagaaatgtttatcagctgtctcttctattatatgattataagaattaaaagtaaaggcaagagggggtgcaagagaaawggagatggttaatgggtacaaaaaaaatagaatgaataagacctagtatttcctagcacaatggggtgactatagtaaaatatagttgtacatattaaaataactcaaagagtataattggatcatttgtaacacaaagaataaatgctcgaggtgatggattccccatttaccccaatgtgattattatgcactgca

SEQ ID NO: 773435 - DNA, 635 bp, Homo sapiens
gcttttgctatgatatgcaaaataatcattgccaaggccaatgtcaaggagcttttctcctgtgtttttttctaggagttttattgtttccagtcttatgcttaggtcttgcatgcattttgagttgatttttgcatgtggtgtaagagtctaattttattcttttacctgtggaaatcaagttttctcagtaccatttattgaagatactgttcttttcccaggtgtcttcttgttactcttgccaaaaattagttgaccatataggtttggctttatttctgggcttctaagaattcttaaaggttatctggcygggcacagtggctcacacctgtaatcccagcactttgggaggccaaagaggtagatcacgaggtcaggagttcaggaccagcctggccaacatggagagaccatgtcttactaaaaatacaaaaattagccaggcatggtagcgcactcctgtaatcccagctactcaggaggctaaggcaggagagttgcttgaaccctggaggcaggggttgcagtgagccgaggtcacaccactgcactccagcctgggcaacaaggcgagactgtgtcaaaaaaaaaaaaaaaaaaaaaaaaaagaagttaccctggtttgcccc

SEQ ID NO: 773436 - DNA, 592 bp, Homo sapiens
aggttagaaagttcattggtggggcagttatttccaagcccaatcctacaatccgatgcagaaaaaaattataaaactgatgatggcctcatataccaagcatcataaagtatgaggcatgaaaaggagggagaggagaataaagagaagaaaaagaagaaagactcacaaaaaaatactaaaaatggaaagtctatgaraagaggataaaaggcagtggcttatgtctgtattcttagcattttgggaagggaagcaggaggatcacctgagcccaggattttgagaccagcctgggcaacatactgagagaccctgcctctacaaatcagtttttaaaaattgatttttattttttgactacaagtggcgtacacctgtagtcccaactacttgggaggctggggtgggaggatcccttgagcccagcaggtcaaggctgcattgagccaagattgcaccactgcactccatcctaggtgatagactcaacacctgtctcaaggcaaaaaaacagaaaaagaaaaaaaaaggaaacattacttgattccccatcaatgttgaacaactttcacagtaagcgttataatat

SEQ ID NO: 773437 - DNA, 566 bp, Homo sapiens
acaagtatttactctgcttcgagtttgttgagtttcttggatccattcatagttttcatcaaatttgaaatgttttcagccattatttttcctcaattttttttgccttcacttccttcttttgaaacaagatcacatgtatgttaaaccacttgatrctgctccacaggtcactgagctttcattcatttttctcagttgtttttctcactgtgttttactttggatagtgatatagtttggatgtctgtcctccccagatctcatgttgaataaaccccaatgttggagctggggcctggtgggaggtgtctgggtcatggggcagatccctcataaacggcttggtgccctccctgtagtaacgttaccttgaaatctgattgttaaaaagagaatgccctccccatagtaagaagttatcatgagatctgactgttaccttccccctgactcttgctccttctctcaccatgtgacactcctgctccccttcccctctgccatgactcaagagcttcctgaagcctcatgagaagctgagatccggatgccatgcttgcaca

SEQ ID NO: 773438 - DNA, 611 bp, Homo sapiens
acaagtgtgagccactgtgcctggcctctatttttttttttttttttaatgtttttgcttcgttattttcatttattttctaagggtatgttaaattccctgaagagcatttaaatacaaatgcctggattcctactccctctataaatgctgattcaaccggattatggggtggaccaggcaactggkaacttcttatttttatttatttatttttgtttttgtttttttgtttttttttttttgagacagagtctcgctctgatgcccaggctggagtgcagtggggcgatctcggctcactgcaagctccgcctcccgggttcacgccattctcctgcctcagccacccgagtagctgggactacaggagcctgccaccgcgcccagctaattttttgtatttttagtagagacggggtttcaccgtgttagccaggatggtctcgatctcctgacctcgtgatccacccgcctcagcctcccaaagtgctgggattacatgcatgagccaccgtgcctggctggtaacttcttattttttaatgttttataatttttaattaaaaatttaaaaataggcctggtatccttgagtcctgaacctctga

SEQ ID NO: 773439 - DNA, 611 bp, Homo sapiens
acaagtgtgagccactgtgcctggcctctatttttttttttttttttaatgtttttgcttcgttattttcatttattttctaagggtatgttaaattccctgaagagcatttaaatacaaatgcctggattcctactccctctataaatgctgattcaaccggattatggggtggaccaggcaactgggaacttcttatttttatttatttatttttgtttttktttttttgtttttttttttttgagacagagtctcgctctgatgcccaggctggagtgcagtggggcgatctcggctcactgcaagctccgcctcccgggttcacgccattctcctgcctcagccacccgagtagctgggactacaggagcctgccaccgcgcccagctaattttttgtatttttagtagagacggggtttcaccgtgttagccaggatggtctcgatctcctgacctcgtgatccacccgcctcagcctcccaaagtgctgggattacatgcatgagccaccgtgcctggctggtaacttcttattttttaatgttttataatttttaattaaaaatttaaaaataggcctggtatccttgagtcctgaacctctga

SEQ ID NO: 773440 - DNA, 637 bp, Homo sapiens
ctctgtcacccaggctggagtgcagtggcgtgatctcagttcaatgcagcctcgacctcccagctcaagcgatcctcccacttcagccacccgagtaactgggactacaggcatgtgccaccatgcccagttaatttttgtattttttgtagagacagggttttgccatgttgcccactagtctcaaactcctgagctcaagtgatctgccctgcctcaactgggattacaggtgtgcaccaccgcccaggccaaacagtcccttattaattaattcctccaaaataaacatcagaaaaacagccattagtctttttttgaattattttttattttattttgtatattttttgagacggagtctcactctattgcccaggctggagtgcagtggcrcaatctcggctcactgcaacctctgcctcccgggtacacgagattctcctgcctcagcctcctgagtagctgggattacaggcgcccgccacaacaccaggctaattttttgtatttttaatagagatgggctttcaccgtgttatccaagattgtctcgaactcctgacctcatgattcgcccgcctcggtctcccaaagggctgggattacaggcctgagccaccgcgcccagcctaca

SEQ ID NO: 773441 - DNA, 596 bp, Homo sapiens
aggaggccaaggtgggtggattgcttgagtctaggagttcacaaccagcttgggcaaaaccccagggaaaccccatctctacaaaaaatacaaaaagtagccaggcatggcttgcatatacctatactcccagctactggggtggctgaggcaggaggatcacctgagccccagaggtcgaggctgcagtaagccatgatcggcccactccactctagcctcggtgacaaagtgagaccctatctcaaaaataaaaaaataaaatattctgacactttgggaggccaaggcaggtggattacttgaagtcaggagttccagaccagcctggccaacatgttgtaaccctgtcactcctaaaaacagaaaaattagccaggcgtggtagtgcgtgcctgtaatccyaactactcgggaggctgagacaggagaatcgcttgaacgcagggggtggaggttgcaatgagctgagatcaaactactgcactttagcctggacaacagagcaagagtctgtcccaaaataaataaataaaaataaaataaattatatgataaaatctataaaacaaacaccccactggcttgactattcc

SEQ ID NO: 773442 - DNA, 567 bp, Homo sapiens
tcctgcaaggcttaataatcaaatgtttgctaatgtactcccaacaaatttcaataatatgacttaagtcaataaactcataaatttacaatgccatatatatttaaaacctagcacttcaataatatgtaaaatgatgagtattacaaagaactgatggcctatattttttgaaatagcatttgaaaataattttaatattattttcttatggtttttattttcaaaaagtaaatcaagaaaaaaattgctggccaggcgtggcagctcatgcctgtaatcccagcactttgggaggccgaggtgggtggatcagctgaggtcagaagttcaagaccaractggtcaacatggtgaaaccccgtctcacctaaatatacaaaaattagctgggcgtggtggtgggcacctgtaatcccagctactcaagaggctgaggcaggagaatcgcttgaacgcgggaggcagaggttgcagtgagccgagatcgcaccattgcgctccagcctgggcaacaagagtgaaacttcgttccaaaaaaaaaaaattgctagtctgcattacaaa

SEQ ID NO: 773443 - DNA, 589 bp, Homo sapiens
caagtgactgcctccttcttagtttgtgcctttaaattttgatgaagtacctctttcattagcttcctgtgaaaagatgtgtgggaggtcaatatttagaatccttgcacacttgaaaatatttttattctactctcacacttaaattgataatctatttgagtatataactggattgaaaatcatttccctacagaattttgaagacattttttcattgacttgtaacattgaaaattttatcaagaagtttaatatttttctgattatcatttctttgcacacrtccagttttttttctctgaagactggggactctgaaagttcacacaatagtcactcttcttctttttttttttttttttttttttttttttaaagacaagattacattctgtaacccaggctggagtgcagtggtacaatcatagcttatctcagcttcaaactcctgggttcaaatgatcctcccacctcagtctcccaagtacctgggactacaggtgcaagccactgcccctggctaatttttttatttttttacagaggcagggtcttgctgtgttgcccaggctgatcttgaacatct
